United States Patent Application Publication US 2015/0240253 A1 - sequence listing, part 18

SEQ ID NO: 82358 - DNA, 399 bp, Zea Mays
caggattgcagccctggaagcccaactgcaaggactggatccgcccgaagcctaggtccccgccccgacgttgtctcctccccgcaagaggctgcgctatggagagcccggatccgtcactaggccgcaagagtcatgatgtaataagttatacttcgcgttaaacgatgatactctctttaagttatcatattaataaataacaaccatgtgatggtgattggttgacatgcttgagttggatctttgtttgagtgcaatggtcttatggaatgatggccataagaacatataaaaattttaaaacataagctatttcccctctagaatcttttctcactcttctaaggatttcactatctgaccaatcagatggtgaacgtccgttcaggacccaac

SEQ ID NO: 82359 - DNA, 568 bp, Zea Mays
agttcatatgaattttctatgatttatacaaattctagcacttatttatatattaaaaatccttttataatttaatttctctatttatactattctggactgggcgtcaaattcataaaagatcaagagttcatctacaattctccccaagacacagacttcctccgtactggacggcgggttcattcctaataaactcagggttacttatgcaaaactccagactgaaggggtatcgaccaaggtgggccgtctaattagagatcgagcgccaggatcaaaccgtatttaaaacaaaactgtacgcgtctacagccgatggatccgagatcgatacgtgagatctaacctggcgtgcgccaaactcccagccctccgatcaccactaaccggtcacgattaaatttcttccacgcgctcatccatgaatggatcttggccacccgttttcgatccaatgcaagggaagtcgtccccaacctcgggatagaacctgcccagcccctttcgttcacccgacggcacacccgccggcggcaagccatctcgcttcctagactaacattgc

SEQ ID NO: 82360 - DNA, 1101 bp, Zea Mays
gcttaattgaacgagtcgaggagcatcaagggcatgtaagggtgttgaaacaagagagcagaggtcatgatcggacctggagcacactggccacagtgagaccctctttacggcgatggaaagctgatttgggggaaataagcaattcgggggctctggtgagtacttggaggcacgagtgggtatgttgggtgcacaattacatagcggagccgagggtgtgctcaatttgtagtacccttgagcggtgacccatgaatttgagatggcgcggtggcggctagagagaaaagggtgcactagcgcaagcaattggtggctttcaccgtggcgagctcaccgacgatgaacgggtgggctaaggtgactcactgtgacgtggttaaagcaccaaagcacgtggtgcaaggtcatgaggtggctaactccggtgagtctatccaaagcggccgtgactcaggcgggtacggcggccggagtagaatagtggccggagttcatccacggtgtgatatttcttacccttcttcgttatccatctgcgctgggcacgaatcagcgcgacaggcatgaatccgagtgcacagctcgtcggcggcgaggttcagtggattgggatatttttagtgcactgtaccattggatcctcattcagttagcctgacagagtaacttgcagggagatttgctcccaatttcatgtagtgactcgacctgctctctgtgtcaaaattgtagccctatgatccggctataaccttgctatagcaaccatagccaaacaattactggatcatagtcaaatcccagctcaaaggttgcccaacttcactattatacaacattcagtctctgcattatctgatagccagacttcagacccatttaactcctaattttgtacaataccaaggcttaagcacttaatcaaatttgtactcctatagtagctatacaagtttgatgtgttgaccctaggaaaattcctaagatttttagaactacagagctccaaagtctgttcactggttttcagacttagtcacatgagaggtgtagagtggctttttgcaaataagcccaaatctcatggtttgattt

SEQ ID NO: 82361 - DNA, 864 bp, Zea Mays
caggaaccaatatggtttcataaaaggaagaacaattcaagattgcttggcttgggcctatgaatacattcacttatgtcattcctcaaagaaagaaatcattgtgctaaaactggacttcgaaaaggcgtttgacactttagaacatgaactgattctgcaggttatgactcataaaggttttggtacaaagtggattaactgggttcgaaatatactacattctggcacttcttcggtgttactcaatggagtccgagggaaatcctttcactgcaagcgaggagttagacaaggagatcctctttcgcctctgttgtttgtcttggcggctgaccttcttcagagcattataaataaggctagacatatgaatttgcttcagcttcctctaccagataattgtgaacaagattttcctattgtgcaatatgtcgatgatactctcttgataatggaggcttgcccgaagcaattattctttcttaaggcaattctcaattcctttgcaacctcaactggtcttagggtcaactataacaaatcaaatatgtatccgataaatgttaaccctgagaagatggagatcctttcaagaactctcaattgccagataggagcaatgccgttcacttaccttggattgcctttgggtctctcaaaacctagaattcagcagttcctacctttaatccaaagaattgaaaagagattgtcatgttcttcaaattttttatctcaggctgggcgcttggagttggtaaattcagtgttttcagcattgccaaccttctttatgtgtacgctcaaaattccaaaatctatcattaagcagatagacatttacaagaagcattgtcttta

SEQ ID NO: 82362 - DNA, 473 bp, Zea Mays
gtaacattgccatgaaatttgattgtatggaagatgcttgcaccaagtagtaatacctggtcttaatcagaggcagttgtctgtctgtagaattatcttagcatcacaatgttttcacaatcttggttcagtactgaacatggaatatggtggcatgctttaatttgtaataaagccattgagctagcaagtctatcagatactgtgtcaacaccattgagctccatgatagtatagttactccttccatgataagaacaaatcagtgagagcaaccatagtgcaacagtttcttcagaaacctttccaagtccaggcacacttaaaacatgtgggatatgccaattggaagaataatttgagtgagtcaaaattcagttagaactctaggatcatatcacccctcccccacccgaaaaaaataaggcaagcatggcagtgtctaggcactaaataacataacacgttctaat

SEQ ID NO: 82363 - DNA, 424 bp, Zea Mays
cacatatgcttggggaacgctgcaaaggtaaacgtgtcttacatcaaaggtgagtgggacatgggaccacatcgtctggattacttgacccgtgacaacgacgtggttgacccttcggtaatggtcattttttatgcttgttctgaactgaactctatggtaatcgtgtggatgacccctttgaagggtggattggcaaagtcatctccttgttttaggggtggaggcggtggttgacggggttgctggttttcttggggccggtgggggtgggagtggtggactttcttggtattagagttgtgggtgtttgggaattctttggttgtagtttggctagtattggggtggggtgggtgttcatttttgtagtgatggttgtactgttggtgatagggctggatatcgagctggctcaattcca

SEQ ID NO: 82364 - DNA, 771 bp, Zea Mays
atatggatctttattttgtgacgaatgacaaattttcagaataaaaacggcatgggtcgtgggtgtaacgtctgaggggtggttagtacttttaacagcttttaccatgttagcactacatctacacgataccttattcctaaccaagtaagtagtactactatatttagccagatggctcaaaggtagactttgcctcgagctctgggctggtggctacctatttaacaattggagccacgttaggcctgcaggtaactacagtagtcaattgtggctcggcagggaaaagaatctctcaaatcaaagtgtttttggtttgaatggggttgggggccttgtgggggtttcttttgaggtacggtgtcaagcagaaggaactgggaggcatcatagcaatggattagcatgagttgttgtggggttcacccttcattgtccattttatagtggcataaaaaagttactatttggagctagtttggaaactctattttcccaagagtttttcggtttcccaagagatattagtttatttttttttcttgggaaattggaaatcccatgagaaaatagtgttaccaaactagtccttgaagggtttattttcctggatccaaccttgtgtgagcatatgtagttataattaatatggtacagattatgatttacacacacatacacacaaaagtgtagctgaaaattcaaatcctggtaatgatttctgttttttctttctttcttctcattttattgtagctgtggaaaatc

SEQ ID NO: 82365 - DNA, 482 bp, Zea Mays
gtgattttgtcccgaacaaattaagcagaactctacaactaaagtttttggtgcaaaaataatttcttctcctcccgtcagctgagaaatcacatctgaggaattataattgagatttattcagtaaattatctactctaaattaaatcaagcgcagtctgtactagttgcactggtatattttgtttcgaccgatttacatctcgcatagacttaatctgagaactaaatcttctgtgtagtctttgtaacaaaaattagagaaggaaaaatctttttctccagctgtgaccgatggccttaacctctccctctcctctgatatttcttagccaccgttgaagatctttgattttttcaccaccgtcggcatggccctttggccttatccgcagccgcgtcgctcagcacctagggaaaaaatcccgctgcccagccgctctctgtcccttcagatttttcagccgccgccttggactttc

SEQ ID NO: 82366 - DNA, 389 bp, Zea Mays
ctcgttacccgaaacatgatcatgaggtccaatagctctgagcctctgaccctttctacacacaatgcctctttgggtctcctgccccctgcgtcatgtctgttgttgctgcgtctacctggtatcgtcgtcctagttaccctgtctctaatgtgttgtctagtttgtctaatgcttcaactgtcaagggctccaatgcccaagacagcagggccccgactacggagctcatagtcgtggtcagcaaaggcgccgaggattttgcccggtaacccaattgtgaaggaggtgagattggaggaacaataagagaaaggagataggaaattcttgcttgccctattgaaacagccacctgctttatatatagccaggccggcgtaaccaac

SEQ ID NO: 82367 - DNA, 348 bp, Zea Mays
gaccttcgaaatctaggccagtggagcaagtaaagtctaccagagaagctaacactgccgatacccgaaggggcttctcgtggcgactttggatacattgttcgccatgcttcagggaaacaattatcggaatagcaaattgctgaagtgcaatattatgcaaaggacatgaaatatccccgaggatccctagtatatggagggaatgacgaagatgattacctttactgcctaccggacaacaaagaggtagatgtttgccgggaaataatggataatatgggttatccgaagcttgaacttggtttatctgcaatgccgaaggatcaacttgcagactgccttgct

SEQ ID NO: 82368 - DNA, 744 bp, Zea Mays
tccagaccacatacgacaactctctgatccactttcctgtgaacttttcattcttgtcgaagactttctttctgagtgcttccaatatcattccattggctctttctacttgcccgttggctcttgggtgtgccactgatgcatacttgatctggatgcttttttgttcgcagaaatcaaagaactctgaactagtgaaattggatcccaggtcagttatgatgctattcggtattccgaacctgaatattatgtcttatatgaattccactgccttagccgaagttagagaagcgatgggcttgtactctatccacttagtgaaattgtcaatagcaaccagtacatgagtgtatcctccttgagctttcttgaagggtccaatcatatccagtccccagcacgcgaatggccatgttacgggtatggtttgcagttgctgtgctggtaaatgttgctgttttgataagtattgacaagcttcacatctctggactaactcggctgcatcactctttgtcgttggccagtagaaaccagacctgaagaccttcccaaccagagtcctggatgctacgtgtatcccgcattgcccagcgtggatctcatctagcagttgcttcccagtagccgaaagaatgcatttcatgaagactcctgtcgcgccccttctatacaatatttccccaatgagagtatagtgagttgactgccttgcgatgcgttctgctgcatttttgtcat

SEQ ID NO: 82369 - DNA, 734 bp, Zea Mays
aatttcttagtttatagaaaaatgcaccgactaaacatcaaactggtttcgttaaacactccatgaaatgtcttaatagacacttatttgaacttatttattaatatatttttcgaaaaacttggtcaaagtaatttgaatcgggggactagttaaggtatttctttcctttgctagtacacaggtaagaacatgtgtttgcaagattgctgtgtcttatacacaatggtaaattgctcccagcaatagaacattagaaatcattgttaaacctaaaggtcaacatctaagacaggctgccagctttttgtccagaatgacttcgtcctcttttttccaaacatgagcacgttctaatcttatgttaagttttcttccacaatcttcggaaagccactgttcacaaacccacatgcatacattgcagaactcaagtaaaggtggagactttcatgaacttctaaaacttcttggatagaacatagtaaacatccatgaacatcaatgccactaacccagtcttatattgccagcaaaagaagttacagcacttctaaagagctatatcactaacgagagaacacaagcacagcaagagtcaagatcaagaataggtgagacaaacaaagaatcggtcatgaaggaaatgacagagctcatgggctgacctaacgtgggtatagcagaggaaaccttcttctccatcagttgttcctgaaatgcgtcaacaacac

SEQ ID NO: 82370 - DNA, 713 bp, Zea Mays
ctttgcggcggagcagataagctcgccggtgaaccgccgtgtctcggccttgtgccgcgtgtcctaaccgcgccaccgcatcgccgtgactccctctaaactccccgtcgaccaccggagttactgccacgatggtgaacacgtgttcactgcaccagcgttcttcctcacttccgaccgccgcacatcaacgcccaaattcacggtcaccgccgaagagccctataaattgaagcccccgctaactccgcaaggtcatcctccactcagccaccgctaatcgctagcagtccttcgccagagctcgcgaattttgaattcgccccaaatctctctctaccgccgagaactacaccctgccgtggccagccttccccaggtctgctcattcccttcttgttcctgttcaagcatccttacatgatggtgatgcttaccgacccacccaattgaaccgtgccgccagggatcgtcgggaacacgatcgccaagccgcgatgctctcggccgccgtggctagagcttattagttagtcgttgatgaaattaggttaggggaagtgatctggggtggttcaattccatgcccactgctcgggagtgccggtcatggtcccactcggccggtctgctagctcgctggagtacgtcccggtgcagttcgccgccggggacttcgaacggagaaaggatagaaacgcggggttgttttt

SEQ ID NO: 82371 - DNA, 772 bp, Zea Mays
tcctaaggtgcgagaccttctctggatggtcacagtggtcaaaggtgatcgagatttctgaccaccggagatacttggggacgactaggtccgaggtgtgtacctcttggtgcaccatcttgaggcgatgtttgtcgttgtatgcctcaggaccaccgaagatcatgatacatcccgttggttcgggaaagtcttcggtggcggcgctctattccaccaccttggtggcttcctctggcttcgccttcttgttgggaggattagcaatgaagcgcttgagtagctcgcactcgcagagcttgtggtggacggggtagatatggttctaacacgacgcatccatcatcttttggaagtggtcaccaccattcttcccgatggcttgggcgggtgctacgtggtggtgacctcatttccatcgcgttgggcatggttgctcctttggtgcttgtcggggtgttcctgacgctcctttttcatgttgcttgtgttgccaatgtcatctaggttttccccttgcgaaagatcacccccatcgcatcctctccgtcagcaaacttggtcgcgatgtcgaggaggtcagcggtggtctttggtcgtccgctgtcgagctcgtgaatgagcgcctcgttcatggtgccgtaagtgaaggcactcataacttcggcatcagtggcatcagggagctcattcctcttctggtaggaccttcggatgtaatcccggaggctttccctattcttctagacgcatagcttgaggtcccaatagc

SEQ ID NO: 82372 - DNA, 458 bp, Zea Mays
gtcgttttgaagtggcggtacttaacccatctttaattccaacatagatggatgtggtgataggtactcattggcttgaactaaagtttgttgtggaagaacaagttcggagggttccatcaaatacatcaagtggaaaaaatagttgttgttgactctgtttcagaagtggtaaactctaaacattttgatgggggttgctctgaagatatggaagaggatgatcttcttgatgattgtgagatgggtaacgttggtaatatggcgcctattatgcatcatactaatggccacaaggtgacagatattcctagttctactattcatatgagcataatgcctatcgattcctagctaggtaaaccggcaaatgtgtatccgtccaacagttttgaaacacctttggtcgaggaagctcttaagcaagttgggaggttagatggtgatcaatagtctac

SEQ ID NO: 82373 - DNA, 329 bp, Zea Mays
taactaatccctaataattttgaaacgtaggtcatggcttgcttatttgggctaacttgtttgcgtcatgggctcgtatgtgctgcaggtcggtagccatcgttgttcatagctcctgtgcatcgctggtcatccctactaaacaaaactgaaattgaccagaagctggcattgactgaaactaacactaactgaaaaccaaatggtcaattttagaaaatatacactgaaattgaccacaagctgacacggactaaaatgaagtaacctaaagtattcatatcaaatcccaggtactatgcacaaactgaacaatgtattgcaatttg

SEQ ID NO: 82374 - DNA, 666 bp, Zea Mays
tgccaattcgacctccgcgttcggtgagctctcgattctttaccctcgtcgtattcccttacctagctaatgtcgcgtcgtagttaatcgtgggcgaattgggcacgaatttagcctttgtgcggggaatgtcgtttgggcgtcgcccgtatcgtggttgggggtgttcggttgcgtggcagtcagcaaaatcattcccctatgttctccttgagttccgtttagggctagactagtttgatttggtcgggcctcgtcggccatatggcacggccgtgggcattccctgccagagggtgctcggctcaccgggagagcggaagaaaggagaaagcactagatccgttgatctcaggatgaacgacccagggtcagatagggtttggaccgtgggatggttgttgtgcggctcagatcaaacagtagtatacctccttcgcgcattaggtcgtgaccgtcgatttcgtgatcaacgatcctcggcgcgtaacggttcattaaagactagattcaatccaggccagtgaatcctgatcgtccgccccacagtgcacgataccccttcggccgtccaaaattacaaaataaaccccgggcttgttataaattaacccgccgtccatagcagtggcgctgagtcttagagatttttcaccagaccccctg

SEQ ID NO: 82375 - DNA, 406 bp, Zea Mays
gaccgtgtaagtcttaattatgtggctccgagagctaatttcagttaactcatattacagaatttgctaatgctttgtggcataattgacagtttggggaggaaatgaatttgaatgatgacttatgtcagttatctattggaagcgtaactgccaaaagctatggacgttacgacgtcaatggatatcactttcgttcaagcattttcgaatcaagtcatcctatggccgccactcaaaatagtggagtcgttactagggcaaccgacatggaaggacacgaagcctgctattacgggaaaatcaaaaatataatcgagattacatttgctggaaataagcctttagcgctagttttctttgagtgtaaatggtatgacccgaagtattataggaccgaatttag

SEQ ID NO: 82376 - DNA, 580 bp, Zea Mays
tttattttttttatttaaatctctactcctttaaatcacgagtttctcacaattcatgtgtaagtatgtttttctcccccgcgtctcgcctaataaacagagagggataatgatggtggtatctagataagctttatctcgctagagacaaacaacacatgatgtgtgatgacacaaacgactcatgattgtcaggattagcctactaatctcgttataaatccctggccccatcgtggcatccatccctaggtaaggacgggggcacatatcccgccagcagctcgagcgatagaggtgaagtcgaccatgagctgatactggtcaagggacaggggaatgtcatcgtgatcaacaccatctttggtggtgacacactgctagacaaggcaaacttttgcttcgctcgggtgcgagacctgcccccctcggctgccaagagaccgactcgttcgctaagactttctgcacctacaacaagctatggcagatgcaataggagcaccaacatcacttcctcgacatgagactccttcgcgagtaggttggcgagatcgtcgcctgttctccctagaatagg

SEQ ID NO: 82377 - DNA, 661 bp, Zea Mays
ggattttctaattttctggactaggcgtcaaatactagaaaaggtagggtctcttgcacaagaatctgcaagactcaacgcacaaccgcgggggacggtgggttgattcaaatgtttggcagggtctctttagcataaacgccaaggcgaaggggtacgagcgagtattggccatcccatcaggaaacaaaggcacatattaaatctgccccgcttgaaccggtaagcaatacgagctctcggatccaatttctatgcctaggatttaatgtgactacgatctaatccggtccgttcaatacgatctaacgacgcagacataatcatgctgaggtctaatcctgacccttggccgaagatccagcgacacgagttcaatgcatcaaaggggtatctcagttttaatctcaaccgttctcccgagatctaacgacacgagcctatctcccctacgacacccaccagacggcgccgccgcccaccagtcacggcggaggacacgccggcgagacgcattctggcgcatagatggtcttatgcggtcacagctgagagataaacgtagcagagataatgggaaatcgattgaaggagtatttatgtaaagcccaaaatttgtatcagagaaaaaatgaaaataataaataaatataattatgtt

SEQ ID NO: 82378 - DNA, 708 bp, Zea Mays
atcgcctcgcacgctgggtgggtggggcctggggggagggggtgactgcctgtgtgagaggaggtgccggtgcgctaccatctctccaaatcatttatattgcttagagtatacacgagttgaataaaaaacaaggaccaagtgatagcaaatagaagggaaatcaaagcagaaaacaatcatacacaaacatcaacctatcacttatcatttatcaacaccctcgctcatcatcaattcattcaattggtgacaaactggacaaatgccacacataaaacgtcagcacaaagcaagacacaacagatgaatcccatctatactgctgaatggttttattttcacactgagtcaataccgactaatgaaacatcgataaaacacccagggatgaaactgacacacggaacatatggattcagttgaaccctaaaaacccatcgaaattaaacagcatttcgccctaaaaaatcatggaaaataaactgcgttcgtccttggtaagctctcagatgttagatgccaacgaacgtcagtgttgcccactacagaataacaggaaagaaccaccaacggatgcaccgtattaacaacccaccacgatgaacaaaaaaatcccaacataacaaaaatggaatctagcctaaagagcagcagaatccttgcatatgaatgagtttcttgcgaagttaatgtccaaaagttcag

SEQ ID NO: 82379 - DNA, 335 bp, Zea Mays
gcttccttaattggtgttctagcctccctcatgtccctggtagctcacagacccatccgattgaactagaccacactggattgccctgaacaccatagtttcctctcggttttcgtcgtcgtcgtgagcaaacatgctccgggccggtttggtgcaattggttgagggattagtgtcgcagagggtggaatttggtgtcggccaagttagggctatggtctttgagcatatcggccagttcaggctcgccggagggcatgctcaccgtcgttcgccatcgaggactcaagttgtgaagagaaagaagtgtaggggccttagtgcatatgtcagtg

SEQ ID NO: 82380 - DNA, 641 bp, Zea Mays
aaaggagaaatcggcagacctaattctcggatcaagaagggaacgaagactaccgactgatgggtatcctctatggcgacggtaatcccctgctagatccgccaagagcatagttcctttggcgacaggaccccaatttcaacgaggtggagaagatcggactcaaaaacaacagaagcatagttgccgcaaaatagaagttagatgttagtgtcgattgggggaatgacaggggcggcggttccctacttcttcttcctgggcgccatcagaccatgcgggcaagcagggttgagcgcattcacaaagatgagcagggatttcacgacggaaaaagcaaagttagggttcactgccacgaaactgccagcgaggatgtatgggcgcacactaagtcgggtgcatcgagatggacgaagtaactcggaccagaccctcaacaaagcaaagtcatttgggctcgtcagacataggcgctaaccgatgattttagtcggtcctatcacggaactagtcagttgggattatcagaatgggctcacgaaaccaaagtcgtaaggcaaccataagtcaagaataagagtgaacacatcaaaagaaagcagcaaacaaagttttttcattcattggaggtggttcat

SEQ ID NO: 82381 - DNA, 842 bp, Zea Mays
ggggtcggggagcatcagggacacacaaggacactgaaacgaaagagcagagggcatgaacggacctggagtaggattaccacggcgaggttgtaaggtgcgagacttcagaccgaattgggggaaaactgaaattggggcttgctggtgagtaattgggggcacggcttggtggatcagtgcttgattatcctacggacccatcggtgtgctcaatttattgtgtgcttgagcggtggtgcttaatttggacgaattgcgctggcggccgagaggggaatgagtcacggcggcgatctaccgtggcaattgcagcgcaactgaactacggcgatcactagatggtcactacgtctcataccgatgcgataaacttcctaaggcgtggcgccctcacggtgaatggcgaacacgccggtgttagccgctcggccacgtcgccagtgcgaatgaccgagggacagcgcggccacagtgtcctagacctatccatggcgtgatcttttcaccgacgatctcaatccacagaccagaagcatgaatcatggcgagcagcaccaatcacggtgaagggtcatcggcggcgagatactttgagatggcaatctgatcagtatactgtaccatcccgcaaccaattcagttagtctgacagagcatacttggggtcaatttgctccagattttatgtagtgactggatcaactctctgtttcaaagttatagcctaataaaccagctctaactttgttacagtgtgtacccacaaaaagtcacagaatcttacttaaaattgagccctaagttcatccaatctcactgtcactgaaagttcagactta

SEQ ID NO: 82382 - DNA, 551 bp, Zea Mays
gtttaagcaggcgatgcagggtagaaggcgaagtccctcaaggtgagatcgacggagcagtggttcaaagatactgcttttgtgagattggggcctagaaagcaatggttcatagctaactttgttctaatctgcttcctgttctagagattctactaccacaaagcaagaagattatgtacctgacacattgcacacggagcaaatgacagagcaagctgggctcaattgttctggacattcaggtaagttgcttataacctcagcttatctttatcatagaatcacaaaggcatatgattctattttatgttattacttactatgccttagtatactgggttttcacagatatcctggtaaactctacgtattttttaatgcaccaccgctagaaatttctagcacaaattttgaaagggatgtttgcttgcatccttgtcggacaagtctgcatggaacacaaacaaacaggcccgaagtgcacatggtatcagcatacagtgcaaacaggcccctggaatcaactacacatggtttgcacatctaca

SEQ ID NO: 82383 - DNA, 555 bp, Zea Mays
gatgagccattttgtcttttggtttacataaccaattgtcatacagatttttaatatttttcggaatcatcctcaaattcaaggcaacttgaattactctccacatatattgagcaatggggcactgaaaaaacaggtgatcaatagattcatccaccccacagaaacaacaattcaaagaaccaatccagcaccttttcttcaggttgtccttagtaagaattttatttcttaccactaaccagaagaaaaccttgattttatgaggcaatttagatttccacaaaaacttatatggaatcaaagtttgatcttccattttctttttgtacaaagaattaactgaaaagccttttttcccagagtccacacaattttatcctcttgatcagatagtattacctgattacagcaatttatcaattcatcgaataacaacctcaaattacccacaatccttcttctgaaagtaagagactcaaaattcgatgtgaaaacctcattaacagaaacatctttgtcataggtcaagtcaaaaagaacaggaaactggta

SEQ ID NO: 82384 - DNA, 355 bp, Zea Mays
gaaaatgtcaaggatttgaggattgcaatgaggagggaacaaaatatgaaattcaacaccttctccaaaagcctcaaccacgcctccacaaaaggtaacatccaaggtaatgatcaagtcacacttcacattaagaggtgtagtgaatgctttgaagaggggcacttgattaggtcgtgtccctacattaaaaaaggcttgattatcaacaaggatgatagactttgttttaaatgctccaagaagggacacttgcttagatcttgtccccatttaaaacaaagaggcatagggttagaaaagaaaatttttactaaccatgtagcaagcaacaaacaaggaagaaaaaagagat

SEQ ID NO: 82385 - DNA, 951 bp, Zea Mays
ttcactgcgtcaggtccacgacggtgaaccgcggtgagcatgcctccgacgaacttgtacatgccagaacacgcaatggccggtgccctaattcggctaacaccaaatcctaccccaggcaaccctaatccctccatcaattgcacaaatccggcccagagtttgtctgcccacgacggcggtgaaaatcggagacaaatcgaggtgttcttggtgttttagtgtggtctagctcaatcaaatgggtctacgagcaataggaggcttaatggatgctagaacatcaagcagagaagcttgaactaacctgtagagggctagccacggcgaggtgttcacggcggcgcggaaaatagaattggggtaaaaccaaaattgggacgctatggtggatgatcagaggcaagggctggtgattggagttcgtaataagttggcgaagcaggccggggcatcaatttatagtagctcgaagcggtggcttcgaatttgggaggagaacgaggcttatcttcccagcgaggtgattaccgaggcccgccgtggagcgcatgcgttcaccgtgtgacggccgctatttaggggatgccacaatcatggcaatgcagtgaatcaggtgagtacgtgtcccctgctgcgttcacggcgagcaccggcggcgatatttcaccgctcgtgcgacaaggggtacagcagtgactcagctttagccaagccctccgcatccaagatcttttaccttccacggttatccactccacactagcacgaatcgcggtggatcgcacagatcgcagcgcggtgatcaccggcggcgaggttcagtgaacccaagatcttcttcagactactgtaccatcaaagtctttcatcagtgcgcctgacagagataattaaagggcttggttctccaatttttgtgtagcaacttgatcatctgtctgcagcaaa

SEQ ID NO: 82386 - DNA, 540 bp, Zea Mays
ctcgcctatgctcgccccaatcggcgaggacaacaattctcgtttaccaacccggtctactcggagacggccacgctccatccccatatgacggtgcctaccacttcgcgaaaattcacccacactatgttttcccaccacccttcgccgcctatacccagtactcgcactagcaagatccctggcaccctccacacacggcgaagtctccgccgcagccacatccaacgcaacaaaataatccaaaccttcattcgaggactcatccgtccaaggaaacgaactcccagattcaccatcagactcaaaacactcagacatagagccaaacaaactatcatcggcaggcactacggttgaggccgcaacaaaatcagtattgtcagcagcggttgcttgcgcaggcccaaacgtcggaacctgcgcagcaaccgaggttcagtatcacagaaacaaaagtttacacttaaatccctaacccctattccgccacctgcgaaggcccggccgccgccgctgggtcttcggcagatggttcgc

SEQ ID NO: 82387 - DNA, 602 bp, Zea Mays
ctgagttgtctgctgagctctatagaatgactcatgagttcgtgtgctgaacagaggaccagctatggggtcacgatgcgatagaaactaggcgtctaccgacacatgtctgaagcgtccaaccctggcagtagtggctctgtgaaggtcaaaatagccttgaatcctcagccaggggctatacctcggtcttgtcatgctccctaatgcggggtggagaaactggtggagtagcagagggagcgggagtggtggaagtatgtgtggtggaggttgcgggtgtatcaagggtagtggtaggcactggatagtggaggctggagtcatagtggtgaatggagtggtagtggtggctggaaccgagaagatattcatctaacacagtaagcaatttgatatgagccaatatgcatctatcctccgttctcttctctctcacctgctgctgctaccactgctcgagtagctctatccaatctgcacttcttctctgcctccctactgctcaaggtagactgccttgcccttgtcctattgataagggtgaggagggtcctgatcatcacctctccctctcggagtcacattctttgtccgaacca

SEQ ID NO: 82388 - DNA, 316 bp, Zea Mays
acttgtgttgatccctgcttttgtagaactcgcttaatatcatgtcaaaatgatcacatctaagatgccatgaatcattcttccatttcgtttagccacctttcatactctgaatgttgttctgctctacttcttgagtggccgttgataggacgaagatttagcctctcagtgcttctttccactttataacttcagcccctcttgtgtgaccggaatgctccttatttttgagtgtttgtgggagcagtagctctccttgtaagacttgaagctccattccctcaacctctcattgaatgtgtccaccttctgt

SEQ ID NO: 82389 - DNA, 280 bp, Zea Mays
cggaaagctactcgggttcattattagccatcggggaatatatgcaaatccagagaagattgaggccgccatgaggatggaaacgccgcggtcacagaaaaaggtgcaaaggctgactaggtgcatggcagcgctgagcagattcatatcaaggctaggcgagaaaggaataccattctacaaattactcaagaaggtgtgcaaatttcagtggaccagagaagcacaggaggctctagaggcactgaagaaattcttgaccacttcgccagtactcaag

SEQ ID NO: 82390 - DNA, 638 bp, Zea Mays
aagtgaagtgtctagctgctagaagccaattatgatggctagaagccaaaacaaataggcccctagtctaatttagatttgggccatagtggcccatgtgtatattgatgttaggttgtgagggtttaattatactttaatgggtgtgttaggcatataacaatataaggcgtctaaaatccataccatcattcctaaattaacccttggagcgaggcaaaagcgtaagtgggttggtgtggtactgtgtgattcactcggtgtatggagtggatttgagccttttggactctggtgtaggccatttaggggatgtatatgattctcgtcctaatttggatttgtcctatattggcccatgcgtacatcgataatggtccatgtgtatattgataatgttagtctttttacgcaggggcggagggcccaatattgcccggcatcacccgagcaataccttgttgcggtgtagtccagtaagatatcattagtaaaaaaatccctatctttaaccccatcgttctcttagctccgcctatgacaaccagtctatatatttctttaaagcacgagtttctttagtcatgggtcatgagtagatatatttttcttttccacgtctcgcttaagtgtttttt

SEQ ID NO: 82391 - DNA, 436 bp, Zea Mays
cccgaagcactgaggaatcgactatagtgccgaaggtgcctatagttgagccagtcgaagccgtagatggggcggccaaaaagctagagttagaaaaaacaatagtgctaccagaaattcttagcacaccggcagaagcagaattgccgaaggttgtaaaagctcccgccacaactcccaagaggagaagaatggctagcgtgttagacgccgtcatggagacaacaagagtattgactcctgctcctgtaaaaaaggttgccgaagctgctacagctcatactgaagccgaagccgggcccttagtgcctgttgagatgaagcctgccatagctgaggaaagggctgagcaagaatctccagatattgacatggctatggaaaaggaattgaccaaaggagctaaatcttctgctcctgaagtactgtccgaaaa

SEQ ID NO: 82392 - DNA, 339 bp, Zea Mays
tggcatgctaaatacatgtaaatgcatgatgccctttggtgtaaatgtagatgcagagctgttttgtatgttaaagtccctacatcctatgtttatgataactgatttcagaattgttttgtatttgtttatatatgtggctcatgccgtttaccattggtttgctgcaacttgagattctgtaaatagaaatggctgattgtgtttttctgcagaactatttagaacccatagctcttattgaattgtacattagttttgtgactggaagtcgtgtgtttgcagtcaattgcagacacatgatgatcttgtttgttattgcaagaacctgagtcttgt

SEQ ID NO: 82393 - DNA, 1265 bp, Zea Mays
cggtcctgatggcttcaagaaagcttcgacagtatttctagtcccataatattattgtaccgtggtcacaaccacttaaggttattataagaaacagagaagctccagaccgaattggaaagtgggcagtagaactcaacgagttcatcttcgattttgttcacatgtcttccatcagactcaagcattagtagattttattactgattggacctcaggcccacaggacgaagcaacccattcatatgaagtcgtatggacagttttttgtgacggctcatgggggtccttcggggctggtgttgcagccattattgtgtcaccatctatggtgaagacatcgtacgttgccaagctacaattacaatgtacaaataatatagcaaagtatgaagctttattgctggggtggagagagttgaaagcaatgggtgtttgaagggcaatcttgaaatataattctcaagttatcacatgcccagtagacaaatcaagcaaggaaaagaattcaactttagaaaagtaccttgacacggtccgaagaattgaagcttccttcgaaggattctcagtaaaaaatatcccgaggctggacaataagcatgtcgatatgttagctacatctgccgcctaggggctccctcttccccccaatgtattctttgaaatattgaaggcaccttcagtggaactaatggaaagggatatcttaacagtatcccctacacacagcgaagaccggaggacaaaaattttatcctttcttcggagaaattatctagccgatgataaactgtacatcaaaagaatgcatgcaaggacaaggccgtacaagattataaaaggagagttatacaaggaaggagtttgttcacccatgcttaaatgcatctctagagacgaaggttaagaactgataagaaaaattcatactaaaatatgtggatcacacattgaccccatggcccttctatggaaaatgttctaccaagtcaacttcggcatagaaccattattttgtctagtcgccatgccatttggttcggtaggccagaactggaccgcttgtatctttgcgataagcgaagctgtaacactcgaagttattgtgaaggcctaatgcatcccttgcctttgtgtggtaatgaaaatcatgaaccttgcaaaacgcatcagcatcggtatgcccctggcttcgtacggcccagatgaaaacactaagccgaaccatggcatttggagtcaatggatgtataaacacttcg

SEQ ID NO: 82394 - DNA, 756 bp, Zea Mays
tgaatgttcaaaatccttctcttcttgaccctgtgaccctagagttctcctcattcttttagtggcctgatatattttcaagacctgatcatttgactgggtgcctctttatcattctttactactatactcactttgtagtttgaagattctgttgaagcatagcatattagaagaaagaacaaagttgcatcaatgtttgaactgggatgtgttttcaaattcgagttacaattgttgtacttccccaggcggtagagaaaagcaggtgcatacttgacaatgatagattgttaccacttgctagataactagaacaatgttctgtgtttcaactagtttatcgtggtctacataattacacaaggtagttcttttcgtcgtcaaatatgccattaagttctgtcagctgccaactcctagcttcagaattctggaatgacgactgagaacctttgaacatcttcttaatttggtcctttcttttggattggattccattgatgggccgtttcattttttttatcagcaacatttaaattttgttgaatttttttttatctgcaagaccattttagaagttttgtcttaaatatgattaatgcaaacaaaacttggtacttactatttggatttatgagtttttcatctcccgtttgtgacactggatttagtattaaacttggggtgtatggccagtaaattcattcccctctgcacagattcaatgggcttgtccatttgcctggcccagtc

SEQ ID NO: 82395 - DNA, 705 bp, Zea Mays
gtttcgttgccaaggtaagaaaggtaagtgtaggaccatgcaggccaggtctagtcggctgccctcatgtgtgggttaccatgtgtgttgtataaggactgatagaattacttacattgttgcatcatggggatgggctggaatgaacttttctgcaggtacactaacctcgatatgagtagttcgtgtagttgcgtaccgatgagtgaacgagtatgccaccgcttatgatgttaatataaataggtcgtggggtcgtaagttacgtgcatgcattattgcataaccatcattttggtcatttagtgcatcgtttatttttttcctggagcatgggtagaggttctcgtctacgttaataaccaattaaaattttctttccctatttctcacccaatataaccttgtaatagatggctcgtcgtaggctcactgcccttaagtctatgggaggacgtgttcctcgtcaccagccatcgtagcacttttctttcagagtacggtttacccaacctgttgtggtgcgttcttttcactttgggttacccagagggggaggaaccacgttacttctaggaaaggagaccacgctctgatggagaaggtatttgggttacagttgtggtagagcctcagacagagaatccagttatgggtggctggcactttggatctttaggccgcacacccagagaaggggcaagc

SEQ ID NO: 82396 - DNA, 472 bp, Zea Mays
ctggttcttccccaacgacgcgagcggaccttgtgggagaatcgcgggcttatggttgaagaggtggagctcggggataaaacttaccctgcgactgcctagctctctctccctctattgcacacccacgccgagcccgcccctagtaccccaaaccatcgcttagattgtcgccattggtggatcgggtgcctgcgcggagagggtctgtggggtccctacgccgccaccaatcgcatgagcccctttcggattcctcgccaaccgactcttaaccccgagtatacagcccgaggccgcgaccccctcgtcctcgctcgcaagcccctgttcgccggaatccccgtgcccactaccaccattgctgcggattgatagccatcgtcgtgagcctgctcggtcgccgtcaataaggcatcatcaaccaccctggggtgttccctgggacacacagaaggtgtccgcgttgtcg

SEQ ID NO: 82397 - DNA, 628 bp, Zea Mays
ccttggggcccccgcagaagacaaagaaagtaaattttcaaaaccaatgcagcggtatcgaggcaccccacgcgtggcccagcaaaaccatcaagtgcggacgttacgggtcagtcagcctcggagacaggtgtggcagttggcgtgaccaaaggcggaccggcattaattacgtcagcaagcgcacagaagcaacgtgccaatcaagctttggccccacctgcaggctcatttcctcccctaaggcgggcccaggggccactatcggtaccctgaattaggggtaccccttactacagtatgaagacacggtgcccgcgtggttgtctctagtcgcgtggtgaacagaacccgaccccaccacgtggacagctccagggtcgccatatggccagaaaagacgatataccccaggatatcaacagtgggtctggaccaccatgggaaagtgccggacccctgtgtgtacggaccgggcctccgggtaaggtccagaacctccacgagcgtgcccggacccctgggacgagcccccggacccccctaggcagggtccgggccactcacagcaaggtcccaggattccggggcaaaggatacccaggccttgatcaaggtcaggcggggg

SEQ ID NO: 82398 - DNA, 638 bp, Zea Mays
tcaataaaattaggactgctccatagaatacatgagcaattacttgctgctgtcagaaaaattgaggaaaaattcgaggggttggagtttcaccatatagaaagagatctcaacatggcagctgatgcattatccaagctagggtcaagccaggcgcaggccccacctggtgtctttgtccaagaggtgcaacaacctagtgtcacgttaggtccaggagaggaatgcaatgcaatagagcaggcaataccaaacccgagtgacttgagggcaccactcatcaaacacattagaaatgaaaaagagccagacgatagagccacaatcgatcatatcacaaggtagtcgactcactaaacaatcataagcgatgtactaaacaaaagtggggcaacatgtgtttttacggaatgcattgacacaggcgctagaaaacatatattggaagaaatccacatcgagaaggcattcagagctggtttctactagccaactgccaaggaatatgcagcatacctagtcgagagatgtgaagcctgttagttcttggccaaataacaacatctaccatcacaacacctacaaactattccagtcacccggatgttcgcatgctacaggctggatatgattcggac

SEQ ID NO: 82399 - DNA, 357 bp, Zea Mays
caaaagcagattggtgattcctaaaaacaaggacctcaagaggaaaatcttcgaagaggctcatctctccaaattctctatgcatcccggaagcaccaaaatgtaccatgatctgaagcctttgtattggtggaccagaatgaagagggagatagcccagtatgtatcggaatgtgacacttgtcagaggacaaaggcaagccacttgaaatcagctagagctttgcaacccctatctataccttcgtggaaatgggatgacatcagcatggaattcatcgtgggtctgcccaacacctcccgtcatcatgattcgatttgggttattgtggaccgactgacgaaagtggcacattt

SEQ ID NO: 82400 - DNA, 652 bp, Zea Mays
gcgcctatgaatatgatccaccgaccttggtcaaagcatatgttctgattgcagattcacgtggtctgtgataactctcctccgatgaactcaccctgttggtgatttgcctcacaaagaggttcattttgatgatgaagttcctagcaatgcacacaatatcattgtgctaggaatacgaaacaatgaatcattcgttttgggaaatgacaaagatcatgattaaatgtgggagacaaatgtgtcgacacctatgtttcctctctagattgtaaagggatccaaaacaaagtcctaggcatgagtgcttgaagctctcttatcgggacatttataaatgcaatcgaggctgaaccaagaatcacaaagtgaaagtcgtgagactgaagttccgacatttatgggcacttttgaaataatgtgtggtgaatgcgatggttcaagtggtcttgtgagagacccatcccacatattggttgaatgaacactgttccgctatgtaatatatctagcaatgtcatgagattctaggaggactcatattcttaaattataaataagcaacatataaatctcacactggataatacattcctgatgaatgatcactctcctatgtagagagtatatcttctagttgagattatagttc

SEQ ID NO: 82401 - DNA, 406 bp, Zea Mays
ttcatgggcttcagcttgagcagaaagcctggcttcgctagattttaatctctccaccaaagagagtaggatcttatccttttcaagagcttcgtttctcaatgttatgacctccgaacgaaggttcccaagcgctattcggcagctctcatcctctgcatccttttgggccttcagagccttgcttagaattaagccctgcaaacgaagagtgaacaaataacgacgataaaaattaccacaaaagtagttcaccatagcaaaatttacaaaacgacaagccaaagtatacaaaccttcaagatgttgtaggcaaggctatctgctagctgatcctccgtcattgcaaataagccaagttcaagctttggataccccatgttatccatcatttcacgacaaacat

SEQ ID NO: 82402 - DNA, 538 bp, Zea Mays
tggagttgccctgtttagggttgtcaatgagccaagttcaagcgagcctagaatttccttcgaggttggagtcaagctcaagcttggctcaaatgaagctaaaaaaggctcgagcttggcttggctaagcacaactgatgacatcctctgctaaaggaatacacaacactttcaaaagttgctgcataggaaatcaaatttggagctgtttggttcttttatttccctcttttggttccaatggtttctgctgggtttgacacattattttgttgtgtgatgagcctcgctaggggggtgggggtgttggcgtatgagcaagaggtggcagaagctagaggagggtgcagcgcagggagggaggcacacatagatggagagaggggtggggtggggagagagatagagtgagagcaattgctctactcttgcttaagatccaaatggttacatgacccctgtatttgtagtccctatcggacttactgccaagcaaattagagatgagtgcttatagatttagaccctcctttcctaa

SEQ ID NO: 82403 - DNA, 332 bp, Zea Mays
caaagatggtatgaattgtttgctaatgcaaaagtacaaacaggattgctaatttgtttacctggcatagatatgacctagatgagtagattatattttcatgtccagcagttatgtggtttgcttctatggctagtggctagctggtataaaaacagaattatcaaagcatctaaattgcagtgggaaccaaagctcctcaactgcagtgggaacctgtgagactgtccttggtgttccgtcactgtccctacaacacaacccatccaatgttgcaatcagagatcacgaaagcccgatgattcagacataaacaaaagcacacagtccgc

SEQ ID NO: 82404 - DNA, 1030 bp, Zea Mays
aaacgaccaagagcgggataggtaaaacaacacccttgaactaaaatggaagaggcgaggctttaaaatgtgggcaagcatcatgaaaaataccgagagatgtaaagggttaaaggttaataacatacaagggtgtaagaggagaggtaaaggtgtagaaaacctaaggtgtgagtacgacaaagaatggagttaagacaagacttgcacataccaaagatgaggttaaaaccaagggcgggattaataaaacaccactcttgaactgagatgggagattggagattttagataacggacatattataatcaccaaggtaagatcgagagatgagaaaggtaaaggcaataacaaacaggagcacaataaagggtgaacataaaaactcgcaagcgacaaagaagaggatacaaccaaaaaaaggtaaaatacaactcttagattgggatggaagacaaaaggaaaggtataagataagcatcaaggtaagatgtagaggtgtcaagggtaaatatgataataatgaaaagcataaccatggacagagttaaggaaagactcgtgaagtggtgaagtggagaaaacaatcaagggtaagataggtaaggttccaataggatggttgaagtaaaaaaaccattaccgagggatgttataaaggaataacgagatcacccatgatatgcgaaataaactcataagcaaataagaatgatatgaatttatttgcttaggaaccttaccctttttacataccttatgtagatgaccttgttcaccacacttgtaacaaaaatgtcgctcagcttggtatgatgcttgatgttcattctcgtttttggtgagggtcatcgtgggggatgcatgtccttgattcttcatgggcgggcatgaagtgatcacttggtccttattgctgcatccacaacatctcctcatactttcctcctcgtcgttatgtggacacgacgcaatgaagtggcctagctccttgcacttgaagcatctccttatgtctcttcccttttt

SEQ ID NO: 82405 - DNA, 526 bp, Zea Mays
atttgattggcgacagattggacgtctggtagatggctcttggctggtcttcatttcacttcgtgcttcaatgcttctattgattagacttgtacttcagcagctatttttggctttcctccgatctctatcgatatcttccttctgtcttgatacattcattgcgtatactgtagggatatgactgtttgggaaaatctattgaaaattcctggacgtcccccccaatgggtgtagccaagggacggcttggtgcgctgagcgtttaataaactgcccttgagtagtaacttgatgtgaccgtagggtgtaatcatatcgtccaaggagttgacctcagtcccaatggtgtcgtgttacgtgaaacggcatctgcggcctgacttgtgtccagacgatttgaatggcctattgaatatttgcgactgttcagtgaccatggtaggagatgagcggttgcctcccgcctctatatatagcctgcctgcttcactggtgtcttcacacatctcccggtcgtttgttg

SEQ ID NO: 82406 - DNA, 345 bp, Zea Mays
gctggatctccttcatctcatctggatttgtacggtaggggtgcggttcgaaagagaaacgtccgggatgagatcgatctgatgctcgatgccacggagcggtggaagacccggtggtaagtctgtgggaaatacatcagcatactcctgcaaaaggttaacaaaaacagggggtatatccaaagacggtgcatcatcaagtggaacaagcatacgtgagcatacaagtgcataacagggcatatgagcctcatgtaaatcatcaaaatcagcacgtgtagcaagtaaaacaggagcattcaactttatttcagatttaacaggtgcgactgatggagatttgac

SEQ ID NO: 82407 - DNA, 726 bp, Zea Mays
ctaaaattaggccaccggtggtattggccgaacttgagatcggatttgagctagattcagtgggaatttggctagaactgttatagcaaaagaagagatggttgataggtctacaactttggtgcagaaggatgatggagttgtcatgcaaaatttagagaaaatctgccttgaatgtggactgtcaggttgtctacagaaccctcatatggtacaatggctgaatgagatcgcgggttcattccccctcgccgctgttgacccttcgccgcgattgttgactgatcgtcacgatttgtgcgtcgtggcttgtggataaccgtgggcgggtaaagatcttggcgcctggatcaacttgggtccggtcgcggctaggctcaccgtatccccttgctcaccgatcgattgggatagatctcaccgccgttggccgattaccgccgtgcgccacgtgctaaagcactttaccacgttgcagtagctcggcttgcgatatttgctcatcgccggtgagttcgccacgacggaagacactaatcacgcgcgccagtaactttctatttccccggccgccgcacgtcttcgtccaaatccccggccaccgcttagcgatcctataaattgatggccaggtctgttgcgccatgttatcatgaagccaacgcacccacgcttgcctcgaatcacccctagacctcttcaatttcccattctccccaatctctg

SEQ ID NO: 82408 - DNA, 493 bp, Zea Mays
tttcggcaagttgtttctttaggtcttcaacttcggctttatgaggttcggattatgcattaagttttgcttcgctgctcttcagcctatccactaaggaaagcagaattttatctttgttaagggcttcattcctcagtctgatgacctctgaccgaagattaccaagggctatttgacaactttcgtcttcagcattcttttgtgcccttaaagcattgctcaaaattaagcgctacaaaaaagaaagggggatcagcacgttaataaaatatacaaaaataatctttttataagtcaaaacatctttaccttcagactgttataagcgaggctgtctgcaaggtcatccttcgacattgcagacaggccaagctcgagcttcggaaaccctatgttccttgccatctcccggcaaacagatatctccttgttgtccggaaggcagtacagaaagtcgtcttcatcagtaccattatacaccaaggatcct

SEQ ID NO: 82409 - DNA, 854 bp, Zea Mays
caacgcaggtggctcgagctgatcaaggactacaacttacaagtgcactatcatccgagaaaggctaacgttgtggctgacgctttgagtcggaggtatcattgccacattctccaaccacttctagaggatggatttaacttattacacccggcagtgctactcaacattgaagttcattgctcactagaggatcggatcatccaaaagcagaaatccgacaaaggcatatttcacatcaaggaaaggatgaagagtgaacccaatagccgcttcaagcttgacaaaaagggtatattgtggtttgatgaacgactggccgtaccaatcaagagctccagaccaaaattttggatgaagctcaccaatccaaactatcgattcaccccggaagcaacaaaatatactgtgatttgtaatcaaagttttggtggacaaagatgaagaaagagattgcatcgtacgttgcgagatgtgataactgttgcagagtcaaggccatccacatgaagccagctgacctattgcagtcattatctatacctaaatggaaatgggaggagatcagtgtggattttattactggacttcctattactcaaacggggcaatgattcaatatgggtgattgtggatcgactcaccaattcaactcattttctgcctgtcaaaacaacatatcgaccaccgaagtaagcgaacatttatatcatagaaattgttcgactacatggaattccaaaaaccattgtgtcggaccgtgggacacaattcaccgctcacttttgggaacaactaccgaaaggtttggggactaagctcgtgcatagcttatcttatcaccctcaaacatc

SEQ ID NO: 82410 - DNA, 356 bp, Zea Mays
gtttagtaaaaatccatcggtgtcactggtgttaagttgaggtttatttgcgcgtggaaagtaataatgtgattaatacttagaactcttagtcgatagtagaaattgttttggcttatatagagaggtggtgacatgccaaagtagtcatcgcttcctctatatcttgagtagggtcaatatgcgttatgtgttcatgaattgggaagtaagcgcatgatggtttcgagttagagattagtggtttacgggtcgtatgatttggtcgatgtgtgaaaatacatgagaatatgtatgtttataaaaaagttgtggtatatgttgtgtctcggatttcgataataatagggtagccg

SEQ ID NO: 82411 - DNA, 328 bp, Zea Mays
cccaggccccactagtacgcgtggctccacatggggtaaaacgttggttttacccttgccttacggctccttcccagggaagccaccgctagtcaacccctctcctagcctataaaagggagaggttggcctcatggcaaggggatcgaaaagagagagctcttggggcaaccgacgccttcagacggacgcgaacccacaaggatgaacaggaggaggaggagcaccgacgatgaccaggaggctgaagccccgccgagccaagacatagctaggactccaccatgcagcttccaagctccacttccaccctgataaagagacttgg

SEQ ID NO: 82412 - DNA, 613 bp, Zea Mays
atgccctgcaaatggccctatcagatagactgaatggtgttctgattgtatagtgactgaataagatcgcaggttcacccccccccctgtcgccgccggtgaccttgcacccagatatatgtcggcgtcgcgattcacgcccggtcgaacacggataacgttccttggtaaaaaaatcgggcaccgcggatgagcttgagaccctgttccgcccagtcgtcgtgtccgcttgactcacggtcggttcagataagctcaccggagatggctgcctgccgatcggaagccacgtgccctgaagcttcacacgttgcagtaaatcgctccatattgtgggctcgtcgccggtaagcctgccacggtgaaagacacgcagctcttgcgccagtgacctcttccttctccggccaccatcgcgccatcccaaattcacaggccaccgcccccggagcctataaattgagtgtgtcgtcgggtccgtaaggtagtcaagcacccaagccaccaagctgtgcctccaattgctcacctgagctcgccaatttgggatttcccccaaatcaaccaagaacaccgtgcggtgtgatctcaccgtggccagcctgctccaggt

SEQ ID NO: 82413 - DNA, 672 bp, Zea Mays
agcaaaaagaagagggagcgttgggaacatctcaataagaaccagataaaccatcatccccagcacgacgaagaagtctccactgtggaccaaacacccaagcccactggccaaaagcggtggcgaccatttccaaaaactgatggattcgccgtgttagaaccacggcttccccgtctattacaagatttgggagtgcaaactcctaaagcgcttcatctccaatccacccgccaaaaaggcaaggaaggaagagccgaccaagacggcggaccaggaggtccccgtcgaggatttctctaagctaatagggtgcctcatgatctttgacggagcagaggcatacaacgacaagtgtcgcctcaaggctgccgactgggaggtccatgtggcaaaatcggccatcccgcgctatgtctggtagtcagagttcccaattgtcttcgatcgccgtgaccacccagacagtagggatgaaaacgggtcggctacccgggttgggtaccggatacagatagttaaaaaacacgaattttaggatatagatacagatagttttattgacgggatggatacgggtactacctggttgatgtacttctggatacgggtcggatacagaattgtcagtacccggaaactacccgaatccctcggtcggatacggatacc

SEQ ID NO: 82414 - DNA, 604 bp, Zea Mays
tggccatgatcccattgagagatctcttcccctaacattcctttgtcgtttgtgtgtggaggcttgcaggttttgctaactggatcaagagatagagaggggagaaatcgggttcgtctcactgccgcgcacagagagaagatcccgggtttgatgtgtccaaggcacgcgtcccgatgccatcttctgatatgaggtagaaaggttatttaggcacatttttgtcaatggggtcattaggatttgagctagggatcatggtgaacacgctcggtctttggctcaagggctaaaattcagaaatctgaatttcagaaatccctattgaacctccacttgagaagcttgtttggagtttttattaaactattttggccaagcttccacaatctttattgtagcttatttagtatatttcaatgtttataattggcctaagccctgattttatatttttcatggtcttttaccccttttctttatctctacttagatagcttgattagggttggtgttagggtttcaacatttttccctttttgaaaaatcctatttgtttggaacatggttctttagatatacacttagtagatctttattttta

SEQ ID NO: 82415 - DNA, 366 bp, Zea Mays
agaagagaagatgacgattttctctatgccactctgcaatgtcgcatgagatgagtgatgagttggagggtgaagaaaagtattggcatatcttcaacaagcatcaagtgctcaaactagacaacaaggagtggaagatgacttcattggctctgaggagccgtggttcttagggatggctggggttggagctggttcactggcatgctgcttgatgtatccaatgagcatgacgtatcagaatgttggggtgagtctgagtccagcaatggccaaactgagcacaacaagcaagcatcagatgaagaggacaaggattattggaatgtggtccttgacagggtaaacttagagctgacacccgag

SEQ ID NO: 82416 - DNA, 327 bp, Zea Mays
cgtacaaagaccgaacaaacaggtgggactgccactgtcactgccgaaactgtcctaatgaacatcgatccttctcttcccggctatgttttacagtggcatgcgattgcctcgaaatcacaaacgagagactttgagagaacttgccattcattagcttctcgtccttatttttagaggaaaatagagctgagatgcacttggatgcctgccactacccaggtaggtaatctcgccagtctctacctcacggaaagcacatgcatataaacaaccctataaaatcttcgccgaattgcgagtaccagagatgccggggcggcataa

SEQ ID NO: 82417 - DNA, 438 bp, Zea Mays
tggaaagacaaaccttttggagaggtggattcatcgtttggtttccatcgttcattttcctcttcctctttgcaagggttagtatcacaagaactaaaggaagtagaagcatcaaatgaactattatgtttggactcatcaaatttagttttaattctagtccaaatatcatgcgcatcatgaatggattcatcatagtttgatatgaaggcacgataatcttcattgctaagagaattagttaagatgtcaaaaagctagatagtttaagcgataacatctttgatcctcctcggaattaatttttccattaaaactagagggaaaaatactcttgtctataatttgttctagtcgtggatctacggttttaaaagcatttatcacactagtagaccatgaatcataattagaacaatcatcaaatagtatctcaag

SEQ ID NO: 82418 - DNA, 605 bp, Zea Mays
ttcgagtatgggcagtctttgatgaagtgtccggactttccacagttggagcaaccagtggaagaactggggagagtagggaaacgagtaccatgggcactcggctgattggtaggagcgggggcagtagtgggataaataaaaacaggttgcttgaatggatatgaatgtgggcgaggcaaagaacgattttgattaaaaggtcggatcaccaacctcgttctcttctcagggccccttgatttgaccttttcacctccaaacccctttgattttccatgtcctgcagttttggcttctactgccagtgccatactaacagccctactgtaggtaaggtccaagcatgttgccattttccgctgaagcctatcattgagtcccctcataaaacaattctttttcttcagaactatattcacttagtcaatggcatactgggagagatggttgaatttgttgagatattgcattacagtatcttccccttgctttaaccagatgaactcttcttgtttcatatgaagcactccctctagaacataatgctctcagaatgctagtttgaattcctcctaggtgatatgatgtccagccgattgatt

SEQ ID NO: 82419 - DNA, 588 bp, Zea Mays
gatctcaatcctcttttatgtccaatgtaaactataacactggtacacttaattatagtcctatggcatatttatcatttctctgctggaatctaacatgcttttttctcttctaatctagtctacatgcatcagactccataaattgtttgtaacagttcagatattagatgggggagaagctacatttaaactcctatggccacgctgattccttccacagaacaagcataaccattctcaattaaactatcactgtcagttctgcaacataacggggagttgccagttctgcaatagtgagcatcagcttcgctgcaatagccagagcacgaatgatccaccataactagagctatgtcattcacatatattctctgtattgcttcattaaatgaaggataatacttgactgcaaactcacatccagcaacccttacaattgctatagcaactgaaagtttagtagtagataatgaagctaaaggatggcacctctggacttctgtcatggttgatattcctcctccctgactgaacccctttagatatacaattttcctgactgtgtgtggcagtaagccttta

SEQ ID NO: 82420 - DNA, 843 bp, Zea Mays
ccttaatgttatgtgatgatatgtgcaagtcgtcgatgtttagtcctgactgcgcactacggggtaacccacacagtgcttttgggaggacggcaacgtcgattgcaactcgatggtatgtgctggggcacgttagaaggcagaaaatttgtataggtttgggtcatctgaatgagtaataccctacgtcctatgtggtgctgagtagtgagtttgctttgagtgcacagattacaggtggttcacgggcggtggaacatgagatatcctattagtctactagtgggcgtgatggcaaaagagagaatcccttttataggggtacctacgcagccttatatcgccgactagagtgatatccctttacaaatcgtgaaaacttatctgaacctatctacttttgctacttcttcatgccgactcttctagtggttgctttcctccgagttatcctccgagcgatccgccatccggtcgcatgtggggcgcgtgcttggaactctattggccttctgcaatatatgtgtatggatagcattcttccgtcataccctttggaatccttttcgctaggcgtgttatccctccgatagtttatatttcacccgaaggttgtcccaatagtatgtaacaccctaggtgtttatctagtgttaaattatgagattggaactaagcacagattgttagtgaagataacgtttctcaatcacatctatctctgtctagtaatattattcaaaaaggtctcacaaaagtcggagttaatcggtctcgagaaatgccaaatcttgagcctattaaaaaatcatttatgaaacaaatgcaaattcaaaagtcgcc

SEQ ID NO: 82421 - DNA, 602 bp, Zea Mays
cttttaaacctcaaatgacgtttctatgatattgtgggcattgtattcacactagagggtattagattacaactagtggatgaagacgttattgggctagctaatgaccttttgtgataccaggtttccaataatccccctctattcaaggcatacctaaatggtgtttatgtataaaataaagactatggaaaatttaggcaaattgcgtgagtgaactgtccaaacataggttaaggttgtaaggcaacttttttccaccaaacagttgctaaaaagttggaatataaagaattcaaaacaatatatcaccttttaaacctcaaatgacgtttctatgatattgtgggcattgtattcacactagagggtattagagtacaactagtggatgaagacgttattgggctagctaatgaccttttgtgatacctggtttccaccatactgttgctaaaaagttggaatataaagaattcaaaacaatagatcaccttttaaacctcaaatgacgtttctatgatattgtgggcattgtattcacactagagggtattagagtataactagtggatgaagacgttattgggctagctaatgac

SEQ ID NO: 82422 - DNA, 310 bp, Zea Mays
caattcaaattccaaacctcctatggcactgtttatcgttcaaacgtcgttttcacgtcgtttgacctctcgatcgtctcatctcgtgtttcctgtgccatatttctctgtgtatgtatttattcacatttcatatacttatgactatgtgactaatacgtgctcacctcttctgtcatttcagtgaccttgattgcccgtgtgccgtctcctgtcctgcctggatcgtcacctctcgtgtgagctttccaggtagtcatctcatcctttactattctatcggatattatcgatctgtgcttagtcactc

SEQ ID NO: 82423 - DNA, 390 bp, Zea Mays
cgaggagacttactatgttgctcctgctcctcaaagttcaatatagcctaataggatagagaagtattatgtaatttccatatatgctatgcagttaaaaaagtggtataaatatagaagtcataccccaacattaacatctagaatgagctggtgagcattcagtggaggaatatgtttagaacagtcaacgcggacacactcaatgaaacattgcataaacacgttgtcgagacatgcgccatcagcaaaagattgttgtatgtcacgacaattggcacgatattcaccaaagtcaattatatttctgcaaatgaaaagattgaacatacaacaatagaaacaaatgttatttgtatatatgagatacataattacataatatatatg

SEQ ID NO: 82424 - DNA, 432 bp, Zea Mays
atgatcccgggcccctcagggtctacttgtttgcagggggacatgggaaaggtccaccccagacggacccactccctgataaacccaaggcactgagtcgagagttgggcgaggtggagacgcaaagggggtcgggcggatcgagtggaagccactcgagtggatctaacgcccaaccgggactgactcgctatgtggcattaactgcgcctagcgccaagccacatatggtgagtcagtctaccttccactcatgacctaggactcctaggcctgcgaccaactcaggacttatcgagcctaggattgagcgcactggccgcctacaggtcttgcaatacgacgagccacgccgagacccaggctacgacaaccaggggtcggcacggcatagagacgataatgatggtgtcaggactttttgccgcccac

SEQ ID NO: 82425 - DNA, 806 bp, Zea Mays
aactacaactggcatccaggaatgggagtagtaaaggagcgagagactcctagctccagccaagtcctgattaaattggaagatagtagcccccatgttaagaggaaaactatcaaagacacatctattcatatatctattcatatgcttccacaatgtccaagctccaaggattagcaagtagttcatctccgtctgcgcaatcccagaaattcactcctgccatacaataataaagctccaattttgaggccgtggagacatgctctggagattggcggacgtggaaccaaaattcccttgcaaagacacacctaaccataaggtgaccaatcgtttcttgtcgttgatcaaaagtagacatcccccttttgcttaaccggtcagctgtccagcactttttaagagcagaaagccaaatgaagaatttacacttagctgtagcccaagacttccaaaatcgattagcactagcaggctcaaagtggacagacccaatgaagagtgcctcatacacagccttagatgaatactgtccattggcagctagcatgaaaacatgcctatcttcaatttgttcatataactccacctccagtaattgatcccatatttccagaaactctactaaaaccccaaccagttatatcggcaacccaacgtccctcattgaaggtctcaagaactgttctaaacttgacatctcttcaagcatccccaacaagatgactcaaaatagtgctctaaaaattaaaatactacatcattcaaagtgtttaggacactaaaaacaaattgtgttctac

SEQ ID NO: 82426 - DNA, 566 bp, Zea Mays
aaaaaaagaaatgaagaaaacaaagccaacgaacttgtctatctacccactcggccaagtagcccagccaactttctcagcccctccccacgtgatcccactctcccttttctcttctctcccttacatgtgggacccaccagtcctctaatctcctccctaatttgtcttccgtttccggttcgtgcttctaggaacgtacgcaccgctctgctgccaattgtaaaccgtcgcgacccctctccttccctccattagcgctggcgtttttctcactacgccatcaatggagatgtcgatcgtcgaccgtttcaagcacgaacgtcgcctcgccttcgcctccccaacgcccagccacgttgaaccgcctcgccagccgcacacagctgcacctcgcgacacatttcctccccaagatttaatcaatgcgatttactcactgcgttacgccacctccattaatggccaccttcaacacaggttcatgccgtcgagtccgcggcttgaattctccctcgtccctggctatttaagccacgcccatgcttctcctatttacctgctcg

SEQ ID NO: 82427 - DNA, 764 bp, Zea Mays
gccgacacatgggtccggtgcgtcggtctctacacgcgccagctcctgcgttcacctgccaagcgggccccgagcgcagacccctcttccggacctggtgctcatccctctgacgtcgggccctacctgtcattccgctgcgccgtcagctacggtaatggccgaacggccgcgcgattctgccgtagtcgtcgtggttgttgcgtcaacatgcgaaaccaggggataaaaccccgcatgacctccacaaccgcgagcccagagccctacatcccctccagacccgtcttccctcttcctcgtcgagaaaatcccgcatcaagggacaccgacgtccgccaccatggtcccgtgcctgcactgccgattgggggctagtgtggtgtcgggattgttcatcgatgggtggggatcaccggcgtgatgtattgcgctcggaggtccatcgtggcgccctgaatttctcaccgttgccgaactccgccacgcaccgcaaacgcccctgctcagccctcgatccccggtaagcaccttcccattgcgtgccttaccgtttttactacctgtaattaccctcggataggaattttatcgtgtgaatcgcatttgggcgcagcaccggcgcggtcgtgtccgtcgcggtgaagcgccgccctatatcgctggggaagaagataacgtgtacatcattggatccgtgatgtacggctcggattagatcataggtgcgccatctcgtttgatgtatcctgggcgtcggattg

SEQ ID NO: 82428 - DNA, 335 bp, Zea Mays
cacggcaggctctgtctcggtgggcactgaaggcccagcttcggcttcagcttgaatttgcgcaacttcgacttctgcatgtctagttttggcttcggcctgtgacttggtttcagttggagcaactttctttgcgagagcaggactcaaggcctttgtagtttccaacacaacatccagcacgtttgccatccttctcctcttgggagttgcggcagaagccctttgcaccttcggcagttttaactctgttgaaggattcaaaatttctggcactttcattatttcttcaatttttggctcttcaatcttcctctcaactggctcgaccgtca

SEQ ID NO: 82429 - DNA, 512 bp, Zea Mays
ccatgccaagttgcaccgactgtgataatcgtgtagttgacagaaaaccaaaaattttaattaagcctctgagaactagcttggataaccaaccgacatgagttttttctttcactttccctataatctacctagccagttgcacagaaaactactaattgtgcagggaaaaaaaagtggaaccagtaatcacatggattgaatgaactagtagcactacgcactagctagctacttacagcgtcttttactgattgttgtttctaccttaattaatttgcatagatcgattaaacactttcaattaatgatcttgtgaaccaagcttcttaattaggcttcagtcattgtatacttttatggccagtaaacatgcgaacaggtatattaattatatatatttggcactcaaaagtataagatactacgtgctattaagtttcagacctgtggttagcccgtcaattcctcgacagatatagattaatatccccacaccacacacatataca

SEQ ID NO: 82430 - DNA, 417 bp, Zea Mays
cccgctgatctaatagttatgggtaaccaagatgcaactatagatgtcatcctagggatgaactggctaaccaaatatcaaactagtcttagctgtgacaagataacggtgaagttagtgtccctatcaggagaagaagtgttagtggagttggtcttgtctggaccaaggaaaggaagttgtcactgagtcaccgcccatattgaggagattaaaccatcagaagctatcaatgtagtatcagaattcccagatgtgtttcccgaggagttaccaggtatgccacctgaaaggaaagttgaatttgccatagagcttataccaggcactaccccaatttccaagagagcatatcaagtgtctggaccagaattggtggaattcaagaagtagattgatgagttgttagaggaaggc

SEQ ID NO: 82431 - DNA, 656 bp, Zea Mays
aattttgtatcttaaatattaatattttttatataacatgaactaaaaatcgttaaaggggacaagtgtagttttgtatagatcagtaagtacacgacacatgtgtcatcctccgttcacgttaccagggcggtgtagccttgtgacgcagttgcacacgctgacaaaaccggcgacatcacgttcgaaagcatggttaacagcaagcccagaagaggaaacgcgcaccgatctcactctcaccctgcctccaatgcaatagccggcctggcaagctggttcggtgaaaagtgaaaacaaagtcaataggacgtgctacagattactaatagtacagtcaactctctcgactgacccggagtccgtggaaggatgcccgccgtggacaccctcgaactcgttaccggctcccccaccgacattgcggccccatcagtgatctgtcccccaccaacccttccaccacgccgcggcggtataataacccggcttcctccccaattccgccactcctcagctcaggcgagcagcggagccgagcagagcctcgagatcccgcccaccatttgccctccggccgacgcggagccgatcgcttcaccggcagcgaggacgatgggttccgtcgcggaggactccaccgcggcagcggcagc

SEQ ID NO: 82432 - DNA, 756 bp, Zea Mays
accaaaagcttccagttaagctgcaccacaaaaatcaggtttcccatttgctaaataagttgatgtttagtttagatcaatcactttgctagtgatagattagtatgcgctaaagtgcaataaaatcatggacaatttcaaaggattgatacgtaacttatgcctacctttctatactgtagatgacacaattattcatttccacaggaaaatatggctatgcgctttatgctgtgtcccaacaatgaactataatgggaaccaatcaatacaatggcacattgtactaagctgctgacacagaatgtggaatgatgaatagactcagctttttcctatatccactcatccaaaaaatgaccatatggcatccaacttgacatttcgaaagcaatatgtatgcaattgtactgtattattacattagatacgtcagtcctcatgactcatacgaactacttatttcatctattgaataatgaatttttccctaaaccctcaacctgttggggatctatgggccatgaaacttctatgtggggacccatattcacctaatcaccttcacagcactccgcacctactaagacgataagaccgacaaatgataatatcacactgcaaatactgttgaaaatagggaaatcaggattcaatgggaagcctatgagcgagcagctttgagattcacactactaagacaaaaacctaccagtcttcacaaactaaacacaaaaggaatagaaataatactgc

SEQ ID NO: 82433 - DNA, 830 bp, Zea Mays
cataagtatatgaaatgtgaataaatacatacataaagagttacgacacaaaaactgagtgatttggagaaccaagggtcaaacgacgcgagaacggcgtttgaacgatgaattatgccataggaggtttgaaatttgaaatagagcatgaaatgactaggaattgagccgatacttcacgagtaggtatatatgagtgaatatgagtgaagtgtgtgcttggtttgaggttttgcgaagaaaacgaatttttggcactcggctgagaaacgatcgctataaaaagatcacagtggtgtattcgatgtctgggtattggataggcgtgaaagttggtgtgagggttactggaggtggcatgagggtgcagggaaaaactgggatcgatttgagcaaatttgagtggtttgggcatttcaccgaacacatggcgtgcgggtttgaggaataccggtgaaatggctgttggggggggttaaatcctccaaaaaggagatggaaacctgtaggaaagcaccagggacacacaagcacactcacaactacttgagttataagaaatgcacacagatttggattttgctcaaatggtggaaggcttgaacttcattggtagagaagaacaaagggagagggaagaaggagtttgctcaccagcagagaagagggagatgagcacgatctggagaagaacttcgccggagcaccccaccggtgatcgccggcggtgaggggaaaatcgccgagaggaggtggagagacagagagatggctgatgggatgaaatgtgccgtggacgtgggctcgggcagggaaaggtttttaaaaac

SEQ ID NO: 82434 - DNA, 332 bp, Zea Mays
ctgaacaggtcttggggatttcacttcgctcttgctggctccttcatcacgcgtgcatgtcgtcgaaccgaagcttgtagcttcatcctcacaatcgtgatcactgcatgttatcttcgaacgaagttcccttccgcatttaccatgttacactcaaaccaaactcaagaataactaattaattaatgttttgaggacatttggttaaagagccccctaacacttagcctattgtatgtgcatgcgttatttagtagctacagaagataaaacatgaaatgtataaaaagttgatcaaatgttcattaaatatggatcagggatgtatggac

SEQ ID NO: 82435 - DNA, 577 bp, Zea Mays
gaggaggcagaagcaggtgactgccatcgctaatcatggacatcgccaaccgcagcccaccgacgtttttcccaacgcctcttcctctcccctccaatgaccagtggaatagactctccggggccctgggccatgaacggtggtgaaaggagttctcccccggtggtcggctgtgatggagcaatcggcctccatatcgattcctttcgcttgaaaccttgagagactcctccatgcagaccgggatcctgcatctttccgagacgctgccacaccggaacacggccaacctgattctcagggtgcggcctcactgccctctgagccacctgaagtggacacccgagagcatggtagccaaatccctggaaccgaaaacagcgtgtaggatgccggcagaaagcagcaaaatgagagggagagagacaattgaagcaccgccctcagagatcctcaggggaccatcgacgaggagtgggaggaagacgcctagcacgcctatggaccaccacctaccacccaccctcagctagaggcggacgtgtagactcttggatttgcaccacctgggcggccg

SEQ ID NO: 82436 - DNA, 654 bp, Zea Mays
agataacactctctatggctttgaaggaaaaggaaccttcccaattggcaaaatagagctaccactgtaatttggcactgcaccgaacgctcaaagtgagcattgcaccgaacaacgccatcatggggcgagggtccatcaacaagttagaggcagcaatacacgggctctacctgcgcatgaaaatcccaggccctcagggtgcaatcaccatatatggagatcaataggcggtcaggaacatagaaagagacttcgtccccgaccaacgtaatgtacatttcctcacaacagaatgtgaagacaccagcagtcctcgcacaaacaaaggcaaaaagattaacgcacagctgcagagtgacgagggaatcaagatagtccccctcgacctcatgacccccaagcaaacagttctagttagtgaagacctcctccccgaagaagaagaagaaagacttctctcttgtctcaaacacaacaaggatgtcttcgcatggtctaccctagacctcatcagcgtcagccacactatcattaagcacagtttgggcattgattccactgcgcgccacaagaaacaaaagttgcggaaaatgtccgatgaaaaaacagaagccgcgaaggtagaagtccaccgcctactagaagcaaaat

SEQ ID NO: 82437 - DNA, 485 bp, Zea Mays
gaagagcttgtagaggccaacgatcaactggaaattcaccaccaagacatggaagctaatgagggaggcatcgagggagaggaggatcccgaggaaatagagcttgcttccggaccgaatgtgactccctctggagtgtccccttcatctgtatccagcgtttcctttaccaatcattgttagacgggttagttttaacatgttaggaggaagggaaaccacgtaagcttagttttggtaccaacttttggactaggctttagggtggatcccctaaaatgttgtaacccaggaaaacttttgtgaacgatgcaatgaatgaatgaatgaatgttatccttgtttgcttcgatataatgttatgtcatttttcttctcatgatataaagattttgtttggaaccatgaatcgaggtaacaacgacagaatttctattttcagatggcagctagacctcgtcgcgggcagaacgagcaagttcccc

SEQ ID NO: 82438 - DNA, 461 bp, Zea Mays
ttatgaattggcgacggttggggagtgatcggcgacaacaggtgagaagcaacggcgtatggcagaggcagcagatggtgggggcagtgatggatcggggaatgcctcctcctcggtctccactcttgtggtacattggcggcaagggcaggggtggaacatggaaccgtcgaatgacaccgtcggggtaggttttataagtgccccatgcctaggctcgcccctgcttgaggtggtgtggctaaactgaaacgtataattgaagtcttaaggcaaagtgattagtggagaaacgtgcgagcataacgttgtggattcgagccctatgtgactcgtgacttgcgatgacacgtgtgattgtctggttgatttctatgggggtcgtttgtatcccttaattttgaaagaatcagaatctagtcaatagagtgggttatttggtttgaaatttaacatttcac

SEQ ID NO: 82439 - DNA, 272 bp, Zea Mays
aaaattttgagacaagaatgatttcagatcgtttatcacatcaatactagttccaaaaatcagtatgtcatccacatacaaacacaatactagtcccttaccaccaaaaaatcgatagtacacacaagtgttagcttcgtttaccacaaagtctgttgatgtcaaagttctatcgaacttctcatgcctttgctttggcgcctgctttaggccatacacgaattttcttaatctacacaccatgttcttctatccaactatcacaaattcat

SEQ ID NO: 82440 - DNA, 616 bp, Zea Mays
ccctataggcgactttcaataatcctattggtatattgacaaagcatgtttctagagctaagtttgagctataatactttattttgctataagatagaatttgtcttaaagtggagtttgctagaatatgatctgaattctaacgtgagtcttgcggtgacgactgaaggaccgatggtttgggtatcaattagcgattcatcatgtatacatcttgtaagccacaaagaaaattagacgatttattgtattccctgcgttctgtgaactcttctcgtgttatgaagattgtcagtctgtggtttttttctcgcaagaattttctacataaaattttatgcctcatgtttaatttagatttgcattattttctaacgtcatattccatatttgcagaacttgtgcatatgggcaaacacgttcgttcgtaaggaagagcagttcaatacctagagcagttcaatacctattcagtacctactctttttttcttctccgagggcttatttaccaacgggattagatgagattgaaggggctaaaatctcattgccattcaaatttaaatattaagagaattttagcccatttaatcccttgctctcaaacaaactct

SEQ ID NO: 82441 - DNA, 1284 bp, Zea Mays
ctcttttacacaaagctgacgaaacaaataactcaactctgaaagcgctagccaaacatgctcagggacatagcctcgaaccatcgcaggaagaatccattcaatccatatgtggaagtcatgactcttcatccctaagactcgcatagtagataagttcaccccctactcaggttagctgcatacccatcagggaacatcaacatcttgatccactgaagtacttccttcctctaggccctgcttaggacgaaatcgggcttaggccttctccacgtctttccgccacttggcggcttcatctctaggttccccctcccaccataacgctgccggatccactcttgccttcacgttatcctttgacttatcaggaatgtccataattgtttcccacagtgcctcgacaacattcttttcagtgtgcatcacgtcaatgttgtgtggaaggagcaggtcatcataataggggagccgagtcaagccagacttatgtgtccacatatgatgctcaccatatcccacaaaaccaccttttgtattggccacgagcccatctatctgttgacgaatttcggcaccagtcatcattgcaggtgtgcggtctgtcacttcgacacctttcataaagttcttgatgtctagtcggaatgaatggtcaggagggagaaattgtcgatgtttatcgaatgacgaatatttgccaccctttttcaaccaaatgaacttgagggcttccttgcaaactgggcatgggaacttaccgtgaacacaccaggcgcagaatagaccatacgccggtatgtcatgcatggagtattggtaccaaacatgcattctgaagtttgtcttcgtagctcgatcatatgtacacgcccagtttattccccgggtgtccaggaattatcaacgacacgaatatattctgcctttgaaagcacacatcagggggtagattgattggaataacaaacacgggccaacatgtgtacggggcagcgctcattccatagggattgaacccatttgtggccaacgcaacacgtacattacgagcctcttcggctttctcacggtgaatggcatcaaagtgtttccatgcttcaccatcagatgagtgcacaatcttgtcaggattgtatcgttttccatttttgtgccatgtcatctgtttcgcggattcctctgtcatgtacagacgctggatcctcggtatgaacggaaggtgccgtaggattgttaaggggatgtcgagttgcctcttcagtccatcaccagagtcta

SEQ ID NO: 82442 - DNA, 600 bp, Zea Mays
ctcaacatgtcttccaaaatctgatttaccctttctgtctgaccatctgtctgaggatggtatgatgagcttcttatcacatgggttccaagtgactcttgcagttgctcccagaaatgtgctacgaacggtgctcctctgtctgacacgatagtccttggtattccatgcaaatgcactatctggtcaatatagatttctgcatacttttctgccctgtgggtggtatgtactggcaagaaatgagctgtcttagttagcttgtccacaatgacccaaatagaatcgtggtgtcgggaggtattgggcaaacccacaataaaatccatgctgaggtcctcccatttccaagatggtatgggaagaggctgtaaggtacatgctaccttcaaatggctagccttgattctttggcaagtgtcgcattcggatacatacttagcaatttccctcttcattctggtccaccaatacaaaggtttgagatcatgatacatcttattactgtcgggttgcatggaaaattttgaaagatgagcttcatccaatattttccgcctgagttttgggttcttaggaacaaccaatcggtcttcaaac

SEQ ID NO: 82443 - DNA, 435 bp, Zea Mays
atcttgccatccacattggcacgagttttttcaacccttacatctgattttttgtcatagtgcaatcacataataatgaccatatagtgcatgtttagtatgcttccttgaggctagattactcagcggatacaattttttcatgtattaaatcattatagagtaagtcaaggtgtaggagagggcctttagccagatatgagattctagccaacatattctaccatggaatttaaaacaataagaaaaatattccctttcttcaatattttcaaacaaggtaagtcacgggtcgtggatgcaagagaggttatgcatagccaataagtataacatgttgtattgtaacttttcatttccatttcagttagcaaaatgtatacaggacttctcaaattctaccatccaccatatcacgcgggtcaccaactctat

SEQ ID NO: 82444 - DNA, 481 bp, Zea Mays
aaacgggatcgatgaaggggtatctagccacgtgagccatccgatcacaatcgaccactaggattagatttacccttatatcgaactggtacacgatctgtgctgttcaatccgattcagatgccacagatttaattaccctaacttgactctcgcccgcacgattgaaatcggacggccagaagaagattaggccaaaccggtacacaggattagatcgcagccctacatcgccaaacaagcggccgacgggttttcttcctcccctggtcaaaccagaccatggcaccaacgccaccgcggctaggcctcacgccggcggggctagtctccggattccgggcatgaaactcaaattcaatcggactacatgctatgggtatgaaagcgggtccgggcgagtggttcttaccaaggatcgtccgcgcaggcgagccgaccacggagaggaggatgttccgccccgtcgcgcactctggcg

SEQ ID NO: 82445 - DNA, 1312 bp, Zea Mays
ggccttttcttcttggcccatccgctcacccagctaagccgacgctctttccatttttttaatccccttgccgcggatgacatcatcttgatgtcatgttgacatcaacatgcaaattaactccgttggagcctgttggccagaaccgttcgctggccagcatgtgtttcactggcatgtgggccaccttctcttgtcccatgttctttcctgtgtacgacccaaccttcttccaggaatcggcaaccgtgttcgttgcaggcaggagatgcgccagggtggttaagatttgattcaatccagttagacttttggatcctcaaggctataaattcggacgctcctacccatatgccgtgtgcgcatacgtgatttgagcgctcacggccgtacccgtacagaaggagagagagaattagtgaacttcggtcgccgttgttgcgcaccggcgattgccgtcgatcttgggcgacccatgcactcggggcagctcggcttgggttggtgggcgtcgtcaggaggaattgcggggcggtatacggcctgcgcgcagaggattcctcaccggtgtgccatcctcgccgtgcaatccgcacatcgccgtcgacgacgcgcctgcggtcgccaaactaaggtgaggatcctcgccaagccttcggttacctttgtgaatacagtacacctagaatcgtagaggtcagtgcagttgtgggagagcgattggtcgtcgtcgcgagttgtcaccgcagagccgctccgctgcgtgagcaggatccgtgcgcagctgattcccttaagtgatagctctgtgagatttgttagaggatcctctacctagatctcgagttgagggtaggaatcagggctctggatcacgattgggtgttcctccggcgatgctccgccgtgtgggggttttgcgccgccgccgtcggtagcatttgggaagaaaggcgcgcgaccgtccgatgtccaaggaacggctctgattagatcgcgcttaccggttcgttcagtttacgtgtcgaccgtccgattgggatcggatggtggctactcgtgctgggactcattaaatcgggaccgtcggattgttatctgagggttcgcgctgcgcaggtggcgagatctaatctcgtgcgcccatctccgatcgggcgactcagatttaatgataccccttcgcgggtactttttgttaaagagcccccgaaaaaattactaatcaacctgccatccagagagtactattctctgtgtctcggagatcttacgcccgagacccctgcacttttcatattttagcgcccag

SEQ ID NO: 82446 - DNA, 1040 bp, Zea Mays
cccaggggctaactcgcaatttctcccaagactcagtctaacccttaagtggacggtggcttattttgaggaaaactgaggggttcgtttagaaaatatccgggcgaaagggtatctagggtttctgaccgttggatcatcaatctgcgccccagattagatcggcgcggccgtgaaacggtacgcgacgagaaccgttggatgcaaatacgacggggaggattttattattctggatttgattctatccgtccgatctagatcaacggatcaggccgaatgctacggaagggtatgcgatcatctaatctcagcccctgaattctagatctctggcccacggttcttcttctctccgccaaatccacgcgacggctgagcactgctcacccacggcggagcatcaccggcggacgcacaatccgacgcccggacgcccctaacctgaaattggccggtgctaaacctagacggggtgatggcgagcacggaagggagattcttacccgcgattgaaggagtagcgagctcgtccacggttcggggcgggtctgcgacatgaacagagcgctgttgagggattcccgacgctctggtgacccacatcgtttgggaggacaacacataggttcccggtgcccagaccatcatcccccacatgtcgtcgaggtcggggcggtggtccaatcggcgttcaaccgcggcggacccaagactggaccggcggccatggcgagatccgtctgtggcacacacaactctcttctccgctgaggcgctcggttttcgggtccgttgctggcacaggctaagggagaggcgatggcgccggtttatatacacgcgacaagggaatcctagggccaactactgcgcgcggattccgcggttctgttctcagcggtgagtccgacctgaggaggaagacgactgacgaagcggacccacatgtaagcgccacacaagaaaaagaaaaggaaagaacgtagagtgggctggcgttaaggaatttggcccgcggttaagactgtggacggcag

SEQ ID NO: 82447 - DNA, 450 bp, Zea Mays
attgtgagcctctatccgaaacgatcttcttcggtactcctcgtaaacacacaatccgagccatgtataactctaccaactgagatcccttttaagtagtcttgaccggaatgaagtgagccactttggtcagtctatccacaatcacccatatggaatcataccctttcggggtgcgaggcaacccgacaatgaaatctataccgatttcttcccacttccattcaggtatctttaacgggtgcaatagtccagttggtctttggtgtttagctttgactctttgacacacatcacacatagccacatgtgcaaccacatctcttttcagcccataccactagtacttctacttcaaatcctgatacatcttagttctaccaggatgaatagagtaattagaatcatgggcttccttcaatatagtctcatgaaggctgtcaatctcta

SEQ ID NO: 82448 - DNA, 397 bp, Zea Mays
gcgtctgcacctggtgctggatctccttcgtctcatctggatttatacagtacggggcgcggttcggaagagaagcaccggggatgagatcgatctgatgctcaatggcacggagcggaggaagacccggttgtaagtccgtaggaaaaacatcagcatactgctacaaaaggttaacaacagcagggggtatatccaaagacggtgcatcatcaagcggaacaagcatgcgcgagcatacaagtgcataacagggcatatgagcttcatggagatcatcaaaatcagcatgtgtagcaagtaaaacaggagagtgtaatttgatttcagatttaataggtgcggctgatgtcaatttgacttgttgtgcaattttagcagccctagtaattatttt

SEQ ID NO: 82449 - DNA, 522 bp, Zea Mays
tggacctgccgtggggaggccagatcaaccgccaccggattcgatgcggaagatgaaatcgccgttgatggatccactattgtgggtgggaggacggaggggaaaccgtgaggaggtgagggtggttaccgatagaaagtgcaaaaattatggaggtgggagagaaaaatgtggaaggctagggaaggggcgggtgatatgttttttgggtggcggttgtttttatggagtattggcgccaaattttacaagttaaattttcataataatgctgactaatttattattaggtatttgagtggatttccggtttaacaagaacaataatgatgatgaactcacgtgtgtggtggcaattgggtccaataatgtggtgcttaactttataattagtagcgttgtgagaggagggagtgatatatactggatgtcttggattgtgatgaacaagtaataaaataacataactccagttcctgcctctgtttccttccaccctctccataccgtgctccttcttcc

SEQ ID NO: 82450 - DNA, 625 bp, Zea Mays
ggggtccactactttcctccgctttctaactatcttcttcaagacttttggaggactgtcatcaaagttacgcttcttcgataatggcataaagtcatcatcctcctcagcagcctgccttgtattgtgtctaacagtttccgccggaacgcggggtatgtcgacactaaaacactcttgagcagactgaattataatccgttttggattagatggaggtcggtgtacgttcttcatgtatgatgttcctgccaaatcaaacaacacatatacataaaaacgtaaaggagcaataaaaagataagcgccaatcagttcagttcagttcatgaccatgcattccattactacataaaaaaagcatgcagctgcactactaagatctatgcatgttgtgcaaaatacgaacaaagggggccgggagaactgctagggcccactaggaagtgtttggaggtagggatagggagacgtgctgctgcgttcttcatatatgatgttctagccaaatcaaacaacacataaacatcaaaaacttaatggatcaataaaaattctgctcatatgcgacatccaattaatgtataagctggctatttcgtgcgtgctggccctaattgtacaa

SEQ ID NO: 82451 - DNA, 541 bp, Zea Mays
gaagctttttcagaagaagaaggagccttcgatagcgaagaaagcagctgggccgaaaaaatgaagaattattactgtgacagaagctatagaagagacaccacgaccagcttcggcttcaaaggcaccagctgttgagaacactacagctaccgaagctgcacctactgaagctgcaactgccgaagctgaaccgaccgaagatgcaaatctaggaagcacgctttctaacattgataagatacttctggacatggccgcagaagaagttgctgcagccgccgaagaaaccacggctacagtgtctgagaaggagaaagaaatagccgaaactgctttagaagaagaaatttttaactttcaaaacttaattgggcaagaattgacgaaggctgagaaagaagagttgagagaatacgccatatcctgcgggtatcaaccaggagcactactcttcggcggtgttgacgatgaaaggttaggctgcctccgagatcaaaccgaagcgaaggttatcggtactctatcaaagagtattggt

SEQ ID NO: 82452 - DNA, 1055 bp, Zea Mays
aacgcccctcgggagggaatggcgctaatcggagccgctactggcaatgcagacgtcgcctgctagctaagggataccatagaggcacgaaaggacacgagcgggaacaccattatcccatatgcgttcctagtgctagggtgtcatttgatgctaccggaattgggcttcgtcgagttcgtaagtttcaattctcccatcctccctttttctattttgtttttatctatcctttctaaattggtggtgtctcctttccctctcagcgatccaccatggtgctacgagagtgtcatgcccctctgctcaggagcatggcggagaagggggtcgctcgtgcggtcgtgccaaggcagagcaatagaggaggtacaagcaggattgtgtcatcaaaaagtggcaccaggcccagcgctagatgcggagggaccacgataacaagacccgacaccatagacaaggaggatgacgatgaggaacgcacagggtcgacacattcaggtgcaatccttgggggactgtaatatcccaaaaaatgttgaccaaaagttgatcttcggtgcgtggatgtgggaaaatggttgtgggacgttggaagttcggagtccgcgaatgtgaagatctcatttaaacgatatcatttgagtatttatttgtctgaatcggggcatggatggaggatttggttgtgagctgtcggtttcgcatcaagggcatcgaaggcatcgctccctcctcttctcaaaaaccctagccgcccctccccatccctcatagcagcagccgcccccctccttccctcatttttgcagcagccgccccccttcttccccattgcatgcagccgctcctctcctccccaaggtgttgcacccacctccctctaaaccctagcggccccctgttcctcctttggtgtgctgcattctccattggtggattggtgggaggaagaagaaagaaagaaaatgagtccaaggtgatattgttttccttttggtaattgtgctgcaatttcgttggattggatgtgggggttagattttgatctcgaa

SEQ ID NO: 82453 - DNA, 447 bp, Zea Mays
ataaagtgtgcaactttagtcaatctgtctacaataacccatatggaatcatatccatcacgtgtgtggggtaacccgactatgaaatccatactaatttcttcccatttccattcaggcacgttaagaggttgtagcaaacctgtgggtctttgatattctgccttaacttgctgacatacgtcacatagtgcaacatgagtagcaacatctcttttcaaaccataccaccaatatttttcctttaggtcctagtacatcttagtacttccagggtgaatagaataagtcgaatcatgagcttctctcaaaataagttgacgtagatgttcgacttctggtacacagattctctttttaaaccaaacggtgccttgttcatcttctgtgaaatctggggctttacctaaactaatcagagttttaatttccttaattttctcatcg

SEQ ID NO: 82454 - DNA, 315 bp, Zea Mays
cgtggtgtggccggactcgatctcccgcgctcatccccaaatctacggaccagatctaaaacacgcgaagatttcttcccaggctaatctggaccgcgcgttcatgaatcaacggccgaagccaccttccccaaccagccgacattgggcacggcggcgctcacctccatccacggcggagaccacgccggcgttccctgattcggcgcgcaggtgtaccaaactccgtggaagctctatgaaaacgatgtggagattcaaacaaacacgcagggtgtttccttacctacaatcgcgcagtggaatcagctgccc

SEQ ID NO: 82455 - DNA, 500 bp, Zea Mays
cctcagtataccacccgcagtccaacggagttgtggaacgcgcaaacgacaaaattttcacagctatcaagaagatgatgctcaacgataaaaaaggcaagtgggccgagttgttacctgaagcagtctgggcattaaacacgactgagtgcagggcgacagggttcacccctttccgcctcctatatggatcagaggccatggccccgcaagaaataaaacatgggtcccacggacagtcccgtcagctgtccccgacgtggacaaacttcgaaggacctcatcgatggtgaccgcgtcttcgccctacaggccctaaacagataccaggcccagacaaaagcatggcgcgaccacgcagtcatcccgaggaaattcagtgaaggagacctcgtactcgtccgaacagctcgaacagagtccaggggcaagctggagcccatgtgggagggccctttcatcgtcaagacgaaggcgtcccccagcgcatacaggctcgc

SEQ ID NO: 82456 - DNA, 556 bp, Zea Mays
ttcatcggtctgctatctaaaaacaccaaacccccttgctccttcaacctagtcaccatttcccgtttagccataagataacagtttttcttttctgctccttgcgagaagaagtttgctctgatagagttcattttctggtgtgcctctttcgaaagaagatagaagctcatgttatacatcgggaggctactcagactggagttagtcaatatcagcctctccccagaggacagatacttaccctttcatgggtcaagcctcttattcatttttgctagaatagggtccgaaatagcagggttcagatgatggtgagaaatggccacacacctaggttgcggcgtttgtgtgggagctgttggagagggacttgctgatcacgttcggtgagggcaattaaggtatcgtagacatgttctacacggcagccatgtgcgggagcgtggacgtgttcactctactgctcaaccacgccacgacttgccggaacggccaaggcagcgcaaggcgtagtagctccatgttctgtacactgagataatgagtcgagtcg

SEQ ID NO: 82457 - DNA, 678 bp, Zea Mays
aggcgctacagggtagcgacagttatgtgccttgttttcataattattgtcgttgtaacgcatgagcaccatactagttctcttttaattcttcaaagttcaaatttcaatcttaccaagttaaaacttaaaaataaatttcttaaatcagtgcacaaacccagaaccccaacatgatgcatagttttatatgtttacttaatatgtatttaaaaacaggaactatgttccacaaataaaatattaccataatttctcactttgttttctcgaggagtcaattagtaccttaatactatgcatagttttatgtacatacatttaagggtttacacctaggctagagcttggcgaattgtgatgttaggcattttgtgaaggagaataattctgggtaagtgagttttggtaactgactattccaaatatctcctcagtgctttacggtctgccctcctccaacttttactattgcaagacctttatacccatcaatcaacttcacaatatctttccactagaatgaaccctttctatgatctcctggtagcctaccattatgataatagtcatcccatatcagagtgacccatggtatatatgtcttgttaaataacttatccaaatgccacatgagaagagcatcatttcgcacttgtatcttcaaaattccaagcc

SEQ ID NO: 82458 - DNA, 440 bp, Zea Mays
ggtcggtgctgtcacatctgaggagggggcgccgagttgccgagtccttcatagtaagaccagaagagtcaaactcgacagaacaagaattatcagcagtaaaacgacgaatagaaagaagattgtggaccaacgaaggagcaacaagaacatcgggaatgcaaaaaaagccgggagggccggcggcacccacagatgtgacaggaagacacgtgccattcgccaccatgatagacgaaggaagagaggaagaaggagggcgaacagaggtgagtataccagggtcaggagtgatgtggtaggtagcaccagtgtccgtgatccacttgggacccattggcggagtcagagtgggagtctggaaggcagccagggcggccgcgtcccaaccaatcagcccggacgggggtgcggccggcggcgtggtccacgacgaagtg

SEQ ID NO: 82459 - DNA, 1286 bp, Zea Mays
tggtcgaggcccaacaaattagagttgcctggagctcaacagttcattaagcacacccaactcagggaaaggcccgatcgccccaaaagactagtccaatgggggaagggtgactctcccttttaaagtggcttccatctctcaagttaagcgaggtgggataattctgaggctcacacggttgccgtctgactacaattgggccaactgggccaattgtgtctttgccaacgggtaatattggaggatgttctcatcaaaggcccccaacattagtattcaagagttttatgaaggctggacttcgttttcccttgcataagatgctggtcgaagtgttgaagacatttgagatataccttcatcaacttactcctgaagctttgattaaagttggagttttcatttgggctacgagaagccaagggatggagccggatgccaaatgttttgcaatattcacgaattatcttactagacgaaggcagttgggaaagagcaatatcataataacttcggatgctagagctttgtgtaccggtctgatgtgaggtgtcctatgccaacgttccaaaaaaatggccgggctcatggatgaagcaatggttttatatatgtgaaaaatgatttgagtgagagagagaggatgtgaagggcgtaatccaacgcccatccgttcacgcttcggcatatggaggccttcgatcgcaagtggaaacgaagtacaagcatgcttgatggccatcaacaaagtgtgcacttacatcggcaccagagatttggttcaggagcatattgcttataaggtatgaccgcttgttaatgactgggagatgcggaaggaaactgctgccggctccaacgaaggtggcctggttaatctgaggtacacctatcgctgcagaagtcagattgacgagctgaatgatgactggcttgaagcttttgaggcaaccagtgatgagctactaggggcttacacgaaggtagaggacgaagctatgaacactaccttcggtgctcgaggcaaaaggagactaaacagatgtggttggattcatttatcctgattactgctttccggctcggaaacaaggaacaaagaggaaaatcgcaacttcgacctcttctggtgggccaaagccaaaaaaagttaaagttctgactcgccggccgaaggtgcagtctttggagaagattgttgcagtacctgcttcagagaagatggaaattgagtatgccgaagctgcctcattggcttcggagataatacctgatgtgaccgc

SEQ ID NO: 82460 - DNA, 705 bp, Zea Mays
ggacagggactgaccgaaaaagggctggccgcggcgaggtgttcttcgcggtggcggagacttgatttgggggaagtttgaaattctagagctcggttgaacgattacgggtgggagtgggtgctaaggcttcacgatgacatagcgcagctaccccggccatcaatttatagagggcatcgacggtggccgggaatttgaagaaggacgcgcggcggtcggaggagaggaagggcacttgagcacgtgaatccgtgtccatcgtcgtggcaagctcaccggcgatgatctaacggctgtaaagagtcacggtgacgcgacagaggtgctcggatacgtggcgtaaggctgagcgacagcgatcaccggagttcttatccaattccgccgcggtgaacgcatgtacggtggccggaatatttcatcggccggagtttatccacggcggggacccttgcttgatcccaagtgttatccactcggtccgcacaaatcacggcgagcaacgatcaacggcaacgagctaccggcgacgagcaggggggtgggatcttcttcagttcatcttttactgtaccatggcaatcgccattcagtcgactaacagaacatcttggagcatgatttactctcaattttcaatgacaactcattaaactttctgcagcaacattgtagagctataaactagctacaagtttgtca

SEQ ID NO: 82461 - DNA, 456 bp, Zea Mays
agtggaaaggaaaacacatgtgcccgggttgttaaaagggggtgggttagcttagattctactccttatgttatttattagtaaccctatttgctacattcacacttcgatccatttttccttagcttccattttcttcatattttatgatgcatgcatgttggaaggaacacttcctcacagatgggaggggtgcttctagggcatcctggctattctaagaatggcttatatggcctacttatatagccacctattttccccctattcctaaggcctttcgtcctaggtctagcattctagtcctgacgattccaacactgatttctagcaatttttatttttgaaaagttggtattcacgacttattgatttctctgtggtggtattcgctccaataccagctatggcagaaccgcacgaattattccgccttaagtgccaagtcacgcgttg

SEQ ID NO: 82462 - DNA, 386 bp, Zea Mays
cgataatccacacatagccgcttgcttttatcctttttctcaacaaacaatactggggaagcccatggggacctgctaggcctaatgaaacccttagccagcagatcatccaattgccgcttcaattcaacctgctcctttggggccattcgatacggggccttatgaatgggctgcgtacccagaatcagcttaatctcaaaagttgcatcgcgctccggaggaatgcctggaagctctgccggaaacacgtcagcaaagtcacacaccacccagatgtcctgcacccgcaaggcagcctcaccctccaccaccatggagaaaaagattcctgacttccttgaccggccatccgaaagcaattgcgccaacaaggataacgtgaa

SEQ ID NO: 82463 - DNA, 531 bp, Zea Mays
ggttgccatgtctagaagctccttcatggttcgcggactcttgcatccccgcttgtgcaccagagttttgctcgtggtacccaaaatgaacatgctaatgatgtcagcatcggcaaggtttggtagtttgttgcattgccacgagaagcgttgtatgtagtccctcaaggtctcatcgggtttctattagtagttcttgaggtctcatgggatgctagggtgaacgtacgtgccttggaagttccccacaaaaatctcttcaaggtcagcctggttttgaatgtagttaggcctcaagttttccagccacgtccgtgtcgagtctaccaggtatagggggaggttgtagattatgaagttgttgtgattcgctcctcccgcatggcacgcgagtcaataatcccctagccaaaggcaggggttcgactatcccaaatactttgcgatattggtgggtgccctatattgttgtggcaccggtgctcgaacgatacgacagatgaaggcctagagtcccggcagtggtgagct

SEQ ID NO: 82464 - DNA, 287 bp, Zea Mays
catgtctaagcacatcatagttaagaagattctttaggtacatcaaaagaaacatcattttaaggcataagtctcctaagccacgatgctaccaatgaaatgcaagaacacagctatgatcactatcaatggaacttcaagatattcaataaaattgcacagttccattttccatacctttgcctttatgagagcacttgttatcaccaattcagggctccttttgctcatgcacctcatagctcaaaagggcacgacatggatttgaaattcacacagtaccaaac

SEQ ID NO: 82465 - DNA, 859 bp, Zea Mays
aggttattaagagtttggtagcgtcctccatgcctttgtagaacgccatgctgatcatgtccatgccgctgctctccgcctcgtgcgtgctgccattcaccaacaaggaggatgcatcctgatggacgtgcatgctgttggaggttaccatgtcactgtaggagtagtactcgggagttggcaccgacgactgcaatgggtagggctggacagagatgtctgtagcgattgcatcagaggtggcattggcgcagaggatctgggcaaagggctgctcggcgctgaggagcatggggtggttgcggtaccggtggtacaagttgtcaacaacaatgtcttcctccatgagcatgtgtgagatgtaggagagatcatccttggcattgtcggcgtggggtgctgggggcaggtcaaggtagggggagggggagggggagggtggcgccgctgtctggggctgtgtctctgatgacaacagctctggggggatcctcatggtgtttctggctactgctgctgatagatgtatccttccttgcacaatataatgcaggcaaggggaagaggtgacgcactcatgcttggcattagagtcaggtgctcggtggttccaacatgcatggcctcgtatgtttgttggctttgtgcgtcatctgtgatttgtgtccctttcagtactttggcagtaccaccatgctgatcgatgatcccgtccaattttgttgcttgctccgtttgtccttaataattatcattgagtgcctaatgtgaaggctatgccatcctttgttatgaatgcccatcaatgtaaaagtctaaggtgaggctccccggttggataatataaacactgtcatgc

SEQ ID NO: 82466 - DNA, 631 bp, Zea Mays
agtttttttgtggggtgggtgaccacacacttacagtttcttggtgtctgcgcagattctgatgattgggcctgcacagattctgatgattgggcctgcacagggtgattttggattcctggataaaggaaaaatattctagatgctgctgtttgtgttacacccttagcttgctggagttcgtccttctcgagtgacacagacgatttttatgatttggaatcgtcggatagcgaagggggcttggaattcttcgcggattgcgtctacgacagaggcttaaactagctatgggccttcgaggcggctccgtttgttaggggtaaacaaaagcgaacgagggttgctgcttcaaagccgatgggaacttcatcagaagtatctgcgcgtaggtgtgggggtggttgtcctaggcgaaagcgcgatagttttcttgatcccgttccaaggattgcattgcaggagttattagtaggggtcttcgcgtgttggcgaaggcgatgtcggtaaattagaaatgggtcctcatcatgttgtgttgatgggggcattgagctgggttcctgctctttgccaagttgatgagtctaagctgtttggggtagttcaccttgtttatcttcactagcac

SEQ ID NO: 82467 - DNA, 596 bp, Zea Mays
ggcatcgaactccgatggaagccttggcccgttacacaaatctcggatggttacaacaacctgtagtttctgttcatactaatctacgaagagcttgcgtccgttacgagagagagggataaggagattctgaccgatatggcccacacgcagcgacgttgaacgctggtgtacaaatacgtgctgacatcatgcttgcatcatgcttacatcagcgcggctggaaataataaaaaaacaaaagccaacgtgggctcacacgatatggaaatgggctgccaaagctagaaagcaattgggctggatggaggtgaggcttcacctattctattttttttttatttcggttttttttatttcagttccaaattcaaatatgagtttagatttttaaatataaattaagtgcacaaaaaaactctagcatgaagtgcaaagtaaaattttatttattatcttactttatccatcaatccactatttttcaatatgaaaactcgtatgcataaaatatactattctagaaaacaatttctaatacatcatattaatatcttagtggatatttataaattttacatcaccctaaataaatc

SEQ ID NO: 82468 - DNA, 477 bp, Zea Mays
taccacattaagttctatgcacgtcagcctgcccagccccaatggcatcatcataccaggaacatctcgctatgggcctaggccagcaaacaggatggagaacatatctggtcggagatacgcgcgacggccgaggagaaggagatcttagcccgctgttgcactcatagctccatggtgtatatatttaatactagaacacagggcccacctgtcgaggtccaattcccttgtaacatgccatccttggattataaaagggatgatacatacgatacaggggacaagctcatgggaaatcttttccttacattattaagcataaaaaaggaaaggataatgtgattgttgatgctttgtctagacgttatactatattatcccaacttaatcataaaatctttggtttggagactataaagggattatatgatgatgatttcgacttcaaatatgcttttgaaaattgcagagagg

SEQ ID NO: 82469 - DNA, 1075 bp, Zea Mays
gtgcatgcctatctgtcggattaatatgacactacagccgtcgtgctaggtcgagctttttagagttggggcaatgacgacctaacataccctaaccatttaaccatcgacacatgtctctgctaacaagcttgacactcaaacagtctccaatggtatatgggtttgtttgttttggctttctggttgattctggccgttagaatcatcttcaggcgccaaatgcttcggttcctagaccgcttccgtgagaatcgctgctgtgaaaaatcactcaaattaacgtgaatgcagaatccaccgagtcgtcacaacaagaggaatatgtcgcttcctaaaccctaaacaacgtgttctctaaggtttcctctaaatatagaggatacttattcatcctctctatatagataccctctcttctctcatctatccacttttctacttagacattagattaagcaaaactaagatatatataaaatatttaagaatacgacaaatacgtacatacaaaatctagatgttctaatatagatctttgatgtattgaggacgagatatagaagacgttgttgaagagaaataaaatatagaacagaaaaaacttttgaaaaaagtctataaaggacatacataaaagaaggatagagagaatatggttggagagatgcccggtcaccaggttggctacaacttgtctggcgaggaatgggacaggaactcggagccgcggcaggatcttgccctactagtccctgtatcaatgatgatgcgatgcccatccatccatccatcgaccttgtctgggattcttaatccgcgaataccggttaattaacccaggtgtctggtggtcagatctgatcaattccattcacgtcacaccccctgattaataattaagaaaaggatggcattcttaattgcctcgcaacgcaagtcgccacacgcacacctaatcccggatccggggacgaaatgaccgggcaacatcagagtagacacaccagaccgagagagcaaccgcagagcacgagtccactccaccccgccatcaaggtgacctgggctgggc

SEQ ID NO: 82470 - DNA, 464 bp, Zea Mays
tgcatatttagacaatgatttttcaatgtttaatattggatttgaattttaaagttgcatttgaaattgaaatttaaaataaaacaaaaaatttaaaaagaaaaacttctatatgtgctcacgggccactcgaccgaacccacccccgcgaaaagccgtcaccctcgcggaatcgtggccacacgtgcatattctcacaactaagtttgatgtgtggggcctcgtcatcggagccattgtcaaccttgggactggcttcagactcgatcagtagtttcaggtcagactcttgcccgcctgaccatctttcccttgccactcggactctctgctgccgcaaatgcacgaatcacattcacttctccatgaacctcttaagtccatcctagtcagagatgccagagtccacccgaatttcattcccttattgccttcgttgttgttttcctatcctaggccccccc

SEQ ID NO: 82471 - DNA, 357 bp, Zea Mays
ttaagatcgtcatatgaggagagcagcaagttgttagaatctaagaaggaagatgtagttaaacttgttacagacaaggaaacgaatgacaacataattttgcaactcaggcaagaacttgaggcaacaaaaaagttgcatgaggcagagactcagcaattagagaccaaagctgccaaagtaaataaggagtttgaacagaggataaaagaaatagaactcatgttagaagattctacaaagaggagaagagaacttgaggaatctactgaatctagaatccaattttggaagcagaaggaaatagtggtaaacaaatttgtgggtttgcaagtaaagaatgctcaggtattggtc

SEQ ID NO: 82472 - DNA, 687 bp, Zea Mays
acagagccaaatggacagaaacattgatgtgccgattttaataaatctatggaatgaacgcaacaaacaagacccggtgaagtatcatttttgcaaactaaaattcttatccgataatattacatggaaagatggacgtgctatagagcaccgcgcgccgctccgaccttgatattcttgctcccttcctccgtgatgtccgagccttgttcacacatacggaaataaaccgagaatttgcgggcaaatcctaggagttcgtttgtgttaatacgaagagaacaatttaaaaagaaatcgagcacgaacgaacgcgcgcaacggacgagaactgttgccacgccacatcacgtgcagtgcatgggggcgtaggtgtggcatactggcacgctggctataccacgcagcctagcctcgctaccaggagactggcggcctgtagtatgctttctgactgtcatcttcacacactcctcgtcctcgtcctcatccaaaatgtctccctctatagtgaatgtgtcaaggcgatcatccggaccgactgtcgggaatctcacctcccaacctgatttttgacgaaattcattgcaaaaattgccctctctcggtaagaataaccagttaaccactactggtagaagcaaaagaagcaaggaaaccgaatcacagacagagactggttcgcat

SEQ ID NO: 82473 - DNA, 544 bp, Zea Mays
gtcaatgcaacaaagttgtagagccattgtagaagaacaactttactacaggtattaagtcttggtgccatgaggaatttggagataatatgatccaaagatgggctgtcaggcgatttttaactgaaattgggcactgttcatcgaacttcagaaagatctcaccggcgataagaacgccaccacggttggggatgggtttgcggccacggtaaagatcatccgcgacgtggcgttaaaatgttgcggtggcactgcccggttaatccgcggtcactgaaccatcgccatggctctgcccgcgcgggtcagctcgccagcgcggttacagctccacgattctcatccaattctggccatcgatctataaattgagctcggatcctgcttcttcaccacatcacgcacacaagcacttgagcaatcgactcaatttcaccagaagaactcacatagtccacaaaaccattttgccctgctcttcgcgctgccgtgaagaactcctctgtggctagcactcctcgggtcagtaactccccgattg

SEQ ID NO: 82474 - DNA, 805 bp, Zea Mays
gtttcagtgcatatttgacttgattatgttttcagcacctgcaactgcatctgcatgcattgggacgtcataggttgtgagcgacccaacgttggcggcgcagggacgtacatgagcgatggcctcgtagatacagtagtggtggggcctactcatttctttttggaaatatattgggagtcgttggagacagttcatttttttggaattaagagatttagggatatcctaatttccttgtattgagagatttaattttgggatctcttcgagatgctctaaggacaacacatacatacatcaggcatattcgttctaaggacaatacatatatcaatcgaagttgctccccttccctgaactccgtgattagatcaccgggtcgccggctaccaccaccgtgacgagttaaccaccatccgtcgatgtcatcattccattgttctagcttgcgcaccccgcctgcttgctttgtctgattctggtacgaaacccctcctccttcctctgggccgttttctccttgcgttgtcgttcatgttttttcaagcatgtgagtagttgcagccatggggccatggcgggggtgggtgtccggggtcgaggagttagatgatccatggagttcgtctcatttggttggtgatttgttggcccggacccatttgggtgtgtctcaggatatggtcatgtcgcgctcggccagattggtggtgatgagtagtttggagccgatcgatgtgcattctttttcccacctcgccgcatttgtctgatcgatttggtcgctccctccttcatcgcg

SEQ ID NO: 82475 - DNA, 534 bp, Zea Mays
gagataacgactaaaacaggagaaaagtgcacacggacagtgttcgagctttcctgcgagcgagtgtccggggtgcagtggtcgtcgttccaaacagtcacgcatgatgctctcagggcgactagctacatccacatgtacatatatatggctactgaaaaatcaaaaggcgaagagaagaaaagacgacaaacggacagaacagtcaaatgaggatatatgtctctgagaatcgcttagctgagccactatatgttttttgtgataatatgctccaccaccaccactactagcagctggtaagtcgtgctggcgattgacttacgaccctcggcagcttgcgtgcgcctcgccgacgtacgtatgcagcaggtcgtccggcgcacagaacagtacgtgcgtgccgactgccgaattgccgacctcacagttcacaccggggctgagacctgagagagatgagagtcggcgtagactcgacgtctgttagggtctgttcggttgcttccgaatgacgctatagagctattcccg

SEQ ID NO: 82476 - DNA, 1311 bp, Zea Mays
gatcgggggttacatcttgcagatgcgcttgcacgcacccaagattttagtcattaataagagacgagcaaacctggactcacgctcagcgcgtgacaaccatcgcaggaagggtacacccataatctgctggagtaccaagtgaacccctaagcaatccacatggattactcggggtctcaggggatacatctagcagaagcgcttgcacacacccaagaatttggtccgcagcaaaaacccatgtgcaactctaaggtgttacatgaaagctcggggcggctgtcgagtactcgggaaccaagtacaataaataggccctttaaaactgaccaactccgatgaccaactctgtgaggcggactgactgaccaactctccgatgaccaactccgatgaccaactctccggtgaccaactctaacgaacaactccgatgaacaactctccaatgaccaacttcaatgacccactctgatgaccttcttcgatgaccaactccaccaaccaactctgtgaggcgaaccagctaacaactccccgatgaccaactatctgccaatctgctccgcccgaccaactcaccgtcgattaacctgtgcaacgcaaatatctggtctagtgctactgatccacgtcagctatgaccgtatgcatcaccatcacgctacgttcggacatatgcacagcacaccgaatgggcaccggggtctctatagtgacccgtacattagaaggacggaacaacacaccatactgagtgtatgcccatgtatgctgacaggtgacaaagggctcatgacgacaggagaagccatgtcacgtgcgaccacaccatgagaatgatccatgggacccgccacataccactacaaagacgttagcgatggactcgctacaggagccagagtaacagacaacgccataccgggagtatggctacacatgaccctatgtaagacccaccacgacaacccgggggagccaatatctctctttactagaaaacagatctcctctataaggtcctacccttgagatataaaaggtaggcccccctccttcttcccacatgagcacatcagttgtaacacgccctcagcaatactaccatcagcactacactggactaggacgcaagcctgaaccaatataacccatcgtctcaagaccatccccttgagtcccacgcagctcatcattcggagtgagtccatgctaacgtccccttcgaacacaaatctgaccatagcttctgaaaccacgataactgagttctctcttttaatttcattccgcgtttgaggtctg

SEQ ID NO: 82477 - DNA, 482 bp, Zea Mays
atccagccagctaattagcttcaaccctcacatttgtttttgtcctgcctccaagcttggcttctctttccacataatgcattctaggtcgtgtccaaagcaccaatttataaatctacgtccttccagatatttgtcttaaaaatcaactttcatacccttatagtccgggccactctgcccgtcagcttacgcacgccaggctagctcttcccctaaaatgtaattcatttcgagttttccataagacccataggattgttgcacaaacacgcaatggactcaaaattatacccaacactccatccaaagagacaattcaagtccccacaaatatttagctatacaacaatcaaacattaagtgacaaattgattcatttctatgcaaagcagacaacatgtatcaactaatggttttttcttattcaagttacctctaactagtaccttgcgcgcgccttggcgtgccctgttgtggcg

SEQ ID NO: 82478 - DNA, 449 bp, Zea Mays
gatgattaacactaggttaagaccttactcctcaagtttggtgtcttttttctcaaactaaaccacatgtgataatagaccacaggtgtatgtgttgagtaaaggcctgagtaacacctggggtgttacagcaaatagctcttgggaatcttcagacagaggtcatttccctaaggaacgaagccctcaaaaaggataagatacagctttccttggtggacagactgaaagctagcgaagtcaagcttaatgcacaaaccgaaacacaaaaagctgaagtcgaagatttgatgaaaaagcttgcagaaatgaatgaaaattttgaagtcgcaaaggcgaagcaggaaataagtgaaatggaaagatcaagggtgcaaaagaatgttgaagagctttggggttccaaggagagatgctacaaaacatccttggaatgcaccaagaagcta

SEQ ID NO: 82479 - DNA, 565 bp, Zea Mays
aacgacgtcgttggattgtgggtggtacactgaggagaaggcaagcttggtgccgatggagaagcagaagtccctgaagtcttggctgtcgaattgtttaccattgtcaactgtgagctcggacgggactccgaatcggcagacaatgttttgccagaagaatttctgggcggtcttcgctgttatcgtggatactgctcttgcctcgatccacttggtgaaatactcgatggcgacgaaggtgaacttgaggttcccttgagccgtgggaagcggcccgacaatgtccaggccctagtgctgaagaggccatgtgtgggcgatgagttttgtgaactgcgaagggtttcccaagcgtggagaaaatttctggcaggcttcgcaggatctcgtcacccgattcgctgtgcaaatcatagcgggccagtagaagccttgtcggatcaccttggcggctagggccctaggccctgcgtgagagccgcaagttctgctgtggacttcgcgcaggatctggacgccttcggtctcggtgacgtatttaagcatgggttgactgacctcc

SEQ ID NO: 82480 - DNA, 747 bp, Zea Mays
cgcgccccatgcccgccagaaccaacgagggcaagcgacgcctcaagaggcgcgctgtcgccctcaggcgccacatcaagagccacgttgccgccatcaggcaaaagggagtgggaatcacgcattcgacactcgtggccatggatggtcactaaccaacctccatcattgacgacctcaaagatgattcaagccacgactcgacattagagcccaacgacgacgatgctgaggcagtcggacatgcttattttgtggtgacaccaccatgagatgggggcgacgctagggacgaagatgctcccaaccaagaagatgagtaccagcgccagcgtcaggcgcgaatcctcgcccgcgaggagagactccgatagaagcaagaggagctcgatgcactacgtagactcaacggagtccatgacgacatagagcgacaccgccttgaggtcgaaaaatgacccgagcgcgacaggtccacgaccaacttgcctagggaagcgatgactctaatacttccttaactctgggcataacatagctagaacgaccatggtggtccggtccattcctaagctgaccgagtcggaggcaaggacggtgtcccaaaacctctacaacttggtggagagagctgtcgtacaacaagctgagatcgactgccacgctgccgccggtacggacggtctcggcacccattgaactcggtttaaaattttatcttctcgtgtgcatccttgattgtttttt

SEQ ID NO: 82481 - DNA, 792 bp, Zea Mays
cacaatcctaattgcctcaattggattggactccttgtcatctactgataaatggtgacagactccttcttctagttcaggtaagtacagcttagttactacttcctttccagatggggacaccaagttaactgttcttttgtcacaactgacagttgcttgatttctatgtagccaattcatccctaggatgacatctaacccttgagttcccattactactaggctagcggggaagtctatctcccttatttcaatccttagattcggacaaatcctatcgactaaacttttcccccaactgaattaactcttaaaggtgggatcattagttctatggggatgttatgtgattctacccaagatgtagaaacaaaagaatgcgtggcaccagtatcaaatagtacttttgctggataggattcgactggaaacatacctactgccacgtcctgagcatcctggattgcttcggcctccaggtgattcacctttccacggttgtaggcctgaccatggcctcctggtgcttgctgtggcgctccttgtcttgctagggcattgactgttggcggctgctgagctgctttcttgggacagttctttgcccagtggttttgttctccacagtagaagcatgcacgacctcctacttgtgttggggctgcttggccattctggttgggtgttggggcaagaagacgagctgcatggttgttctgatgctggtactgatttcctccatacttggtgttctgacggtactactgctgctgctgctgaggaaactgc

SEQ ID NO: 82482 - DNA, 332 bp, Zea Mays
cccgccccccgagccgatgcagctgctgtcgtctggaggtcatgcaggaagcctcgatcccagcaatggaaagcgaagcctctctctgcatggaatatggacgtactccgtacgcctcaaaagatggcgcggcggccagcctgcattgcattgcatatgcctcgggtcgggagaggaagctgagcgaaatgcatgcatgcatgggcagcaggaacgaagcaggagtgtaggcaaggtcgttctctgcgtgtgtgcagcagcttgcattgcattgcattgcagcagaaacgacaatggataaaagtccatcaagaataatgcacgcatatatt

SEQ ID NO: 82483 - DNA, 1500 bp, Zea Mays
cggaagcaccctcgggggctgggttgcagctcgcactacccacctgagccagatcattgttgacaacaccctcgggggctgggtaatcactggcgccatccctggggaccgagttctctgcaacagccacctctaaggctgaaggattctcagttacctccatgggaatggagcaacctagaccagcttcttgactctgaagaccgcactccaaggtcgaggaggctctagacgctgctcgggataactctaaccccacatccggaatgtcagtgcaaacgtccatcataccaccatctgttggctcggacaacagatcttcaggaaccatatcctcgagagcctgatcaaaatttgctatggacaactcttgcagatcaacgagcgcagacaaggttggagaaggaatatcactactccccccactaactaggtagcgtcgactgtttttccgaattaaggggatttcctcctcttcttcctcatcctcgtcaacaatacgaacaacacacccattgggaacagctctggccggattgcacccattgggatcagcatcgtcaaggtcacacccattggggtcagtgtcagcagggtcacacccattgggttcagctccagtaaaaagttccactggcacttcctcagcagcaggagcagaagggccggcatcctgattcaaacacgacactcgccaaagcctcctctttttcttcttcttcccctcggcaggagcagttggatgactggccgggcgaaggcgctttgggcgagcaccatcagatttttgagcagtcaaggtcttttcaggctcagggacagttgcaatagctatggtttcagcagggacagagtcagatgaatcctcagccaacatgtccagcatagcacttttctacatcactcgggtttataggcatttcaaagtgaacttgcctttcatcgttggggagatcaccaagtgaagcaaccagagcctcaacttctttgggagagggtcacactctaagacccaggccactgtcgctagcaggaggattggacacaaaactgaaaaaagtcttagaaggtggcagattctaggcagaatatgcaacaggagcaccaatattcgacactttgcctctaaggatcatctccagccggcttaccaaatccatagcaggaatcctcctgttggtaacccgggttgagtcagtgacaccactatacaaataagtcgggtatgctctgtccttcagtggctgaatgttattaaagacaaagtctgcaactacagcattggtagtcagacctctctccttcaacaaatcaacttcagcaagcagaaccctggcctcagctctctccaagtctgtaggggtttcagtccaacttggagcacgaacatccggttgtctccctgaccgagggggcagggacttgccatgattctccacaataaaccactccaagcgccatcctttgatgatgtccttgagtgggatgtcgaggtactct

SEQ ID NO: 82484 - DNA, 372 bp, Zea Mays
gctggaccgaaaatcagtgaacaccgaagacgacagacctttggtgaagacgtcagcatactgtgaagttgtcggtacatgtaggacacgaacattgccaagagcaacatgttcccgaacgaaatgaatgtccatctctacatgtttggtgcgctggtgctgaatggggttggaggacatgtagacaaaactgatgtggtcacagtataccaaggtcgtcttcggcagaggagcatgcaattcagtcaagagccgtcgaagccaggttgcctcaccagcgacattagcaacaacacggtattcggcttcagcactggagcgagaaatcgtgttctggcgcttggaagaccaagagaccaggttgtcgccgaa

SEQ ID NO: 82485 - DNA, 390 bp, Zea Mays
gctgatacagatgcatggaaggcactagatgcttttgattccagctttgctgatgaagtgtggaatgtccgcttcggtttggcaacagatggtttctcgcctttcaatctaactgcaacgtcctactcatgttggtccgtctttgctgttccatacaaccttccaccagctctttgcatgaaatatgaatttattttcttttgtcttgtaatacctggtccggatcatcctggaacaaagattgatgtgatgatgagacccctgattgaagaattgaaaattttgtgggaaggagtcgaggcgtacgattgttacaagaaacagaagttcaacctgagagctgcgtttttgtggtctattcacaattttatggcttatggtatctttgct

SEQ ID NO: 82486 - DNA, 853 bp, Zea Mays
ttgaaattaccaattgaaatcaaattgaaatttcatgaagcactaagaagcataagtgataattgaagttattcaatgatcatacaacagatgcgatcaaaagaacaacataggcattagattttcaattaagctcaagaataggagaatccaaaaaatatgctactttagtattaaaagctacaatccttgataaaggagacattaatttaccaagttggattgaaatgaagtagcatgccttatgagaaacttgttctcatacatgagacaatatgatttctaagttagcgtgctagtctcaaaataatcaagatatagaaataggctccccctagagatatgcaccaagaatgaaagaattgggtggatgcactcattttttaaaggcaaatagggagaagcactatttatctttgatcaaggcttataagatctgcaataaacaacttaagccttgtattctcacaatgaaaaagatttagaatactcacaaccacaccattgatgcttttgacaaacttattgtccaagtaggtgttgtttcacttaaagtctttctctttcatgtgagtgtcctccctttgtagttgtttctttttccttccaaacttattgaatatactcaagaaagatgttaatagcacaagggagtagatgatgaatgatggtttctttagatagaagaaaagagcaattcatcatccataagtcacgtagacatgaagtaattttcttaacattggtgcacatcaaaagaaatatgcacctttaaacattttgaccaatcatagaaagtttacttcttcatattgaattttaacatcataacttagaagcatatcaatatgaa

SEQ ID NO: 82487 - DNA, 403 bp, Zea Mays
caaaggatggggcgatttggtcttgatggttgccttgtggtaatttttgaattattgagtattcatatactactcatgagatgttatatgattagttaatgttgatgtgatgctcattattaaaatattcttttgcataatttataacatccattgctcaacttgatatataagacaaaaaatattttcacatatatatactatcccattattccatgatttgtgctcctggatcaagaatattattctcctaaactgagaattttgttcttgttaagactaaatattgtttgatgaacctagaacatcatctctatttggtaaaaatattctcttcttatgagataaatgctcgacaataaaattttatcttgatagatgtatatgacatcttgttttgaaa

SEQ ID NO: 82488 - DNA, 550 bp, Zea Mays
cctggtgccttggttgggcgcttcatcggtgtagcatcgccatggcggtgagcgagagaaaccgagagaatgctaccgtgggcagggcctcatcggtgtgggccattccaccgacagggcagctgcggagccatagaactcgtcgtcaaccgtggcgtgccagggaagcgaatgcagcatcatcggaattgtccccaccgtgggatgccggcggcgccgccctgattcggtcaacaggggtgtcgcgggttagggacgacgttgtgaccgtccgatttatgtcgtacggtggagattagatagggagataacttttcggtggattggatctggaccatccatccagatcggacgggtgaaaagcaatcgcatgactttaaaatcgggggcgtcgatttgtgatcggacgatctagagcgcttgctggtttgtaatggttaagatttaatctgggccatccgcgcctgatcgggcggccaggatcaaaccgtaccccttcgcgggtcacttttgttaaagagccctcggactttagtgaaatcaacccgcc

SEQ ID NO: 82489 - DNA, 351 bp, Zea Mays
aaataaggtgataaagatgtgcaaagtgcaatggagtcaccatggagaagatgaagcaacatgggaaagagaagaagagcttcgcatagattttccccatctgttccctaatctctcctaaatctcgaggacgagattcttgttaagggggtaggattcgtaatacccaacttgtaagagaatactaaaggaattttttccttacgtatatgtgtgtgttgtatctattcaccatctcatgtgaagaccacatttaaaaaacaaataatcaataaaagacatgtcaataagtcatgcatcatgctggattttattttgtgtgcattttgtgacaatataaaaatataaaaa

SEQ ID NO: 82490 - DNA, 670 bp, Zea Mays
tgcagccctatgtccatgaggtggtatggcatggttataatgtgttgctggtggggctccatagtgttgctgcgatgagtgtgggaactgttgtgcagctcttggttctgcgtacgcatacccagacggtcaggcgtaaggggtcggatggtccgcgaccgggccaaatggtccgaaggtgtgtccggactgtcgagtcgtatatggtgctgcctcggtagtctcatacccggaccgtccgtcgtaaagggctagacagtttgtgatcgggccgaatggtccagggctgtacccggacggttcagtcatatatggcgtgacttgggcggtctgcgcgtggactcgtgtagagtcggacggtccgacttaatacgccgaccgattcatgccatatccagacggtccgacgtaagataccggatgatccgcaacatatccaaacgatccggcataaggtaccggacggtccatgacatatccagacggtccggcataatgtaccggacggtctgtgatggggccgaattgttcggggttgtacccagatgatccggccatgcaaggtgcaacctaagtgctctatgtgcggggctacgtcgggttggacggtccggcgaaatacgtcggacgatccgcgatataatcgggctgtctgagatgatgctcggac

SEQ ID NO: 82491 - DNA, 783 bp, Zea Mays
caaaaatgacatcaacaagggattcaattcgtgggttcttctctcccaccagggatccctctgccattgtgggggcgaagcatgaccaccttcgctcgtaccctttgcagtcaataacaagctggtcagcactggtccgagagggcttagagtggaaaagcaaaggttaagtcattacctcaagaattcgggtgcatcctagggacgaagtagaagcgcttcctttcccttgatcttgcacagttgttttcttagcttctgccttggtaattttagctttttcctccttaaaggagtggccctgttcgaaggtgactcttcgtcgctgtcaatttcagcatcctttgtttcttcatcaccaaactcactttgcttttctttcttagaggccttcacacttctcttcccattttctctagcttcggtgttgtgcatcagtttggaataatctggatatttgaatcccatagcatccatgactctattcaatcttcttttccctcaggtcccaaaggtagaagtcatagctttgtcctccttaataagataatttccaatgatctcattgtattttgtttctatgactttcagccaccccgaagaaggagctcagaatgaagcttgctccttgaattcaaaagctaatgttacgagctcattttctttagatttaaccaccttcgacaatttccacccagtgcgtgtgggaaaatttttgtatgcaaggaattcttagattagatcatgagacccgatcttcttagcaacaacattgaaagcttt

SEQ ID NO: 82492 - DNA, 675 bp, Zea Mays
cttttatgaattttcttgccattgttacattctcactcttcgttttccagggcttaattctaagcaagactttgaaggcccaaaaggatgcagaggatgagagctgccgtatagctcttgggaatatgcgctcagaagttatcacgctaagaaacaaagctcttgaaaaagacaaaatattactctccttagtagataaactgaaatctaacgaggccaagcttgttgcccaagccgaagctcacaaagccgaagtaccagagctaaagaggaaggttgttgaagcaactgaaaaatttgaagttgaagtagtgaagcatgagatgtgcgaaatcaaaagatcaagagcgcagaagaatgtcgatgagcttcgtactgccaaagaaaaatgttatgagatatctacggaatgcgcaaaaaatctaaagagcagctttgctaaagttggagccttctcctcggagcaaaaattcatctgcggtgacccagatggaattattcaatggatcggtggcgaggctgaagcttttgaagagattctcagtgacagaggggatttttgcgccttcgtcggtgcccgtggggctgcatcaattctggaaaaggtcgactgtgatcatgcgaaggctgttgttgagccagagtttgctctctcagccgacgacataaaaaatc

SEQ ID NO: 82493 - DNA, 795 bp, Zea Mays
ccgccggcgtattgtctcttttttcaaccatgttaaaaagataggattgaagtaggttttggaggttgtccgataaaagtactaatctctctagttctaaaatgtaaattatatatatatatatatatatggttaaactttttaaacatcgaccaccaatatactacgttttcatacgaggttaaattctctagactactatgggacaagatccagatattccagaacaacccgattcactattatgtattttaatcagtatagagaaaacaaaaatcaaagtggcgtgttggggatctactttgtcgaagattctcaaatcatctttacctttaacttgagaatgtatgtttcaggtgctatatgaaggacagacgaggtcggccttcagtcgaagcagcatgtaaagggtttcgcctcgaacacacacctgacgaagatgtgcaccgaagccaccaccctcggcatcaggaaaagcttcacacgtgaaccaatggaaagggaaagcgttgaagacttgggcggcaagcaagaaagagaaaaatacgatgacacccctgcaatatttggaaaccatatttgttgatatttgaaaaccatatttgtagacatcgtggacatgtatgtaagtccacacgaagttatatccctccgtcataaataggtgaacagtgacatgcataaagtaccttttggaggtccataagcttggtttctcttagccttcgaagtaccttcgagatgtctcgcgtgtgaagccgaaggtacgtttctatgtttattatatatgaagaa

SEQ ID NO: 82494 - DNA, 775 bp, Zea Mays
gactggtacccctcgtgccgggcccagccgggcacggcccgttggacatgtatagattagatgtggttaaacccattaaagtaaaaaaaatcataattctttttcaatccctttgtatccatgaggtataggaatgaccaaacaaggcttaatcagtccacaaaccttaccatcacgccgtctaggtgtcttggaaaggtagtggaggtagttttaaacgaactagggctagctaggctctggtcgacatgtaaaaaaaacccatagatgtgggtctggcagcctgatgagattgtgcatgcccactggcatacacggatttgtctgcaagcgaggcaatgaaaggatacggggaggagaaaagatctcatggatggtgcatcggtcgtttataagaaataagcatcagcaaaggtttaactgctactgttgtccaacttgctctgcagcggctctcctgtctcgtctcatatgtcgtatcacatcttaaattttaaactccactatacaaacagtgctgtctaccgtccatatacacgatctgctagagacaggcttagacggcgcagcgacacatcagaacttggctgccgttaggccgtgcagtctgaatatcttgcttctgcattaattactacactacagcagcactgtgctgcagtcttctatttgtcaatggatgcagcagccacctgttccttttgaagggagcacttgaatcgatctgattgcatttgtcaacatgtcacccagcagtctttttgcctctgtcttt

SEQ ID NO: 82495 - DNA, 345 bp, Zea Mays
agaaaattaaagcactacgatctgatcgtggaggtgaatatttgagccatgagtttagcaatcatctaaagagttgtggaattgttctgcaacttacgccgcctggaacgcctagaggaatggcatgtgtgaacgacgtaatcgaactttatttgatatggttcgatcaatgatgagctagtcgaacctacctttgtcgttttggggatatgctatagaaatagtagctttcacactaaatagggtaccatctaagactgtagttaagacaccatatgagatgtggactgggaaaagcccagtttgtcttttctgaagatttggggttgttatgttaagtgactg

SEQ ID NO: 82496 - DNA, 654 bp, Zea Mays
ttttattctagtatggtctatacttatctcaatctattagctctgatctcactcttgtgcttgcgacatctttgtaggtgcccctcaccataaccttcttgtttttttgggattctttcctcttcgtcattaaattgctaccatctggcgagctctagtcctttggtattgacatgcttgtatccctttaatgctcttgtttcaaacacttgcctctgaatttctactgcctacttagacatttcagtttatatgtccttcctatcttttgagaccctttcttcttctgttgttaagtcgctatctttcggcaatatcttgtgttttggtattggtatgctcatctccttgaaaccttacatgctctcatatttttatatgcttacttttatatccaatgccaatttaaaacattttagtttacatgcccttgaccacccttgtttctcgatgatccatgagcattcattttatttcgcacatccttggtgatctcgtaaattcttttgtaatttcctttggtaatgaatttttacttcaacccttctgttggaatcatacctatctcacccttgattattttctccacttcgccacttcgtgagtcttgccttaactctatccttggttatgcttctcacgactgtcatcttt

SEQ ID NO: 82497 - DNA, 616 bp, Zea Mays
tagagctcaaggattggagtctcaactcccattccatgtttcttagcacatacacttgataaatggtcggttggggtggaatttatagcccccatatccaaaattcgttgggaaaaagcatagttttctgcgtagcaccgggcatggtggcacaccagacacgtctagtaagttcgatgtcagctagccattgcgaactagacgttgtcgatcattgaagcctaggtatctggtgctaacaccggtgtcacaaccgacatctctagctcagttgcatttgcaacctttgtaagtaccatatacaggtgcgggattcaatgagctaccagacatgtctaatgcattatggccacccacgtatacgatgtagggcttactaggtgctctatctgttgtcgcatccggtgcacatgtctgatgcacacatacacatccagagtactaagtcttcagcccaatctttagtacaagaacattacctatttggtgccctatctggtgcactaccagacacgtctagtgctcctttatagtttgttttcttcaattccttgtgtttcattgtttggccttttttgtcttgtgccttggactcttgcatgatctttgataggtc

SEQ ID NO: 82498 - DNA, 1506 bp, Zea Mays
gcactagtgtcaaaaaatattttggcaggatgatgtgcaacaaggaacctacccacaagcaccgaatgcccttctgaagtcacatcaacttgagtataaaacactcgcccagatttcctattgtccttcacttttgcattgttgccagatgtattcttgttctaattttgagaattgttttctgctggtctctggaaattggagttattttgttgaggatagggacaatctttaatgaaatgtcctgcttttccacaattgtagcaaggatatttagtgccggtgggagaaggcaagcggggaacttgagtatttgcatgtggaagctggtttggccagttggcgggacgaatgtaagtggggtttttgaaaggataggtagttgaacggtaaggaacatttgtagaacgagcagtcctgattaccacctttttgcgtttcgccgatgactgagaaaaccctgacctagaacctttccatgcctccttcacattttgatgtactcgcgccttttcttccacggctatggccacacttattgcccgattgaaggtaagatcatagcaagtggccatcttcttttgcaattttgagttgaggcctctcataaagcaatctcttttcttgatatccgtgttcacatgctcaatagcatactgagaaaggttgttaaacttcccaatatactgcatcatagtatctgccccttacctaagtcgcagaaactcctcaagcttcacttgcaaaaccctatcaggaacatgatgagtacgaaaagcttctttaaattcaacccaagtaacctggtgatctggaggttgtatggtgaaaaagttggaccaccaagtgctagcggctccgcgaagttgttgtgcagcaaataaagacttttgtaccttagtgcactgaataagaccaaacttctcctcaatcacctccagccactcaactgtgtcaagaggctcttctcatttagcaaaacactggcggctgagtctccataaattccatgtatgttgcatttctttgcttattcaggggaatacgaggcccaccttgattgttttgatgatgagaaatctcatgcaaaaccctagcattatcagcagtggcattcactagggcagcaatggcatctgccagtgtacgtggaactggaggtggtaggggttgatatcagcttctgcaccaccacgcgatgtgccagccccattcgacccacaagtacgcataggcatctggagtaaaacaaactcatgaataaacatccataaccatgaaatatattacatgagacaggtatatggagtattattcattacaataccaaaattgacatagcttaatatcctatgcctacactagaggtcacgacaccatactcatgccacattaaacttctgtatcactagctatctcagaaacatcactacctcttggggactcaacacctggtacaagcataggagctgcttcttcctccaagtctgcatcaggctcaccccc

SEQ ID NO: 82499 - DNA, 649 bp, Zea Mays
ttgctagcgaacagagcggaagcagtattgtaagatagcagagaaggcctggatgtagaaaagcaaaactagggcacagaacgcagaggcatgcgacagtgtagtacatatggggttttcccgggccagacgtcatttctaaaaagcacccagtcatcacccggcggttacttctaaaacgctggcgtgccatgtcatcacccggcggttatttctaaaaacgctggcatgccatgtcatcacccggctgttatttctaaaacgctggcgtgccatgtcatcactcggtcgttatttccaaaacggtcgatgcagcccaaattaactcagctgttatttctaaaaatgctgacgttaccagacttcactcggccactatttccaaagcggccgacgtggcccgttatcactcggttgttacttctaaaacgccgacgtcgccagcagtcactcggctgttattcgtaaaacagtgatgtggctctagaggattcggctattacctccaaaacgccgacatcgccagtaaccgctcggtcattatttctaaaacactgacatggcccgctatcactcggatatcacttctaaaagccccaacatcgctgataatcactcggccgccactactaaagcgctggcatcgcgg

SEQ ID NO: 82500 - DNA, 273 bp, Zea Mays
ggtcaacctggccgccatgctcaacacagagttggaccacacccttgacgagttgggcaaggttcaggcggaggttgcggaattgcgtgctgagtgcgcagcacaccactttgtggatggtggttctcccgcccctgtcgggattcagcacccttaccgttcaacgccccgtggtcgcttcgaatatggtaacccagattgcaggacccggatagatttggatccatagatcgacagagtcagagtctgtaataatgcttaattcagtgtctt

SEQ ID NO: 82501 - DNA, 273 bp, Zea Mays
cggggtgaccactataccctaccaacggagcggtcggtttaagttagtaatgacttaaatcggcacggcacattcacgcctacttaatccgacacaagcacgtttgcaattactcatcttagggcgacctctatgccccacgaagaaatttcatactgcatttacttctgcgattgtagatactgttgtattctaacaacgggaaaacaatagcggcattcagtactaaaaagtgttttctaaatatccgagcacactaaccacatattcaaa

SEQ ID NO: 82502 - DNA, 325 bp, Zea Mays
gcgggttgtagggtcgcgagaatggagtctcgtggacatagatcgcttgagttggtaaaggaccatccgctgttgacattgatttaagcaacctttttgtgttatcacatatcatcttatgcggaggatgagctaattaccttagttgttctgttcttgcaaacacagtcctagacatgtggtcctatgtgacttggtagaggatgcctaggcttgtctcgggtaggtaggccttcgcaagagctaggtgtgcattcgtatgttcgggactctttgggaaagatttacataagtagcaccttgtttgaagtggcttagtgataag

SEQ ID NO: 82503 - DNA, 600 bp, Zea Mays
cccgtgtgacggagaggcagcgaagctgtgtgatgacggcataacccttgagctaacgaggatgtcttaggatagcccgtgagtcggctactatggaaatccgacatctgagtctgcaccttgagaacatgaatttatgaggacgtgagggcaggtaacgcccgtgggaaaggggagagaggcacccttcactgagtaagcgacatgcatgtagcgtcggcgggccaggccgactgcatgtatgaagggtctagagttacgctgtcgagattttgcgtgggcatgtagcaccaaacttgagtcggcgacacgactcaagccgattgcctcacgaggtagggcctgagttcaccctgcaagagctgacgaaggcatgtaacaccacccataagtcgaagggtgacttaaggtgattgcctcgtgtaagtaagggcttagagatcacccatgagtcaagtgaggcatgtagcaccggcgggccagaccgattgcctcgttttaaccgtggtcatatagggttcatgacgccagttacataaggatgcagagatgatctgagtgcgccgaggtacgtaatgcacagtttgaatgtctagaaat

SEQ ID NO: 82504 - DNA, 373 bp, Zea Mays
cacagtggcggaaggtgtggagggagcagtggagcaaggccgagatgcgaggcgatgaactctgtaggctatctgatcagaagggatctgcaactgtcctccccgctcagcctgctctgctgttgctgccactgcaaaatgctgcacgagcggctctgtccatacgatgcttctttctgccctcctgctgctcaagataaatcgtctttcccttgacctgcctgaaggggcaaggagggtcctcgtcgtctcctccccccgatgatgaaacgttcttcgtccacaccatcctgaccagattgctacacaatagagtgaaaagataagcagaagtagagagcaaccgataggatctcaaaagaagtgataacta

SEQ ID NO: 82505 - DNA, 504 bp, Zea Mays
tcctccctctcggttctgtgagcagaggctcccttatcctccccatttgcatcaattccaaattcttcaaattcttgtcaaatccaatgaatccagttggtggaatgtgttcaattgtccccattatgtatccctgcaggttcttggctccttcgggaaggttttcacttctcatatggccatttctccgaaaccctaatatctcgcccaccacgtgttcggtaaaatgcccaaaccagccaaaaatgctccaattaaacccaaatttttcaggcaccttcacaacacttccagtaacctacttgccaaatttcacgccaatccgagattccaggcttaaatttcactaaatttcccgttttgagtgatcgtttccgagccgagtgcccaaatccctttttcttcgcctaaattcaaaccaagcacacacttcactcatattgacctatataaacctattcgtggtgtatcggctcaattccatatcgtttcgtgcctcaattc

SEQ ID NO: 82506 - DNA, 436 bp, Zea Mays
cgcttagcggccatcgtctgaaactctgaagacgcacacgagaaagcaaaaagccgtctttgcttttagagaaaacctagatttactcgtgagcgccaaccatctagaaggtgggaacagggtacttatcaccttatcggcttgatcccggccccggccccggcccacacaataatgcatagggacttccaattggatccgtccttactctagcctagcctgtcctacaagacaggtagatgtaatcaccgttacaacgacaaagctggcttgtcctgtactcgtgctaaactatctgcttgtctcgtcatgctccctcgctgatttggtcggtctctaacgatccgtcgaacacccacccgagacgcgagtccaccactcgcgttgctgttgatgcagcatgtgacatgtgtttccaaagaatatatatatacaa

SEQ ID NO: 82507 - DNA, 658 bp, Zea Mays
aacaattcctaaggctcagagagtcactggtgtggacggcgggttgatatatgtaaaaggcagggtctcatttataaaacgtacccgcgaaggggtatcgtgatcacagggccgttggatctacattatgtggtttagattagatcccgatgcgtatgaatcggtaagctacgactgccgtcagatctaaaacctgtggctcggatttcatttgagaaggggtatcgcgaccttctaatcctgaccgcacacccagaatcaatggttacgatttgttcaagcggagggttattcggtgatctaatctacaccgtccgaattgaatcagacggcacgggagctgtcttcttcccccacgacaccctctctcctccactccaatcggtctacaccagggcggcgccattagccagaaattgagcccctgattcctacacccgacctccaaaatgaaagcagtaatacatggatgataacggtacaacacggttgcaggattactcacttcgattcaaaccactccgagcctcgcacaacgcgcgcggcggatctgtggcacccacagtgcgatggcgagcgattcccgagagcttgaccgcccttgcgccaacgccaataaccgtccagcccctcatggttcgcgcgccctccaactcgc

SEQ ID NO: 82508 - DNA, 976 bp, Zea Mays
cccttttctctcctctcctcccctctttctctcttcactctctcatttgttgcagtcgccgacaccctcacctttctctctccctctctcacatcctacacttcaaatcccttcaaacactatcaaatctttgtggagattgttggagatttgatcccctcgggctcctccaccgtctcttcactcttcgttgggattttcgtggtcgatttcttggatcgaggtattgtctcattttccatatttttgactcgatccaataccgttcttggttatcttaagtatcttttcaaggatattgtgtagtttaggtgtatggcacacttaaactgttatcattgtctcgaacattgtttgagttaagtaggttggtattgttcattgtagttaaaccgctcatatgaacggttgaagtgcatgctcaatatcatacgtgtctttcctcaaacgtgttcattaagatccttgaacatcaaatatctctctcaccatgtgttcttctttgtttaaatcttaaggatggtgcgtcgtagaaatccatctgttgttgagtccgactcagatgacgacgccctagaaattcgtgaagatactcctcctcagtctagatccaagcgcgggcgcggatctggcaatgtcctgccaggtggtgaggcctctggatctcatggagctcgcggacaaatggcccggaatccctccggtcggtctcgtcccgcggcgaatccacaggcctaggaggctaccagcgatgatgagggaggaaaagatgatgatgttgatctccctcctgctaatgcacccattatccaggggttagtgcttcacagagcgcaggcacgtcgctccgccaatgagtaggtcattgatttcactatcagcggagggtctgtccttcttcaggatatgcgcttccaaaatcctacattccatattcgtgatgtcaggattgatggtaattgcttctggactctcc

SEQ ID NO: 82509 - DNA, 626 bp, Zea Mays
tccaaaagatattatataatcgtcatggaccaaatttggctagaattagccaacaaagtttaccgtgttgtgcttggattcttgtgcatgtatcgaccaataattgtgctagggtagtgctcgactgctcgcaccggagtgccggtctacgcccaagccgaagccacgtctggccagagccgcgctcgctccatagccgtgctccacacgtgtggcggcggggctgccgatgcccttcccggcgaggacgaccagcgctacgggtggcatcgtcagagccatggcgttgccgtgttgccagtgtctaccaacttccgcttgcctttgccacgtcgggatcttgtcgtcagcaagccgtgcgtagtaactggtgaacgctggtcgctaggaacttcggccagaactccatgaaccagcaggcacgaacaacggcgacaccaacgacagcgaccatctgagcaccgagcgagcggctgaccgggctagatctgctagatcgggcgacgcgcggcacggagtgaacgagacggacgaagaagaccccgcgctccgacgggccacgggcaccggctgtatcaacgaaaaaaatccccacaattgctgtcctgcgtaatgaccggccaacc

SEQ ID NO: 82510 - DNA, 586 bp, Zea Mays
gagtggctttcccattaggggttctagggtgcgaggcaacccaatgtcttatcttattaaataccttggggcgcatggggcctttgagtcttatctagttaggtgccctaggacaaaaggcttgtactaccagatgcccctggcggtggggtatgcgggaatcatatagtgttgtcagtgtttcaaaccaagctctgccaaataaatttatgtgcgtgttatgggctccggatggtgggcgcggtgggcgcaagatttatattgtttcgggcagaacgtctatacatttagtctttggtggcttgcgctaccggcacatttgctgatcaatgctcgtagtaggggttacaatcggacgagagtggaagaagagactcccaagtctcttgtatggaggcggtggagctaagggctatagagctagagtcctaactaagttttggcttcgcggcagggctccgtcctctgagtcctcgttgatatgctcatctacatgcgttacccatttacaggtacagctagtccatcgaacgaatgcaaatctttaagccacgtgccagctgcaaagcaccaaagtctcagtgcg

SEQ ID NO: 82511 - DNA, 455 bp, Zea Mays
ccgaccgtccctatcgattgaggtggtggtccattttatagcccatgcaaacagtcgggcgttgctgcgtctgcgtgggccatccctcgtttgatcggggacacagagcaacgcagagcagagtagagcaacgcagagcagaacagagcagctagctagcgtcactctcatcactagtagtactatcgtacaaccagcccaggagcaacagactctcatcattatcgtaccactaccagcctagcagtagctctgcctgctgactatgctgctgttgcattcctgcatgcttgagaaaggtgtagctgtagggaaggggaatcgcatcacaggagagctgaggtggagcactgagacgagaggatacgcgacatctccatttcacctgtgctgatttaattagtatgcacgtagttataataataattaattaattcagaaattgaggggtggac

SEQ ID NO: 82512 - DNA, 345 bp, Zea Mays
atcagttacatgcgcacaagacataaagctcacgcttacgaccatgcgaaactagcgtccgcgaaacaacacaggtgactcgcaagaactactaacttgacaacacatttatgtctaacgaacattaaacataaacacctgaaaaggtctagttacactcacgtatgctcgccaagcgtagctccagattgtaaactaatcctcgctaaagcactactttaataattattggatcaacaactaattgaataattatcgaaagcatatactgcgataagctatactactagtatgtgaatgatattgtcaatttatcatgaacctatcatgacaggagtaaaccga

SEQ ID NO: 82513 - DNA, 701 bp, Zea Mays
ctccggtcatgtcgggcatggatcaggaagtgtggaaacgtcgcagcctcttggctctggaatcaaggggtcgcactgggttcagcggccgccgcagttatgtttgatagaagccgaagaggctgtgaatgcaggaattattgtggagacattacaaccgcgtgtctctggaatcgaggagacttctcggactctgcagtcagcgcattcaagccttatggataccgttaagattgtggctgctggggttaatgtgtcgcgcggttccaaggggtgggaccatcctttggcggctgctgtgcatgggaacgagtttttggaattggccgaggagactgtgaatgcaggagttactgtggagatgttacaaccgtgtgtctcgggaatcgaggagtcttctcggattttgcagacaccgcatttaagccttatggattccgttcagagtgtggctgctggagttaatgtgtcgcgcggttccaagtgttgggaccatcatttggcggcagttgtacatgggaccgagattttgccaaggacgcagccccgtttctctggattcaaggggacatcttgggttctgcaaccactgaagttatgctcgaaggacgccaatctgtctgtggatgcgggcgatattgagctgcacgtttccagggattgggaccacctgctggcaacccatttgtctgatcctatgc

SEQ ID NO: 82514 - DNA, 699 bp, Zea Mays
attaaatccattcggaatgtgggacctccgacctgtaagcttgaaatgtagaagttcctcggcaaggtaaattatttacagaggttcatttctaacctgtccgggaaaattgatgctttcactcccatcctttggcttaaaaatgatgtcgaattcacatggggggcagagcagcaggaagcatttgatctcattagaaaatatttatctttggccccgtattaaaagcaccacaggtaggagtaccattcagattatacattgcagttgaagataaagttattggagcagtcctgacacaagaaaccgaaggaaaggagcatgtagtgacctacctaagtcggaggttggtggatgctgaaacgaggtacactttcatcgagaagttatgtttatgtctattttatgcatgcaccaagtgtagatgctatttgctatctagtcattgcgtcgtttctggtcaagccgatgtgatcaaatacatgttgcaaaacccgattatgagtggtaggaccggtaagtgggcttatgcacttatagaatatgatttggcttatgaaccattgaaatctataaaaggacaggtcgtagcggattttattgtagaacatcagattgaggatacgtataaactagatgtatcatacctcactattactccctggaccctatactttgatggatcgggttgcaatgaag

SEQ ID NO: 82515 - DNA, 858 bp, Zea Mays
cctcaggcttcgggcttaggctccggcccttcaggatgacatcgtcatcgaagctatggtcaaagggctcaagctaggaccaaccgcctagtactttgcatggaagcctcctcattcccttgaaaagttattgcagaaaatggacgaatacataagggctgataatgatttccatcaaagaagggaaaagttccacagatacaccaaagccgccagggcttcggaggaaggttccatccaagtcatgttcaaagcatctataacccatcaccggttgaggaaaaggtgatccagtcatagggtcaatcaggacaacaggcaagctctgagcagcaatcttcacaaagcacatttcgaccacctgcttcgagaggaagaggaggatgaagctttagtggcagatttggtgcgcctccaaggaagccattctgtttgttttgtggtgaggacaaaggccacactacaaggacatgccataacaccattaacaagcagaaagagcttgcttcgtcagctactcaaccttcacagctgaaagaggtgttcaatacatcttcatactgttcaccctacatcccacaatatgtccaaactcagtcacaggaaccaaggccaagtctaccttcggcctcaaatgcctcaagcaactcagtgatgagtacatggtcaccaactgcctccttcgtcctaggaccacctaccaatgatcaagttcccgctaatcaacccaaattcccaagacaagacctgcaacaaagggagggatctgaaaactgtaccgtcaatagcagggtccagagacgaagcacatatactgagtaccccaagggcagggtaagtgaccccgaagctattagc

SEQ ID NO: 82516 - DNA, 528 bp, Zea Mays
gagcagagaagggggcacgcgctagagatggcgttcagcacgccgagctgcaggaggaggaagccgcgtagcatcggcttttatgcacaggaggaggggaagtccgagtgaatgttgttggttcacaacgagaaatttgagtggagtttggttgaggcgcccgtggaagtcgcacatttggttggagatcgtcacgggggagaagataacactgtcagctgggacccaccgttagagccatggccacgttgggagcaagggggagtgaggatggattgcgggccccacatggcagcggttgaaggaatgtgggctagtgcgcacccggttgtccacactgaatgggtgcctgatatgcatagtgtggctgacgttagggccccaccggtccagggagtgcgcacgccaggggagatgggccgcacggggagaacgaggtgtgggccgacgcggaggaatcctgggacgaggagaaaattggcccaagcgcaggtatttctttttttttctttctattttcattttcac

SEQ ID NO: 82517 - DNA, 580 bp, Zea Mays
cttctttctagctttggtcagcttcgtctggtgtgctcctttgagtttcttggccatattttttaccttcaagagagatacacattttaaaaaaatgaaagagaataaaaaggtaaatgaaaggaagataccaaccttcctcatgatggttttggcatcgacttaggctacatcttggccaccattgctccacaccagagtgaagaatcttcgactcaggttgacaaaatctcatgtgaaaggttctgcatatcatctatcgtaatgccaaagtccgggcgcacaaccgtcttcaggtgggagtaggccaccttctccaaaatgcatgtgacaccatgagcactgcaaagttgtccgcatgtttctaacatagaaatgaagcccttgacctctcgagtcatccattttagggcttccgcggtgtcgccttccttgaaagccatccgcttcggccatgcctcgccgaagacaacacatcatgtatttagtgggcacatcacgatgcaaagattatttatacctcgatcaagcaacatacaggtacttgtcgatgatcttatcatcactcactcgatcaccc

SEQ ID NO: 82518 - DNA, 522 bp, Zea Mays
gtaaatgcagtgtgatggttttgaaatttcatcttggggcacagaagttgccctaagatgggtgattgcgaatgtgccaagcgtgtcgtgccaatttaaatcagtgtcaaattaaactgactgctccgctagtagggcatagtggtcaccccgagtttagtaagcgtgagcatgtcgcatcgtcttaagctattgccgacttaagccgattgctccgttagtagggcatagtggtcaccccgagttagataagcgtgagcatgtcgcaccgccttaagtcactgccgacttaagccgattgctccattagtagggcatagtggtcaccctgagttagataagcgtgagcatgtcgcaccgccttaaatcattgccgacttaagccgattgctccgttagtagggcatagtggtcaccccgagttagataagcgtgagcatgtcgcatcgccttaagtcattgctgacttaagccgattgctccattagtagggcatagtggtcaccctgagttagataagcg

SEQ ID NO: 82519 - DNA, 779 bp, Zea Mays
tgtgggcaagctttagacatgaatttcttgaagccaggcttttcaccaaaagcaaaaggcagctcatcttcaataatcatctcagtgaaggcctccctaagtgcatcttgatcaaacctccaagtagaaacaccttccccttgaattgcttgtaaatatccttgctttccatctttttcaaacttgttaggattgtgcttgcaactttgtaggtgtctattcaaggcagatgtaccatgtcccttagagtctgctttcatgttgcgatgtcaatacttgcattttgtagctatcataatgcctttatcatctttgatcttggttaaatggttccacacatctgatcttggtgccatcttcttcttttcatgttgtgcacaatacttgtcaaggtcaaccacctcttgatcagtagccccttgtgattgtgatggttgtgtttgtgtcccatcattttctagagtgtcagtgcccattgattccatacccttgtccaatatgtcttcaggttcaggcatctattaaaaaggaggacacacacagtaagtcaataaggaagatgaatacatgatgcaaggaaaacatctcatgtgcaagaaggaaacacacagtaaacatctcatgcgtatcatacatcctaccttcactgcttcacacaagaacacactagtattagtgtattaccaattcacacaagaacacactagtacaagaacacactagaattagtatcgtacgaggacaagcatgtactacactactatttctactgatcctag

SEQ ID NO: 82520 - DNA, 344 bp, Zea Mays
gaaacatccggtataatcagtcaaagttgatagtgactgatttaggacaaaccaaaaaacaactaaaccatgtggacggaaggagtattcttgtatgaaatcaatgaccgcgatgttctagcttgcgagaaggaaccgttgtggcccgttttcatccctgattacgcggcgacgaacactagatgttgtagtgcgtgttcgtccaccacctcatcgcggatgggacgatcgcagacatggcatcccttgtttgtcagtcgcgaggtactggctactttgagaatgactcggtcctagcgacagcctttggcagggtagatcgagccgaggcggggcagatgttg

SEQ ID NO: 82521 - DNA, 616 bp, Zea Mays
ctccactccactgctcggtcgcttcctcgccgggaaactcaccgagaagcaggagcttcacctccgccattgccgcccaggttcggtcagagtgaaccaccattctcgaacgcgcaacatcccaaccagagccccccaccttctccacctgagctccccaaaactacctagaaccccagccagcgcttcccttcaccagaaaccaggtttcaccctcgccagagcaagggttccaccggtgagcgtagacccgctctcacagccaaccccagccaaattactttgggggatcgtcttcctaccacccgagaagcttgctcgccaaaggaatcgagcctagccaacgtcgactagccggaacaccttgtcgtcgagctctgaccaccagagaaggtagaccgcgtgactccgaccaccaccggccatcatccgaccaccggcgagatcgtcagagcttccccgacctctgagaccacttcgccgaaactagaccatcgctggtaagccctgccatcctttcttcctccatggtcactattccggtgcggataggagcgcgggttggatagttcataagcctagggggtttcgcgatgtcagtttctcgggtgaatag

SEQ ID NO: 82522 - DNA, 794 bp, Zea Mays
gcatgagcggcatctccgtctcgttctgggtgctcttaggaagaatcagttttatggcaaattgaagaagtgtgctttttggctgtctgaagtggctttcctgggtcatgtgattaatcagtagggcattgcggttgatcccaagaatgtcgctgctgtggttgagtggaagagaccctctagtgtctcagaaatcagaagtttcttggggcttgccggatattatcggtgtttcatgccaaatttttccagcattgctaagcctttgactaggctcttggagaagggtgttcttttcgtctggtccagtgattgcgaggtcagttatcagacattgaagaacaagttggtgaacgcccctatcttagctttgcctgagagtggtaagtgtttcacagtttttacggatgcttctcgtattggtcttggctgtgtgttgatgcaggaaggcagagtgattgcttatggctcaaggcatatgaggaagcatgaggggaattatccgactcatgacctcgaattggtcgcggtggtctttgccctaaaatcatggaggcattatctttatggcgaatcttgcgacatctacaccgaccataagagtctcaagtatattttcactcagaaggagctttatttgaggcggcgtcggtggctcgaattgataaagtattatgatctatccattcattatcacccggggaaggcaaatgtggtggttgatgcccttagcaggtccagggttcctaatgtggccttgcctttgatcgcagatctggaccttatgggggtcg

SEQ ID NO: 82523 - DNA, 561 bp, Zea Mays
ttcaaccctacgtgaacatccatggaagtacaagagggagaccccgctcggacaccctcgggggctgggtcatagtttgcgctacccattcgagccggatcatcttcggcaacaccctcgggggctaggtcgcagcctgcgctacccacccgagccaaatcatccccgacaacaccctcgggggctgggtgagtgccaacaccatccttgagggccgtgttctctgcaacagccacctctaaggctgaaggtccctcagtcacttccatgggagcaggacaatccaagtcagcttcttgaccctcaagaccgcgctccaaggtcgatgaggcgtgggacgctgcccgggatgaccccaacccggcgtcgagcacatcaacgcaaacatccatcacgccaccatctactggttctgataacagatcttctggaaccatgtcttcaagagtttgatcaaagtccgccagagataattcttgcagaccaatgagggcagacaaagcaggagaaggcactccactactttccccactggctatgtagcgccgactgttctttcga

SEQ ID NO: 82524 - DNA, 1005 bp, Zea Mays
gtacactgaccattgtcaacaagcccaaaatgtataggtgagtggccatacaacacttcaaacggagaagttccaagagccgagtgagaacaagtattgtaccaaaactcagccaacggcaaccagtgcgcccatttcttgggagaagagtggacaaaacagcgaagatacgtctccagacactgattcactcgctctatttgtccatccgactgaggatgatatgcactgcttaagcataactgagtaccagccattttgaacagttcttgccacaagtgactcgtaaagaccgggtccatgtctgaaatcatagcaactagtaacccatgtagccgatagacttctaacaaatatagtttagccactgaaagagctgtaaagggatgagccaagggaagaaagtgagcatacttagaaaacttgtccaccaccactaagatgcaattagaccgattgaactgaggcaatccggtgataaaatccaagctaacagtattccaggcatgtgttggaactggtagtggcagcaggagaccagggtacttgacccggtcaggtttggcctgttgacatgtgacacacgattgcacaaattccttcacctgcttcttcataccaggctaggcaaatatagctttgagacgccggtatgttactgggaaaacagagtgacctcctagagcgctgtcatgcaaggcggtcatgactgtctgctgcaaaacaggattggttcccaaccaaatacgacccttgtatctgatcactccatttgtcagagtataccgaccctggtccgtcccagtggctaatatctgcaaaagtttttgagcactgggatcttgctcatacccctgaactacttgatgtaacaaactgggaaccactgttgaagttgccactagattcagttgaagatgtggtgcatcccgttccagccccggtcggcgtgacaaagcatcggctacccggttgttggtcccttgatgatagataatcttgtat

SEQ ID NO: 82525 - DNA, 638 bp, Zea Mays
acgagaggcaggttcattttgagatgcctataaacctgagcgacgcagaaataagtgctatgctggacatgtcggctgaggattcctcagatttggtccctgctgaaacactagctgtagcacctatcccagagcctggaaagaccttgaacattcaaagatctgatagcactcattcgaagcgtcttcgcccgaccagtcatccagcttcttctgctgaggggaagaaaaagaaaaagagacggcttcagcgagtgtcatgcttgaatcaggatgccggcccttctgctcctgctgccgaggaagtgccggtggagatttttactgttgatgatcccaatgggtgtgacctggctgttgctgaccccaatgggtgtaaccttgatgacgctgaacctaatgggtgcaatccggccagagctgaacccaatgggtgtgttgttcgtattattgacgaggatgaggaagaggaggaggaaatccccttaattcggaagaacagtcgtcgttacatagctagtggggagagtagtggtgttccttctccagctttgtctgctctcgttggtctgcaagaattgtctctggcaaattttgatcagactctcgaagatatggtccctgaggatctgctgtcc

SEQ ID NO: 82526 - DNA, 787 bp, Zea Mays
aaaaatatatactccagcatgatgcaacaacgattattaccctagggttttattaatacatgacatcgagttaactctctctctagaactttgaaagggacaaggcatagcaaaaaggaatggaaaagggaaggtaacgcccgaatttgttggatgttaaggaagaaaatttagacccccaaattcagggcgttacaaacaaccactccacaagtatctaccatcagctatcttaacatgtaaaggcttgggtaactgctgaacatattttactggtcccatcaaatgtgtactcatgaaactagctgaggttcctgaatctactagcaccaacatttgcttgtgatgtattgaagctcataatatggtagttttattgttctcactgccactcacttctgctaccgatacaaccaacaccacctcctcttcctcttgaccagactgactcccctccttttccacttcagcctcccccatcccatgggatgtaactgcccacatctcttccaccacatgcactagaacgctattagagcaggtgtgattgggattccacctctccccacatttaaaacataatcccttggcacttcgataagccttgagagcagacaatttactatcatctcccttgttacctgtattcctcaacttgtgatgctcttctgtctaggcctgtcctcgattggtcatcattggcagaaaacattacgagccactagagaattctttaggggcaccttggaagacccactattatccaagttccttccatcccttcgac

SEQ ID NO: 82527 - DNA, 349 bp, Zea Mays
atcgtgtagcactggtccaattagatgtagttgcgtcatcaccggagattcgcttcaccggtgttgggttttcgccgtggccgggccgcggcggacgggggcaaccaacgcgcgtggtgacgacggatccgtggccgtcggatccgtagacaacggtctcgattgatggcaccggtgtaggattggtggaggaacggtctgagccgttgatcgctctctggatggctcagattagttctgaatctcataaaaccgtagccgtcaatatctgatccagcgatcctggatgcgtaccgattcattttggttcatatttgatctggtgcgctcgtacctaatccaacggccg

SEQ ID NO: 82528 - DNA, 541 bp, Zea Mays
cggggatgtgtcccttctttggagagtgaattgtaatgatggcttgtaatctgccaccgctcggaccttctttggcgtcgccgagttcgagtcagagtcgaggtggatcttccttttgaactgtgatctttgtgcatgggcttcctctgggtagattattgctcgatctccttagttcttggggtgttgttgttgtttattaaaggtcgatgtcttcatgtcttgatcattatcatggatcttctgcataaggttaatagatgtcacaagatctattatggttagtgtgctcccctatttggcatgccaactgtcgatgattttttgctagtgaatttgtatgtgggtatacatgagatcaaagatttgaatgtaaagacataggaaacacaatatttatactagtccacgctctcttgagagataatgcccaacgtccagtttgtcgctggctatgcttatatatgattatcaaggctatcgctggctatgcttatatttgattatcaaggcctcatccttaggagctttttaacccctt

SEQ ID NO: 82529 - DNA, 898 bp, Zea Mays
gtggaagggaagtaagggcgtgcgcctagggatgaaaacgggacgggaaaatcccgcaccgatcgacgccgtataccgtgttaaccgatcgtatatcgtattttcggggaaaacaggaaacgggaaaaaatacgggaaatatggacggtaacaggaacggaatcagtaagagttgtttcccgaccgaattaacggttcccgtattttatccggaataatcccgtattcccgtgtgtatcccgcttgcgcttggcccaaatgcgtgtgtggcccaaatgtgtacagtgtgcttggcccaacaaatgtaactctagctggctagcgcttgccgtcacggacgtggtgcatcagtgcatgtgccgtgcggacgtggtgcatcagtgcatgtgacgtggcttctctctcctcctctgcgtgcggcattgccgattgcggctggacggcgaacgggctggttgctgagcgcctgagcggagtagaggaagcgattgctgctagccgattgctgctgcggatggctctgctgttaggcacttgggcatactactctctgctgttcggcactggtagttctaattcctaaactgaataactgatattgttagtctataagtaatagtcgtgatatgttggtctattgggcacttggtctgcaatttttcgtgttaccgattcccgatcgtaatcgactcgttcccgattgaaaatgttccgttcccgatatctcgtaatatcggtttcgtttgtccgtccaacatttccgttcccgtttccgatttcggcaaaaaatacagtaaaggtaatggtttgagcattttcccgaccgttcccgatcgttttcaagcctacgtgcgccccgccttggctccgcccgtgggggacgacgcgggcatcttcc

SEQ ID NO: 82530 - DNA, 388 bp, Zea Mays
tagataccctaatcacttcacacgatcgcaccactctgttctcttctccctctctccctctattctgttggactctggcgaggaagactcgatgtcgacggccatggtggcaccgccgtggggctcatgctagctaatgaaggtattttctctagcagcttggaagcacaaagcctccagcctcaagaaaaccctagccgccacaatacttgggaaccgatctccctagtgcactgagcgacgagagaagctgtggtccatggcgactgtagactgaggcataccaacgaagcctatctctgatggcccctccaacccccgtcttttttactttttagaccttttgcgaaagttattcataactatgctatttttagtttaaattcat

SEQ ID NO: 82531 - DNA, 808 bp, Zea Mays
cgaggcgtagggacccatctacggtcgtggcggatctgcagcgatggggttgctccggtgaacgattccggagtcatgaacagcccaatccgctagaaggggccacagaaacgttccccgcgccatggcaaagctcaccggcaaagcttggaggcccccacggcgaccgaacttcaatttcctcccctggcggccagtcttctctccctctcgatctcttcttccgttcacagctgaccgcacggcgatggggggggtcacggccagaatttataccagaggataagggcaaggtccgagcggaaaaggaggcggtgaccggtaagctcggcccgggatctacgcatcgagatgaacagacaccaagtctgttacggcgacgttgaagatgaccctgacaggcggccccatacggcagtgacacaattgtgtgggcgaaggggatgcaggcgctgggttggggttttgggccgagagcgcggctgggctaagtggcgagttgggccaaaactgaggaatccagcccaacacaagtttttctcttttctttttattttctatttcaattcccattcatttcaactattttaaatttaaaggagttactaattcaaatatagatgccaccacaaggaaaatccagcatgtgactaaacatattcataccattattatgcagatattttttaaatatgtaatgcacacacatattcaatattggttttaatagctcattcaaaaaatagtatttattatgcatttttcctcaacataaaatagttttaaccctttttcgatataattaaat

SEQ ID NO: 82532 - DNA, 512 bp, Zea Mays
gtcgtgcccttgcatagaccacctgcaccacgctttccaagttcgacgtcgttcattgctatctcgtttaaaacacaccgccggcaggcatccaggccatccctcctattgcgtgtcgttttgccctgcccagtaaagcccgcagtcgtgcgttcgtctccctgagcgagcaggagtgcgtctatgtccgaaccaccatgtcgtcttagtcgccccccacacacgcgtttgacccagatgtgatcgcgttcgcaacacccctgcataaagccccatcccactatccatccccgtacaacagccccactcctccagccgctcacacaacctcattctcatctacctcatcgcgtgcatgctccattaggcgtgcctttccctctcctttccctggccacaccatgccacaaggaccgacaccaagcaacagcgcagccagcgagcaccccatgccccgaaccaccccacaccatatctgcagtacaggtacaacagtcccagccgccggggac

SEQ ID NO: 82533 - DNA, 554 bp, Zea Mays
gctgccctgatcgcctttaacgttgtgtgcagctatgttgggacaaggtaccttgtccatgaacacctagccttctgtatatggccgcttcaggccagtgggcaatgctggagccgaaggatgatgattcgacaaagcaagaggtgggaagtgggagtcttgtgagaatgaagtatacatacaagtttaggaatcaattcgaggagccgtgtgatgaatggatatatggcactgaagcgaagtataatgaacttcttggaaactatgtgaaggaggacgaagctctaatcgctaccttcagagctcgaggcaagaggagatcgaatcgcgtttttatgccatagggttcttctaccctgactaccctcgattagcgcaaggtgaaaagaaaagaaaagcaactaggaaggcaattgttgatgccccaaaactgaaaagggcaaaatcaccacgaagtgtcgtaggctgcccaaagagtctaaggatgctatatctttaataattgaagttgctgctatatcgttggtgcctgtcaagccaaaggccaccccgac

SEQ ID NO: 82534 - DNA, 487 bp, Zea Mays
ccagtattgcccccagccgatcaccagcgagctctaattccggatttcccccaattcgggtttccgccacccgaaaccgacctcatcgcggccagctcccttcccggtcagtccaaccctccctctccctcgtttaagctttctcacatgtctacgatgcttgccgaaccaccaatttggactgcgggctcaccaatcaccgggaacgcactcaattgtccgccacccattcggttcacgtggacagagcttgatagctcaccatttgtgcaattaagttaggggaaatgctctctgggtcatggatttggtttagtctaaagctgagcgccggtcttggccccctccggccggtctagctcgtcggagttgcgctccccacgctcaccgtcgtcggggaccttcctctgcgaagaaataaaaaccaggggtcatttttgcaaagtgtcagtgactctgggtaacagtagagagaccggatccccag

SEQ ID NO: 82535 - DNA, 405 bp, Zea Mays
gaataagagcctctcgtcgacgatcgatggcaacttggttttagcttttatcaattctgttataaaccgagtttgtacccttcgcattggtgacagtatagcagccttcaccgcatcaccgccacccgctgtggcggatggctgcgacgacacaacatcgagattcaccacattttagctctcagtcatccattttatcatgccacttgttacccatgttttcgagtgcttgggcccactattctcagtccccaacacctatgtaattaagtggtttcatggttattaggagggatcaatgtcggggtcatcctttgtcccaacagtaggaactatatcccacatactaagttcacaactttcacaaattccttcacaacccaaagtacaataccttatgccatc

SEQ ID NO: 82536 - DNA, 736 bp, Zea Mays
gtggaacctgggagcggggttggttgaggaagcaagcgacggtgacgcagcagagaacctggaggagaggctgcctgttatgataagcgcgagaaggtcaggcaacgtggctcgctttctgaaccatagctgctcgccgaacctgctttggcagcccgtgcggtacggcgatgggggatacccgcatgtcatgttcttcgcgatgaggcatgttcctcccatggctcaactgacctatgattatggtactacgagaggagctgctcctcctggttttcaggggaaatttccgaacgcttgcagactcaagccatgcttctgtggctccaccagttgccgaggttctttctgacgaaaggaaccatggtgtagtaaagcaggtaagaaacatcatcatctctctctgtctctggtggtcactatggattggatggaaacattctgtctgtaccgattgttagtttcttttaagaggatagttttatcagtagttggccctgatgctgctatctctgctttcaggttctggtgttccctttgtatatataaaagcatgccatggcgggtgtggtaaggggaatcaccagtctgttctgggacgatcgttgctggcaacgagggaggggaggaaggtagtagaatgaagtctttgtaagcatggcgtggacctctagtagttcacgaacaaccagactatgtaatgcaatgccagtgtgcaatgtgacatgtaagtctt

SEQ ID NO: 82537 - DNA, 383 bp, Zea Mays
cttatttggtgacacatgtatggatgacgtgaactactaacaattaacgatgccatcgtcaaagtgctgcatcttgcttgatggctgcggtgtgatcctccaccgtggactgcacctgcatcctcggatgttgcctataggtgtatctccacgcacacagcaggtagagaagcacggcgacgagttcaaagatcgcaagaagccagtagaacaaatcgaggcggccggcgctgagattggcgccttccagccaccctgtgcccctgctggtgccgtggtgcgcggtggcgcggttgaccacccggatgaggaagctcccgagccacgacgcgatgccgaggatgcagaagcagacggcgcccccgatggacttcatgccggcg

SEQ ID NO: 82538 - DNA, 320 bp, Zea Mays
tccgtcttagacatagaacagaacagaggagatggaggagcaacagataaatagcaaagggggagactggaagactggaggagcagcagaactatggcgtcgctgaccctggtgggcggcggctggggaagacaggaagagccgaagaggacaaacggacaggcggtgacggcagacctggtcgactggggaagagggcctgaccggcggcagcagcagcttccacaagctctttctttcccaccgtttccctcctctcccacacggcagctctcgccctgtttccttctctcacatgcagcagcatgccagcagctccc

SEQ ID NO: 82539 - DNA, 581 bp, Zea Mays
ttcgggtggttctgccacaccgtcgcagcgaattcggtgtgcgccgtggccaatgaccttgccgccgtggaacaaggtaaagtacccccctagggcgttcgccatgtcattctcaacatttatctctggtcaattttgggctcggggaatgtggctggccggattttaccctcgccggtgagctacgccgccgcgggtgaaccttgccgccgcgtacagggtcgcgttggggggagaagataatgtgcgcgctgttggtttgattatgcacggctggatttgatcaagcggctcaggctagttagcgaagatctggatggttgatctgtgaaccaacggtcctgaacccacgatacctcttcgcggatcagttttgcacaagagtccctccgttattttagaataaacccgccgtcctcagcgactgtttcctgtgtcttagtatttttagcaccggggcccctgtgtccttcagatattgacgcccagtccagagctcatgaaaatcaaataaataaattcagaaatggatttttaatataaaaacaattcctagaaacttatttaatccatagaaaatc

SEQ ID NO: 82540 - DNA, 488 bp, Zea Mays
cgcgaaagggtatcgcacgacaacgactgtccgatctataatcaacgcgccagattagactgctaaggtaacgaagctatacgtattctgggccataagatcgttcaccagtggtccacatcagatgataacgtggagcgatcagggccgttcaactgtggatcaatgccctgagccgattatgccgaaccggtacatgtcggattaaaccgtagccgcaccctgatgtatcaacgacccacgccgatcatcccccaaaccaacggcgtataggtggcgccgcccgtaaacacggcggcggccatggccgtggacggccaactcgactcccaggccgtaatcctccagtctaagacgctctatgtggtatgtggatgaaggcgaactccttgggttcagtacttatcgagggcaaggtcgtgcgcgggttgttcacggcgaagcacgggcgtagcggaaatcccaactccgtcgtgagattttcacgg

SEQ ID NO: 82541 - DNA, 816 bp, Zea Mays
gtttagtaaaaatcaatcagtgtcactagtgttaagttgagatttatttgcgcatggaaagtaaccgtgtgtttaatacttagaactcttagtcgatagtagaaattgttttggcttatgtagagaggtgatgacatgccgtaagtagtcatcacttcctctataattataagtcgagtctatacgcgttaggcgttccttaaatggtgcttcgcaaataagtgtattttgtgtagtatggattgattgtgagtgcatgtgtcgcaagaaaagaattagtgcgcatataggcgatgaatgggtgtgatgaaatggtgacatgccttcgtagtcatcatgtcgtctattggtgacctaactgaaggtcgtagagaaaggtcgattacctgtgtgttattattgtcaccttgtggttctgtatgaattgcaacgtgaagtagtaggctctgtatgtgatgctagatatctaggtagatgttcgtgaattgtggtgctcggaccgtcgagatgaaggttaagtcggtcgatgccgattaagtagttaaaatgattaagggaataatcatggggttaaaactagaaactagtgttcttgcacccgtttgggatgttgtagcccaattgtgcatggttatgatcgcgggtaaaaattagtagtgctcatgtggtgtctaagctaaaatgcgaactagtggatgaaaagcactttgatatacatatatgtcggatttgatgattgtggtgaatgcattgattaattgtgtatggtagtcctaacgcacgtaataacttgtataaaaattagtaactcgactt

SEQ ID NO: 82542 - DNA, 722 bp, Zea Mays
gtggagtctagggagcaattaggggggtttaggagattagggttccaaaccttgggttaaattttgggatgttacatgtgagtatatcctccttgagcttttttgaatggcccaatcatatctagcccccagcatgcaaagggccaggttacaggaatagtttgcaaatgttgggtgggcaagtgttgctgctttgataggaactggcatgcttcgcatttctgaaccaactctgccgcatctttctttgttaaaggccagtagaactcggacctgaaactttcactaccaatatccttgatgccgcatgtacaccacattgccctacatggatttcatccagtagctgtcttcctgtagccaaatgaacgcacttcatgaggactcctcctgcacctcttctatacagcagaccccctatgatggtatagtgggtcaaccgtcttgcgatgcgctctgccatggccttgtcatccggttcttccttgtttttatgtacttaataattggctccctccagtcgttgggatctgcttctgcttggtctaaggcgttgcactcctcaacctgctctacggtgacgctcaattgccatacctcttggacgaaaatcccaggaggaacctaggcctgactggtccccaattttgacaatgcatatgctgctgcattgtgatcccttttcatgtggtgaaattctaaaccctcgaatttgtcttcca

SEQ ID NO: 82543 - DNA, 323 bp, Zea Mays
tatcctgcagcagtcaaaaggttgctgctgttgctgtcctgcagcagtcaagactgcaactgctgctgaccacatgacttattctatcagttattagttgtcctgctaccttttacaaaacgtaggtcacttgtggatttgcaactctgatcatgtgtactacactaataaacaagtaccggccttaggagttagaaggcaataataacgagtcccctatgaagaatatattgcttctgtcatcattgttaatgtatgttttcatcagtgcatttttaaacagttcctttaagatgtgagcatgcctatatcttcatgcccct

SEQ ID NO: 82544 - DNA, 1824 bp, Zea Mays
gatgatttctagaacaagctagttagtccatgtgtttgtgttgattatcaaccaccaaaattagttatagggaatagttaacccaatttccctttcaggagcgatgtatgttgatgttgatgcttcgggcatgaagctaacgcgcgacatgtcccttgcaagggagtctacatcgtcggcctgtatgggagcattggttgggcgtggggcactgtccatggtgcgattgcacttgtcctgactccgtctcctttggtgagaggggcggtggtggaattatggacgttcctccactggctaggggaacaggagtggcctcgctcccccggctgggagaaacgatagtcagcatcggttaggtgtctaagtgtgaggagcaccatgttgtagccaaagccaagagacatgaactcaagactcctgaaccagatcaccgtgctgagccacagagggtgctggggactggccatctggagccttggtgggaatgtgatgtctacccgcagcgagcccctatttggagcaccaattgtcggtgttttaacccgaggctcctaccaactagtgaattagtgttctgtgcccagatctagatgtgtgatgcaagaagacacaagcttttatcctggttcaggtaagagaaggccctacttccagcagagagggaatgaaacttatattatcttgcacccaagtgcttgtagtagggggtacaagctggccgggagagggagaggatcccaagtccctagaggtgattgaggcaagtgccaatattagttgtggaggttaaaacctgtgaattgttctcctccctgaatgaaaccttggactcctccttttatagcctcaaggagggatcccaggagcgccatagttttgtcgtgtatgcagaggaggcgagtccgagcacatgtagctagtatggccgacagtatggccttcgtacaggctattgactcaaaccaggaggaggacgtctggtccctgtatttgcctcttgaccgagcctatctgatggaggtgttgttcgagtcatagttgttgaaacagtgataagtatggtgaaatgcgcatggtaattctccccgtatggcgtaaagcagacttgacatcagtcctgtagccatcccattgttagcagccttcgtggaggagttggtggtgtcctttggtcgatgttatctaggccgaggccagctcgagcgagacggaggttcctcccaaggccttggtcaagcctgcctcagggcatataaccgtacatggaggggttagttcagttgttggagtagcctcctgcggcattcgcggggagttgttgccagggtagttggccgaagccgactcgggcgaggcggagtttcctcccaaggttgcggtcgactttggatgagcggagttccctcctgagggtgagaccattctcagacgcacgcacatccaatccgtagttgtttgagcacattagtctgcatggggggggcagtggccgttattcctgggcgtgcgtcattgtagttggtgaaagtggatgggatcgtggtcccatcgctccctatttgactgcggtgtcacgtggtgagagtggttgggctcagggctgttttcctgtccgaaatgggtttaggcaaggcaaaaatcgtcattccttgaagaggggacctcgggcgagacgaggacctccccgagtgctgccttcgcctaaggacaggctcaggcgaggcagagttttgagcaaccgacgagcggggtctcgggtgaatcatgattcatccttggttgaccttggggaacgtgtcttatgatttttcggtagtttag

SEQ ID NO: 82545 - DNA, 324 bp, Zea Mays
gtcctggggcggagggtaagaggacgattgacccggatccccgcgatatgggggtgggtcaaactgctccggatcatcaacataagtttcttcttcgacgtcatcggctgaagagaaaggtaccccatacgcctgctggtaccactcattcacatctggaggaggagggtgaagaggtacatcaggagagcgaggggcgaagggagtacccaaagcagaagcttgacgacgaaggttgtcgtcggtctcccgctgacgtcgagccacctcatggacatctgcagcaatattacggcacatagagaagaaggacgcaaatccatg

SEQ ID NO: 82546 - DNA, 274 bp, Zea Mays
attaactgctgtacctcctttctggaatcaacacttgctgttccgtcgttgactcatttactagcgtgttgtgaaccttattttcttcctttgggttgtaaggatctcgacttctgttttctcttaacacaatagatacactgctctcaactcccctgcgctagatcgtgcttcccactgagcagtatgttcttttatatcgcacttgcgtgtgcaactttgcatatctcaagaaaaggattttacatttgcctagatttatatgtgcgttctc

SEQ ID NO: 82547 - DNA, 323 bp, Zea Mays
ggcaaaggttgccctcgtatgaattcattggcataccatgatggctaagaccgtgtaggcccacttgttgccgatgcatcagttgcctctactaagatatcatgggctataaaactggcaataatagaattttcaaatgcacgtgtaagttttttatagtttcttctatcccccctattcgttgttctacctgatctcgttgtaattctataatatgcataatgaattgattatcactagaattacttatagtgctatcatggagcggagcatgaagacgtcgagctttattttttcttgcttgacgatcttctggtgtcgat

SEQ ID NO: 82548 - DNA, 462 bp, Zea Mays
tgagaagaagttgatttgctttggcggagaagagaccatctcgaaaccagaaaatgatgaagtggtagtttttaagagcttcttcaaagcagggttgaggtttcctctgcatggaatggttgcggatgttttggagaatttcaggatttatcttcattagctgactcctaacgctatcgttaggctcagtgtcttcatctgggctcttcgaagccaaggagtagagccacttgctgaagccttctgtcgggtgcatgaacttcattatcaaacgaaggctagagaagatggactgcacgagaacttcgactgctacaattttgcctaccgcaaagacatgaatacaccgatggttagctaccgcgctaagtggccaaccagttggaaaactgagtggttttatgttaagattgatgagaaaaaggagaagcttgttcagagtccgctggacctaaccttcgg

SEQ ID NO: 82549 - DNA, 599 bp, Zea Mays
atcgacgtgacatcaagttgggtgatgagccgatcttaagccatgtaacgcgtcataagtcaccaatgccgaattcaacaccaatgcaacagaaagatagttcgatcattccataccccatggtgcaggaaaatatgacaccgacctccacaaaaatcgttgaaactttcatatcacctcttgcgaaggaactcgacgagggggacgtagacaaaattgttccttagaatgtcgacgcaaacatcaaaaaggaagcaaaggttgacaccaatgttgaagggccaactatttcaaagaaaattcatcagcaaatcgccactgacgatgtcaagaaaccgttagaatcagtggcacgctacctgcataaattgcggagtgttatgacaaatcaatcaaaagcggaatcagcatctcatggagtacgcacacggtcccaaatagacaattttgaagtatgggaagaagatggaatgattcatactcgagaatcattacatcttaaaaccaatatctcgatatacaagaaggaggatgttcctcctaaatttgtgaatgggaggccgttcttgacgacggtgcaactttctaagttgtcgact

SEQ ID NO: 82550 - DNA, 1212 bp, Zea Mays
ctgaaatctttcatttcccattcttgatctgtactttcatggtgtcataaaggttgattccggtgacgtgagttaggtgatagtcgggtctttgtttcagaatcactaaatgtatgatttggttgtatgaacgagttgatctgccattgtgaagaggaacaacattacctgctgtttaattagttggttctcttcgattccttgattcctttattactgaatgttgagcaggccaatatgtacttaaatagatggaagtatgaataatttatacggctaattcgtcttactcgaagttacctcgcactattcagatttgttaaagtgtactcttttcttattcctcagactctctgcattccctttaggcagcacaacaactctcgtggttgtagcctccagatatctgatcttcttggtttatgttctattttttttggccaagtcatgttcttccgcttttgttttttccaattcggtcataggccaggttctcttctcttatttttcttttccccattttcccttctcccttcttttataagatttccttagatcagaatttgcggacaaagcaccagaaaagaaacatgcaaacaagtcattgacacagacaaaggtgagctttggaagaatcaatctgtacactttctcaaagcatcagatctaacctacattgtgaatttattgtataaacgatacataaaggattcatttgtgttttgaattcttagtggcagcttcgttttggaatgacactaagtggtaaccttgctccttaaggactacacgagtgaggtgattatttcttacattatcctattttctagacaagtaaaatgcagtagtcggctgcatgttatgttcaccttaattttttttatttcccccagaacttcctttcccccttaatttgtgttttacatgttcttgcgtttatctacatgtgtgtgtattatcctatatctgatctaccaagtgtagcgacactaccttgcacatatatctagatatgctgcaacatacaactcatctataaacttataaaatgcaggttcataactcagtctgcttatggcactatcaaacctgtttacacgatgttatgaggtcaagttccaaatggagcatgttagcccaaacagaaaaaggaagctaagtaagcgatatcgttccaacttaattcagaacacgccgcaatatcaaattggc

SEQ ID NO: 82551 - DNA, 310 bp, Zea Mays
attggtagggcatgttaactttgtatgctacaccatgtgatgtagtgagctaagttagagatatccatgcataattcatatctagtgctataatattttgccccttgaggttaggggccacctagtcataaaagtctcgatcagagtgacccttctaccgtgggacttaagatcaatccctttaacgaaggttcttgagcatgtcttggcgatagctgggtgcacacccatcctctgggtgctaatagaggtcctagggcccatgcaagagtgatcctataggtgggaccatacctcctaatgtctcatg

SEQ ID NO: 82552 - DNA, 656 bp, Zea Mays
cgcaggaacccgtgtgtagcgagggacgtccaaaggccggcgcaagctcaaccacacacgagtaccacttcagcgcgacggcaacagcaaaggcgcaggtaaaaaaatcaatattttagctcatgaggtctgctcgggccttcggtttctgaagccttttctgcttaaggccctctcagatcgttcttgctacgcgcgaggtcggctttagctctactgtcgctgtcctaggaccttgttatctccaacctccttgttttgcgcactccggatgctgttactgcgcctgcatggaagccgtgaccgcctatatttcatgtcgcgaaaaatgcgggctttacctggatccttgcagaaacgagtgggcaacgctgtcacagttaacacagcagccttgctggcatatacacatgcatggaagtttagtcgtagtctgccttatttggtaattgacgttgcgttgttatttttacacatgtagtctgggaatggtttcgttagaggtacaggttgtattcattcattcctcccctttgttgcggtgccggccgtatggctcgtttatatatgctgtcttctattccatcaaacgaaataaggtctatattcaatcaagcatgctagttccttattcctgtgtgcgttctctatcagcg

SEQ ID NO: 82553 - DNA, 572 bp, Zea Mays
ctcaaaccaggcaaaagagctacgctgataatagaagaagaccactggaatttgaggaaggagatcatgtgtacctcaaggtgtcaccacttcatggaatgaggagatttaaagttaagggcaaattgtcccctcgctttattggaccattcagaatctttaggcgagttggggagatggcataccaactcgagctacctgataatttatctgatgtgcataatgtattccatgtgtctcaacttaagaagtgtctccgtgtccctaaggaaaagttaccaatggaggagctcaatgttcagggagatttgatgtatacggaatatcctatttagattcttgacactttgactcgagttacaagaaataaggtgataaagatgtgcaaaatgcaatggagtcatcatggagaagatgaagctacttgggagagagaagaagagcttcgaatagattttccccatcttttccctagtccttcctgaatctcgaggacgagatccttgttaagggggttaggatttttaatacccaatttgtaatttctaagagataatataaatggagaaaca

SEQ ID NO: 82554 - DNA, 562 bp, Zea Mays
aaagacggaaaccataggccacgctcgactagctgcaccccaagtccacactagaagctagtcctgctagggctactgttttacaatgacttttgccttttccttgtcgtcaaacaggatcggtcgtctcctcctgtactgtagtcacacacgtgtcggcttaagcaaaagatccagcgctgttgtctgaatatacggctaatatgatagtatctaccaacatgaacactgttgttggtgttctgaactaacaccaacgagaaaatttgtgtatgtgtgttgtaagtctgaacggtatatgtgtcagctatcgtaattagaggtacctgaattattcccctaaaacacgcttaaccccaagaccaccatcaagacacgttccccgaggacaatggagtgcaaatcacacttcgcccgaggcccctctcaaggtcaccatagctctgcctcgcccgagcctaccctcggatagggtattgttctcaagagaatcctcgtcctggccgaggtctcctctccccagaaccgttgtctccacctcgtccgagcccgtctcgggtaa

SEQ ID NO: 82555 - DNA, 912 bp, Zea Mays
atggatttccaaatctggacagaaaaagaaaagagaaaagaggaaatagtgttgggccaaaatcggtacaggcggcccaacaatgagaagaagcgcgcccgcgccaacgcccgtgccaactttgcactgagctccctgtcattttgaatattccgaagcaaggtcaacgcactattgagacgagtcactgacggtttatacggaacccctcggacttctaattctttaccggctgaagccctcgacgtcagacggcgatgcgtagggctccgacgagcgcgtgaaccggggattttgctcagtggttggtgtcctactttggtcgaaaccaaattcaagttctaaggaccatttccccccaataaattttacggttggtgatctgccaagctctgcccgcgaggacagtgaacggcgcggacatgtgctcgtgttccaatcgattagcgggctcctagttcaattcggtggtttgtcaagcatcaccagcatgcatggacataagaacaacgcgcgaatcggatggtgtcttaccagaatggactgaccatggtggagtggtgctttacggtggcggagaccaatttggggaaaacggcgttgcgacggctctgggtgaaattggaggcggggattaaggctacacggacgtaagaaactatgcttttcaccgtgctcaaacgatttgggcaaaggtggagaggtcagtgcgaatttgactcgatttggtttactggtatgtgggtgatgaccgagcctcgccgcgaaccatgggctatttatagccgcggaggtccacggtgatggcacggtggccgccgattaaccggggcctgccacctccccgttttaacgccacattgccaaagccttttaccgtggccgccgacgacctatcccgaccgccgtggc

SEQ ID NO: 82556 - DNA, 421 bp, Zea Mays
caaatgcacactttgtgcgcttgatgaagaggtggtggcgacgcagctcgttgagcacggcgcggaggtgatgaaggtgatctgcccatgtcttgttgtatatgaggatatcatcaaagaatacaaggacgaattggcggaggaaggggcagaggacataattcatgagcacctagaacgttgtcgaggcgttgcagaggccgaacgccatcaccaggaactcgtacaacctgtcatgagtgcggaaagtcgtcttgtggatgtcttccagtcgcatgagcacttggtggtacccggagcataggtctagcttcgagaagtaccatgtaccatggagctcgtctagcaactcatcaaccactggaatggggaaggcatcctgtatcatgagcgtgttgagggcacggtagtcgacgcagaa

SEQ ID NO: 82557 - DNA, 417 bp, Zea Mays
cagaaactacaggggctatctcacaaaagatcataagactcaggattcccaccgcactggacgacaggttgaataagtaaaacgccagggtctcttttagaaagtgcgcgcggcgaaggggtatcggaccataacagccactcgatcgaaaactgacggtccagattagatttaaccccgccaacacaccagagccgcccgattaaatcctacggttccaatcgtaaatgcccagatctaatgacgcacacccgatcctgatcgaacaactcacgctctggttgcccctagatccaatccggtgcgcacaacacggatccaacggcccagatcaacttatgccatgatctaatcctatccgcttatccccgatcggacggacagtatccagtcaccctcacccggttgtattagacg

SEQ ID NO: 82558 - DNA, 389 bp, Zea Mays
tttggatcttctgtggttccatttggtatttatttgctagtcggtgttctctttatgtatcatgaatcagctgatgacgatggcccaaactatatgattttgaagacaatacaaatcataagcacatgctctcatcctgttcctcaaccagccggagctcgcctgctcctgaaatctcgatcgaccatggcagtaagctacaaccagcgacgaaatggcgtccactccgggtcgaacgccctgtcgcgcataggatcagaacggcaggcatcgccttagcacgtacagacggaacgaatgaaaaagacggcgagcagacagcaactctggcacgtaaacgtcgtggttgttgcttgctgcatgcaggccaggccaggccaagcggcgac

SEQ ID NO: 82559 - DNA, 830 bp, Zea Mays
ccgggctaccaattccctttcaagtcggagggggtcttgagttctggctgtgtgttgtcccatcgccgtgctagaggtgtccctgccgcgccgtgtgtgagcagtcagctaccccctgcagctccaaatgtcaacgtggggggatggtcggttgtccggccgcggcattggtggcgcaagatcttgcaggatcctgatggcgcttcacggaacctccaatcggacaagacaggcactagtcatttcaaattgaagctcaagggtaaatgctacaactgcttctcatcagcgcatctcgcgttcagctgttcggccccttcgcgttgttggctctgtctgaaatctgggcaccgggcgagatcttgcagccaaaaaggctaccagggaccattcaatgctgcgctcttcaacactggaccaaccaagcattcatcaaagagtaccaactaccaggagttactgccaaagtccaacttcctccataagtaccaggccctttcccaggaatcctctcacggtctgctgcacccaatcctcaagaagtcctaccttcaggctgttcaggagggacccgatatggaggcgcgttacccaggagatcccagggggaggcctgcgcgtgctttctgcgcggtctcggcgactggttccattcgtcgccggagagatgagttgatcgacaaggccatcgtctgctccttcgacggcaacagccatgaggtggacactctgtccgcaggggacatgctgagggaaaagttcaacctgcaccacggtcagtaccagcttgtcaagcacttccctgagcaattctttatagttttctcgga

SEQ ID NO: 82560 - DNA, 866 bp, Zea Mays
cggtttgccttctaaaaccgggtgtgacacaaagttggcccaagtcactcttgagaaggatgaagtcatctaggttagggatttggctgtgttggacaatgtgttgtggattggcgaatgtcaggactaccataccttgctggtagaggtcatcagagaaaggaatacagctttgtctgaagtagcgcagcttagggcaacacaggtcaacctgatgcagcagctgaacaatgttgaagcttggaatactaatctacacgaagaggttcactagttgcatgcccagctcaatcctgtcaacccgccagaactgggggaagcagatgtcgtcgcagccgacaatggaggtgcagtctctggggccagcagtgtgcaggagtggttgttagttgtcgctataggataggctaacccttttggatagtgttcctaggagtaggaacaagacttatggtgcaaggccgatgtaatgatggcttctgacgcgtgtgtgcgtgtgggggaaaacactctttgcttgtatgtgcatttatatattatgaagtatgtgatgatgatgttgcgcatgttgggatgtgattcttgccttacgatttttcacatgaagtttccttctatgagattgtatggcatgatttccttatttcacatgtgttacgacataactcaccgcctacccataatgaaaatgtgtagatggtgactactcgccacattacccggggccactggagcttctggcagtggtaaccaggagggtgaccaagaagcaccacttcctccacctccgccatacacacccgagcagttcttcgcacaacttcttggagctcagaggaacatggagaacttgcagcagaagatgg

SEQ ID NO: 82561 - DNA, 490 bp, Zea Mays
gcccctgtcatttttttgtgctcaacatatgcccatgcctttttgtggaggttgacgaaccaaaagcatatgtactgccagcgcctttcaataaacagtagttctcacaagtcacctttgttcccgaagtgagaattaagctcgatgcaagtcactggcttttcaatccaatagggtgatcgttcaattgaacgtcaatgcataaaggctgttttggattgcatctttctcggccatgaccatcaatagatcacaaggtatataatggaagtgcccccaacctgaataggcaaagggactatgcaagtaccatgggttcattgtcataccgttccaccatttgaacaggataatatatcgacgatgagtaagcgaatgcaaagtatcctggcattagtggatgaataggtgatgcttgctgcatcgcctttctgaccgttttattcatccgttttgttttagcgggtgaccggggtttctttgttggccg

SEQ ID NO: 82562 - DNA, 556 bp, Zea Mays
attaatttcctattttcagctctctctggattgggcgccattttctgtaaaacacaggggcgccaatgtaaaaaccccgaggcacagagaacagtgccccgggacggcgggttgttttaaggatcttagaagggctctttagtaaaaatgctaccacgaaggggtacgctgcactacgggccgttggattcaaatctgaaggccgagattagatcgtgttttaaatgaaaggggtttgtaaccgtgatcctcggatcttagatcaacggccagcacaccccacaacacccaaccatcggtttcgagatctgcggctacaattcactagaacgaaagggtatgggtggttctaatctccaccgctcgctggcaatccgacggcgcgcgtacactcttccacctccgacgaccaggggaggtggagcagaggcccgcgggggctctccaccagcgcgcggcgattccggctaacccgacctccatctccaaattccttcgttcctcgcccaatcgacgatgttacaaactcaccctccctaccaatttctactgtcgt

SEQ ID NO: 82563 - DNA, 446 bp, Zea Mays
cagaaacagagggagggagtttatcatcagtcaacatcatcttcgttgcaactatattttgtccatgtgtttggactttggagagttgcacagaccctcggcgtggaccaggggcatcggcatattcacttcatctgcttcgtccgtttctggtgctccgagcaagcggaggcgcaacctttttcgtatgaccgtatgggtgggatgtcctctgctgtgcccacgaccttttatgatctgcaaagtttagctgacggtgatgtcgtaccgacaacacgatcgcgtcatgcaaatatattacatttttccagctctttcacgcgtctgatatggaatcatttggtcctgttggttggcgatttggccatcgtggcccatgagttgcggtaaagtgatggcaaagttagcgctggtccctccctattgatggtaatcgtgcttactcc

SEQ ID NO: 82564 - DNA, 549 bp, Zea Mays
ggtagattcaggtgcaaccaagaacaactatgtttatagtagtactcgaatcggattaggtggaattggattatttacattgagcctctcagacactatatagagtttacatgacttgggccaaagccggtacacaaggatcctaacaccaactaactctatcctagtcgtgatatactctaacaatgttaagtgcaactaagaacagcagaagtagattcaatcaagatcctcagtcacaagaaacaatgtatagtttgacaaagcaaagttgagatcaggtccatatgcacctgaatagtcgcaagaaacaacagataggtttcaatcccaaagaggccaagtacattttgggatgtcgccgcatttccacgccatggtgacagaattagaaaagagtaactcagttgttagtatgtcatctaaatgacactaatcttggttcgaatgaactccacgatacagtactcatactctagttgtctgcatagaatggtacgatgctagggtggggagaaccagaaaagcatgtacctccgttgaggtggt

SEQ ID NO: 82565 - DNA, 426 bp, Zea Mays
ctatccacggatggcgtagaccgtccgtccctcgagtccagaccatccaccctgcgctagaacacctccaacgatgcgccaacacttatggaggaagacgtcctagtgggggaagacttggtcgactatggtgctacgccataacactcacgtatggacgtaaatgttattatgttctcagccgattgtactattatcagtggcgatgaacctatcgttgctcaatttgattttggtcctaaagaggacaccttcactaagccaaaagaatcagtcaatcattaaaagccgctcttcgtgcacgatcatattggtggaataccgattgctaagatgttggtagacggaggggcgaccttacatttaatgccttattcattgtacagaaaattaggaaagcaagatgatgaactagccaagactaat

SEQ ID NO: 82566 - DNA, 567 bp, Zea Mays
gttcgacatgcttcaggaaaacagctatcggcagagcaagttgccgaaactccacattatgctaaggagctgaaataccccaagggatccttggtatacggaggagataacaaagatgtcttcctctactgtctaccagacagtaaggatgtcaatgtttgccatgaaatgatggataacatggggtatccaaagcttgaacttggcttgtctgtgatgacgaaggatcagcttgcagatagccttgcctacaacaacatgaaggtttctatactttgggttgtcattttgtaatttttgttatggtaaactatttttgtggtaattcttatcgtcgttatttgttcaatcttcgtttgccagggcttaattctaagcaaggctctaaaggcccaaaaggatgcagaggatgagagctgtcgaatagcactccgatcggaggttggttataaccctgagaaacgaagctctcacaaaagacgagattttgctatcattggttgagaaactgaaagccagcaaagccaagctatctgctcaagctgaagcccatgaagtcgacatgca

SEQ ID NO: 82567 - DNA, 606 bp, Zea Mays
gctggatgcggtgggaacggagttcccctgtttttctgtatgctgggggctgggctaccctctagtatgagcccgcgttgctgcgaagcttctaatttcctggattagttcgtgtttttcccgtcggcattacggtgatccggacggaacgtccttgctcggtgtagatcggggagaagagtcagaagtgctgtatagtgtattagtgtttgaccagtatagaggctaatgccgtttagagtaatcatttcgttatagtgtttgaccgttcgtcgcaaactatggtaacctttcttcccgacggccaagggaaactgtacataccagggctccggtcagacatggcggctagtcgttggctggcctggacttgatcgcttgagcggccgaaggatggagccccatcctgccctctttcaacggtccaactactacgttcgttctcttttcatgtatcatgtatggaggtagcaatttaaacaaacaagccaagccgcctacaaaagatctagaagacgaatttatgggtcctttgccactagatgtaaccgaatgaattggtgcaactatgtaactaaggcacaacgatggaggtcgggatctttt

SEQ ID NO: 82568 - DNA, 435 bp, Zea Mays
ttctttgataatctttctctagtacatcatcagcgggaggatgttcttgctcatccccgtccacttaatctacaacctctatttctatatcccctccgtatccatatgatcatcggttgatgtccatcctcctaccactacgtctcctaccatcgacacacattctcatatcactaaagtccctaccattgatgctccttcttcgtagcatttttcttatcaataccctcatccatacgcgtacaattatccacatgacgatcctccttgtagatcttatggtgctcctccatatactaccccatatatatggtgctcttcctttagtttatttcctgtatggtgctcctccccatatgatgctcatcttcctttacgttctcctaaaggcaaggtagtgcccctaagtagccacaaacgatatattgtgcactg

SEQ ID NO: 82569 - DNA, 448 bp, Zea Mays
agttttctaaagcacctacctaactgccactaacacccaccacatcaaactatttctgccccaacaagcactctccaggaaattatcttggaaattcttgatggatgttgttgtgggagagctagcccaccctaggctattttctcacccatcactagactagagtatggattaggcttagtccaaaattcaattggactttggcacgtggattccattgggtttgaactcaattggatgaggacatccattccttgcacatctaatagttttggattttgttgaataaaaaagttggataaatattgacttcgactcggcagcactaaccaccatctcggcacacgagggtcttctccatctctagcgacatgccaagacgctcctctaggtcgacaccaccatctgctggtgcccactcaaagcagtgcgacagctgtgcgagcca

SEQ ID NO: 82570 - DNA, 673 bp, Zea Mays
attcggcaattctgcctctgctggtgggctcagaatatccggcattatcactgttatttccaatttttgctctttggacacataatctttggcttcggttggcccgactgtaggcaccttcggcactacaatagacccttcagcgctccgagcggcgggagcgtcttgttctgcttcgacagtggaggaagtcccctcaccaaattcaggcactacgaccgtttcaatatatcgaggccggtgcgtcaaaaccttcattttcttgcccttcggcacatcggtggtggccgaagcgacatttttcctcttttttcctttcctcaaggggtagcagtaatcaggatatatgaagccaattgcatcaaaaaccctgtttaatcttttcttgccccgacccccgaaggctgcggacaaggcatcatcttcggccttggaatatgtcccaagcagctcgtcgttggtagcttcaatgcatttcaaccagtcatcatttggtttgtcaaacttctctctgtatctgaaggtatatttcaatcgaactaggccaccttcactggattcaacagtagttttcttcggcatttcccagctatccacaagtggccacaccctataggctatgtgctcttggattatatctcttgtgccaatgaaagcacaaacattgctaaag

SEQ ID NO: 82571 - DNA, 285 bp, Zea Mays
atctgttgtgttccgtcgtgcttcgcacaaactatcgagttgcgatggacttcatcgccctctcaaaagcaatatgtggtataccccgtagtgtgtcgacagtaccaaacaacgatattaaccaagcgagatagagtattgtgctgtaattacccaattgaacacacatattctaagaatgtagcagataaccacgtgcacaaactgtatttaggcttgtctcccctagttgccctataaatacctatgttggggtcatgacaccaaacacattttacaaggatc

SEQ ID NO: 82572 - DNA, 398 bp, Zea Mays
cgctaccgcacggtaaagcgctatcctttgattacttcccctcctggctactactacaccggtctcatggcgtgtgtttttatatgcttaatgccactccttgttagtgctgttgctttcttgatcgatgtgtgcggtgtgctgctacttcctatagctctaatggttttttaatggccgatagtgagggtgcttagatactagtaccaaagaatatagtttctcctcttaatgtttgatccctaatggcttgtcatgccgaggtaatgcggcacagtgacttttaggtgcaattctactgtagtaccagatagccaaacaagtcctgccattttgtacccttggtggcttgtgatttcatggattcatgcttagaactacgcatcattgtttttttc

SEQ ID NO: 82573 - DNA, 463 bp, Zea Mays
tgccttgttttatggtttacagcaatcaaaaacaggtgaacaacaataagaacataaactcataattcatgcaaagagtaggttgaaggttggacgatatggtaatgacaagccaacatgaatacggcgcagtggtcatattgaaaggcgtgaaaccatcagttgccaagccgatacgaatgtttcttgcatcgctagcaaactctatgtcaaagttgttaatagccttccatgcatcagcatctgatgggtgcaccattaacccatcttgtctgtccgtacaatatttatgccacttcatgtgcatagcggtcttcctcgagagaaacaaatgtttcacactgggagtgagaggcatgaaccgaagctgtttatgtgcaacctttgtcaccaccttctccccatcttcatgtacaagctccacgtaccttgacttgccacattttaagcatttctgctctct

SEQ ID NO: 82574 - DNA, 316 bp, Zea Mays
agaagaagaacatgtgggagtcctcggatccgaaatggagggctggtgatgtcgatggtaccatgcgggtgtgggcggagatgtaggcgaagagcaggccttccgtcacccagcttggactcaggtaggagaaagaaggctagccattagatcttcaattggacgctctagataacgtttcatccggatccgtccctggccgtctgatctggatcgggtgcttgatagtagatctaagagttttaaatctcgggcgttggtttagaatcggaggactgtctgttggataccggtttgtttttagttacgcttaaat

SEQ ID NO: 82575 - DNA, 373 bp, Zea Mays
catgttttaacctagttcaccctacactaaataaagaatgatagaccaacccaaccaatagagtcatgatggattgcataatctgtctatccccacctaacatcaaacaaacttttgacatacatcatgaattctatctcatccctatctatcttaaacatattccctaactacgatgatatacaatcaatgagaccaagaccggaggagaaaagatcaacctcatcaagggaggagagaagtcgaagtcgatcttcagatgcattaccacccaacaaggagttctttctcgccataaactttcttaccccaagctattattgccctaacctaacctacccatcttttatcctacataataaagtggctagac

SEQ ID NO: 82576 - DNA, 767 bp, Zea Mays
gataagatcaatgtgggttagggaggtggaggagacaatagtgttattatgatttaaggttagggttaagatttttgataagccctccatggccatgcttagaaagggaagggtcaaacaacaatgatcgacacgagggtggagcaggttgaagggcgatgagcaaggcgctggtgtcgctacagagctggtggaggaagataaccagatggatggtgccactcttgggggcgacaaggttgcaatcttttattcatcgactagatttaggggtgggtagggatagagcagcgagggttggcatccaatgttgtatgagccaacgactggggacaacactagtggttggaggtggggtcagttggtacggttcgtcgaagaagaatagtagacaatggttagagacaaggaataatgtgtgtgagagagagagactcatgcgtcagatgttgtagtagcacgtgcactaattaagacagatgctttgctgatgccatgttgactaggtgttggagaatagttgttgtcgactattggggcatcttctccattaatcgctataggattcaagtggccctatagaaccttctgagtagcacctccattctatattgttcataaccacaactttttgatgcatgtgtaaactttctatagagccactcctacctccaactatattgttctttaatcactgtctggttgtgtggtctctggtgaccatcagaagataatgtgatcccctctttctttgtgctttgtttaaa

SEQ ID NO: 82577 - DNA, 357 bp, Zea Mays
tagccataattgaaagaattggatatgttagtttatgctcatgccaccaatttaagatatcaaaatcatcctcataggcagccacattgtcactatcaaggtaaacagttagctcacaaatacccacaccaggtccactgctacctgaagaacctgatgcagttgaggatctagaagcacctgttcctccaaaaattttaccccaagcctgttttctcttacttgtcatacctgattgatgtgtggttctagatggcctagcagcaccaaacttagttttcatacttgggcatatagcttatacaactcagtcttaacatcagcaaaataagtactgtaattataattgttagattg

SEQ ID NO: 82578 - DNA, 818 bp, Zea Mays
atatcctaaaaaactctcccaaactcataaaagcaaatatcaactcaaaaataaaactagaggggttgaaagaagaagcaactcaaaagctaataccatcagattttccacaagatgaaaaagccatgagggctgagtgtggttacgaccacacttcctcaaaatcgcatgaacgtagatgtgaaggttcaaatcatccaaggatctcctaacaaagtacgaagggaaatgaggattacaagctaaagagggaaatgaaatgctaaaagtgatggttgaatggtttagccctcccttcctatttatagagggttattcctctttcctaagttacttttagctagggcgaaatggaccaacttttggaattttgatttgacggacacacaatcttcacaaagttgtttcgtcttaatgcatccttcgtgatgacaccacgtgccctcgattccctccagaactgttctactaggttttgaggcctaaacccggtgaaacctatgaattgtcacgatgggtggtttgaggctcaaccactaaaaccactgcgggtagtgtactccatacacattccccacgacatgtacatgtgtcccaccagtccataactgcatcgaagacataattcgctcctccatgctctcacgcctgttagtgtccccaagtatcaaccgccagactagtcacctagcttctctagtctctcggtcaggactcagtgctcgtccttcgatgctcacaatccatcgatacgaaactgcatgaccttcaccttcaccgtcgaccaccgtctccggactccacacatatataccaca

SEQ ID NO: 82579 - DNA, 319 bp, Zea Mays
ctaaactcaaggagcacatgaggtattgtgaccagcaccctgaggagatcgacaaacttgcaaaagtgaaggctcaagtcacagaggtcaaaggagtgatgatgcaaaacatcgagaaggtggatctgtcctttttctacaatggttatcagttactaatcttatggggattgatgaagctttaggaatcaactatcttttttctttactttgatttactaaaaaagtgatgctcaaatggctctacattggtcatcaggtattagatcgtggcgaaaaaatcgagctccttgtggataaaacggaggatctccgatca

SEQ ID NO: 82580 - DNA, 1155 bp, Zea Mays
caaaatattaataaatggatgaagatcggtaaggcatccaagcatagagcaagtatattaagaggctataatctagctaaatgctaaggtggaggagagagaagaagtaggttgtaaacttatagccgacttcgacataagagagggacaaataaagtcttacattaatagtgaagagttaaccactatacaaatagactaaatggcaggctacatgaatccttacacaaccagattagctttattattaaacttgcttaagtttaatgatatctagtggggctccactcttcaattcttaaccccacccctaccccacatcacttgatttcttatgaagttattcttggtctaaacatttaaacggattaaacaatggcctaacatttagctatttattcaggccaaaagaaatcatgacctttaagtgaaaggggtgaattagacaacctatttcacaaaccaagctctctaatttttttatagttaaaacttatgtaataaacaaattatatgttgagaataacctcagtcttgatcagaagccgggaagacgagaccgcgggaggagataacgatagcacctatgcacgcgagcccgcttgacaaggataccacataaacctatgccacccgatacaaccaatccgacctgccgaaaaaacccgatccgacctatacgacggatagatacgagtcataatttttgatccgtaataattcgtagattaagtacgggacatgattttttaagcaaaatctgatccaactaaaaaaactcgatccaaatcaaaaaaatctgaccaaaaccaagaaaacccgacccgaccgcgtttaatcgagagagagacgaaccaacctgatccaacccaacactgtgcacggcttagaaatgggcgtgtcaaatgatccacaatcctccgacccaactcagcgtttgaacagatttaataccacataccagccttgtcggactagtgttctgaccatggtcctggacgacgtctctgcgcacatcgctctggccggggcctgggcaggggcgcggggccggggatgcgaggtggggtgcgcttttgatcacgtttccggataggttccggtctccggaggacccctctttcctgatggttcgagctgttgattgtgtcggca

SEQ ID NO: 82581 - DNA, 978 bp, Zea Mays
aacaactattgcaccatgttccagcactttgaagtggcttgttccgactatgcctataacgccatcattggaagaccaaggctggccaagttcatggccatctcgcactacacctacatgatactcaagatgtcgggctcccaaggcatcgtcaacattactttgacctcctcatcagtcagtcatgcaccatcttccaagggcacattctccccatgccaaggggacgtgacacaaactcaacaaagggactctaagtcaagacaacaatatcatcaacatttatagaaaaataacataacaagtgacatttaaggatagaatgactgaaacttacaacaggggaagattgcatgcagaataagcttgcagagcaccatcattgactatggcacctctgagcatcatctcaactcagttcagaacatcttcctctatgattaccctttcagtcactcgggaagggtctctagtgccggtgtacagataagtaggatatacttgatgcttcaatgaccgaatgttcttgaatacgaaatcaatcacaaccgcttcggcagtcaaagctctatccttaagatttgcaatttcactcaacaacactctggcttcagatatctcaaagtcagatgggcacgtctaccccttcgacatccagctcgtcatcttgggctcgcgggttagctctgaccatctttgtctaattttatctaacccccctaactcagtctccgtcttacactgtctcacgcaattcatcacacaaccatctctttcactcggccagaacgtgatccgcgacaaatttgacaaccacctctcgcgttatctccgttgtatatatacggacaccccacattatcgcataacccctcgtctccctccctggatccaaatcatgcaggagcagccatctcgtctcggtggttaccaggcccaggtgagttgtctccctgtctcccctctgttgtgccttcc

SEQ ID NO: 82582 - DNA, 598 bp, Zea Mays
aaacggttgaaaaccgaagaaccagcccggacagcatgccgagcaccaccaggcggcctggcaaggttccgaatcggaacagcattggcaccggtgagagggagcttaaccacgtccgcatacgacggagaattcctgacccggaccgtcgaccaggaggcaacttcctcatccaaaaaagcctgaattcatgcttccaattgggtccaccacgattccagaggttgaagaaagctttgaactccttacgctcaatggagcccaagttataaatgtgaaaacccaccgccatcgaggaaaccgaaaaccgaaaaacgcggtcagccagctgaagcacttcgaaatccttggcgagcccaccaagagcagcctggagaagatgaccgaccgagaccgaattcaacttgaagatgcatctgccaaaggacaccaccagccagaagggcgaccgcaaacaggggcaagcagggcaaaccgaggcttccaaggaatcccagagggattccgcgaaggccaagcctggccgaaagtccaggagggagaaatccatagcagaaaagcaagaagaccggagagaaggacacgagaagcagagaac

SEQ ID NO: 82583 - DNA, 387 bp, Zea Mays
atttgagtgttccaccgtgttggtcggtcaatcacagagaataatgtccagacactatttggcccgtgaactaatcatttgccatttttactatcttaagggcttggataaaatttaagaaagcaatctaagaatgtttggagcaaacaaaaatttggttttatggcctaattcggtccttaagattaactcttgcaaaactgaaatactatctatgtctatccactcagcaatcagcatcctgcagttacagatgtgctgtaggctagtggcactcgaaagctgttctccacaagtattcccggctgcggcgttgttgtccatgaccgattgaccgtgcaagctgacggagggcactgaaatctcggcagattttttaggatatat

SEQ ID NO: 82584 - DNA, 607 bp, Zea Mays
cttgttccttcatcttcgtcacatcatcattatgagctttttctgcttgttcttgctccttttagcttcggctcatttctctttagacgcttgaagtggcggagtgttgttgttatagtgtcagatgttgtcgctggagttggtgtcgttgttgcctttagtggtgctgggagtccaggcttgggcgccatcacattattgctttccacgatgattgctagacatcgttcgtacgcccgggcaagcgacatggtcgtctccatgtcctttgcatctagcatctcgacgtccattttagcggttgcagtagtccgttggtgtagatattgacttgttgtcactcgttgaggtagccgacgtgtgccacatgcgctagaagcgctctgtttagtcgttaatggtgctcgtcttccttagggaagccaattcttccaaggggttatgcctggttaggggtccaaagtgctcgttgacgcaccaagcaaagtacgccagtctgtcacctcgttgtcctacgagagtctcatgtaccactgttgtgcagtacccgttagatggtaagtgtgtagcatgtttttttggtcgtctggagttcgttggaccttga

SEQ ID NO: 82585 - DNA, 791 bp, Zea Mays
gttccatttagttgcgaggtcgctagggttacaagtgaccccttgtccaaaaggacaaggaaacgccatctttctgttcgtatcctcatatataaaaccaagcccggaagatgctcgatgagcgtgcattttttttctttctttctttctgaaatggcgtagcaggtggaacacacctttccatcaaaactttaaacaaggaggagctaaggatgtaagttggcaaccccgagatttggagtcctgattattgcttctgagttcggaaggcatcaaatggtgttaggatccaagaaacttctttcagactcgagagttgaggcagtgtagtaatgtatgtattgcagatggtcagtgctggtaggaagaggttatccagccaactaaatggcataagaaaacagattttgttctcctgatatgcgtgtagtcgctggattaatgaatttgtaggcaatagtttggtgattatttgagttgttaagcttctagcacagctctaacggcaagagttgttagtgtcctggtgtggtatcaatcacttcccccctcccccccccccccccctgctttttgataaggcagaggctggtcgatccgtgtcaggctcaggcgggctctgcgttgtttagtgttagtgaagctgagcttcacttgcctgctcacctaacgctactagctagtgcatcagagctttgagagctgaggctaccaaatcaccgtagacaaataccatatgcatgcttgtatgagcgagacatttggagacggaaatttgccgtgtatctgca

SEQ ID NO: 82586 - DNA, 602 bp, Zea Mays
cgtcggatgaatcttcttcgttctgttaggattgtgccgcaaatccccattgccgaacgacgaagcaggatctccctggctctagggtatatataccggtggcactcccctccttgaaccccaagtctcgatggttagtatctacgcctcgccatgacctccgagcatgaggaaacgttggtgggagatcgaacgggaagcagagaatgggatgaacgggggagtctcggattgggggaggagaccgtagcatcgtggcctggatcatgacttgagcttatgggatcatccgtgtcgtgccgcacgttcctagcggtttgccggccgaggtcaacccctggagcttcatggcgcgtgccggagttggcggtcggcgtcacgccgtggaccgggtcgatcagcccccttttgcatcggtgagcccctttaacgtgttcaccatcttctatgccctctaatacgcgttactgtgtctcaaattgggggcgtttgtggtgctagcccgtgttcaccagaaccacaccatcgtggtgccgcacccttgctgtgggcgggagtctcactgccaccatcgccggtgcgctctattccattgaattcac

SEQ ID NO: 82587 - DNA, 1510 bp, Zea Mays
gccaaccgtcagcggtgctacggtctatgagacttgtaaagggccacggggcacaaagcaggaagccagcaaggctataaggggcgaccaacaatgggaaattaggagggttaggcgtggggttcatggtgttagggtttgttctttactatgtaacatgtgctaggccaaaaaaacactatggatcgatttcagatatccaacggataacccgcgggtagaatgtaatatcctaatccgtgcccaccagacttcggatcggatttgggtctgacccacgggtcaaaacatgtatccatatccggctctgtcagatcggatttccgatggatatccaaatccacggatcaaattgccatccctactggagaccgaccatcgtggagcgagttcgtagtttgctcgttcgcaagtgtacgccgtcttgatagatgtgaaggctgtgatgatcctgcatggtccagacatcttcctctttaggtacatgtagttaggtatgaccatgaacttggcatagcacgacctactgagcatggcatcgtaggatcccgggaagtccaccacctcgaactatagcagttctgtgcgaaaattggtgtggttgccgaacgtgatgggaaggatgatccgccaaggggtaggcctagtggccaggtatgattccatggaatggtgtcgtgctaggtcacaacgtggagtgtgtgatcctcggtccgttgatggtcacaatatacatgatcttgaggccacttcccccatccatgagcaccttggtgaggcgcttagagcctacaactggctcgatgatgaggggtaggccccaggatgcgggatgctgtcggggtggtcgcagtgatcgaagacggttagaaactctgaccaccaaagatatagtgggatggttagctctgttgcatggacttctcggtgggcggctttgatgcgatgcttgtcgccgtaggcctcagccccaccaaatatcatgaggcaccctgttggctcaggaaaatcttctgtggggacctcctgctccaccggctttgtcggctcttccggattcgccttcttggcgggcagcatggagataaagcgcttcaggaactcgcactcctagagcttgtgtcggacggggaagccgtggttttgacatggcaagtccattagcttctggaaatagttgccaccgttcttgctcgacatcctaggtggtcgatctgtggtggcgacttctttgtcgtgccagggacggtggttccttcgactcttgttggggtgttctcgatgttccctcctttcttcgcagggctcaccagtgtctcatgggccctttcccatgcagaaaatggctcccactacgtcctccctttcagcgaacttggtcactgtgtcaagtaggtttgttgttgttctcggtcttccttggtcaagctagtggacgagcgctttattagtggttgtaggtgaaggcactcactatatccgcgtcagtgtcatcggggagttcgttcct

SEQ ID NO: 82588 - DNA, 616 bp, Zea Mays
tgcttggcaaaagcttagctacataactcgatagattgaaagcagcgaggtaaggatctcgagggtacaatgctaagcactattcctgaaccacactcaggaatagctctctggtctaaaaggtatcccagacatcaggactgcctccaaggagcccttacgccagggggccaggaaagggagatccttgtcttcaggccgagctaggagtacacaagggcaaggtccttttttgtctctccagcaatagcaacataccaacactccatgtgggaactacaagcgtggtgctgttgcattctgcataggactaacatctctaaaacaaaacgcaggtatggcccaacctgtgggttcgccacctcacccgaggtgggcctgagggcctctttcggttccctaaatgtggtgtacccactcctgctgggtcaaggggagaccccagtggctgctcatagccacgggattactaggtggctagcgtcttaggactaagacccaccatatgaagtcgcgggccagcagggctcttttcttagactcggccaccatcaccacaagtcccacaaaggactaatcagctataggactgggttcccataggcagaacctggac

SEQ ID NO: 82589 - DNA, 494 bp, Zea Mays
tctagtcaccatacacaggtctagcgagatcgtcggactactcggccacgaagaccgactgattcgacaggggaacatagagagaaaatatatatgagtgctaagataggtacaacagatgttgtcatacaggggaacattgaagagccgataatttttggtaaaccagccaagacaaatgaggagaaagacacaggagcaaccaacaaagcagttaacccgaaatactccatgccttgatggtgtccatcgggtctaacgtagtctcaaaagcgcaaattgcagcgcttgagaaaaaagtagagcatagaaaaagaggcataaaaatatttaatgacacattcgtagtacccaccaccacaaaaaggtggaggccaaaggccaccgaagcaactcaagcgggcacgaagatagaaggcgaaacactagctacatagttctctacaggtacgacagaccatcttacacctgagactggactatccgcgccttgt

SEQ ID NO: 82590 - DNA, 461 bp, Zea Mays
cgggggggtgttagatacccgtctcttgtaatgggcctggcccagttatttggtctattaatacactgcccaaccctactctagggttagggtttccattccaactgttaccactctcgtgcaagaaattttagcgcttcaattggcctcttgtgcatcgttgatgatgatcttcttgtccttgcccttatcaattgcattaggccgaacgaggactttttatcatcaaagtggatcatatttattgggaatggctttgtgtccacctgcatttcttgaaatttcaatcggacctcgttgatggccgattagacctgtcgttgaaacacattacaatcattatggtgtcagagaatgatttgtgccacttggagtaagcgtgatgcttgagtttgtcgatagatggaatagtatgatttattttaatgttgtcgttttgagtaattcatcgaatattttgt

SEQ ID NO: 82591 - DNA, 347 bp, Zea Mays
ctttagcatcaccaaaacataatatttcacttttgtgaaagttaattttcaaacctgacatgctttcaaacaaacataaaatgaatttaagatttctggcgccttctaagcaatcttgaataagaaaaatggtatcatcagcatactgtaaacaacagcaaccattttgaatgatgtgagggatcgacccttcaataagaccttcctcctgagcttttttaatcatacaagctaatccattagcaaccaaattgaacaaaaggggagaaaaaggatccccttgccttacccctttgtgagtagtgaaataagggcccagagtatcattagtcttgatggcaacttta

SEQ ID NO: 82592 - DNA, 330 bp, Zea Mays
ccggtgtgaagtgcaaacaaatcctttaggaatacttgtaggtttagagattattaaggattcttcactagatagcctcgcttgccttcatcattttgagccacatgttcttattcttatccaacttctaagactgcctctagcaggtcaaggatacagaaaataagtaacaaaatcgtactattcatgcgtccagtagatcgatcatgtgtcgcgcaaaatgcatgtcctctcacggcgtcgtgcatatccgcgagctcccacggttgcgcaaaagctggtttccttagcggtgcacagtaaaacacatagcctcaatattcatgtgtg

SEQ ID NO: 82593 - DNA, 405 bp, Zea Mays
gaaataagtatgcgtcagtgaattcaaacactcatctttttatagactatgttctatgacttttttgaatcttttgaaattcaaaaatattacaaatcaatcagaaaacacgatgtgtcaccaggtggttggtatcgattgattgggtcgatatcgaccaatagtgacaaattccaagcccaatatggttgatattgaccctaacgttcgtagggctggccctaagaccaacagaggtgaccactgaagggctagaaaggaaagtggcctaacatttaatagaatagtagagatagggctgcttgccgatgacccaactcacacgctgaaagcctgaaacacataaaagtcgcgggacgcgcactgtcctggcaacctagccgctagtccgccgcgcaattgtcg

SEQ ID NO: 82594 - DNA, 723 bp, Zea Mays
aggactactcccttttggtcggtgtcaataaggaaaaaagagatggttgtacacctggtggctggccggctagaacaagcagaccgcctggccgcctgggacacctagtcacctggacacctgatggctggccgactagaagtctaaaacaagcagacttccttttgtttattttgaatttggttatttgggttggctggatgaccgtttgggacaagcagacttgcttttgtttcttttatatttggctatttgtgagttgtgactgtctctgtgagctatgactatgagtgactatgaggttatgataactttgaagtttaaacaattattatgatttcaaaaattcaagagcatgcatcaagcttcttgagttgtttaatttcttttagtctatctgattgcaagtgcatgtgtcatgtgtgtaagtgcttgagtgcatactaaattacttgattgcatgtatgcaacaagatacttgagtagttgagttagtattttagtttcttaatcatttacgatgtgtgtacttgttatccgaataaaatatttgttaccgacagtattcgtgttcgacttgtccgtattcgaaaggtgaatatccgcatccgtatccgagataatctgtatctgtatctgtatctgaaactatccgtatctgtattcgaatccgactataattatgaaaacgaatacgatatcatcaatatccgttcgtatccg

SEQ ID NO: 82595 - DNA, 455 bp, Zea Mays
aattaggaggtcgtggtgcttagttgatagttcagtttgtaatgtttttcatctttgtgttcagcatacacaagaggacataagatattacgtgtttcgttggttgaacctctctaaactgccattctataccaaaaatatagtacatataaaatcatttaaagaggcattaaataatcctactagctcctggtaataatcacgatccaaaccagcccttaagctaggttgtttctttatggtcaggctgttagtttatttccatagaaacatttgcaaaaaaaaaaagagatactatgttgtttacaagaatctagcaaaatttctcacaagcaaaaaaaataaataaaaaaatgaaatcgtcctctagatcgaagggcacacacgagatctcgggcttgaaaacattcccatcacggggcgaggaacaagattcttatatatcaccacagcat

SEQ ID NO: 82596 - DNA, 514 bp, Zea Mays
cggattttgttatggcagagaaggcactacgactcaaggtaaattctctggccagtgcccaccctgtgcagcagtgatgaccattagagcacatcttcactcgaacctgacgaacctgacctccttgtgccgaacaggaacagaatttacggctcgagattgagaaggcgcgggagcaattcaagagcctactgaacgaatacgtttcgttgtcagctacgccgacacagaaacggtaggcatcgtcccgaagccaccggccgtggccggcggcttgtgcactcgtgctagctcttcacgacatgtgggtatgttcagaatgccagagaaccgaatgctagcaaggaagcggtgatgcttctggacggctttgccggtggcggtgtagacatagcgcgaaaggcgtgtgtaccaagctctcagaaactcgactttggtttattctccagtgtcgagtgattagatactgtacatacttgtaaaacaagaggtcaccttttctgtgtgacgaaaa

SEQ ID NO: 82597 - DNA, 413 bp, Zea Mays
tgatcccgatcgtatgacctctgatacaatgaacagtccttcccatagtggtgataacttgtgctacccttcccccgtaagaatttggcgaagtatcaagtctcccactgcaaaggaccggtgccgcacaactttatcatgatagcgtctcaaggtctgctggtacctagccgactgaattactgtgttcaatcattcttcctccagcacatcgatgtcttctagcctggttgcttctgctttggctatgctttcgaaagttaaccttggcgccccgaagattaggtcgacgggtagcactgcttctgatccataaaccatgaaaaacggggtatttccatgcagagcccgactgggttgagttctcaggctccaaaccacgtatggcagctctctaatccatttccctgcaa

SEQ ID NO: 82598 - DNA, 461 bp, Zea Mays
gggtgggcatcaccagcatacaaagatgctaaaacgagaacaaagagggcatgatcatacctatggagggctggccacggcgagggtgcgctttgcggtggcagagaccagtttgggggaaaactaaaattcaagctctctgacgaacgattgctagtgatttttggtggctgggtgtgtgatgaccttgcggggctggcgggggcttcaatttatagggatcaatggcggtggccgggaatttcagtggggacgcgcagcggtcggaggaggaagaagagtactggcgtagtggcttggtgtccagcaccgtggcaattactccggcgatcaacggggagctagagtgaatcatggtgttgcgatagataggtagagacacgcggcggacaacgatgatggcttaacggcggtgagaatccttatccgagggcggtgagtaaggggagaggtaccgcggc

SEQ ID NO: 82599 - DNA, 304 bp, Zea Mays
ggggagtgttgtcgttcaggcttttgagttaccgaccgtaacattctcgtgtccctttactaaagtcttcgagctacagtggcctaatcttgcctcctggccagttctccgtgctgtcactggtggtggagatctcctttcctacccaagtcatggtggcggcaatgagctgatttcgatgagtcaatgcagatgagccgatgttgttaagccaatgtagatcgaccgatacagaagtcaatgttgtcgatcccactagtgtgctagaaatatgttgttgcgggaaacctatgatcgattgtct

SEQ ID NO: 82600 - DNA, 524 bp, Zea Mays
ttttacaatagattttccaaattcaacatgactgggcttgcttggactcaagataccatcgtctacctcatcatcactactagcttcggcatcaacattatcagctttggcattaacaatgtccttctcaggaaaagatccttctccctcttgaacaaccaatctagaacgcttcataacctccgaaattggagttgtctcattggtctcgatctctccaccctcatttgtcagtctagcagtagacctaatcctagccatttgagttcttaagacgaagctaacttttgatgcttgttcgaagactagtaaacgaacgcacagagctcaaacaacttcgactttagtaaaaaaattcagtagcacaacgatgcgatagcatggaatgttgtaataacttcttaccaaccaatctatttatatagtcctactggtgaagaaggagaaccgccgtgccactcatactaacttatcgttggaccaacacaggtcataacttttttattcgttttttaataacaacc

SEQ ID NO: 82601 - DNA, 415 bp, Zea Mays
gtttgtcttcacaggtataaagtgtgccactttagtcaacctatccactataacccatatggaatcatagccatcccgagtacggggtagtccaactatgaaatccatactaatttcttcccatttccattccggtactttgagaggttgtagcaatcctgctggtctttggtgttcggctttaactcgttgacacacatcacatagtgcaacatgagtagccacatctcttttcaaaccgtaccaccaatactttgccttccaatcctagtacatcttagtacttctagggtgaatagaataggtcgaatcatgagcttctcttaagataagttggcgtaggtgttcgatttctagtacaaagattctctttttaaaccacactatgccttgctcatcttctggggaatctggg

SEQ ID NO: 82602 - DNA, 558 bp, Zea Mays
cgattatcagcataactcttctgccgagtctgtgctatcgtcaagttctcccggatcatacggacttgttcttctgcagcttgaataatttaagacccaaagaactgtctttcaccagtctgatcccaatatagaggagttctgcactttctgccatataaagcttcaaattgtgacatcttcagactggcctgataactattgtaagagaactctgcatatggcagactcttgtcccaactgcctccatgcttaagggcacaagctcttaacatatcctcaagtacttggttagttctctcagtctggccatcggtttggggatgataggccgagctgaagttcaacttcgtatccatgttctcattaagacttttccaaaatcttgaggtgaattgagatcctcgttcagaaaaaatcttcttcggtactccatgtaggcacacaattcgagtcatatataactctaccaattgagaacccttgtaagtggtcttgaccggaatgaagtgagccactttggtcaatctatccacaatcacccatatggaatctaac

SEQ ID NO: 82603 - DNA, 429 bp, Zea Mays
aaaagacataacagtgaactcatacaacccatacttggtaatgaatgtcgtcttcggaatgtctgagggtcggatcctgagctgatgtgataacctgacctcagatctatctttgaaaacacgctggctcctctcaactggtaaaacagatcttctattctgggcaaggggtacttgttcttgattgtgacctcatttagagcttgataatcgatgcacatcctcctagtgccatctttcttctccacgaataggacaggggtggcccaaggcgaggtgcttggctggatgtaacctttctttgacagctcatcgatctgctttttaagttcaactaactctggtccagatactctgtaggctcttttagaaatgggggcggtgcctagaagaagctctatagcaaactcaactttccgctcaggtggc

SEQ ID NO: 82604 - DNA, 397 bp, Zea Mays
gatggactacgagacatcccctaaacacctaggtatggaaattaatgttattacttttttggccgattaagatgttattagtgatgatgaacctgcggtggctcaatttgatttcggtcctaaggatgcggtcttcaccaaacccaaggaattggtcaatcatctaaagtctcttttcattcgtaggcatattgatggaacaccgatttcgcacatgatgattgatggtggtgcagacatcaactttatgccttactctctatatccaaagctaggcaagcaaaacaatgagctgaccaggtcaaacatgacttttaatggagccggtaccaaccacccaatcaaggccaagggtgtcatgtccactaagctaaccatcgaaaccaagaacctaact

SEQ ID NO: 82605 - DNA, 661 bp, Zea Mays
gcccctaccatggtattctacaaagcactaataagctgactaggggatggaaataaccaagagtaacaagaaatcttgtgtcacaaggagcacctagcgctacgaaatgcaatcacaaagatgcaatgcactagatcgctcgcaatgttgcataaaaacatccactaagttagcaagtgagctgggttttttttattgagctcatatattcttcatccaagtatgccaagagagccaaaatggtcgaccacacaagtatttatagttatagagcccaacccaatcaaaatcactgaatcatggctacaccgagtgaaactaaccattgcaacccctaacaatcaacctctagtgcatgatgtggtgagcatcggattagtcacaccagactaatatgttggctacaaaactatgaagagaggttatagagagcgattttggccatcagattacttcggtatctagcactggcttctcctttgaccccttcaaaattttcactcgaagatacctcagtgaacaacgccaacagttgggtaagcaacagattaattcagtgcttaaccctaccctagattaagcctatgcatgtagcgctttatatagttcctttggtggggcaccactagattaatccagtgcccataaaaaagcaccaaac

SEQ ID NO: 82606 - DNA, 284 bp, Zea Mays
cttgaatttcggcttggaaaatttgaggttgatcatatggatacaaatgatagggataagggtataatggttgacatgtagctagaaatagtgcagggagactgaagccgaaacatcaaagtggcgatacagtatagaagactcatcagactatgggatttgttacccattagacagcaagaatccgtgaaggtgctcaaatctggggaccaacccgacattgtgttgaagagagggcagtttggagaagagagaataagctccaccaggatggtggtatttat

SEQ ID NO: 82607 - DNA, 376 bp, Zea Mays
gtgcagcttcgaattggtggacggaggggagagggtcgcagtgctacggcttgcgacggtggcggcggtcaggacccccacttgttctttctctgcgtgagcccagggttcatggtgcttacccgtgatgaagaaagctagggggcggtgctttggattatatatccccatggatgggcgagtccggaagacttggatcgaagatacccgatcgaatcaccatggaatacggcggggtctgtttagattcggagcaagattcggatcgcctggtggagcaaggtgaacctggcgaggtgggcccacgcaccagtgatagggaaggagtttgcgcaaggaaagagtggctaattgggccgaccaggccgtatttcgg

SEQ ID NO: 82608 - DNA, 550 bp, Zea Mays
attttgaattcatgacgaagatggttgcattcgacataggaaaagagacaggttgtgcgataaaaaggctagattgattttataggtcgtatgaaaaacgttctattaagtgtatacgtcgagtatgttaaatggatcctatgtatgtagagtgtagtgtattggttaggcgaagaatttttgaatagacgagtatgaggcgtgcagttaagtcgagattgaagtgcaaatcctactcaatgtgatgggattcatggttatataggagttataattgttgatgtgacgagtagtttagcgaatgctcgtttgcgtggaggatgtatcgttaagacatgagtgtcggagttcatttatattagtggtcgcgccacattgattgaagtgtcccgagtacatgccataatatggttgtatgcgagacatggttatgcgcatgacgagtttagtaaaaatccatcggtgtcacatgtgttaagttgaagtttatttgtgcgtggaaagtaataatgtgttaatacttagaactcttagtccatggtagaaatta

SEQ ID NO: 82609 - DNA, 556 bp, Zea Mays
gtcgagtcatagcttatgcttcaagacaactgcgccggcatgaggagcactatccaactcatgatttggaactagctgcagttgttcatgccctcaagatttggcgtcattatctactggggaatatatgtcatgtgtatacagatcacaaaagtttgaaatatatttttacccagtcagaactaaacatgaggtagataagatggcttcagctaattaaagattatgacttggaaatccattatcacccaggaaaagccaatgtggtggcagatgcattgagtcgcaaagcttcctgttattgtcttgcaataaggacccctgacatcgccctatgtcaagaaatggaaaagttgaacctaggtatgatgcaacacggactttgatacaattaaagcttgagttagttcttctacagagaattattgatgcccaaagaaccgagaagggtatgaagcatattcatgagaaaatagaagccggcaaagcaaattgcttcagaaaagatgaccgaggaataatatggtttaatgatcacatagttgtgcccaaagat

SEQ ID NO: 82610 - DNA, 638 bp, Zea Mays
ctgggttatatttctacaaaaatccggacgtgtgccttatcgctgggacctcatacgtactgcaggtcggttcggaggtgaactctgtccctaccaatgcgaaatcgttggccatcctgctcctgcagcattaattacaaggaaaatagaccgagaacagcatcgaattagaccgagaaaatagtactaccaccatccaaggaagcctgatattttggccacgggtgagagtgagagtgaccacaagcccacagcctttgctgcgaccgagacccggctcgattcgggccgtcaagagtttctagattcagagacagcaacaagtgcaggaaactgtactgcccgcgaagtgccaacgaagcacgagcccgtacttaccgtggacgccaagaacacggagacggaccacgagattgacctgaccaaactagtagccacgcgtacggtacgtggtactaacagtccccaactgctgctcaagacgaagaaggcctgacgggcacgcaagcactccggtccgagctcagagactctgctttgttttgaatcgtgcctgaggactggcggtagcgcccgagacacatggctcaactcaactctggccaaaggtgaaacgctgtctccggcggcgattcctg

SEQ ID NO: 82611 - DNA, 352 bp, Zea Mays
gcttgacaaggccctagcaattgaacacaagcgtgttcagctaggagatttgaataggaaggctatatctcagggtcagggaagcagcagtgttcgtccatgctacagttcaccccaaggtacaccagttcacactggcggaggccagcgcccagctcagcactcaccttaggggactccaccgactcgtcaggctacccccactggaaccccgacgaagttttcaggacagagtgcaggcactacttgctacaagtgttggaagactgggcattatgcaaatgtttgcccacagaggattgctactaccccagttcagaataagcagcagactctaggatctggcaaggga

SEQ ID NO: 82612 - DNA, 643 bp, Zea Mays
ggaattaatcaaggactgatttggaggtgcattaccatccgggcaaggccaatgttgtggcagatgccctaagtcgaaaggcccagtgcaactgtgtaactatggactctaagatcgccactctatgtgacgagttgtgcaagctgaacctggaagttgtttcctcaggtaccttgaattatatctcggtggagcccaatctacatgagtagataatcatggcacaaaatggtgacaagggtgttcaagttattaaggagatgctcgaacaaaaggtggataagtacaaatgctttcatcaggacagcaagggagttctatggtttgaagaccgattggttgttcctaaaaatccagaactcaggaagaaaatattggatgaagctcatctttccaaattttccatgcaccccgacagtaacaagatgtatcatgatctcagatctttgtattggtggaccaggatgaagcgggaaatcactaagtatgtgtctgaatgcgacacttgccaaagaatcaaggctagtcatttgaaggtagtaggtaccttacagcctcttctcataccatcttggaaatgggaggacctcatcatggattttattgtggatttgcccaacacatcctggcaccacgattctat

SEQ ID NO: 82613 - DNA, 564 bp, Zea Mays
ccagtattgcaccacatggttattaacaatataccttggcctaattttggttggtcaggtaataatgcatgctatgtacagtatttatcgagaacgtgtaggctgtgtggaccatgcacgtttgctgtactcagatgcatacatcttccgctgtctccgtcaatggatccatcaaggaaacttgtactagcagtctcatacagagcggcaaactttgacgagacgactctgtccggtatatatgctctacaagtcaaacgcagagagtgatgctgacgcgcatgtcgcatcccaaccccccgccggacgacgtcgacgatacgatgctgcagcgtgcaatatatgcgaattgcgcaacttgtttgaaaaatcagtagatgcatgcgtagccctcagatgtcacgatgacgcgtggagtagccggccccaccatcaagctcattcactgtgaccctaccaaacagcggcacgagcaggcagcgcggcggcatgcagatggagatcgctctctgtgcggactacgagcagactcaaatataaaattgagaagatagtgcaccaaat

SEQ ID NO: 82614 - DNA, 815 bp, Zea Mays
gataatacccggtcgaaaatccaattgctctatatccatactagaaactccatgaagaccagggtagggagaagaggaagaggaaggatcacctcgcatggcgggaaggaatcaccagggacatccgcttttggtcattttggtcctgttctttttagagacccttagtggtggtgtgaaatccaagggtaatatagaatcatgattatgaaacaatcaaattcaaaaggagaagcaaaaccacaattgtaaacaaagaacaattacaaagaacaagtctgtaatccagcgttatactgtaagaagaatgatggccgatcgacctcgctttcccataatacaggaaccaacgtggctttacacgggacggggcaccaaatgacttcaacagtaaaagatgccaattgtacacacaacatcttccaacaaaatttgtgcagcactccgatggagccgtgactcaagttgagcgaggcaagctcaaacccttaggtggacaagatcctattccgcatcattgtcagtagcctgaggtattttgttcacacgtgccctaacatcacatttgtagtgggctacgtgagccgatttatgaaggtgcccaccgagcacttgcgcggctgaaagtcgcctagagggggtggatcggcgaaacctaaaaattataaactttgaatacgaactttgcatggagttagagttagaatgagtaataatgaaatcagagcttgttgtcctgaggtatcttaggagtatattatgtcccctaattgacgtttgttgtgtgctttgaggcctgtgggggcatatataag

SEQ ID NO: 82615 - DNA, 561 bp, Zea Mays
agtgagcttcatcaaaactgcaaaaacaaacatcaacttcgttaaaaccacaaaaaatccgtcaaatggccagagtgcgttcgactgcaagggtgactcgtgaaagagaagagatcgaggccaccgagacagcaccaatttccgaagtcatgaaataatcaggtctagttgtgacagagggaactactgacgaaggtactcctgttgtcgaagctgaacagaccgttgctaaagaagaaaatattgaagaggatgaggaagattatggtattttaatcccaacaaaacctaaccatctagattttgagaaatctactgtgtctgaagctgacatgtccatgatgatgaagctggctactttggggaagctaaaaggaaacttgtccgatttgccagagaagagaccacccaacaccaaagaatgatgaggtagtggttttcaagagtttttttagagcaggactgtgacttcctctgaacgagatgataggggaagtcttgaaaaatttcaaaatatatcttcatcaactgacccctaacgccattgttaggcttagcgtc

SEQ ID NO: 82616 - DNA, 1197 bp, Zea Mays
tttgcatacaaaaatctgggtacataaaacagacaaaaaagtgatatgcttacaagaatgacgatggaacatccgtaaatggttgtagaaacatttgtaacgctcctagtatgccacttcttggcagcttggcagaaatcattgaatattatctggcaccagtcaatctcgtggaaacgatccatttcctcagttaaaagaacctcatggttagttattccccatcttgcagtagggaacaacaacctattgaacagtatcaggaagaagtatctgatgcttagatcatcgtcaaaccctttccccaaacgatcttgaagagctgcaacaccaaattcttctttggataaaccaagttcagcccttaaattgtttgcagcaacagcttcatcaatgcctaatgcctttcctccaccagcatttggtaaccccaaaataaggtgcaccgtctcctttgtaattttgagctccttccctgggccggctcgaattgtcatatcattatggtcaagcttttccatcagccaagctaaatgagatctactgccaagcgcgtcaactctcatatcaagtatactggagaaccccctccgtgcaatagcttgacgttgtctgtcatttaaaatctgaatgcttactataacattttggggattgcatctcacattaagcctctgctgaaataatgtatacaacgaataacgtaaacatttacatctgcataatcgcaactcaatgtttaaatcaaatctcaatacaacataatttcacgcagaaaatgatatattggcattgaccatcaattctaacctgtcgggggggatccactgctttcctctgctttgtaactatcttcttcaagacttttgtaggactgtcatcaaagttacgcttcttcgataatggcataaagtcatcgtcctcgtcaccagcctgcattggtttgtgtctgacacttttcgccggaacacggggtatgtcgacactaaagcactcttgagtagactgaattataattcgctttggattatacggaggtcggtctacgttcttcatgtgtgatgttcctgccaaatcaaacaacacatatacatataaaacgtaatggggcaataacaattctgctcatatgcaacaaccaattaatgtataagctgcctattttgtgcgtactggccctaaatgacttacctgctt

SEQ ID NO: 82617 - DNA, 349 bp, Zea Mays
gttaggggactcagcagtcttgaatgctcttctgcctttgagctcttttatctcaaactcttctactggaccgacactagctttggccatcgcagcattaatggtctctgaagccaaggggatagcttcggtctgtttagcaatctctatcctctttatatcgggtattgcagttgtccttcttatagaatgtggcctcagcatgtgagttaaaactttaaccttcttcagcttaggcgcggtggaagaggatgaggctgccattttccttttcaacccttgttttcaggcaggaaagcagtaatcaggataaaaaatccaatcacatcaaaaactctattcaacctcc

SEQ ID NO: 82618 - DNA, 438 bp, Zea Mays
cgtggattgaccttcctctaataaaagcactctggttaactaccatcaggtcttgaagatatggccacaatcgattagcgaggatcttagtgaccaacttagcaaaactatgaatcaagctaattggtcgaaaatctctagctgaagaagcatcctctctcttcgggagaagaatgagatacgctgagttcagcaaatcaagcttataagcattaccatggtatagggagttaagagcagccattatgtcgactttaatgatgtcccagcatgtcttgtaaaattttcctgtaaaaccatcaggcctaggagccttgtcagaagggagataagcaatggtgtccataacctctttctccgaaaaaggttgctccaaagcacttagatccatcgcagccctgtgacaattactcagatcaatagtaaaatgtctctgca

SEQ ID NO: 82619 - DNA, 938 bp, Zea Mays
gtaaaggatcctcgccgacggtgagctggagatcactccagtgactccccgtggctctctcttcctctttgcggttgagcggatttacttaccagtgaccgccgcctcccggccgtgcgccgcgtggcttagcctttccaccgcaccgctgtgacaccttaaggttgtcccatcgtagccggggagattgccacgccgttagccacggatttacttatgccagtgcttccttccatctccggccaccgggcgtcttactcaaaattcgcggccaccgcccgttagtactataaattgagtgcaccatcagcttcgttatgtattcgagcatctagcgcacccttctgcacctcaaatcctccaccagaaagcttcaatttgggatttcccccaaaacactcaggaactccgcacagctagacctcgccgtggtcagcccgattcaggtccaatctcaccctcggtttccttgtttcaacatccttgtttgctcttgatgctcaccgacccgttaaatcgaactagaccaccccaattcgcgggaacgtgtgctcccatgctcggtttccgccgtgcacgtggaccggccgttctcggggtgttcgggtcaaattgatgtgtgttccgcggccgtcgtaggtcggtgaagcctcatagatagttagcttgagcagtcttcgccggccatggccggtacggaccgcgtccgggacgatctacgtgcgcgccgtggtcaggggcattcgcggagaagaaatagaaggggaagggcctttctgtgatttgtcagcgacacatcaaaacagtagaagaacctgtctccagatagataaaaccccgaggccctttctgcaaagctgccagggcgcgggtgcgcgcgggcgcctttctccctctagctgggccactgggctgaaatcagcccagtactattcaca

SEQ ID NO: 82620 - DNA, 508 bp, Zea Mays
ccggggcgtaccatatagaagcttcgagagatcaccaggaacgagtctgtggcagtcttgggctaggtaacctagccggttgcctggaattcgtcgtcggcgcagttgagtcgtcgtgaaatcgcccatcaccgggggcggcaccaccatcaaccgaatcactggtgagtcatatgccatcacgttcacctcgaccccgtagttgtgaatccatagcctgtcgggagtagggtgctccgtggtgcaggatcggatatcttcggtaaggtcgccgtcgcgggagcgttgttttgtcgtgctcaggtgttggagattgaagatggtgcgcctatcgtctgatttggattgtatggaggagattagattgtgtccatattcgatttgggccatcaggattgaagcaaacggttgagattagaatgcgcgtaccccttcgctcttggttagaatctagccgttgatctggatcgtgcgactctacgactgttcggagaactttgaatctggg

SEQ ID NO: 82621 - DNA, 705 bp, Zea Mays
agcctactgaaggaatatttagatttctttgtgtgggattaaacggaaatgtctgggcttgataggagcattgttgaacaccggctctgcctaaagaaagggtttcgaccttttcggcaatgagcacagttgatgaaagatgaagtactacaagaggtcaagaaagaggtagagaagatgctagaggcgtgattcatcaggccatgccggtacgctgaatggatttctagtgtagtgcctattcaaaagaaggatggtcagtggcgggtatgggtggatttcagagacctcaacagagccacactaaaggatgaataccccatgcctgtcatagaagtattaatcaacacgaccgccgaccacatgatcttgagcttcatggacagaaatgtcgggtacaacaagattttcatggctcccaaaagacgtgcataataccacattcagggtacccgactcggtaggattgttcgagtacttggtcatgaccttcaggttaaaaaatgatggagctacgtaccgacgcaccatgaactacatcttccatgacctgattgaaaaactagtggagatctacatcgatgatgtcgtggtcaaatctgcatccactcggggcacatagaagatttgcgtcgggtcctagaattaactaggatgtttgggatgaaaataaacctgaaggagtgtacctttgggtgatggccg

SEQ ID NO: 82622 - DNA, 1248 bp, Zea Mays
gtcacgcccatactcttgtttaaaaccacctgcaacaagtcatgctttgtagcgctcaatggagccatcatagcgggtcttaatattatagatccacttacacgtgataggagaagtagaggaaggaagtgggacaagatcccaagtgtcggttcgctcaagagtagcaatctcctcggccatatctaattgctactcaggatgggaaagagcatcacagtaggaagtaggcttagagagaatagaagcagaagcgacaaaaccaagacgagccggacgacaaatcgtacgacgaccgtgaaggttatattttggaggaggcgcaccaagcacacaaggggatgagctagatgatgccaagggggacagtggaggacatggacgttgagtgtagtggaaaagaataggaggacatgatggaggggatggtggagatggaggtggaggcaatgctggagggggagaaggcgatagtggtggaggtgagggatgtggaggtgatggtgatgaaataggaataggggaggatagcggagacaaggtggtaggaagaggtggaaccgagcggagaaaatcaatagactcaaaggaagaggaagaagaggacaaatcagtaggaaagaaaggacatgactcatcaaaggtctcatcccgagatactcgaatgcgacgagcgatagggtcccaacaatgatatcccttacactcggtgtcatatccaaggaaaacacactaaatagattaggccatgagctttgtcctctcatgaggctaaagaaggacaaatgcaacacaaccaaaagcacgaagatgagtatactacagtggccgaccaaaaagacgctcaagaggagtgacaccatgaagagcaatggaaggtttaatgttcacaaggtacacatctatagacacacctttggcacagaactgaggaggaacagatgatgccagaagtaatgcacgggcaatctcaagaagatggcagtgcttacgctcagcaaacccattctgagcatgagcacctgtacaagaatactgaggaagggtgccattctcagcaagaaaccagcgaagagcacgagacaagtactcgccagcagagtcagcctgaaaaacatgaataggtgaatcaaagtgggtatgaaccatggcagaaaaatcctgatatgtagtgagcacttgagcatgtgaatccaagaaatacacccatgtgaaacaagaaaaatcatcaataaaagtcacataata

SEQ ID NO: 82623 - DNA, 809 bp, Zea Mays
tgaacgcaggctcttgtaatacccaaacttgtaactatattaaaggaaataaatctcttaagtgatgtgcctttaatttttattctcagtttttaatgtatgttggataatgctggataaaattgtatgctagataggtactcgtgaagatacaagtttgaattttcaattttatgtatcttataactttcagttttcatgtatgttggataaaaatgcaacctttttaattgtatagtcctctaggtagtgttgtgagtgtaaacaggttgagtgtcttggtgtggtgagtgaaagcagattgagcttcacttgatgacctgcttcctcaaaacaaacaaaaaatggattcactccatttccctaaccaaacataaagaaaggaccatccaatcttgtgagcaatgaatctgctctggatggagcaaatcccctaaccaaacacaccatttgttttagtacattcaaatagcctctcagtcgtcgagacagacttgtgcatgcagactgcacagcaaaaggacaccatcatcaactcttgagtgacaaagccacactgcatgcacgcacgcacgcatgtgtataacagaacatgaaacaccgcatgtatgcactaaggccgcatcagcaactgactttttgcttagttgttgtctctttcgtgctcggtgtatgaaaggagcctaatgatggtctccacacatgcatgaatcatgatcaaaaggtcgtcggccttattagaagatattagatattgtgcttatctgatagctaggattgttatactcttggagccgtgtctctatctc

SEQ ID NO: 82624 - DNA, 280 bp, Zea Mays
agatgacgtgatgcagaggagacttgctggagcgctcgacacacacgtcttgcccagcagctagcatgaggggcttgtcctcagcccgagtgctcactggtcagcaatgaccgacactcaactctcccttctagcgcagcaacttctaatgcttaatttgtaaggtttgcattgcgatttgtaaaccctatcttctgtaaatgtgcaataattaacctatgctgcaatgttgaatgtagatatatattttgtattgtttcaaaaaatttcttgattgaat

SEQ ID NO: 82625 - DNA, 298 bp, Zea Mays
tggttatatagcacgcatgcgtgttgatattaggataaaggattggcgaaaagtgcctacagtggtaaaatcaaacctatgggaggatgtgtcaaagaaatttgtcatgccaagggatgaaacccataccctcagtgtgaagaaggtcgctttgaaatctatgagtaaggattgacttctcgagattgtttgatcctgtttgcatcatttcttgggatttatgatttattttccttttattcgtacatgccatgcatggaaggatttcaagtggaaactaaatataaattatgtcaag

SEQ ID NO: 82626 - DNA, 361 bp, Zea Mays
attagcaaaggcacgtgagtggctagctacttaatccgttggcgtcttccttctgtgacatcttatccaagaggggcagaagtgtcaatcttcaccagaaaaatgcaatgttcatatgacatttgtgaaatctgtcattcccaaccgaagacatcctcccacattatcttccactacaactttgagagaaacttttgagcacttgttggcgtcccagccactgacgatgccaactacaacaacctacatcagcttcagcgccctggcaccctatgtgataaaggcttcaactccttcattctccttgttgatggcacttgtggaagcaaaggaatgccatagtcttccaaagtgagctatc

SEQ ID NO: 82627 - DNA, 543 bp, Zea Mays
tttgtttggtaccctgggttgccggtcagagatgccccgatgaacttgctgccatgggaggtctgctccgccatgtctgcaagagaggagaatcgcgcgggtgctgttgatcaataggtaatggtcgtgatcatatcaaggtgttgaagactgtcgtggccatagatcagtaaacgaacggtcatgattaactagtggcgagtaccgattcgaagtagtggggagtcgtctgatcttgatctgaggggtgcgctcaggtatcgtttatttaaatctggtccgcagatctcgggatcaatggatggtgtgtgtacccgttcacttaaaacttgatctaatctggaccgctcagatcatatcttgcggccagggatcacacataccccttcaccgtgcacttcttttaaaagagcccctgacctttgctggattcaacccgccatgcacttaattgtaaaaagcatagcagttaggtcctcacatttatgaaaaagaccttgtgctttctagataatgtatctggcgaccaactgtacccgaaat

SEQ ID NO: 82628 - DNA, 592 bp, Zea Mays
gcaagttgatccttcgtcattgcagacatacatcatttcacggcaaacattgatttccttactatctggcagacagtaaaggaaatcatcttcgttgtctcctccgtataccaaagacccacgggggtatttcagctccttagcataatgtcgtgtttcggcaagttgctctgctgatagctgctttctcgaagcatgtcgaacaatatagttccaatcaccctgtgaaggtgcatcgggagtaggtgatgtgggcttttctggcagattttctttcactagctctactagcgtagcccccgaaggccctgcttcaacatgaacaggagaagcgcttgcagcggctacttcccttgcatcttcaattttatcatcagaaacttcagcagtagcaggagcgggcaacttagtggattgtaaaatagcatccaaaacactagccattctcctctttctaggagtcgttgttgcagtagttgatagcttcggcaaccctgtcacagttgggggactcagcagttttggttgttcttctgttgttttctttggtcccgactcttttaccaaatcgacactaacttcgactggcgca

SEQ ID NO: 82629 - DNA, 684 bp, Zea Mays
atgacttcaagtcctatacatatgaactatagagctcattaagggtgtcacagtcttttcctcttagaaatgtgttgcgcacttcacttgattttctctttgtctccttgttatctgcttcagattctccaaggtgtttcgactaaccactgatgccaaaactactacccgctcttttagcccgcggagatcagtgatgaaagtcactatcctaaaacaaacgctgagataattgatatttattagtttgaggaccatcggcaaagccacaccccaatagtagcctccttacatgaatcgttcattttctataacgggctcaaaccgcgaaatagatgaagggggccttgaactgaagatccgaaaacaccttccctgagcatgttattttaaacagaattgcataaatatgttttatcctatgagtggcacaaagggaacctacaacagtggtccatgagccagtgagtatacccggtgtggctcctcggatcctgtacctttacctatataacgggacgtgtcctcgaaagccaggcacgacatttaatgctcttacaatattgctaccaacaatttctcttcctctgtagctcacctgcgttgttgcttttcgcaagctttaggctttttagacctcatgccctcgtaaatggagaagaacaagataaatgttcaactagc

SEQ ID NO: 82630 - DNA, 315 bp, Zea Mays
gagatcaaaggaaagccaaatatagctactgaactgcaagtctagtcagcagaagcattgaagcacaaagcgaaatgaagaccagccaagagccatctactagacgtccaatctgtcgccgatcaaataaatttcaaacctaacaaggcatgggtagaccatgttgtttgagttcgcaagatcatgagatgaagacaaaatgctgatttctaaagcatgagacaaagataaaatgttgattcctaaagcatgagacgaaagtaaaatgctgatccctaaagcatgagatgaagatctttgagtggattattttca

SEQ ID NO: 82631 - DNA, 417 bp, Zea Mays
gaattgtccctggcgaattttgatcagactcttgaggatatggttccagaggatttgttatcggagccagcagatgatggtgtgatggaggtttgcgctgatgtgcttgatgctgggttgaggtcatcccgtgcctcgtcgaccttagtgcgcgatctcgagggtcagtagactgatttggatcgtctcggtcccctggaagtaactgagggcccatcagccttagaggtggctaccgcagagaacttggaccccaaggatggtgttgacacttgcccagcccccgaagatgttgtcggggatgacccggctcaagtgggcagtgcaaactatgacccagcccccgagggtgtccgagcggggtctccctcctgtacttccatggacgttcatgcgggatcacctccgtactccggc

SEQ ID NO: 82632 - DNA, 535 bp, Zea Mays
ccgactttgtattcaagaacattcaacctttgaaggacagagtctaccctacttacttgtatactggcatcaatgattctacccgagtcactaacaggcacattcccaatgaggacctgttaagccgactggatatgatactgaggggtagggtatcgaatgttggtgctcctttagcttactctgcatgggacctgcctccgaatagtcctctctctgatttagtctccaatcctcctgcttgagatggttgcccgggccatagagtgtggccctccctagaggacattgaggccttgatcgccccacttcggaatcttcctgaggctgagaaacaaactcatttcgagatgtcatccagtatcgatgatgctgaaatggatgtcgtacttagcctgctggccggggaatcatctgactttacccgcactgagccgatgccaattgcgactaggcaagagtttggcgaagatgaggaaatccagaaacccgaaggtgcccgccggaagcgttcacgccgagtgaaccacccagc

SEQ ID NO: 82633 - DNA, 350 bp, Zea Mays
cagaaacagggtatcaacctctgcggtttctacatttgtgaatttattcacacattcgtaggtcagaagacagtaaccaaagatattcaggtacatcaacattttctacaatatttatgttgattaatattaattaataaagtatcttagcttttagtttaatgcaatcaggggcggatccagtatataaggtgtgctgtcacctgataacaatgcctttaaacttggcacaaatatgtttctctattttagtgggtgacaacagcccagtatatacctggtgacatcagtgtttctctgaaatcagtctgcgtcctctcaaattgcttcttcacttgcactgagtctct

SEQ ID NO: 82634 - DNA, 342 bp, Zea Mays
gatttctgagggtgtgagagcacaatacatgcaaacacattattccatgcgtccagggtatgtgaaaccatatccatcggaagttgacatggtacccttcccaaacaactatcgccaaccacagttcagtaagttcaatggaactcaatcttcacatgaacatgtggctcatttcttagctgcttgccaagacacctcccataatggcgctctcctcctccgacaatttctacaaacattgtcagggcctgctttcacatggtatagtaagttggcaccgggctccattagaacatgggaacaaatgcaagatgctttccttgagcgtttctatagcacgca

SEQ ID NO: 82635 - DNA, 465 bp, Zea Mays
ttcctcggtcgcaccaacccgacaatgtgggtatcgctcgggtctggggatatgctctgggtgatcggtatggtcgtaggtaatggcatgattggaccaatcgaggaaggtcggggatgcttgccatgcctggagtatctcatgccatttcgacttctgatgccttcttgaatcatagttatttgaccctccgaagatcagcagacacctagtctcgtcgaggaaggcaacccccgctttcccatgcgcgccactctgttggggttcaacccctctctcgggtggcattcccttgcggccttgcccaggaatttcctcagcaaaccatagtccttataggcgtgtcggactgaatagcggtggttcggacacgggatctcgagcggtttctcgaaatggtcggtggcctcctcggtcggtggtttccatcctttctgacccaccgtggctaccagcacttcgtcg

SEQ ID NO: 82636 - DNA, 586 bp, Zea Mays
ttgcatatttgattacaaactcaccgaacgtggcatcggacaaggcacccagacatgatgtaatatgtgcacttcctagttatgagcatcgggcgtgtctggtgcgacaccggtggcacatcagacctcttcacattagcggctaccaccggacatgtctggtgcacacagaaaagctgggtgctagtataacgactagtttggccctaggatgtcaggaagagtggaggaaaatgttggacctactgtcatgtggataggtgggcccaaacactgagggacaaacaattttcaggtgcgcaatgaaacgttaggtgggaacaatagtgtctcgatatgcgtgtcccatcagtctacagaacaggggtattttatagggcaccgaggggctagtagacttaagtacaattatgccctggttacctgctacattctcggaatattctatacaatgggataattacaatatagtaacacccgtcgacctagatacacccgaggggcttacaagtggggccaccacaaccgagtgaagcctgggccccactaaggtggcctaggatcttgccttcgcatgccaagcggc

SEQ ID NO: 82637 - DNA, 303 bp, Zea Mays
ggaatatcactacccctcgctacctctatagtgccggttgttcttgcggatcagcgggacttcatcctcttcttcttcatcttcatcaaatatgtagacaacagcttgtgcgtgatcacaacccttagcatcaacctcgagaagaacctctgccggcacctcatcacaaaccggagcagaaggacctgcaccctggtcaagcatgacagtcgccgaagccgcctcttcttccttttttcctcaacaggcgcagtcgggcggctcactcagtgtggacgctttgggcggataccgacaggtttc

SEQ ID NO: 82638 - DNA, 1319 bp, Zea Mays
ttttagccataaaaacattaacaattcataacataaatgaagaaaagatgagattataacctcaaaccgatcaatgaagaagccaagccagagtctatgggctattattgcttctactgggtccttttctggtggtgcctcaggctcaccagcgataagatgcggcctcaattttgcatctgggccacagtaattcatatctgatgcaaacaatccacgctttgtatctatggtccacagccatgcatcaacaagttccgcaagcacaagaggacctaaagaaggcgcagccgatactagccatgtccagatgtagattccagtttccattgcatcaggggtagaaatataagcaggacaccaacatagaagccgtataagctgagaaaacccttccaggtttgctctagaatcagacacctacatgttacaatataggaaagtagaattaatccagaattaaggaaacaacaggcagccatgtgcaaatgatcttaccatatgatcaagaagtaatgctgtagcttgagaacatgtttcacgaaattgtgaattatctattggttgtttctcagctgcaacaacaaagttctgaagaagactgacaaacttggagacaaaaacttcatcaaatgactgatgggggtgcaaagattgtgtcccaggaggagacatgcccatgtttatgcctcccatagtactaaacagccttctcataccagcaatctcaccagcatgattgcacttcacagttgcactcactactgcagtagagagtacttccaaagtgaagtcaggtgcttcttttttggctcccgatgctgctgctgctgagtccataactgcaggaacattggccgtcctaataccgttccaatcattctttccactacaaatacgtatctcagataaaagtgaaacaacatctgctgtatgttgtgttctttgtactccacttggcttgcaaaaattttcctaaaaatgcaatcaaaaccctcttcaatagatataccaggcattggatcaaaaacaaaaaggacaaattacaagtatgaacttcttatgccagcatgatgatgcatgtggcataagtttgagctatagacgtttaaaagaaggctgatttgaacgtgcggtaattcctcacggaaaatatagaacgcaaaaactatcaggcagtttcttctccaaccatttctattcactatacattaagatgtgcatatcatttgacacaacagatgccgacaaaaagcagcttttggtaataaaaaaaatgggataataagctagtgaagtgatgcaccacttaagtaatc

SEQ ID NO: 82639 - DNA, 342 bp, Zea Mays
tttccacaattgaagcaaccagtggaagaactagggagagcatggaaacgagtaccaggggcactcggctgattggtaggagcgggggcagtgctaggacaaataaagataggctgcttgaatggatatgaaggtgggcgaggcgaagaacgattttgattaaaaggtcggaccaccaacctggttctcttctcaggcccttgatttgatctttcacctccaaacccctttgatttttcatgtcctgcatttttggcttctactgccagtgccgtactgacaaccctactgtaagtaaggtctaagtaggttatcattttccgctgaagcctgtcattgagt

SEQ ID NO: 82640 - DNA, 506 bp, Zea Mays
cgtgtgagcggcgatggcggtggttgagcgcatggcgatgacctcctgcggaagcggcagcaagagcagaggcagttgctaaatataaccagtccgaaatttttttattagggaactagcatggacgctattttggccctaaagtgactgacgtccaggttgatgccatgatcgaggtttcctgcaccgcgatgtctctttgtcgctgctctctctgcttcgtctgtccaatcgcgtggccccggtcccggccccggccccgcatcgtggatcgccggtctggcctcgccctcggccccgcgcgacgatttccacccggccggagctggacgcgcgcacgcgctcattcgggatggctcgtcgaagtggaggaagctccgcgacgacaaggcgcagttcctggaccgacgcttcgacctggaccatcctcgcgtcccagacattgcccatcacagtgcatcactacaaggcgtcaaggcctagcttcgtcggcttcttcgagccgg

SEQ ID NO: 82641 - DNA, 465 bp, Zea Mays
tagacttcaaaacaacatccaaaacactggccatcctccttttcttaggagtcattgttacagtagtggatagttttggtaaccctgttgtggttgggggactcaaaagttttgaatgctcttctgcctttgagctctttatttcaaactcttctactggaccggcactagcttcgaccgtcacagtaggaattgcctccgaagccaaagggataacttcggcctgttcaggaatctctatcctctttgtattaggtattacagctgtcctttttatagaatgtggcatcggcctatgtgtcaaaactttaaccttcttcggcttaggcgcggtggaagaggatgaggccaccattttccttttcagcccttgtttttgggtaggaaagcagtaatcaggataaaaaatccaatcacatcaaaaactctattcaacctcctctttccgcgagcgccgaaggcagt

SEQ ID NO: 82642 - DNA, 714 bp, Zea Mays
ggcgccgcttctccacgcacgttcgcggtgctggcgaggagatacgtcgccgcgggtatgaccagacaagcgattcgcgcgttcgacgacatggaggcgtttgtcagcagggagcctgatgccgctgagtttgccacgctgctcgacacgctatgcaagtacaagtaccccaaggttcgtgaccttgaaacatactgattatgatctttttcaaactagaattggataaaggcttgaggagaaataatttcccacttcctgagattcattacttactgattatgattactgaaggatgagtgatgagtgcttaagttgtgctggtttattcaagaggcttttatcaaattacttttcccgctttgttttatgttgctagcaatctgaaaatggctaactttctataagatttccttctcatttttgttcttacttgtatgtggctagtgctggagttacattttagcttataatgtcatctttataactttattgtgaatgattatgcaagctaacacagttttggatatggtattctgaattctgttttggaaatataatcttagggacttacctgaaagaagataaagttaaacgattttttaatcttactaccttatgataaaattaacattttacttttgtagctatcgtagttagtggatgaaatcttcaatatcacactgacgcttttggtttgtgtggaaactgttg

SEQ ID NO: 82643 - DNA, 833 bp, Zea Mays
ttcttcgtacgggaaagcaataattaggataaataaacccaatggcgtcaaacaccttgttcagtctcctttttcctcggccaccgaaagcaacatttaaggcttcatcttcagcctttgtaaaagcacctagcatttcgtcgcaagttgattcaatagcttcaagccactcatcatttggttcgtcaaattgatttctataacgatatgaatatttctagtacaataacctatcctttctggcgctctgacttgaactagcatcaacatcctttggcatttcctattcattgacaagaggccatatttaaaagttacgtgctcttgaagcaagccctggtgcaaatgtagctgcacatagtgttaaatgccaccaagcaagtctgggacttatctatattcacgataactggccactttatcccgaagcaggattggataggccactggatcacatccctaatatcacttctcttgtccaagtcattcttcacgtaaaaccacttcttcatccatgagcccagccattttttccgaaatgttagcacgaggtgcctggcatctgatcgataaacgaaggtataacagccgaagttattgtggtactcctgcttcccagtagccttcgtctgatacaagagctcctggatattgcaaaagaactcggcatctggctctaagccttgacttctcattgcctaaataaacacccgaatcctaaccaatgcttcgggggtaagctgatgaagatatatctcaaatcttttaagcacctcgaccaacatcttgtgcaaaggaaagcgtcatccaacctttaaatagcttcaaaaaac

SEQ ID NO: 82644 - DNA, 1188 bp, Zea Mays
gtttctctttgtgttgactatcaaatggttaaggttaatacttttaactttctttgtttcccaaagttattggaagcagctgggaagcaagatttttggtaaacacatatgcagtgtatttttgggttgatcttgttgatggagataagatactatctctgtttgccctttttatcagagagcagctagatatcgttaataacaatggtggccaagcaaacaagtcattgtctgcaaggcttggaatagttcagacagcttatgcgaatggggcgtcgacgcagtttctgaagagccttggcctcgaagtggtgttcactcctacaggagtgaaatatctgcacaaaagggccttggagtatgacattggtatatactttgaggcaaatgggcatgggactgtggtattctcagaggatttcatctcttagctagagtcattaagcaatgagctctcctctcaagctgacattggtacgctcttactatctgttttacgtccttattctccctttcaacagtttatttgatgcggttggtctaatgccctttctaggttcagcaatcagcacagtaccacgctgtaatgagattgttggcagcgagtcagctgatcaatcaggcagtaggtgatgctctgagtggtttgcttttagtagaggctattttacagtataagggatggtcatttcaggattggtgtggattatatagtgatttgcccagtagacaactgtggggaaaaggggttaatctactcattgcattatgctatttgatatcatgagtactggattgccaatcaagttaccagttaaaatatgctcatagcactgagtacagtatggtagatgataggaaattagaaccagacttcacatcctctaaaaatagcacagtacataaacaatatgatgatgaagcggacagtactaaaacttattgtttgggctgttgctgatatttaaaaatctctggtctcactaactttttagttatgttgacaaacacatcttaattccattgcaggtaaagcgatgtgcagaaatgtcacgcaaactaaaaattttcagtgatcagatcaacagggcaggtttaagatcttctgttcgacctgcacttgaaccggatattgatttggaggagctagaggtgcattactcatatttcttgtaacagaaagttttt

SEQ ID NO: 82645 - DNA, 729 bp, Zea Mays
gtcgaacggcatcggaggcgagatcccggcggtcatcggcaacctgtcgtccgccaatctctccctgctctacttggacgacaacgagatcaccggtgccatccctcgcgccatcggaaaccttgcctcgctgacggatttagagctgcaggacaacatgctggaggggccaatccccagcgagctgttccatccacgtgggcttacaaagatagtcctctcgaataaccagatcaatgccgaaatacccaaatccatcggcttattagctcagcagctagccaccatcagcatatcgaatagcggtctccgaggcgagataccagagaccttgtcgaacctcaccaacttggactacgttcttcttgaccacaaccagctctcgggtgccataccacctggtggtcttagctgccagatgatcctggacctttcgtacaacaagcttacaggccagatccctagtggcatgcctgggctccttggtagcttcaacatgtaccttaatctctctaacaacctcctagaggggcccgtgtcgtcactggagttcggcagcatggagatgatccaagctcttgacttgtcgggaaacaagctctccggcggccttccgtcttccatgggcgccttgaaaaacctccgtttccttgacgtttcttccaacggccttaccggtgtgattcctcggtctctgcaagggttgccgctccagtttgccaacttctc

SEQ ID NO: 82646 - DNA, 569 bp, Zea Mays
ataattgacgtactggtaggttttgtattattttatgggcactgtactctatcttcagttgcattttcaagtgaaatgtacgcacccgcttcatgatttcttagtttgttgtatgggcgtcaactgcttctgaacatggacattcttaacgggtttgcacaatctgttgggctcatgagtgggaatgtacaacgcagacagctatgcacctcctagcttttggtatggaactcatgcagtcatgcctatggttttgggctgcatagtgggtggaatgtgttcaacgggaagtacaaggcaagaggaaagacctacgcgatcctatggttctagcaatgaaaacttggatggtttagatgagttgaagcatggaccatgaagtactcgatgggtttaaaaccatcagggttgttctggagcagctgctgatgcaaaagaacatgagcctcccaacagtcatgtctataatgcagttaaacagtacaaccttgcagattttggtgagaccaattcagatgccacactttttattattaaatcatatactgaggatgatgttcacaagagca

SEQ ID NO: 82647 - DNA, 590 bp, Zea Mays
gggaaaacacaggcaagccacgaaaggaggtcttctaggttgagctcaacgaacagtctattaatcccccatctgggcagacatcgagaacaacgacgaggattacttcgccaccaccaaagcgtcgcgccccgtctggatttggttgagctcctcgccgcttttcaggaggtcagtttcccccccacccaccttctctatatgccttgtgatttggttgtatgatttggtctatgcgttcaatattagctaccagcaaaacaatccgcctaagccagtatagcagttcattcaccagcattttcccttgaagaaacaagttctaggaggatcatcatcctgattgtttgggatgccagtattgttgactccaatcaggcgcaacatgtcgtcaggttctatagactccactgtttgttggtctaaggagcacttgatttctaagaatcagtacaatcagcaagtagataacctaagcacaacattttgagagagacggttcgttttcattcagcctcagctgttcttgtttccttttctactgattctatccacttaaaagaataaaaaaaataaacacaagctatttg

SEQ ID NO: 82648 - DNA, 436 bp, Zea Mays
attttatcccccagttattttgatttgccaataagcatgtatgattactcagcaaactgcctgccagagttgattgcaatttgaaaaaaacttaatgggatgagtgaaaattatcagatattctatagtgattaagttttatcctttaactgtgatgtgtattggggagttttttctaacgctccaaatatcatccaagtacatattggtcacagaagtgtaaccatgtttgtgatcagtgaatattttatatttgaattcagagccatcccccgctgcactacgccaataacacaactgaaaaaattggagcagcccggctgtagaacgtctggtacaacctgctcacgatatgcgacacgtgcacaactaaaggattcaacgcttgtttgatcttgcatcccacacgtttctggttcagctcctagctttttac

SEQ ID NO: 82649 - DNA, 443 bp, Zea Mays
cttggtttgaatttaggcgaagaaaatggaatttgggtactcgactcagaaacgatcgctcgaaacggggaatttggtgaaaatgaagcctggtatatcggatgggcgtgaaatttggcgaatatgttactggaggtgttgtgaaggtgcctgaaaattttgggttcaatcggagcatttttggctggtttggacatttcaccgaacacgtggcatgcagtgaattaggtttttagagatatggccatttgaggattgaaaccctcccaaagggagctagaaacctgcagggatattcaatgggcacataggaacacattccaccacttggattcactggaattgacaagaatttgaatttggcacacgagggtggaaaaaggggtgcactgctcaatggaacagagagggagagaagacagagggagaaaggggctgctcac

SEQ ID NO: 82650 - DNA, 401 bp, Zea Mays
ggggcttagcttctgatcgtcctactaatgtgacgtgcgcacgccgacgtggttggcgacttggttggttcgatgtgcgcggctcactcggggctttataatcgtggtgcagcatgatcagcatgccaccgtagtcatgtgttggatccaggggtgttttggtgttttccgggcgggcatttcctggagttgtttcgcacaacttcttcggacgagctggacagtggggcgggcctcaagctggacaaagacgacgacatcctcttcgtctctctagctgccaaatggatcgatccactgctacggatcgttctctgtactccgatcattcttgatagtggcattttccactccaagattatcggtttttctttattctctattcgtttcttccggattcc

SEQ ID NO: 82651 - DNA, 459 bp, Zea Mays
ccactattttactctggccaccgtactcgagcagaccacgatggatttggataggtttgccggagatggcctcttcgcggccttgcgccacgtgccttggcacattaacctcaccgccgtgactcaccttagctcgtccggtggtcgccagggagcttgccacggtaataggccacgaatcaccgcgccagtaaccttcttctcccgccgccgcgcgtctctctcaaattcaccggccaccgctgtgggagcctataaattgccgaccccgcctgctccgctaagtagttgtgcaaccagtgaagcaacccgtgcctcgaatcatccactagaactcccccaattttgggatttcccccaaatcactcaagaacaccgaacggtgttggctcaccatggtcagcgtactccaggttcgttcgtgctccctgccctcttttttcagtacccatacctgcc

SEQ ID NO: 82652 - DNA, 748 bp, Zea Mays
aaatactgaagagtaccagggctagtttgtaaaatttccaaggctcaggctagacccgcactggattgcgggttaatttctatttctctcggggcctcttttgcaagactacgcgatcgaagcggtaacttagaatctgcgccgcgcgattatgatccttcggtcaagattagatccagttctttactgaaacggtatgggatgcgggccagtggatcagggatcaacgaccttgattttaaatccaccgggtttgtttgtatccctcagatcgtagatctatggttagggttatatcggtcgaaggggtatccctcgctctgatcatcgccatccaacgagtatcgaacggttaaaccctgtctccctcctccggccgtagcagagcgacggcagtgagccccccaccggcggagttctctcctgcgagctcccactgggcgcccagggtctcgaaacctaccaccaagtagtcatacgcgatgtgcacagtatcctgaatgggattagaccataattacccgcgatcgtacaacgatgaagcttgaccccggcaacaggcacatcgtggcggagaagaagatcacgtcgacaaattcccgtggccccgagttgtcgtggtcctcgagttgctaagatacatccgcagtgctcccacgaagccctcccagtatcccccaaggctaccaccacgtgtagatgcgaatctcgtgtggcggcactctccccttttgctcttggcttgcca

SEQ ID NO: 82653 - DNA, 402 bp, Zea Mays
agagtttataattaagaacctatatcgaatgttgtggaaagcatacccaaggaaaacacaatcaacggttttcggtcctaatttgtgcttcttgttaattggcacattcactttagccaaacaaccccaggtgcacaaataggagaaatttaattttctcttttcccatttctcgaatggtgtgatttattttttccttgtgggaactttattcaggacatgacacgttgtcaagatcgcctcacccccaccattccttagatagtcctgaagtctctaacattgcgttaaccaaatcagttagagtaaggttctttctctcagcaaccccattggattgtggtgagtatggcagtgtcctctcatgaataataccatgttccacacagaaatcaaaaaaat

SEQ ID NO: 82654 - DNA, 825 bp, Zea Mays
tcccttcccacagctcatcctcaggcgcgtcccacttcttacactcgaccgacctagtccctcacccacatatttcctcgcatccacaccgcacccgaatgccgttgacagcagggaccccttgttaggtgttctcttacctcgcgtcacagatgggccaacagcaaagcgaacaccgggattctcatgtcgctcattctttcttcagccaggaccttgggagactatatatacatactgcactgcacccccttgacccataagcgtcgtagtagatgagccgcgagcccattgaagcgagggaagagagaacagagaggtagagagagccgtcagcatcaccttgtgtacgccaccgttcggaggctagaaggcaatcgaaggagtttgcgagggcgcgagcatgcgagaaaattaacggtcgcaaagttcatctaatctgaaccacttgtgtctaatctaagaatgcacgatcgttcttctcctttcaccaacaaaacaggacgacacctcctcgccacagtggatgctaacaggcgtaaccccgatctagccatcccagcacattcatgcataaggaccggtaacgaatgtagccaagacaatcgtgaactatctgatgcactccttacccagatcgttggccgcgaggtaatttcaatcgatctggtccttccccatgctccaatgtgtcgggaacgcgtttgaggtgctccagcaaccacctgggcgccctccaatatccctgtgacgaggcagttttgggtttggtgacttatctctcccttcctctctctctacaatcgccactgggttgaattcctt

SEQ ID NO: 82655 - DNA, 794 bp, Zea Mays
cttaatatagttaagacaaataaaagctacatacctagaaatatctttaggcgcacaacaaaagatacatacctagaaaggcaaaacggcttacagttttggatggagggagtaggaatattagaaaaaaggaatcaggtagctagtcaatatttaccttagatgagaagcactggcaaacctaaatcatctatacacttcctgtcaactttagtttcctacaacagtaaagaaaatggtaatagcttaaaattcacaacatagatatcagtcatggctagccaatactattatttgtagtttgtgctaaccttaatgatcatgcatgaatgatcagacaccctgcaacgatttaaatatgaccaagcatctcaagagtacagttttttactacctcctctttcttcacaatgatccaggcagctaggcaagaaacagacttcactcgccacttcaccaattatcctctggactaaaagctaagagccactattgttcaacatcacaattttactcaataccatcatgggtgaagcatataacaccactaacaagggcatcaagatgtgaagcaatcagcgttctagatcatgtataaaccatgatccatttgtcatttgttgtcaaaagttgatactgaaagggccttttcccacaatgggagacaccatcagtactactcatagcgttaagtttaaatccaccgttacaaaatcaaccaacagttagaaacagtaaagtcatttgatgatgcaaatattagctaaggcagtagtgttatcaagaaaaaaaag

SEQ ID NO: 82656 - DNA, 398 bp, Zea Mays
tgccccctttcatcctctttaaagcttctttgacctctgactcttggatcctacatacaaagcatctatttaaatcatcaaaggagtcatccaattaggagtccatagtttcattatcaccattgaaaagattgtcaaaatagctctgccacctctatttgatgtcttgtcctttcaccaagagttgatccatctcatccttaatgcatttaacttggtcaaggtctcttgtcttcctttcctgaatcctagccatcttatagacatcgttctccccttcctttgtacttagtattcggtaaagatcatcataggctcgaccctttgtctcacacacagctcgctttgtagttttctttgtcaccttatacctctctatgttgaccgcgctcctgtca

SEQ ID NO: 82657 - DNA, 599 bp, Zea Mays
aatctctcaccaattgatcattctccttcttcggaatcaaaacaataaaagaaccattaatacttcgaagacaaacatccccttgataaaatttctcacataagtcatagaaatcctgagaaatgatcggccagcattttttgagaaaattggtgttgaatccgtcaggccccggcgatttgtcagtgggaagggcagcaacaatgctgtcgatatcttgctttgtgaaaggctcttctaaccaatgtaagtcttcttgcaacgaaattaggctagagaggttaaaaacattgtccgaaaagtcagaagaacccaagcgacatttgaagacattccacagaaggccagctttcccgtcatgatctgaaaataatgacccattatcatcagagagcagcgcaattgaattacgccgatgctttaccgttgcgtgagcatgaaaaaatctagagcaaatatctcccttggtgacccaattgatggaagtccgttgtttccaatagattttctgaatttggagcagttcagcatttttggattgtagaagctcccggaaattccattcttcaatcgaaagatcgcgatgttcctcaataaag

SEQ ID NO: 82658 - DNA, 391 bp, Zea Mays
accgtcgacgcggtctttttcaacacgttgcgtctgagtttttgtttttgcgggggcttttgctagtatattacatggctccgcctcgttaaaaacctcaccccccgggaggaaaagagtgcgggccggaataacattatgtgctgaattacaagggcgcgtggaccctgacggttaaacaaaaaaattgcggggattgtcaatgttccaggagtgctctaagtctttgccggatggcgttactagcctgtacgcactgggggatgccttcgacttgacgatgaatggacccacccattttggctccagcttgccccgtgattctatccgggtggtccggacgagtacgaggtctcctttgttgaactctcttgggacgaccgcgttgtcg

SEQ ID NO: 82659 - DNA, 584 bp, Zea Mays
caaaaagtctatgtaaatcacattgtcatgacttgggctaattataaaagttgtagtacacttaataccctacaaaaactagaaagagggtgaccccaaaaggttttcagaaaaaccccaaaaaggtcaccaaagagtagagcataaaaggaaaatcaagatttgctcaagttcaaaatcgaccctctttcaaagatcaaacatgttcaccttgaccccaaactcaaaaccttttggcccaattgaaaaaatggcgcccaaagatccctagaacaccctggaaagtttgaacccaaccctaagccatttgacacgacttggcatggcttttgtctcggtgtggacacctctgacagagccgacttctcacccctatatctctctaccccgactgtatccttgcttggaactcacataaaaaaggtaggatttggtgcagggaagagaccgtacatgggggttttgccaagatctgcacgctaaggcgctcaaataggccgttgaaccctggcagaagcaaacccccacgtgttcgacgagggttgacactcgggggcgcgctcagagcacgcccgcacgcaaac

SEQ ID NO: 82660 - DNA, 644 bp, Zea Mays
gttgatgtagctcgccggggtggtttcagtactggtggtgttgtcaagaatctttttagtgcatctagagcttcttgtgcttctgaggtccattgaaacttatccaccttcttgagcagtttctaaaacggcaaacctttctctcccagcctggatatgaatctgcttagagctgccatacagccagtgagtcgctgaaccttcttttgtgatcggggggcttccatcttcatgatagcttcaatcttatctggattagcctcaattccccggtggctgacgataaacccgagcaactttcctgttggtaccctgaaaacacatttttcaggattaagcttccatctatatcgtctcaggctgttaaaaaccagctgtaagtcttcgatgaagttttctgaatcctctgttttgattaccacatcatctacataagcctccacacgcttgccccagtgatcggctaagcatgtttgaatggctctctgataagtcgctccagcgtttttgaggccgaacggcatggaggtataacagaaagcaccaaacggagtgatgaacgccgttttttcctcgtcttctttcgccagactaatctgatgatacccggaatagcaatctaagaaagacagcacagaacatcc

SEQ ID NO: 82661 - DNA, 321 bp, Zea Mays
caaatctaaattcctacgttgcaaagcgcctatgcgccattgcgaggttgaataccagatgtagtttggccaattgtgatgtacagatgtgccacattgacaattgacacgcagtttaaaggagagtcagactactagttttttcattgcccaacatatacctttggccacttattgaaaatgtgagagatcatttgagtttgaacagtaagttttgtgagatatcattttatttagtaatcatgcacacatgtctagaattgtgaaatgcacaataaagacgcaaactcccacgagcatgcaggtacacccgattgagga

SEQ ID NO: 82662 - DNA, 537 bp, Zea Mays
tgagatctactttcttcatattagttacaaactgggtattaaaaatcctaccccccttaaaaagaatctcgtcctcgagattaagaaggtctagggaagaggtggaaaattctattcgtagctcttcttctctctcccaagtagcttcatcatcattgagatggctccattgcactttgcgcattttgatcgccttacttcttgtgacatgagttaaagtatcaaggatcttgataggatactcaatataagtcagatcatcttgaacactgagatcctccattggtagctagctgctttttgggtacccggaggcacttcttcagttgggatacatggaagacatcatgtacatttgcaagatggtcgggtaattctagttggtaggcaacttcccccactcgctttaggatgaagaagggtccaataaagcgaggggacaacttcactttaactttaaacctcttgattccccggatcggtgacaccttcagatacacgtgataaccctccttaaactctaatagtcttctcctc

SEQ ID NO: 82663 - DNA, 931 bp, Zea Mays
tttgtatatagggctacaagtttgctacaaacagattagcaagttgtcatgcaaaaattcaagaaaaatgcctctgaagattctcggtcagaacaattgacgaagcttctgatggtacagtactaaaaatatcccaagattagataacttcgccgccggtaaaccgtgcgcccgaattcacgtcggtcgccatgattcgtgccgccgggaaagagattgcgctaggccgtgaaaagatcaactcgcggatgagttcgggctactgtggcctcgttgttcctcgaccacttgcaccggcgacgtggctttgcggccgtcaccggagtttgcgcccttcaccgcgattgtgccacgcctcaggccattaaccacgtcatcgtgagttgtgatcattacccagtgaccgtcgtggcttcttatcccacaattgccacgaatcactgcgctagtaacatctcccctctccggccaccaccgcgccatccccgattcacaagccaccgccctcggagcctataaattgagtgtgtcgttggctccgcaaggtagtcaagcaaccaatacaccaactcgtgcctcgaattatccaccagagaacttcaatatgggatttcccccaaatcaaccaagaacaccgtgtagtgtgagctcaccatgcctagctcgttgcaggtccgttcatggcttccctgttctcgttttaacatctatatgtgctgtagatgcctagcagcctggccgattgaattagattaggctagatcaccgggaacaccacgggttgtcctcggcttgcgccgtcgacgtggacagagcgatttaggggtagaactctgaaattgatggaggggaaatggtgaataggagtcaaatttggtgtcagccgcttgggagcactgatagttgagttatccggccgatatgagctcac

SEQ ID NO: 82664 - DNA, 959 bp, Zea Mays
tcgatccttcgccgcgattcgtgtcaccggcgactggattcgtgcctggagttgatggatagcatcgcggggtaaaagatcatcaccccgtgcgctggacgccactctggctagctgtcgtgcctcccccttgcgcactgatccttcggataaggttctcaccgccgttaagccctcaccaccgtccgccgcatgtctttacctgtctaccgcatcaccgtgactcactctagctccacgttggtcgccggtgaagtcgccacgacggtagacacaaatccactgcgccaaggtccttctttatctccggccgcctgcatttgcccgaccaaattacgcgccacctcctaaaccccctataaattgatggccggggctgttgcgccgtataatcccgaagccatagcacccgctcccacccttaatcattcacctagctcttgaatttcaaactttccccaaactggtctccgccaccacgaagagcacctcgccgtggccagcgtgatacaggttagttcatccctgctgctcttgtgtttgagtgaccttatatgctcgtgatgctcgtcgacccatttgattaaactaaactgccaccaatcaccgggaacacattcatctgtccgcaacaccctcggttaccgtggccagagcgaatcgggtcaccatttctgaaattaagttaggggaagtgatcgggaatggttcaatcctatgttcgctgctcgggagcactagtattggccccctccggtcggtatagctcgctggagctcggttctgtcaccgtcgtcgaggactttgtcgtgtgaaggaatataacgtggaggtcttttctgcaaaccgtcagcgaccctgtgcaatagtaaatgaacccatttcgggttagccgttaagtcgaggcccttttcgcaaaacagccagcgcgggcgcgggcgcgcgcgctttcctgtgtt

SEQ ID NO: 82665 - DNA, 301 bp, Zea Mays
cgaggacacatgaagaaataaagaagaatgcatgttgttagagagcaccgaagtgtcaaaggagggctactataattgaacacgctagaagcataagtgtgcactagaactagtcaacggacatgtttggcgggcactagataaggcaacagataggatactcaaagatgactataacatgtttggagaagtccataaggcactacacatgtctaaagagtaatagataccccgcaccagacaggatactcatggagagtcgcaacacaactagagagggccataaggcattagacctatc

SEQ ID NO: 82666 - DNA, 292 bp, Zea Mays
cgggatattgttgaatacttcgcagccttctatgcgtacgactgggcttcactagtgctttcatcaaaagccttcaagatgttcagcgcatctgacttcctactccttccaactaaatcgataatactctgaccaaaagaagatctgaagctagggtactggtaaaagactgggggttggatattgaaggaagcatgaccggcgggatcatgggatgtgccaagcacatcagcagatgtgccagtagcagtgggtgctgctgctcctgggttaggtgctgttgttgggttag

SEQ ID NO: 82667 - DNA, 471 bp, Zea Mays
cggcttcggtgcttgaggcgcttggcctcgttgacgtcgcttggatgataatatccttgtaggaacagggttattggggctcgccaatcttcggtcatgatgaggttgactatgcgatggccctcggcgtcgttggttatttgtaggccctctggattgcggacggctggcgtgccgatgacatggtagaacacgtcggagggcaaggcttcgcctctggcagctgctttggccaatgcgtcggcctcctcgttccttgctcggtccacatgctgtaaggtaaagcccttaaattgtttctcaagactgcgaactgccgtgagatactgcatgagtgcggggtcttttgctgaatattctttctcaacctgatcggcaaccactttagaatctgtcttgattatgtaggtggtgaccccaagcgctcttagcttgcgaagacctaggatgacagcttcgtacgctgctacg

SEQ ID NO: 82668 - DNA, 324 bp, Zea Mays
cttgaatgatttggcaagggagttggtggtttagctttgcagttgtgggctaaatgtccttcttttccacacccaaagcatttgatgggcttatgagtctgttttgccttgtattgatttgttgctttttttacacaaaagaattatatccaataccactcttgttgtttttcatgacaatgttcatgagcaactcattttgagggtattgacctttgttgaacttttgcacacttgtagcaagatgttcattttcattcttaagtttcttgacctcatttctaagcctttcattgtccactgccaactcattgttaaagtcat

SEQ ID NO: 82669 - DNA, 624 bp, Zea Mays
agtcaattgaagtaaattataggaactgtaagtgaaaaatcaaagggaaagctgctgttttgttcaacaccttagcagaaagttggtgttccaaactgtctcattcagttcacatgtttgatctacaaattattcattaatttatgaattcttttcacctcacatatgtgcaatatgactatgaggcatgtacaaattattggaactattgtctcatgttgcttatccattaaacaatatgattctagtagtaaatcaatttaggaagtatattagaaccatcgtcaaggttgagtaggtatgttcttaatgatgagaaaaatgaagcatgtactgtccaaatgaagttaatgttgtgcgataggcctggattggttggaggtggattgcgtacattgtagggaaaggaaggaggagaataggggtggaagagagacgaaagtttatggtcgcccatacaccgaggcttgccgatgcatagggttagtgcaaggatggcagaaatataggcaagggccgctggggacaagggggttgcatatcggctagagagatgaaacatttgagtattgaatcctctatttcttttcttgaatattatgagcacattacccttttatttat

SEQ ID NO: 82670 - DNA, 601 bp, Zea Mays
ttcatctccctctccgttgtgtattgccctgccggatcgaaggatagtgcagactatcgcgtggtcggggaagtacgacgatggcgccgccgtgggtggattccggtcgccgtggggcactcacgccaccgtgcctagtctgcctagggtgggagatggttgccggtgaacgttgatgaagcgaggaacatatcagatttgatcgtgggtatttaaaaccctggcggtagatctaggatccaacgacgtagattagatgagggatacctctacgcttaattaaaccctggccgtccgatcggctatgggcagttgggtggcgcataccttctcgcgtggttagatccgagccgtccagtcctgatctggcgcgtgagattagaccaccaaactataaatcacgacgtcggatcgtgatcgtactgccctcggtgcgtaccggttcgttttaagttacgtttaatccgggccctcgatgcgcgatctagcggtcgatcctcacccgtactctcttcggccaggtaataatgcaaaagaaccactggatttctaggggttaaacccgccgtccacatacagtcttaaaaaattacaaccgcac

SEQ ID NO: 82671 - DNA, 655 bp, Zea Mays
gtgcaatagtgaaatctgaaaaacaaaagactaccattgcatgtcttctccttcatgatgaggtaactcgaaatacttccaggttttcaacaagcatatgtacacaacactgtcttacctgactaccaacaacaaagtgcaccttctctatcctatttagacaactcccagttcagccatcttttgtgcgatagatttctgcagatcagcaatcctctccgagagtacatatagtgtttctgtatatatatcgaaaaggcaaataaaaagacatgatcactgcaacgcgatcttgcaataaaagtgcaatagtgaaatctgaaaaacaaaagacgattattgcatgtcttctcctccatgatgaggtaactcgaaagacttccaggttttcaacaagcatatgaacacaacactgtcttacctgaccaataacaaagtgcaccttctccattctatttagacaactcccagttcagtcttcttttgtgcgatagattcctgcagatcagcaatcctctccgagggtccatatagtgtttttggtatatatatatcgaaaagacaaataaaaaggcatgatcactgcaacgcgatcttgcaataaaagtgcaatagtgaaatcttaaaaacaaaagatgaccattgcatgtcttct

SEQ ID NO: 82672 - DNA, 1366 bp, Zea Mays
cttgaaagcccctttctgcagtaacttcgttagtggccgggcaactatcccgtacccttgcacaaatcgcctgtagtaccctgtcagcccaagaaagcctcgcagatcagtgacattcattggtgtcggccacttgagcatagctgctgtcttctgtgggtcagtagccacaccctcaccagatataatatggcccaaataaatcagctcctttttaccaaatacacatttcctctctttgagataaaacttgtggtcccttaaggcagcaaagaccagcctcagatgctccaaatgagaatgccaagtgggactataaaccaagatatcatcaataaagatcataacaaattttcgaaggaaaggagctagcaccaagttcatcgcacactggaatgtagccagagcgttagtaagtccaaaaggcatgacccgaaactggtagtggccctggtgagttttaaacacagtcttaaactcctcggaggcgcccatgcgcacctgatgataccccgaagtcatgtccagactggaaaagaattgagtgccagcaagctcatccaaaatctcctcgaccaccggcatcggaaaccgattcttgatggtcatatcattgagcttacggtaatccacacagaaccgccacgtaccatccttcttttgcactaaaaggaccggagaagcaaatgggctcacactgggggtgatcagaccggatttcaacaacgcagcaacttgcttttcaatctctgtcttatgatgaggagaatatttgtagggtcgagcattgaccggaatggatccagggagcaacggaatatgatggtcaaatggtcgagatggaggcaattcagttggtataacaaaaatgtcactgaattcccccaacaacacctgcaattctggatggatctctttgctgttctcctcaatcacctcctccaacaatgcaaacacccagatatcattccctcgcagccatttctccacctgtagagtagaaacttcctccacaacctgatgttgtgcagtattgcctaccaactgaacctccactcctttgtcaacaaaactaataaccttatcatcccaattacaatgcatgggactgtgtctgcacaaccaatcatagcccaaaatagcatcatatgctcccagccccaacaccctcatatcacattgataggtatgcccattggcccaccattccaatgatcgtaccatcgtgtcactatacataatctccccatttgccaccctcactttagctgaagcacaaggatgcactggcagccccattctatctaccaactgcttgttaatgaaactagtggagctgcccgaatccaccagcaccaacatcacc

SEQ ID NO: 82673 - DNA, 345 bp, Zea Mays
gttagttaaactgcagccgtatgttcaagcttccttagcacgtcgctccaacaaaaaattggccttcaaattctttggaccatatgaaatatagcttcggattggcacagtggcttatcggctgcagcttccaacatcttttagcatccacccagtctttcatgtctcccagttgaaaccctttgtctcatcgagctcccaggtaccattgtcacttcttgatgatttgacattaccccattttctagaacacatgctatagacacatatcacctccaagaactccctgtcggtgcaacaaggactcattcagtggtcacaatggccgccggaattggcaaattg

SEQ ID NO: 82674 - DNA, 1056 bp, Zea Mays
gtttgggagctattttgagtatgatccagtgagtatttgattgtgattgctatagcaagattaaagctgaattgtaggactagaactttgttacagagggattaacgagttgccacatagaaatcagagattaatgccctgcaaattgctctgtcagacagactgaatggagttttgattgtatagtaactgaagaagatcgttggtgcagtacaccttgccgtcggcgacccccgcgcctggattcgcgccgacgatgcgattcgtgcccgttggcgcacagataacgccttggggtgaaaagatcttcaccgcagatgagatcgggagctggccgccgtacccgcttgccttatcgtcggtccagataacctcgccggcattggccgcttaccgatggtgcgccatgtgcctaagcgcaataccacatcgcagtgaatcgccttagcatgtccgttcatcgccggtactcttgccacggtgaaagccacgcatctcttgcgccagtgacctcccctctcttcggccgccagcgcgccttcgcaaaattggacgccgccgctgatagaacctataaattaccgcccaagtgagcttcgctaagtaatcacgcatccagcgcacccactcgtgtctcagattgtccaccagagagctctaatttagagtttcccccaattcaattctccgcgccgtcgtgagtgagctcgccgtggccagccttctgcaggtccgttcactccatcctcactctcgtttcagcacccttgtgtgctatagatgctcatcgacctagccaattgaactaaaccgcgttagatcaccgggaacacctctatttgtcatctgttcgcgccatcaccgtggacagagtgactgtgagctagaactttgcaattgattgaggggttatggtcgttatgggtgcaattaggtgtcagccacacctgagcgccggtcattgtgttatcctgccggtacaggctcgtcggagccactgctccaccgtccatggtcggggacctcaacttgcgaaggaatagaaagggaggggcc

SEQ ID NO: 82675 - DNA, 318 bp, Zea Mays
taaaataaccccaaacctgggctgtcagacctgtagctcgattgagattgcaattccagtgacatctctccaactttggagccattttgtgcttgatgttgagctaatgactagagtcactatagttgagttgtagccctatgttaatgagcaaactttctacaatgattttgactctgtgctggacaataatgggagtaaaatgctccccaaaactccctattagtctgtctaaaaggggtgtttagtgttaacagttaactgaggaagatcgggttcgctgaacccggccgcccacgaaccttgtgcctcaattcg

SEQ ID NO: 82676 - DNA, 805 bp, Zea Mays
cttttcttcaactacgacaggctctgtctcagtgggcactgaaggcccagcttcggcttcagcttgaacttgcgcagcttcggcttgcctagtttcggtttcggcctgcaatttagttttgactggaacgactttctttatgagaacaggacttaagactttcgtcgtttccagcacaacatccagcatgtttaccatccttctcctcttaggagtggcagcataagtcttttgtatctttggcagatctgcctctatcggaaggctcaaaatctttggcatttttgttatctcgtcaatctttggctcttcagtcttttcagtcttatcttcggttggctcaactatatgtatcttcggcattgcagctggttcttcagcgccatgtgtggtcgaagcagcttgtattgttttggccgctgaagaggaccctgcgtcaaactcaggcaccacggctggttcaatgtaacgcagccgatgggtaagaaccttcacctttttgcccttcggcataggttcaactggggtggccaaagtagcaattttcctctttttcccctgtccccgcagcgagtagcggtaatcggggtacgcgaagccgatggcgtcaaaaactctgttcagtcttttctttccccgatcttcgaaggctgcggacaaagcattatcttccgccttggaatatgctccaagcagttcatcacttgtagcttcaatacacttcagccagtcgtcgtttggctcataaaatttctccctgaatttgaaggtatacttcagccggaccagaccaccttcgctagag

SEQ ID NO: 82677 - DNA, 841 bp, Zea Mays
gccgaaacgacggtccagattaacacagagaatgggtatgcgatggggcgaaatcagtcgctcactaaggatccaacggtccacagtgcgaccaaccacacctcctctctccccgatgaacaataggcggcgatgccgatgcttctcacggcaaagctacgttagagcccggttgttcgatgccctggtgccgtattccaaaattggataggtgctatgcgcagtgcaaagagtggcgagctacaggtggtggtcacactacaaatcgcatcgtgatgacgccgagccatagtgaggtgcggatccatggcggtgataaacaatggcgagcaatcgccaatgccctaatgctctaatctaacctaaacttggtatatacactagtgaagatgaggcgagcacaggatggaagcattaccagcgcctggagttgcggaggtgaccggccatagcgtggaggaggtccgctgtgcccaccccactccagcgagcagttcacgacactgcggtgctccacaatgatgttgatagccacaaccggcccacaacagaccaaaggtacccccaagctgcgctcctagggccgaacaataccgaatcatcgcacgccccacggcagcgcccgtgttcttcgtcttctctgttctctcttcctcgcggaaattgggcatagacgactccatgaacccgagctaaccctaggtgcggttctagtggagggctatgcggctttggtatttgtagcccatgaccaaggtccccgccaaaatcgtgtcgacaggcgtggaccgaatccaccccggatacatgctctgccctcaatagatttgttagagacgaa

SEQ ID NO: 82678 - DNA, 425 bp, Zea Mays
ttttaggctcatctgctcctggaactggacaagatgatgtcctggtcaattattaactccattaacttgctgctactgttgggttattcctgtcctggttcattaaattgccactgttgattatacactagctactagctgcatctttctgattcatgcgagcattttgaggcctgtcttgtctctcttggtctgcaagacaggaggcaaagtggcttcagagctacaaaaaatgattttatatgggatggagctgcagagtttaattatagccgtggagcagctcattcttgttttttcagttttttgtttgattttttccttatgtcatctcatgttaatgtcccttaggagttttttttgtctggagtaggttctattatatccaggatttgcatcattgataatctgtttttgtgtttatt

SEQ ID NO: 82679 - DNA, 484 bp, Zea Mays
gatcgatccaagttggtaccgactagcaccagctttaatgtggtcgatacccatacaaccgattgtcgttagaccgatgccaatgtggggcggtatagagtaccgaccactgatatggtggccctggcggacgatattgaccccttcaggccaccaaccagttggtctaggagacgtcgctctcattggagaccagacggttggtatcgcctcaacttggaggaggctatagcctcgaatcatccaagtgtcaatgcaccatttccctattaggcgtaataggacgagaacgtaatacaagggcaaagggctagcaacaagtagtagtggaggcgaaccgtgggcagaagaaggtcttagcgaagcatctctataaagccaacaaggagttaaattatgcaaagttgtatgattcattcaccaagttttatggactggaacaccgacaatataaatgatgacatgagaaggcttcatatgttgg

SEQ ID NO: 82680 - DNA, 548 bp, Zea Mays
ggaaattcttggtttggttcctcaagatgaagaccccatcctagagctgcctacttgtgggaccattccttttaatttctttgggttgggccaacctagtgctagaccacatttctagcccaacattgatgttcttaggcatgttcagcaagaagggaaccctcaagctacaaatgattttcctgtagagaatgaggtttggggtgaatgaattgacataaatattccccaagaggtcccccattgccaatcctattgatgagaacatgctcccaattctaattcaggcccctattattgggattcatagtgatcttatccctgatctaaatggggaggctgaaatctttgatgaagaaggtacctttggtcatgtctttaagaaggaggtccatccaaatgaaaacatggaagtagaagtcgctctcaatattcctactcaggttccccttgatggagaattcctccccaatgaggatcagcttgatgacttaatggcaagagcagatgaagaaattgtcccccagatccattcatgcaacaagaca

SEQ ID NO: 82681 - DNA, 721 bp, Zea Mays
gttctatttcttctccgaattggtccaaatccacgacgcgctcaccgtcgatgatcctgttgcacggactggccaagattggtggtggctgcccaatttaattactgggtaagtattacagacatgagacaaccctagaacgagcttcaatcgcgtggttatggctctggcttagtctgacctcggtggcggggaataccaacacaagttcatgtgttccgggtgattgagcgtggccaagcaagaaggacggagccgatgagtatcacgagtgtatataggtgttgaaacacgattaaaacgagcgggagcagacctgagatgagctgaccatggggcacggaggatttttgctggccggtgatagaaaagggggaaaacagtgtcgcggcggttccaggtggaattgggaggtgagattagggctacatggccgtaaaggactatggtttcaccgtgcactaccaattttgggagaggtcaagaggattccacgaatttgggctttaactgggctcactgatgaagatgtgaatacctcgtcgtggtccatgttgctatttatagccacggcggtccggctaacgattagcgatcgcggattgcattgttcacgcatggctaccacgtagagaagaggcacaataagggaaaaacgaggcatgggtgacaccgcggcggaagcgaccgagccacggcgaccgccggtgggatatctccg

SEQ ID NO: 82682 - DNA, 547 bp, Zea Mays
gcgaaggctaggatgcgagagcttttgcttgctcatgatggtggcgttgctgtaacggccgaggcgtcaattgcgccctccaagcggagcgtagagctttaggagtttcacctggttgtcagtatggtgtgcgccccctctcgcccctgcctctgatcaaggtgcctctagttgatcggctgtgggcgttacctggacacgtggagcgcgttgttgctgaaggcacgttccactagagcaacgtagctctagggcagatggtctcccattttgatgagatcgacgttgtcgtgattgcagaaggttttgccatcaattggagcgacaaggaactagatgccattgaagatcaagaccacccccaagcttgattgctcaccgaacgggttgatgtgaagaccctactgacgacacttggagcctaacttcgcccaccggtgatccgctagccggtgcttagacaactttttatttcaatgcttttttgtaataattcttttgaatggacaggatccctgcgtgatacattacttttgctttgaattct

SEQ ID NO: 82683 - DNA, 746 bp, Zea Mays
ttattatgatctttaggatcgagctccgcattcttttattggaggttgtgattatatgatcaattttatttatgatttctcttgtaaagtctggaggtttattttataaagcataaaaatgttgctcttactgcattcaagcaatggaaagctttagtgaaaaatcagactggcaggaaaatcaagaaatcgagaatagacaatgaattggaattttgcaatagtgagtttaattctttttgtgctgatcatggtattgctagacacaagactattccaggtatgccccgacacaatggtcttgctgaaagaatgaatcgtactattttgtagcgtgtccgttgcatgctttctaatgccggtttatgggataagcatgatacgtgggtggaagctggttctgccgcctgctatttgattaatcgctctcccaattccgctattgattttaaaattccaaaagaggtatggacaggtaaatcagttgattattctaatctcagaatctttggttgccctgcttatgctcatgttaacaatgagaagctagtgcctagagctcaaaaatgcacttttattggctatggttctggtgttaaaggatatcgtttattatgtgttgattctaaaaaggtgattgtcagtcatgatgttacttttgatgaaagtacatttctttctctagaggtgtttctgatagtggtttctcatccacatctatgcctgaaactaccgatgataattgt

SEQ ID NO: 82684 - DNA, 1227 bp, Zea Mays
ggtaatcgctggtgccatccttggggaccgggttctctataacagccacctctaaggctgaaacattctcagttacctccatgggaatggagcaacctagaccagcttcttgactctgaagaccgcactccaaggtcgatgaggctcgagacgctgctcaggataactctaaccccacatccgggatgtcagtgcaaacgtccatcataccaccatctgctggctcggacagcagatcttcaagaaccatatcctcgagagcctgatcaaaatttgctatggacaactcttgcagaccaacgagtgtagacaaggccggagaaggaatatcactactccccctactgaccaggtagcgccgactgtttttccgaattaaggggatttcctcctcctctccctcatcctcgtcaacaatacgaacaacacacccattggggtcagtgctggccggattacacccattgggattagcatcatcaaggtcacacccattgggatcagcatcatcaaggtcacacccattgggtcagcgtcagcagggtcacacccattgggatcagctccagtaacaagttccactggcacttcctcagcagcaggagcagaagggccgacatcctgattcaaacatgacactcgccgaagcctcctctttttcttcttcttcccctcggcaggagcagttagatgactggccgggcgaaggcgcttcgggtgagcaccatcaaatttttgagcagtcaaggtcttttcagtctcggggacagttgcaatagctatggtttcagcagggacggaatcagatgaatcctcagccaacatgtctagcatagcacttatctttgcatcactcgggtttataggcatctcaaagtgaacttgcctttcatcgttggggagatcaccaaatgaagcaaccggagcctcgacttctttgagagagggttgcactctaagacctaggccactgtcgctagcaggaggattggacacaaaactgaaaaaagtcttggaaggtggcagattccaggaagaatatgcaacaggagcaccaatattcgacactttgcctctaaggatcatctccaaccggcttaccaaatccatagcaggaatcctcctgttggtaacccgggttgaatcagtgacaccactatacaaataagccaggtatgctctgtccttcagtggctgaatgttcttaaaaacaaagtctgcaactac

SEQ ID NO: 82685 - DNA, 563 bp, Zea Mays
atgtcacaatttggtggtggtgcttgtgcgtccattggtgaccgtccacaatcagtaatagagagaccaatgctgcaatgcacaccacacaggcacacaacgatatgagcagcagcaggcatgtcatagaaaaagatgacaagagaggaggggagacaaggagagaagaactcacagggaagtgggatagactcatcagctgacaaagccgagggagacgcggcgacgccactcttgggccagaatggcgagggctcaaggcgatgacgatgagatacgttggccgatcggcggcaggtccttggagtcttggagacgaagactgctggccgagtgggattgtctgtctggctgctaggttatctgtctggctgctggagtgctggttgggccatttgggctggacggctggttgggctgctagtagatggcaggatggccggatgggccagttgaagccggtaattatcgacggtaaattaccgaccaaatgtggtaattttcgaaaacggtcggtaaagcctgaaaccgtttttgctatcgtttttgaatttttttgccgt

SEQ ID NO: 82686 - DNA, 691 bp, Zea Mays
gcatcctaggcatggcaccagtacgccactatgggtgccacgactggtgataacatctacccatgacgcgggggcgatgatgacacgagataggggatgggaatttacacctagacgggttctagccgttaggctagcccccacataacttgtaagccactcttccttgggctataaaggaagagggggacccctctcaaaaggggacttcctccacatacccaactcaagccaactagacaccttcagccggactgaacccaactggatcacgtgatactccatcagttgaagtgtctcttagcttgctaccagtaccccaaccaaaactctaaaaggcaaaattgatccaaatgaagtcatattgatctaaaattttgcacacatattcatatgactgtttcaaaggtccataaaaatagctccaaaaagtgaaaagctttcaccataaataaaaattatgctctcaaagtggggttttcttaaaatcggtcaagaggttagattttcatgctcgagttgaatttgcccaaaccacacttcttgagaatggtgctggaatgtccttgcatttttctatccaacccaaaagtccttaagaactcatattcaaaagatccaacaaaagatcaaagacgataccgagaagggaaaatccaaagaaaaacttaaaggactaaaaggagcacaa

SEQ ID NO: 82687 - DNA, 323 bp, Zea Mays
tggaccgcccgagccacatggacggactgtccgatcatccataggtgccacaaatgttgctcaacatatgccccttgccctttgaggaagctaagcgaaccaaaagcacctagtacatgttacaaaatcgatgtgagaacatcagttttctaagtatctttccatacactaggatgatattgcttctggaaacgaccattcaatgccttagatagctcatcaccttgcaatgtctgcaacatgtatgaattaccaaaggttaagtgtgtaactctataaggcccttctcatcctggggaccacttgccaaactttcggtccgt

SEQ ID NO: 82688 - DNA, 960 bp, Zea Mays
ccttcttttctttcttttctttttctaatttttatttcatatttaaatccagatttggtactaaatttaaatatacaaatttgaatttgctcattgtagtgaacttgtactcatttttgaatgtaacctttgatcaggccattatggtatgatttattttcttattgtggctattatttttactagatgcacatacaacaaaaccaacatgatgcacggttattctcaatattattaattgtttactgcttttcgatgtggtgttctcatatttagttgaacagtggcaaaagtacgtaagagaattctctccttaatatagtttacaaagttgggtattacaaatcctacccccttaaaaataatctcgtcctcgagatttaggaaggactaggaaaaagatggggaaaaatctatgcgaagctcttcttctctctcccaagttgtttcatcttctccatggtgagtccactgcactttacacatctttatcaccttatttcttgtaactcgagtcaatgtgtcaagaatcttgataggatactccgtgtaagtcagatcatcttgaacactaagatcctctattggtagctgctcttcaggtaccctgagacacttcttcagttgtgacacgtggaatacattatgcacatcagatagattattaggtagctcgagttgataggccatctctccaactcgcctaaaaactctgaatggtccaataaagcgaggggagaatttgcccttgactttaaatctcctcactccacgaagtggtgacacatggaggtacacatgatcaccttcctcaaactccagtggtcttcttctattatcagcatagctcttttgcctggtctgagctaccctcaagttctccgtgattatacagacttgttcttctacctcttgaataagttcaggtccaaagaactgtcttcctccagtctggtccta

SEQ ID NO: 82689 - DNA, 482 bp, Zea Mays
gttgtctcctcacgcaccgcgacaagcgccggatcgaccgatgtagcttgatgtagccgatctatgaagtcgaagcaaggaccagagataaccatgaccgccggttcctccgtgtcacggcaggagagggcatccgccaccatgttcgtactgcctgccttgtactccacggtgaagtcgaaccccagtaacttgtcgacccaatggtgttgcggaatagttgccaagcactggtcgagaaggaatttgagactgaagtgatcagtccttaccacaaattggcgaccccagaggtacggtctccaatggcaaatagcgagcaccagatcgatgagttcccgttcatatgctgtcagggaacggtgacggggcgtgaccggcctgctgaagaacgccaccagatgctggtcctggaggaggacggcctcaaagccatacatagaggcatcacactcgacaatgaacgattgcgtgaaatccgg

SEQ ID NO: 82690 - DNA, 514 bp, Zea Mays
ctctagtcatatccaatcctatctaatctattcaaacctaatgtgagtcactcaaatatgattagctaatgctgaggaaatacattggaccgtgcccctataaacaagtttgagatcttagatcaactcgacccaacccaacaacttgacctacaaaacaggttacataactaatcctatctagcatatagctacctactaaaccctctatccatctgttacctacagatctatcttaacctcttgtcctaaacccggaaggagacaccaaagctcaagaaggaagagatcaatttcattaaagaagaataggaatcaagatccacaatcttagagggagtctttccttaccctacccttcttgcccaaacctatctatgctttaaaggcatcttctatcctacataataaagtggacatacatatatacacccatgttttcctaatcacctaccaatttgtgtcgtagacttgaacaaaaaaatcttttgatactaaaaccacttagaaactg

SEQ ID NO: 82691 - DNA, 808 bp, Zea Mays
gcctgagaaaaacataagagtaagataaacacatacagtaactcgcagatggtaaaagtaagagttcagaatttgagatgacctcttcttcatcccgtctgatagcttcatccgctatctccctcccaccatagagccaaattccagaataaaattttcctcctagagtaatagcttcggcagagggttcttttacatcttcagctgacactgtgaaatccggttgaattacaaccttcgcatgtttgcaactagccttctcaagcagcgacactgctccacgagcccctacataagcgcaataatcacctcaaccagcaaggacttcgtcaaaagcctcgactttgccttttatccatttaattgccccttcggcatcaccacgaataaaattttggtcatttgagaatgcaccaaatttagcaaacatatccttcagcgtatcacaacattaaatagcaacaaaaaaccttcttcttttgatagtcgaagctttataacattcttttgggactttatcccgctcagcttcagctatcttccgtttttctttttcgacttccaaattttcattgaactcatcaagcttcccttatagccttgatacttcaaatttgtgtagctctacctaggctgacagtgcatattctagatcagcaatgtgtttcgaatcaatttctttccttcttttagttttggaactaatgagctctctttagaaaacttatctaattcagcccgactctcttttagttttccgaccaaggaaagcagagttttatctttttaatagcctcgtgccgaaggg

SEQ ID NO: 82692 - DNA, 724 bp, Zea Mays
tgcgcctcaagcaggttggccaatgatggacggaggcgcttacagcagtcctctggagcttgagaacaaccccgaattgctcaaccgggtatatgtgctactttatggtttacggagtagaagcggtgctccctactgacctcaaatacaatgccccgagggtaaaacagtatgcaactaaaaagaatgagtcaagcttagaggacatgttgtaccaactctatgaagcctatgatgtggcacttttgcggttagcgaagtaccagcagacgctatgaaggtaccatggccatcgcatccgaagaagaacactacaaataggagacttggtcttacgatgggtccaaaccaacaaagatcgacacaaactatcccctccatgggagggaccgttcgtgatcgaggaggtacttcggttgggcacctacaagttgaaggacaagtaggggaggacgctcgccaacgcatgaaacatcgagcaactacgacaaccctacccatagcaaggctctgacgttccttaaatctacctgctcccgacctcaactaagagctcgggtgccagggggaggctaacaggcagagcaatacaaaaatactaacctcctctcactaaatgaatatttgtccttctagtaaacgtttatgcccgagcgaggtgacgctaatacctgtttcctctttatcgtttgttcgattgatgcaggattccgaaaaatttgag

SEQ ID NO: 82693 - DNA, 823 bp, Zea Mays
aaacagagggacgaacgagatctaggtcgggaagaagagagagagggagaatggcggtctctggatgaaggagagttcacgagaaaggtgacgacgtctactccggtggcttaatctctcttcacgggaaaggtgtcgacgtctgcttcgttctcttgatgtcatgttctataatcccaagaatctctcttcctggaagacatccgtggtgtgaggagtcgggagccgagggacaaggagcaagcaagcacgttgtcgcgatggcgaagacggcggcgggtaagcggcacgatgttcttattcactctctacttctttagccacgcgacccttggaggcttggagccctttctggaagactcccgtgcgtcgagctgaggcggaatccattatgcgtgtgcgtacgatacattcatctgtccgtgtaggtgaaatctaacggttgaggggatttacggtgacatgtacgctctgtcatcgagatttcctcgtcgcgaccctgttctactagtaacttgtgcgcgcgctctgcgcttagaaaacatctttctaagcaagcaatttataccaagtgaaagaaaacggaaaatattgcaaaggcgggaaatagatggagaaaagcgatctataggacataagagagtaaaaatgagcaaaatggcaaaaggaaggtatctcctctagttttagtgcaaaacttgaaaagttcattgaagtaagctagcactaagaatgggaaagcaagagaatatgactgaaattcagcaaagctcagctcataagaagattgaggtacgtcatggatggactaagtgcaaaacgc

SEQ ID NO: 82694 - DNA, 868 bp, Zea Mays
aatgacatcagcatcactatgaggccaaaaagcctcagacatggaaggtctacgaccagcacaccagggcagtgatagtgcccaatacttcctcagccacttatagaacatggctacataggccatgatgcttcggtccatccccaagccaatcaagctggaggcgaggatgatgtactagaacctccacaacgtggtggagagagtcgccgtgcagtagacggagattgaccgacaagcagctgccagcatggatgatcttggcaatcgctccgcatcaacgtggagcaggggaggtgctgccctcctagtgcaccaaatcacgagcccccatgaagacctaccttggtgacatctgcgacgcccaccacatctttaacaaccagtgacgggagcaagatgaggtgaaacagtcacacgcccctgaggggagacacaagcgaagccccaatccgactggctaggactatgcacttttggacacgtgatccgaaaggcgcaattccccaccaggatgcgtgcacccatgaacatcaccaaatacgacaggatgaccaaccctggtgtttggttggaagactaccgcctcgcctgccatatggaaggaaccaaggacgatcccctgatcatccagttcttgcccattcacctcgtagagggggcaagggcatggctcgagcacttgccgagcaacatcatcaacgactaggctgacctcaagaaggctttcgttggtaattctagggcatgtacaaacatcatgcgagatcttgggatttcaagtgatgtgtccagaagagtggggaaagtcttcaggactaaatccggatattttcctagaaaaggaacgaactgcccgatgccaaca

SEQ ID NO: 82695 - DNA, 594 bp, Zea Mays
gatggatctcactcaaactccggtggtgttgtttcgagtgcggagttcgaagcgatgcaacaacaaattactcaattgatgcagcaactacaggcacttcagcatgatctacgccatgcacctaacatggagggtcaacctgacaatgaagaatatgtggaagatgatgatcctgctgccttggaggcagaggcagcatgtcgtgctgctgcaggaggtggtggccgaggacgtggtgctggtcgaggacatggtgctggttttggcaatttcggtgctccgaatatgaggccacaattttttggctgtgcacaatgtgttccaactggaggtgctgcaggttttgatggtgatcctaattttggttatcaagatggccatcgagcaggttatcatggccgtcgtggtggttacgatgatcgtggaggtggtcactttggtgcttttggtgaccaccaatttgctggtgatgatggccaccgtgatcagcgtcgtggtgatccagtacgccgacaagatgaagatagtctgggcaaagttaaagtgtccatacctacatttaacggcaaggaaaatgctgattcttattatgag

SEQ ID NO: 82696 - DNA, 611 bp, Zea Mays
ctgatttaaaagttcagcatgttgtacgaaataaaaatgaaaaggcagatgcactagccagtttagctactagcatgtcactaaatccacatgacataatggatgtacatgtggaggaacgtagagtccttcctatataggaagacgaagaggaagaagacacatcatccacctttgcaacaaatataaaaacttgtgagattgagatgggggattggcgaacatcattcgtcgaatatttactccatggatacttgcccctcaattcaagtgagaggtctaggattaggaaaatatcaattaactacacctacataaatgatacgctttatcggtgttcaaattatggcattctacttgttgccttgccattgccagagatgaagtgatagatgccttaaaagaagtccatgttggagtgtgcggagcgcaccaatctggacctaaactacattctcaacttaaacatttaggctattattgcatgaaattcgcaaaaaggtgccatgagtgtcaaatacatggcaactttatacaccaaccacatgaactattacatcccactagcatgtcttggccatctgaaatgtgggggatggatgtagttggac

SEQ ID NO: 82697 - DNA, 406 bp, Zea Mays
gatgttgcctcaatgcgtgaaaggcatcttcacatttctgaccccaaacaaacttggcttctttcttcaacagctcagttatggacttcgcaattcgagagaaatccgaaatgaatcttcggtagtaaccggctaatcccagaaaactccgaatctgatggaccgtcatgggtggcttccaattcatcacctcttgcactttgtcaggatcaacagctatacctgcttgagagatagtgtgacccaagaatttgatctcctttagccaaaagtcacattttgacaacttggaataaaggtggtgctctcgtagacgttgaagcactacatgcaaatgcccgacatgttcttcttcgttctttgagtacaccaagatatcatcgatgaaaaccactatgaatttgtc

SEQ ID NO: 82698 - DNA, 1171 bp, Zea Mays
taattatgtagtgttttgggattatggaaccctcgaagattattggtgttcttttctctgtgcatactcaattatggaaattaaagtagtcaaatagcaaataaataaatatggaattatgcatagcatgctgaagttttggactgtgcattcaaaacttagttgaaatccaaactagattaaaacgagattgtaaatttgaatttgaaacttacaaatgaaattaaaaatcagaaattcaaaaaatagaagaagatagaattgaaaacaaaagaaaaaaagcttacgttgcttggtgcttggcctgtccgtggcccattgccaccatcgcatggagccccacctcttccccatttttgtttttttatatatttccagctgtagctaaacatcagcctgacattagctcacataattgtgtctctgcacatgggaccgagctgtcagcttgggtcggcatctacctcatgacggagtcaaattggggcactgcgattaccagccaccaggaatccttctcctcgctgtttccttcgactattcgcggtcgttgttgacccgcatggtcagctcttcctcgtggaacagatcacgtaacagccggtccgttttccacgccgcgccatgtgcgccaccagctgattccgagtcctagcctctgactaaattgccgttcccaccgaagcggggtttaagaaccgaagtatcgtggcctttcctctgcatcccatccaagcgccgccccatagctcacttttccttgccccgccgtgccagcatcgttaagggcggatattgccgccgccatagaatctcgggccgtgactagccaaagctttaggcgggagttcaattggattcgcttggtcgcggtgaaggttgccagcgacgtttctggggcgaatcggggcccagcaccttggatttctcgccgttgagttgcagtccaccgcgtaccgcactgctctggagccagggcacgactcgacataaacctaggtataaacgcttatcccatgctcgcgttgtccttctgctctcgttgcgcgcttcggcagggtggttgggggattgttatcgggttgggtttgctcaccggcgtggtctccgccgtgaacggaggtgagcgccgccgtgcccaatgtcagattaggggaaggaatgtgcaccg

SEQ ID NO: 82699 - DNA, 495 bp, Zea Mays
ggggtctcggtgtaagagtttctatgactctgagaatcccaggcatggatggagggtttattctataaacatggagaggcgcatgtgcaaatttgacccgcgaaggggtatcgacaaatctcggccgcccgatcaaaagagaacgctacggattagaccctcatccttataaactatcgtgcgatcacagccatcggttacagacctacggttctaatttaaagccctacggtttgatcacaagcgctcaaccgtagatcaacggccacggtgagtctcacccaatcggtacgtcaggttagatctgaaccgcacatcgcacatcgacggtcagaaaacctttcccctccacggacagaggaacgcggcggcgcgtgtcgcccgcggcggaagacatcgcctgaatccggttcatgccgatacggcgatccaaactcgatggggcttctgctacacaatgctatacgctagaggaacaggacggttggaatctta

SEQ ID NO: 82700 - DNA, 379 bp, Zea Mays
cgtcggcggtgggtttgctggcgatctgatctgtttcagttgtacactgtaccatggtgaacacctcatcagagcagctgacagagcaacttcagagccatttttctccaaattcctagtgacaacacaagtccatccctgcagcaaagttgttcctgtatagtagctctataactttgttatagcaatcttaggtatattcctactggatcttagtctaaatagctctcaatcttggatcaaagtcactgtccatctgaagttcagtttataccagcctgacagtccatctttgggtaagattatcttccaatttttcacaagaacatggcttgcactctcaagcaaacttgttctcctataattgggctataatttt

SEQ ID NO: 82701 - DNA, 583 bp, Zea Mays
caggctttcatcaaatccgcatgtcttctgctgaccaacacaaaacagctttccaaacccaccaaggccattatgaattcaaggtgatgccctttggcctttctggtgctcctgctacttttcaaggggcgatgaaccaaactctagcacctctgttgcggaaatcaatcctggtgttctttgatgatatcttaatatatagccctacatggtctcaccatttatctcacctggaatcagtctttcagctgctcaggcaggacaagtggcagattaaactatcaaagtgttcctttgccaaacaagaaattgcttacctcagacacgtaatttctatacatggagtgtccatggaccctgccaaggtttcaatggtctccacttggccaacacccattaattgtaaacagctttgcagcttcctgggtttggcaggatactacagaaaatttgttcatcactttgcggtcatggcaaaacctcttaccaatttgttgaagaaacattctctcttcatttggactagtgtgcatgaggatgcttttacagccctaaagtcggccttatcctccgcaccagtatt

SEQ ID NO: 82702 - DNA, 567 bp, Zea Mays
gcgaagactgatgagccgaagctcactttgatgctctgaaggaggcttcagaagcttttctttatgctgttagtgactgaaaaaacacttttgaagtttctttgtacaagaaaatgtactcttcaacaaagagttataattgaatgtgaaaaatttgtaaatatttgtggatacctcgtaatgttgcttttaccttttatcccactgttgtttgctttgctgtggacgaaaccgatgcttccagttattttcctgttagatatctctattcacatcgaagcaccttcccttcttttcgttcacatcgacgcaccttcagatcaatatcaatgaatgaccctttcatatgtaacgaagcatcttcgtgctgagggcaaaaacctttattttcctgttagatatctctgtttgtaacgaagcatctttgtgctgaaggcagaaaccttctctgcttctttgttattgccttgtgcaatatgtcatgatgcgatgaacctacatatatctaatgtatgttcgtatgaatgcaaaagatgatgtgatgatgtatgcaaatgtatgccgaag

SEQ ID NO: 82703 - DNA, 849 bp, Zea Mays
catgagttttacatgcctctttgaaagtcgggtataaaatattattgtatgtccgtaaagattcatagccttgagctcctttgacaatcattagaagcattctaagataatatctttcacccgccgatggatgtacaaaatgcatgcggcctatgctaccgtgtctatgtctttgttcccatgatctcttttttcatcccatctccattcagacggaaaatcggtgtaagttagagatcgcgcactctcatgtacttggttagcaacaaaccactcagttagcattgttcgacgtaggtattcctgtgataagatatgtgacatgttggtgttggcatgatatgtgatgtaattttcattaggcaaatgcaccggcagtctagcaacaggagggaagtgtctgtgaatttcaaagccgaaaatcctccaacatgaatcgtatggacaaataaatctagcatctagatattccttgacctcattccttgtgttcgtttcttcatcaataggagtgtcttggccatctaaaactcgttgtagatataatttgctgcaatcaggacctttcgtaacatacttgaaaagatattttataaatatactcttgttacaccactctacattgatgtgcgcctgatatttcttcagtaatgtcatgttatgaggaacgatccatctgttgtctaatctggtgtttgatttgatgacaaatctagcattgctcgctcttttataaactgcaaatccatttgtatcaactacagtttcagtttgaaatagtttaggatagtgcttggaacaatggtttcttttcatacagggtgagttatgattataggatccacatgg

SEQ ID NO: 82704 - DNA, 427 bp, Zea Mays
aaagcacttagtttattcatgagctcgatgagttacccactcagtttctagtatacgggatgacattagtggactatggatgatgtgggggcagagtactcagagagttatgatgagcagcgcgtctaccgtctagtcgacatgagcgcggtagataagcatgagtagccggatctggcaaagatgtttgcacgctactatgacaccatatacggttccgacaaggactacaaactagtaccacataagtaacaacccaaagcacatgactcagaggccgacaattataggtcagtagcaccaccccaggtagcactagtcgacccttctttactttagatacaaggtaggattagaaattagggtgtaaaactctttatcacatatttaggtcttggggtgaagtttgggctgagattataatttt

SEQ ID NO: 82705 - DNA, 519 bp, Zea Mays
catcctaggatacttgcagttcatggcgatgatgatccagatctgccatggtgaagcggtggctcctctccaagatggttagagaattactggcgtcacgatataaccaatccagattgtcgcgagaagctgcaagtgctcgtttctcctcctgcagacaagaatcaaccctcaaatatccagaaatcagtaaaagcacagcagatccaattaagtaagcttacctcgttaatcgccctttcagagtcgagctgaccattaagagaggaattcaaggaattcgtgtcgtctaaagaagcaaaaacccgagccaggttgatctgaccttgggaatatctctcctcaagctcagaatactgccgggttgagtcggtttgatgttgaagatatctctcctcaagctcaaaataccgccgagttgagtagatttgatattgaagatgtttctcctcgagctcagagtatctccgggtcatatctgacaaaaagcaaccgaagaaagatacatagtcaaaaaac

SEQ ID NO: 82706 - DNA, 518 bp, Zea Mays
cctattttgatgttgtcgccggctgtagttttctctattttttagaacttgtttatagtcagtgacttaattgccacaaatgtggggggtttcccctatgccccctgccagaattgtcggcctttagggccaaatattctagcacgcttgctgatcttgtgcctgaataccgaattatggaattttcaatcggtcttgtactggtggagctagcctatcaaatactaaagcttatggtaccccacaagttgggtgaagtagaattccataaggatactatgggtgtagcgtcgctcctccccacacaggtggataagcaggtgggtaggcgagtatgggtggatatgatactagtgtatatgtgtatggtggatatgcaggcggtggatatggatgtggtagataaacatgtggtgatgtccttggtgttggtggtgtgggtggaaccagctggactacatctttggcagttttagtcagtcgtgtttattttgcttgtttgtttagtatgggtgaat

SEQ ID NO: 82707 - DNA, 1041 bp, Zea Mays
gctgaagagaatcctgcatgtcctgtattgtctgaaacatcgagagcatcctctcggacaactgctgatgggctgctgcctgacgggtctgctcggctgccaagtgagcctgctactgagtaagtgtctggaggatcgaagcaagagtagggtcaatagtaggaggggcagcaggggtagcacgagaactcccaacctcatgatcatgggagcgtggaggcataggaggcggaggcggaattccaaagtcatcatcatcatcatcaactgctgtgtcctgagctttgaactgatgaagagtagaatcctcggcctgagagtcaaaaactagagccggtgctggcacaggatcctcaggcgtcggacggtaggacccaaagacaaggtgtgaggcctcaagtgtgccctggaaccgcggaggccgaatcagctgagcaaaaatgtgacatagatagtgagcatatggcaactgacgatgtgcacgcagaccatccaaaacggtgtcctcgatctcacaaataaggaaatccacaacatcaaactccgagtgacagaccagggcaccaaggagccagagctggatatgagtggtggcctccctgtaccccatccgcgggagaagtgtccgtctcataagctgatagagaaactttgctgcagtggtgaaatctgtcggagagcgtcacgacccatctgagaagggcggtcggaacagagccgcgacgtgagctgtacccggagcaacaccgctgtgagggcgacgaggaggttcagaggtgccatagcataagttgtgaagacgagtcgatgactcgtgaaatccaaatagctggcgaatctggctggcatgaatagtgacatcctctcgctcaaaacgaaacctcatccagtgatgatcagggtcgatccatacagtcgcgtagaaaactctgacccattcctcaacatacctgtcgctggtgtcaaaagtgagagaaggccagacagataggtgaggtgtacctcagagtcagcactagcggcaagcagaaatgcaggaag

SEQ ID NO: 82708 - DNA, 504 bp, Zea Mays
gagaagtctagaatgttcaacacatttctcaacttgtaaaaccttgcttaatcaactgacttggtgaatatgttagctagttgatgttaggtatctacactcccatttgtgatatcacctttggctcgatatcttataaaatggtagagggtataaatatgttttgttcttaaatgttgaactgggttggtggttatcttcatgtcactcattaaatgtcatgaagcaatggaacttgactaaatttgattccataatcaagcaatgctcatccatagcaattatgcacaacaactaccatagatttgtactctgcctcgtcattggaagcgtaaatgagtttttcttgatttgatgaccatgacataagtgatatttcaatcaattgtcatgttcccgatgtaatacccaaattctatatgaatggggagagttaataattctattattatgtagcttatttttatttttgacgaatagaataattaaaaaataaaggttccg

SEQ ID NO: 82709 - DNA, 459 bp, Zea Mays
tatctagtttggatcgggatgttggtccttcggttcctgctgctgaagaagttcacgtgcctgagcttactgtcgctgaccccaatgggtgtgatccgtctgttgctgatcccaatgggtgtgctccttctgctgctgaccccaatgggtgtgttgtctgtgttgccgatgaaaacgacggggaggaagaagatgaggtccctttgactcggaagaacagtcagcaatatgccgccagtggtgaaagtagtggagttccttctcctgctttgtctgccctcatcagtctacaagaattgtccctggcaaactttgatcagactcttgaagatatggttccagaggatctgttatcggagccagcggatgatggtgcgatggcggtttgtactgatgtgcttgacgctgggttggggtcatcccgcgcctcatcgaccttagagcgcggtcttgagggtc

SEQ ID NO: 82710 - DNA, 340 bp, Zea Mays
tgggcgagaagctgtgcgcattgttcttttcggatagcgtggggctccaaattttacataaaagcagaagtcttctaatttttgtattcacttacgcgcgtgatctgaacagttcaaaattcgccagtgatgaagattcgataatcccaaaagttcatgaaacctttttaactgcctagattatcgaaatgaaaatggcaccaaactcaatcttttgtgagatgattaaattccaggctaaacgagatttctcgaataatcttggtaattggagacggggctaatattgaaattgttattcaccccggcctttctaacttacgtccataatcgctgttta

SEQ ID NO: 82711 - DNA, 458 bp, Zea Mays
accttgtggagctcacggcgggctcaatttataggaagcgaccgcgagcacaacgaatttgagcggcggatcgtgatcggtaagaacaaggtgagtcactggtggccggttaacgtggcttttaccgtggcggcacctccgccgatcaccggacatgcaaagcacggttagccatgacgtggtaaagcttctggacatgcggcgaacgacggttatggttcaacggcggtgagaatcttatccgagggatcggtgagcaagggggaaggtacggcggctagccggagtggtgtccagctcaacggcggtgctgatccttctacccgagatgttacccacttgccgcgagcacgaatctagacgccggcgacatgaatcgcggcggagatatcgtcggcagtgagatctctacactggcagcctgatccaattcaggttactgtaccattgcatcccac

SEQ ID NO: 82712 - DNA, 276 bp, Zea Mays
ctcttgttcagtgactggttgtgcgaacctaaaattgaacgttgttatgctatcccctttcatagtgcaaacgggtggtggtgttacaacaatattgtgttgtggccccagccttttatagggtcaactacccgtgtcatatctaaggatctacttatcttatggagcatgcttacatgtaatcactgtgttctgtcatcatatattaatgttatgaataccccttactatgggtgtgatcctccatgatgtcatgtccaacagaggtagatcttc

SEQ ID NO: 82713 - DNA, 287 bp, Zea Mays
gtcgttggaccgtgtggtgcaactataacaactaagatttttctatatgggtgtcagaccctacgagtaggataattattagactattgtgtctggatctgacgccctctaaaatgttatcagagtggagtggtttcttgagcgtcagactggactaatgtggggtcattggaccatatgctcttgcatgttactataatacgtccaacatagtgagaccactgtgaacgtcgaatctcattgtaactaggtttatgatccaatggttaggtgtcaaacagtatgac

SEQ ID NO: 82714 - DNA, 314 bp, Zea Mays
gtttcttggtgccaggagcaggtgttttgtgtcaaaacccaaaaggtgtctcctttgctgtcggatctgcatgccctgccttccgtgttgttgtatttcgtagatttcatggctgttagataattgtgacggtgttcttttaagagcgaggttaacctcgcctccagttcagtcaatggggtttggttggagtcatggtacaagcgttaactatgtggtggcctatcaagcattgctttttatttttggtccaatccatgaacataatcattaatcttctatatatattgtgagctctgtttacaacctattgg

SEQ ID NO: 82715 - DNA, 551 bp, Zea Mays
cagcgtaggaggggaggagaaatggcaagattatggccgagcaccagcaagaaactttggtccagatcaaagttttttagatccaaaaatatcgtggtattaataaaattatggtttgaaatacatagttttagatgtgctcccaaacaccttttggcctagaacaccatgatatgctcaaatatcataatattatattgagactaggaaaatactatattcccaaacaggccctaaaggtacattcaattgagctgtggcttttaatgtgagttgtggattataaataagtttatatgagatatgcttagtgagaaggtgaaagtcatttgattcaacaaccgtggttttcgaataaactatgctcagtgtaactcacttgcgaatgaacccaacatgtgatccacttccttcctctcgcttatgagaagacattgtttgttagactcacacattcatcttcttcctctcatcgtactaaggcagatacctcaccaaaactgaggccaccactagtcatgctcgcgtcagccatcggataacacccacac

SEQ ID NO: 82716 - DNA, 1540 bp, Zea Mays
agagtagttttaggatctaagggtaccgaaccttggactcggctagcacctcactgatgaagtaaacaggcttttggactttgagtatgtgcccctcatttttcctttccactaccagtgcagcgctgaccacctgagtggtggctacaatgtagaggaagagcgtctctcctgggttaggagagtccaaggttggtggcgaggtcaagaatacatttattcgatcgagtgcctcctaggcttccgctgtccaagagaactggtcgttttttctgagaagcttgtaaaggggcatgtccttctctctgagcctagaaactaaccaattgagtgcgatgacgcacccaacctaccgctggacctcattgaggtttgtatggggcccatgcgccggatggccttaattttgtctttgttagcttcgataccacagtctgagaccatgaagcctaggagcttacccttaaggaccccaaagacgtatttctcagggttcagcttgatcaggaaccttcggaggttggtaaatgtctcttctaggtcagtgatgaggtcatttaatttcttggtcctcacaacgatgttgtcgatgtatactttcacattgcgcccgatttggtcggtgaagcattgaagcatgcaatgttggtatgtggtcccgacatttttaactcgaagggcatggagatgtagcagaacgtcctaaagggggtgatacatgtggtagcatgttggttgatttctttcatggtgatttagtgatagctcgagtaggcatccagaaaggaaaggagctcacacctagtggtggattctatgatctggtcgatgcgtgggagaggaaagggatctttgggacatgccttgttaagggttgtgtagtcaacgcacatcctccagctcttgttctcctttttaacaagtacagggttcgacccacaccaggtggtgtatttcccttatgaaccctgccaccaagagcttaacaacatctttgtcaatggccttgtgcttctctacgtcgaaacagcatagtcgttgggcgatcgacctggccatcggctggatgttcaaggaatgctcagcaacttcccttagtaaccccggcaaatccgtgggcttccaagcaaagacattgtggttggcctagacgaattcgatgagcgtgctttcatgtctgtcagagagtgttgcccgaatgtgaacgtgcttggttgtgtcggtggcgtcgattgggacattctttgcatcctctgtggactaggcaccctaggggatgaccttatgatgcttagacaactgtctcaccacggccaacattgaggcgagctcggtgttggcttgctcataggcatagtccactttgaacaaggcaaacatcgtgatgatcccatgcaggtcgggaatcttcaacttgaggaatgtgtagttggggatggtcatgaattttgtgtagcatggcctcccgaaaatggcgttgtaggaccaaatgaagtctgtcgtggttttgaaaaccaggggacattaagatttgtgtttg

SEQ ID NO: 82717 - DNA, 483 bp, Zea Mays
acgggggtaaagtcacaattacaaggtccatgaagggtataatcacaattgtctcaaacatagaacaccaaaagatgatgtctatcccgatctaaaagtttgatgtagctgtaattaatagaatcagtaaaagtcggtacaaattaaagctaagacttctaaagggtggtagctctcttgtcgagtttctgcgtgcattcatctcgctgttgtgggttgatactgacatactgtagattctggccggtggatacatcgcatcgcatcacggcgcatcagcacgcagcaatgcactatatatgctgcaagaagatgtggatgggtgtcctgtggaaaggacagagctttggtttgcctttgcagggtgttttctgtcccctcatttggctgcgatggaatgggaaacccgccggatcagatgcccgtcgtcgttaataaatcgtgtaacagcaccggctcgatccatctcgcgatcattccgac

SEQ ID NO: 82718 - DNA, 1091 bp, Zea Mays
ctaagcccttatatgttgttccataaaaacatgcacctaagccgcttctctagcaaaataagcttgaccgctagttccacttcagtttaactgtgtgcttatgtaaaaacaaaatacaaaagtgtttgacgcttgttttcgcaaaccatctttagccaatgttcttcttgagaatccttggccccatcctcgtggatccctcatctgctcattctaaaggcaaaatcgtgttcgatgacctctcttctcacttggatctagaaatattgttccttataaatcatgttgcgactttatctgccaaatctctagatcatttattaattctaccctgtcatcttgttgttgctataagacatttcaaggaatcgaatgttgatcatttttaatctctcattcatgtctcacggtacccatgctcatgtatccgggtagcctgaagatctccttgttagccccaagttgcgtatgaaactaaacatgagaatctcatggtcgtattctcgatagttcatctatatatctggtatgttgtgcttctatctcgagccacatcaccatttactcactctaagaagtcatccaatccaagtgatctctcattctcctcgtccttgtattctctaatggtagtcatgacgatgttttatcaagtgatctacgagaaatgcatatgtttggttccataaaatcttgtgatgatccttgattctattatgtctctaaaagtttgtcaatcgctatctcacgattgcccccttgtagtgtgaatctcaactttttgtagcaattgtatgattcgacgccttgccataactttttgagatcatcgataaagggttgtagcatcacattgagccctttttctcaggatgggtccaaacctggaataaattagataaaagaaacatgtaatcatatttcatgcaaaggtgaggtggaaggttgtatggaattgcaaacataggccaacaagaatatattgatgtgtttgtattgaaaggtgtgaaaccttctgtcgctaacccaattcgaatattcctcgcatctagagtcttccatgcttcactgttagaagggtgcatcatcac

SEQ ID NO: 82719 - DNA, 466 bp, Zea Mays
cgtcgatgtcggatgttccgccgccatgctactgctcccgtgggcggcagcgcccgcgctacagcaccggggtaaacacctaccaattagctcgtaataatctcccctgcgtattgaaccttccggttgggtaaatggggctccggggcaccaggcgcgctgctcgccgccggtagctccgccgcggtactcgcacgtctccacggcaggcaaactgagggaagaagatcgggtcctggccattggatcttttgccaacgcgttggattagatgtgagggtatcctttgcctactttgatgggtgagcgtcgatctgggatcatgtggctcggtgtggtgggggtgtggcatatcctcggcccttgatcacgaatccaacgcagcatgtcgtataccaatttagatgtgagaggtttctaatccaaacccttgattcgcgatctggcggctcagaaagacccgtac

SEQ ID NO: 82720 - DNA, 1094 bp, Zea Mays
tgcatttctgctcacaaaaatcaaagaattacgtgctagtgaagtttgatcctaggtctatgatgatgatactaggtatctcgaatctgaagatgatttcttggatgaattctactgcttttgctgaggtcagggttgtaatcggcttgtattctatccattttgtgaatttatcgatggctaccagcacatgtgtgtatcctcattgagctttcttgaatgacctaattaggtccagtacccagcatgtgaaaggccaggtgactgaaatagtttgcaactgttgcgctagtaggtgttgctgtttggccaaaaattggtatgcttcacatctttggactatgtcagctacgtctttcttggctgttggccaatggaaaccggctctgaaagccttcctcacaagtgccctagatgttgcatgcactccacattgtcctgcatgaattttctccagcggacatctcccaacgcctgaatcaatgcatttcatgaagatccaacgaccccctcttgtacagtgctttccctatgactgcatagtgggctgactgcctcgcaaagcactcagcaacagccttgtcaactggttcttcctcattcttgatatatctgatgatcggtgccctccagtcacttgggtcaggttccgcctgctctattgcctcgcattcccccctgatcctgatgtgatactcggctgttgtttctcttgtatgaagatgcatggtggagcttgtgatcggcttcaacccaacttagatagaatacatgttgtcgcgttgcgatctctttctatgtggtagaactctaaacctttaaatttatctccaatcttcatgactgcaacacagtagtcacccattgaatcggtggagcaatatcattccttgttgacctggatgatgacaactaaggaatctccatataccatcaatctcttgatcccgagtgatacgacaatatcgagcccatgtgtcaaggctttgtactctgcacattattggagactggaaataaaagttgtagcgcgtacttgagctgatctccttcaagtgcgatgaagaggattctagccactgctccttgtagct

SEQ ID NO: 82721 - DNA, 333 bp, Zea Mays
tccgcacaaggttaagtttgcaacaagctcaagaacaaagagaataggagaattaagatgaaattgacagcgtgttagattgagttcacctcacaccaagggtccttcaaacgattgaaggagatgcgattgcgagtgtgagaggtgaaatgaatgcacttgttgagagtttggtcagccaagatttcgtgggagaggcagaagtaaataagagagagagtgtgagagggtatataaaggatcccccaaaagctggcagccgttgggagaaaaggggtaaaaaccggttgaaccggtttccaccaggaagatcccggttcactaacctactca

SEQ ID NO: 82722 - DNA, 609 bp, Zea Mays
ctaggggagattagggatggataacaagaaggggggttggattagggttccaaacctcgggttgaaaattgggatgttacaaacctaccccacttaaagaaatctcgccctcgagattcagacggggctcgagaataggtaagggtattccctccttagagagtcctcactttccgaggtagcttcctcttctccttctctgctccactgaaccttacggagtcttacttctgagttgcgggtctttcggactgctaagtcaagaatctttattggcttttcccggtactggagatctttttgaatctgaattgtctctgcctcgatgtggttctctggtacttacaggcacttacggagctgggacacatgaaacacattgtcaatatctgacatggattctggtagttcaaggcggtatgctgtgggtcccactctgctaatgacggaataggggccgatgaaacgcggtgctagctttcctttcacttggaaccttttgaccccatgcattggggagaccttgaggtatacgaagtctccttcctcaaatctgagttctctccgtctgttgtctgcataacttttctatcgactctgagcttcaag

SEQ ID NO: 82723 - DNA, 360 bp, Zea Mays
gtgatgaggaagcaacggccggacggaaacaaaattgacagtgttggattgacagacatggatgcaattgcaaggtgacggacatatgcatgcatgcatcttgatcgatgctaacaaacaaggtcggcattgtaggcgggatccgatatgtctccgatagatcctgttgggtttcgaaatttgaaggtatggagtagtgcaagcagttgtactgctcactcagtcccaaaatagttagtactttatctagaatcttgataaatatttgtctgcattcatagctaaaagtgtcaataattttagaaggaatagataatacaattacaaagtatggtgcagcaggtgtgtgtatgatgggat

SEQ ID NO: 82724 - DNA, 305 bp, Zea Mays
attgaagtacgtagtttgctggagatagcataagcctccttgataaggctctttcaaaggctcctccaacaactccttaaaaaatctatgaaacgggggctattccgctagcttctcgttgaaaatagcaaggagctgcttccaagaaacgagcaaagtcgggggctcgaaaagaggcttctaaggctccctcccatcctccattcctcccctctctcatgggttccatgttggctgaaggtgctgcatttcgtactaaatagggtgctcatcccgaaactttttgtgaaaacaagaacatagct

SEQ ID NO: 82725 - DNA, 551 bp, Zea Mays
cgaaggcagaggcccaaccgaagattaagacaacctttggtggaacatcgcaaaaagggaagaggatggctaacattctaaagctgttttgaagcctgtgaaggtggcattgcctaagtgtcgaagaccattgaatctcctctcagcaagcctgttgctgagagcgtgaaaaatgaactagagctggttgttagcccaatggtttaccttgatgtggggagagctaacgcttcgaaaacttacactatagcggatgctctcaaggaaaaagagagggatgaagctgaaggtcctaaagatgagggttctatagaggaaacaacttcagtgtctatagagatggtgttgtctagatgacgcaagtacattatttgtcatgcttctaggggaaaattgactacgaagcaaattaccgaagtccaagattatactgaagatctaaagtaccccttttactcgcttgtttacgatggtaagaatgaggatgattatctctattgtctcccagacaatagagaacttgaagtatgccgcgagatgatggataaaat

SEQ ID NO: 82726 - DNA, 458 bp, Zea Mays
aaaacaacgcttgaattggatagagtcttaccagagggggctggccacggagcgcggaggacttaggcttgccggtgacagaggaaaggggaaaactggtgttgcggcggctctgggtgaaattgggggtggaaattgaggctacacggccgtaagaaactatagcttcaccgtgcagactcaatttgggagaagggggcagagacaacgtgaattttggattgcgatcagctcactggtgaagaggtaaacacctcgtcgtggaccaccgtgctatttatagccccggcgacccgacagacgatctccggccacggatagcatcgcaagcgcatgcataccacgtcggaaagagatacagtgagggagattgaggcatgggcgacaccgcggcaaaatttactggtcatggtggccgccggtgaagactccggctgggcttgggagatggcgccacg

SEQ ID NO: 82727 - DNA, 646 bp, Zea Mays
gaacgatctcaggtggcggggaagtgaaaccaactcatcttctctccactctcaaacgtcgttggggatcgatcgatagggagtgcggcagaacaactcatagcgcgtacaccggcgaccgcgatggcaggctcctctgaggacgggcggcgccgcagtgtcgctgatctacgtgatgcggctatcgcgaggcgctggggcgggtgtaagcaggctgcctcttccagttccagcgcccaatccgtccaatccatggccattgtcgttgcaaacccagaaattgtcttgcagccaacgcccttgccgacgatcgtgacacccaatccctcctcgccggtgcacatggagcccgcaacgcccagtccctcgtccgtgccgattgcctccacgatgaccaatgtttccaacgagagcagcagcggctttgccaagcccatgcacaatgatgcaacggagacagacaacccacccaccgaagccgtcacccacctagatgctgtgcctgcgctgccatcgccgcctccagcagaggtgcatgctgctacgtcatccgtcccaccgccgccgcttccaggtccccaaaatccgaacgggtacacatgcaaactgtgcagtgcgtgtttcccgacgcaccagggcctcggtg

SEQ ID NO: 82728 - DNA, 811 bp, Zea Mays
ctaatacagagaagtgcaggggcctcagggtaattctcctaagacacagagaaaagtcctatggattgcgggctgatatgacgaaagtataggggctctttagaaagaattccaggccaaagggatacacatgatcttgagccgttggatcatcagatgagggctcggattagatcctgccttacaatacctaggatcaagcagcgacctttagattttaggttgacggcaagatgagtcactacgctactcaacaatctcggccatccattaaatgatcaatgacccagatctaattaccttgagatctactcctatccgtacatcgttcgatctacggtccggacccaaccttgaaccggtatgggctgatctaatcacagtcatccatcgcggatccaatggtgaatatccatcgtcttcgattgccagaccccgaacataacaaagtcggccgccccgcacggcatagcccaccggcgagcacgagagtcgaggactcccgtactgaccgccactggccggattgaaacagaggtccgccctcgatgggtttgatagctcatttaacagccaggggcctcccttctacctccagacgtcccgcggcggagcgaacaccagctcatcacgccggtgtgatggatattggtgcgcatgagtctaatcatcgaattcgagtgcagcgtcgcatagtagagataaaggcgaatcacgaggatggggactcaccggtagaggtgttgcgcagaggtcgggccgcggtggggagcttcacggcgtgcactcccggctccggtgagcaattctt

SEQ ID NO: 82729 - DNA, 715 bp, Zea Mays
cgcccccatgtttccattcagatatggttaaggtcactccactgctcctcatcttgtattccatttcagacatccttgctaattcttcttctgatggaaaagcaactaggaaagaatcttccccatgttgcaaagcttcccaagcccattcaacccttgacaattttgccaatttagcttgaattgaggcagcatcaagcttacccccagtcatctttatcaatccagttggagcagcatcaggtgtttcaagtctatagtcaaaaactggtatgcgaaagaaacaaagctcattcttggcatatccactcatggctgcagttggtttctccattttgagcaaaggacatttggccgcaatatgtatattcttcttattgcatacataacaatctaaatctgctttgcatgcttcaactagatgcccattgcacttacatcgatagcagtgtggtggtcttggtttcttggccttgaaattttgattctcccgtttctaagtcgcatcaggcagaccttcagcagcatggtttccacccactatctcatgttgatttcccatcctttgaattcccacaggcgcatgctgctgggatgaggcaataggtgcatactgctgcagcgcgtatccatggccacgcgcccagttctagcctgttccccctccgcgaccggacgctggagagccacatccaggacctctccctgccctgcc

SEQ ID NO: 82730 - DNA, 1473 bp, Zea Mays
gcgggtgtagaaactgacagttcagcgaacaacgttgtggaccaagaacaagacaaaacatgcacagctggaaaagagcggttgtgagtattaccagttctctatgatcttagagctaataatattttctctcatttgacatttagctcttgcaaattctgcggaatggtttttggccttggctgtcgtctgtaacttcttcattctttctcatgcagagccaaagtagtaagtcgagtccagaagctaacagtacccaaagtcggccaagcatcaagcttgcggtctaaaccaagagatccttctgctcctaaatcttcaggtaagatacctctttgcacttctgttacaatttaatttcatgggaatgctaatcttgaggagctggtatttgtggcaaatggatctgagtctgacacggtagttttagggttgattaacttgatatgactaagagaacactaatagaatgtgccaaactgacatatttttgtctatttaaacttgatatggatttacccactgcatttgctatttagctgatcattagctggatggcacaaccattttttgctacacccatttacataatttcgctatttactaaaatactatattttttattaaattgacaaactattaaatttggttttataattatgagaattgagaacacagttttctctgccaattactgtctttgatactggccttcttcatgaatgatgcacacttcagtttttgtaagcagctacaagaagcatgtcattacagttttatttggtgttcttaatttttaaggctataagatgattgagaggaggcatgcaccccctcctgctggcagcgacctggctcaggcgacctcaacaactttcactttctagaataaaggaaaagctgcaggaggatcatgttatgtttgatattatcatgttttatgcttcaaagcaaatacagtcagcagaatacttttgcactggggacctgataagcaagaaagatgattgggcacattatgcgttgtttgtccctttgtatacacacttcacttcaccacttcgaagatatcctgatataattgttcacaggactctgaatgcggtgattgaagctgaataactgtatatgtaacagaagaaatcttctgcagaccagaatggagtcaaagcatcttgtgaattgatggatatgtgttttacaggccttcagttgtgcaaagatgttgctgaatctgaagaagggaaaatggcactttctgctgcagttaagaaatttaaggttctttcctctgaaaatcttggggagattgctgaacactgtaatgaaagaaagtgggctggtcgccgtgcagaagaagctggacagaagctctacatgtgggctctgataaagaacaaagaggtaactggtgcatcaccatttgcagctttcgagcaagtttttctgtgatctttaatttgaaattctgct

SEQ ID NO: 82731 - DNA, 423 bp, Zea Mays
ggggggcacacccacctactcggttacctataaataccccccccccccccgcactgtacatggttgggacacggttaacaagacgctattgttccctgcttactgtgttgttgagcacttgtgtcctctctttcttgagtgattgggccctcctgaccacgtgtcagttggtcgcaacaacggtcgagacgaatgatggcctcccaatggcccagccaggtctcagggagacatggtcgtcatgcgctcatgtcgagggatctagatcggggtccttgactgaaggtgagtatcatactccctcatccctaattttttatctgtttagtctcagcggctcgctgatgggttttcatgttttttgtttaccagcgatggtgctagaggagatcgcgtgtgcagagaaccgccttcgggtcctta

SEQ ID NO: 82732 - DNA, 600 bp, Zea Mays
agtccctgccctccgacgtgttctaccatgttattggcacgccagcagtccgcagccccgaagggctccaaataactaatgacagcgagggccaccgcatagtcaaccttattatgaccgaagactggcgggcaccaataaccctgtttctacaggggtactaccatccaaccgacatcaacgaggccaagcgcctcaagcatcgaagccgggacttcgcgctgatcgaaggccaactttacaagaagggggtcagtcaaccaatgcttaaatgtgtcaccgagactgaaggcgtccaaatcctgcgcgaagtccacagcgatacttgcggctctcacgcagggccaagggccctagccgcaaaggtgatccgtcaaggtttctactggcccgcaatgatctgcgctgcaaatcgggtcacaaggtcctgcgaagcctgccaaaaattttctcctcgatcaggcagcccttcgcaattcacgaaactaatcgcccacacatggcctctccagcgctggggcctggacattgtcgggcccctgcccacggctcaggggaacctcaagttcaccttcatcgctgtcgagtattttaccaaat

SEQ ID NO: 82733 - DNA, 400 bp, Zea Mays
gttttggtgtggagcgaaaacatttcaactatgtatgataaattttcacatggatacctcaagagttacaccgctcatcttttgttggaaactaaatatatagaaaatagaaatgttatgttctattcttcctccaatcctgatccaaatacatatttggtatataactcgtattaatgctacgatctcaaggaggagtgacatcgatgacagcgaatgaagggcgacagagacgagggaggaggatgggagggggaggctgcggtggcgagaaaagatgagggacaagagatatcaaaataatattatttatttcctatactttaaagcagaaaggaatacggcttccaggtgcctccacgtcggcactttctgttttagccgcatgatccaaatccaa

SEQ ID NO: 82734 - DNA, 939 bp, Zea Mays
cccgagttctagggggtctgggaccattcaggtgggccagcaccgttgggatgacctagtgaacttcgcggtcgggggatgctccagtgagtcagggggtgctccggcaagcaatcccgacagcagtgggagttgatccggtgcattgaggccggcgtgagcttcagtgaggggtcgagagtgtctatggccaggatttgggcacggggtgaggctgtagtggccaggtgatgtggaggcacggcggtccggcgtgtaatggctccggcgagcccaaattcactacagtgagacgaagtgcggggtggggttccttacctaggggcggtgctcggggagtcttggcacagcgtcggtgggctccggtcggctggatgacgaggaaacatagcggcggtggtcactggtctacactaggagggggtcaaacatggacgggacagaggggccaagaaaaggggaaactgaggtaggttcccgatgcattgtacttagacggagctaaccgtggcaatggcgacggcagtggctcagcaacgacggcggaaaggccatgagacggtggcggcgttattgcgtgctaggtgggaaaatgggtagggagagtgtgaatgaggggcggggtgcgctggtgggtctggggtcttcactttgaagctagggcgatgtgcgtgggactgggatcatggggtgtgggtggcgattatccgcgcggagcgtgcggtgtgggcgcgagcacgacggagcgggcagatgtggggagggggacgagactgatgagtgggaccagggcgttagtggactagcgcgagcgagcaggcagggagtgctgacatggtggggcccatggtgcagagggagggaaggagcgggtgggccggttgggctgaaaggccgacgtgaagggggttcctgtgcttctttcccctttcttttatt

SEQ ID NO: 82735 - DNA, 597 bp, Zea Mays
ttggtctaggtaggtgaagactaggtgatgttgtgcggtggagacctcatagagttctactccaaggagcaaccatagcacagggagtaatcgaggaaatatgggttgggcgacaacatcgttcacctcagtgcaacgctcaatgttgtcttcctatgggctagggaacaaggacattgcgaatggtgatgacggtggtggtgctatgtaaacagtggacacaatgagttcaactatggaggaaagagagagagagcgagaaaacaatggcaaacactaggaatatctcattgaggcagagctctagtacctcccttatgttggtgaggtgcttagtgacaatcatcattttggcgacaatgacatgtgcagacaaagggtagagaaatggcctaacggctgcaactactaagggcatccatgggtcacagtgtcgggtggcaagtacttatgaaagggaggacatcatgggtgcaatggaacccgaaccacaaaaaggaggctaaggtcaccgtgacgtcatgcgtggtatccacacgacgatgatgattggaggtaggagaaaggagcgctactaacgtgtgggccccctcccaa

SEQ ID NO: 82736 - DNA, 617 bp, Zea Mays
gagggtgtatggatgtactaaaaattagcctccaaaatgaccggttcaaaatatcgcaccaatgtttctccaagcaacatcatgaagccgaatatggagaacctatgagctgaagaccagcagcgctttgaggactacgcaagacaactgagagaagaggtgttgcgaaagggagatcaagaaatcgaggaggcaaaggagaagtacctgacgcacttcaagatggactggcattagaaggtcatccaacaaagggaatgtgacatggcatctcttctacctatcgcacctgcctccgatgtaagtaaagctgacgacatccaaactctaaggcattatgtagatgagaaacaagatcaagtaaaacaacacatgggggtatggaagaaaattatagaagaattttaaagatttgtaagaattctcccaagatgttgataaccatgttctctaatgatagattagaagccaaattcccatataagagttatctttgcttcctctaaatatttaacttaaaatatagattatatcaatgtgcctttatgggaattgataaggcatcagatttggttaaaatttaggaatgagaagggaaggattcatatcctaattat

SEQ ID NO: 82737 - DNA, 582 bp, Zea Mays
gttttttttttcaaatggttttaagcataaatgttttctattttttttcttaaatcattaaataaggaaatgatcaggaacacatgggtatactttgtttagctattgggcaggagtagggaaggttgcgttaataaagattagggcaaagaaagattccaatatggatgggggaactttttctcatctgatgatccagcttggtctttgaagacttgagttggtgcttatccttccttgatgaggttgatcatcttcgatctttgttcttggagttgttatccgaattagggacatgtagttaaggtaaatttgtaggtgacaaatagatagagctgctagtttagtaggtgactaagagttaaatgggattagtccgatttagtttggttgtttgcttctgaacggtttggataggttatgtagcatattatgtaggtcaagttgttgggtatggtcgagttgatctaagtcatcaatttaggcttaagtgagttaggagtatggcctaatccaacaataagtaactcttactagattaaatcatattagattagataagatctagattagattggatat

SEQ ID NO: 82738 - DNA, 769 bp, Zea Mays
gtgagaaatcccaagtcgctatatgttgtttcactctcttaggttcttctttgttgcctcggggtcatggggttgtggtgcttgttatgtcttcttcttctgttcgggtcccgggcggcgcaatcggttctgtctcgggtctctcatctctctatgaggtcggcctctccttttatagaccaaggagggggcggttatagatagcatcttctagaagttagcataacataagataaaagaaatgattcacactcaataaaatcttgtagtgtgttggtgtctttccccgcatgggccttctatcatatctctgagattgtcgggggtgggcgtgatccgtgccggtgatgaaagtccgagtgtcaccattacttgttttgtccgtgtctccccctacgtcgaccttccgccttttgtggcctcactgctggtttctctttaatctcggttaagggacataggacttgtagggacttaggcctaggatcggtagattatgagtgggggagaccgatactattcacgccgcatcccaccactaggcgtagttaatgaggcgtacctagagttgacggtgtggctaatctgacggacacgcaagatccactcgaatggggtttcgaccgattcgtttgaaccctttcacctgcctctgtctcatctaacctcttggcttgatgcaaggggtattagccctcgagcctttggaggaaagtaggtgttccatcggaggcttttcttagctcatggcctaaaggtggtcagggcg

SEQ ID NO: 82739 - DNA, 836 bp, Zea Mays
taaaaattgtgatattagagtagatcacaccttcacagtttttgcactaagataagtcacgtgaagatactcttagtcttacatataaactcgagaaaaaaaaagccgatcatggtgactggtgactaaacaagctttgcttctaaaatcttaaatctagttgactaggctgatggaaaccaacagccaacacagcttttttgagaaacaataggcaacacaactgcatagtgaaatacacgatgaagctaatgctaggattaaactgacatgcaagtggtgagccctccgccggactctagcgccaccttgtttgactctgctcttgcttgctgactgcaggagggctacaataccaacctcgacgtggctattgctctagcagtgggtgccgcagcccggtaagcaaagctaggagcctaggattgcagattagttaccggattgggggcagagcagcagaggtgccgcagccggcagtgcgtccgtccgtccgtggtctgttactctggtggatctccactccacgcgacgcagccggcagtgcgtcagtgggtgccgccgccgccgcatgatttggagcgctgagccatggcggctgtgtgcctatgcctgtgcgacggttgttacagtggcggctgtgaggctgtgagcagtggtgggatgtcaggatgtgagacgggcagacgaccaatgtgttgcccttgcctgtggtgggccgatgtgagcccatgagttgtcaatttagaatttgtgctaggctagttaatagtttcggtaaattccgaattttaaattcggtaaatttcgacccaaaacggtaaccgaagaaaacg

SEQ ID NO: 82740 - DNA, 492 bp, Zea Mays
tcgaccttagtcaaagcatatgttctgattgcagattcacgtggtctataataactctcctccgatgaactcgccctgctggtgatttgcctcacgaagaggttcatcttgatgatgaagttcctagcaatgcgtgcaatatcattgtgttgggaatacagaacaatgaatctttcgttttgggaaatgatggagatcattattaaatgtgggagacaaatgtgtcgacacctatcttgcctctatatattgcaaagggatccaaaacaaagtcctaggcatgagtgctttaagctctcttatcgggtcattgataaatgcaatcgaggctgaaccaataatcgcaaaaatgaaagtcgcgagcttgaagttcggacatttattggcactattgaaataatgtgtggtgaatgcgatggttcaagtggtcttgtgagagatccatcccacatatatgttgaataaacattgttccgctatgtaatatatctg

SEQ ID NO: 82741 - DNA, 394 bp, Zea Mays
aaggagtgttattgttcaaagattgtatagtggtgcctaaggatgctgagctccgccagcagatcttggatgaaggtcatcttactgggtattctacccatctcgtaagtaccaagatgtaccaagatttgagacaacattacccgtggactaaaatgaagatataaattgctcgttatgtggcaaagtgcgacacttgtcaacgagtgaaggtggtgcacatgaagactgctggacccctacaatcgttgcctgttccaacatggaaatgggatgatataagtatggattttttgttggattacccaggacatccaatagatatgattctatttgggttatagtggatcgacttacaaagatagctcattttcttccagtcaaaacatattac

SEQ ID NO: 82742 - DNA, 392 bp, Zea Mays
cgagatcttttcaccaagggtcgttatccgcgctttactgggcgcgaatcacagcgccgacgcaaatccgagcgcgaggtcaccggcggcgaggttcagtgcatctaccgatctttttcagttactgtgccatgcgaattcccttcagtgcgcctgacagagcagattgagaagctccattctccatttttcatgtggagagctattgatccatctgcaccaaagttgtagctctataaaccagccttgattctgctatagcaaccataatcaaatactccctggttcctactcaaaatcgcttccaaagttcatcccaggtcactgtcagtaaaaattcagactcagagttgactaacagccagactttaagtccatttatctccaatttc

SEQ ID NO: 82743 - DNA, 898 bp, Zea Mays
ccctagccattggggtgggggcatggtttgggatcagctataacatgttgtggtgtccgtgtcatgcttgattttgtttggatggtttcacatgtactagctaattggttgtgtattattgaagaagtatggaaatataatgaaaaatatcgaataggcccatatggagtatttattttcgatggctagccgactaaataatcatatttacaatgctattagtgacggtctaaaactgacatagataaaccaaaaactagtgtaaataactatttacgtcatggttacgttttatttacaatgattttaggccgacatagatttaccagtttcggctcaaaaggatggaggtctagccatttgggtggggcatgtatagtggaggatcagctacaacatgcgatgatgtccgtgtcatgcttgattttgtttggatggtttcacaagtactagctgatcgattggttgtttattattgaagcacgtttggatatatatatatatatagtttatatattaagtgccatgggcttccaataatagaggaagcccaggctagtcaatatgctcatttgggttgaaccaaacttggtcaacagttcccagtcacggcgccgttacaccgtttcccccgtcagtccagccacgtatcccttgtttcccggtttctaaaaccgtcttcgcgcaatcagcccagagaaactcgcgtcgataggaaggaaaccccagtgaccgcgccgtcctaccttgcatctgaggcgactcgccagcgatttccgccgctccaatccaactgagctccttcaatctccgagcattggagcccgattcaagagccaatgctttcccagaagttccaggtaatccaacttgaaatacatcgagttttccgtcgatt

SEQ ID NO: 82744 - DNA, 429 bp, Zea Mays
gagagatggcatgtcataggtgtagggttgctcgttaattgggctgcttggtgttgtgtccttatgggcaatgggttgatgatctgggtgactatgccatgccatgaatttgcgtctagtataatggtttgacttgtctggctcacaacctagcttacaagttggattgagctagcttgttagtgaacaaactagtgttggcttggctcgttaaaacatacaaatgcgttgatccaagccaagccattaagaccatgtccagtagcttactcatatggtcacccaaaatactgtgttagactgttttacactgcagaatacacttttcgcagagcggagttcgaatgtggggatgtggatgtggatgggtaagatgctggaaatagtctaacaagtcaatccgagcgagttaattagctacaagttttt

SEQ ID NO: 82745 - DNA, 446 bp, Zea Mays
caactggggaggtgcaccaaggcggcgtcctgccaattcgcatcagagcggaccgagcttgagcaggagcgtgaggacttcaaggaggacatccggaaggtgtctgaccgagaggaggaggtgacccgaaaggagagaagcttggttaagaagaaagaacacttagaccaaaaggaggaggccgtcacaacgctccatgataagctaaaagcttataatgcagtgctggagaaacaacgagacaaggaggctgcggctgaggcgaagctgcagaagctgcagcaggagcttgccgacaaggccagtgacattgctcgcgctgagggaaacctcaaggcgagggaagtttccctggtgaaacgaacaactgacctcacttggcaggaggaggacctcgccttcagggaggagatgtgggcaaggcggaacaagctgctggatgagct

SEQ ID NO: 82746 - DNA, 330 bp, Zea Mays
ctcagactagacaaaagagctacgctgataatagaagaagaccattggaatttgaggaaggtgaccatgtgtacctcaaggtgtcaccacttcgtggaatgaggagatttaaagtcaaaggcaaattatcccctcgctttattggaccattcagaatctttaggcgagttggggagatggcataccaactcgagttacctgctaatctatctgatgtgcatagtttattccatgtgtctcaacttaagaagtgtctctgtgtccctgaggaacagttaccaatggaagagctcagtgttcagggtgatttgacctatatggagtatccta

SEQ ID NO: 82747 - DNA, 489 bp, Zea Mays
gataagggctcaaaccctaattcaaatccctttaggcaaatggagccctagagggaattatagcaaaaaggctatgtaaatcacatagtcatggcttgggctaattataaaaattttagtacacttaataccctacaaaagttagtaagagaatgatcccaaaaagaaatcagaaaaccccaaaaaggtcaccaaagagaaggacataaaagaaaaatcaggtttttctcaagttcaaaaccgaccctctttcgaagatcaaacatgttcaccttgttcccaacctcaaaaccttatggcccaattgacaaaatggcgcctaaagacccctagaacaccctggaaaagtttgaacccaaccctaagtcgtttgacccgactggacatggcttttgtctcggtgtggacagctcggacagacacaacttcacctcctcgtaacttgccaacccgaggtcaaatccacttgagcactgcatgagatacaac

SEQ ID NO: 82748 - DNA, 626 bp, Zea Mays
gcaagactgagctctgggggaatgtcacaatcccgggcaactccttcggaaagacatccgggaaatctctaaccacccggatatgatcacctacaaatttgccatctagtatataacaggcttagtggatggtgacaaggtgattgtgacctcaaatctatttccgtccgaactagtgagttcaactgttcccctagtacaatgtataaccgcattgcattcttttaaccatttcatcccaaggattagatctatttcactttcctctagtattacaggtgtagacaaaaaatgtcttcccaaaatagttatgtcgattttgcaacatgtatagtttgcttcaataggtctcttaggtgtgataactaccatgggtttacgcataattatataagataaatcatgcgtattagcataacgaacagatatgaacgaatgcgaaactccagaatcaaacagtacagatgctggaattgaattaataagaaacgtaccaatagcaatgtcagaatcattagcggtagcctcaacactgatctgattaaccctggcaatactgaatccacgattattggttggagtctaattctgcttgccttcattactgcctcgagctgtagtgttgg

SEQ ID NO: 82749 - DNA, 464 bp, Zea Mays
acgataaggtgggtcagcaaagttcagataccggcaagacgacagagcaagtcgtgacagaaagagcaaaatctcatgtccccgaagccttagctgaggatactgattacattgttcgacatgcttcggggaagaaattatctgaagaagaaatcttggaggccaaacactgcgcccgaagactgaaatatccgaagggggccttagtgttcaatggtagttacgaagatgatttcctgtactgtctcccggataacaaagaaatatctgtttgccgggagatagctaagagtatgggatttcctaagcttgaagaaggcctttcggtcttatcgaaggatgatcttgctgacagcctcgcgtacaacagtataaaggtatagaggttaactttgaagctagaaaatgaaggattttattgccatactcaactcttcttttgcagggcttaattcttagtaatg

SEQ ID NO: 82750 - DNA, 826 bp, Zea Mays
aagacagcatcgctcggaagtcggaaccatccatgcatatgcatgcatgctgccgtacgttcgttgaaaattccacgtggcgcgaatctggtcccttgactcgttccagcctttccaggcgactgtgcgtgcatgttggcttcatgtaaataaactggcaacacacaaatttggctgtcgtgccatccgtgaagattcaatcatagctagctaggtgggtcagctactcagctcggacgccgtcgtcgtctcacgttcgcacgtcaattagctcacgctaacggatcggaggaggggcggcgtttcatggaacgcggcttcttctggggaccggaccgtgcatttgtcgccggcgaaaaaacgatgctagaagaactagaacacgtggacgagttgctaagctgctatccaagacaatagacaatcattattcgaagttctatatcgaccggaccggtggatgcagattaggtactgacttttggcggggcccggcaagacgagcggagcgtgcctatgcattccctcgtcgtcgtcgttggcagctctcgttctataaattggataccagcagcggcatcctccactcgatccagatatcccagagcaacgacgcatacggagcacacagcattgcagtatagcaagcgccagccttggtttgcatcgtcctcgctcgctgctaactcagagcacgcatcatcatcagcatttgcgcgacgttgatcgagagagctagtcagatgcaacgtcagagagctaagatgccggcaggccagctgagctggccgttactgctaggcgcggtgttagcctttggagttgc

SEQ ID NO: 82751 - DNA, 498 bp, Zea Mays
gtgagtttatcgagtgtttttttctcctacagtccacaaaacctcatcaaaattcaggttagaccttataccagcacccttttgagccttgcaccttctttcaataatctgcattgttgaatttgtgtgctttcgcgtcatttgttgctggtcgcattgtgttttttctcaccatccttctttcttccttgtttttctccttcggttacatcaaaccctagcgcgctgcaacaatcttctttgtttttctccttcggttacatcaaaccctagcgcggcgcaaccatcttccttgtttctctccttcggttacatcaaactgagtcaacgccacaaaccgagtcaacgtcgcttccttatttttctccttcgattacgtaaaaaaacagaaaaaaacaaaccgagtcaacatcgcttccttgtttttctccttcggttacgtaaaaaaaacagaaacaaaaaaaaagaaaacgaaggagaaaggatacaaagcggttg

SEQ ID NO: 82752 - DNA, 770 bp, Zea Mays
tgtggttgatgcccattctattgaaggcatgcaggaaatgatatcttcatggctatcatcatcgacaagagctttgttcagttcctagctagttatgttgcaaattatgaccatggtgtctgtgtgaggggcacttcgtagttctacatccttcgcatcgaacattagatggacgtgggtccattttgtttggacgactagcccaatcagtgcgacgtggtttaccattcaatagtagtccttcttctgccatttgtttgcgaagtccacgctggagcctcctatgatcatgttgatgatttcgtggacaagtggttgggggaagacgtattcatcttttggtggaggtggtggtagttggtgggttaggggtattatttgtggtggtggatgtggggtaatctttcttggtgaatggccttcgctgtttgttctggggttgttctatccattatttctttggtctcttttgtgatagcgcaatctttggtagagtgctcaatgtcttcgccgtgaaaaacacactaaggcttgtgattttgcgtggggcccctaccgtgtccatgaaccctattagttcttcctcctcatcctgactgttgaggaagattgtgggcatgatagggttcttcggcttgctgtcattattgactggtgatgttatggagttctgatggttgtgaatttggtgatgctattggctcccaagctaggttttgttgtttgtggcatttgaagtctccttgggctttcgttgtgtttcaagcttg

SEQ ID NO: 82753 - DNA, 841 bp, Zea Mays
gaaaacatggacatagtatgccgagccatattattaggtcagatgaggtacggttatagcaagtatggtcgtgggaaggaagagtataataaggaaagacttcatcctgaactgtggatcttgattcctcttggagttggatttgactcatctccttccttgtcggggttgagctgttcttttcagaccttggtgtcttcattcttggggttgccaccagagttagggacctatggttaagatagatttgtgggtgacaagtaggtagagcagctagtttagtgggtggcttagaagttaaatgagattggtcaaaatttggtttggttgtttgcctctagattggttggataggtcatgtaacctattatgtaggtcaagttggtctatcgttcttaatttagtgcagagtgaactaagttaaaacatgttctataggagtagggtctcatttatttcatcagtattaactaatttggtaattatcttatttagattagatcaggtccccttaagtcacattaacttagattggatctagattaaattgatatatctagattagactagataagatctacttattttagaatagatcatggttgttacacttagtgcgagataagcaaagtggttaggataggaaaggataagataagatagaatcttttaagatgagatgaatatattaagataagagaaattttttttaagataagatggatctattaagctacatatttttttaataagggatattcttagttggtctagtttatcttataaacaatttataagataattttttaacataagatgaacctattaggataagatggat

SEQ ID NO: 82754 - DNA, 508 bp, Zea Mays
cagctcccgagcatgtccccctctaggacacatggcagcccaggcctgtccttgtgcaggtccgagtccgacgtcatcagtcttgtcgatggttctggattcgcagagcaactcccaaatgtctccccctctaggacacgtggcggccccggacctgtccctgtacgggtttgggtctgacgtcatcagtcttgtcgaagagatctagaaccgttcatgaggatctgaacccacgagagcaagtcctaagcatcccctcgtcaaaagatatttcattaacccagattcattttaagagtctcgagccaattataccaaaattagcttgagcctctaggcttgtgggggatggatatcttctgggtcatcaagacgtggactcgcttcatgggccgcctaaaaggccccgttaagtcatccaagggacacattatgggcctcaacaggaggtaactaaagtcgacttaaactcccatgtgccggatcagggaagccaactagatgccgc

SEQ ID NO: 82755 - DNA, 419 bp, Zea Mays
ggtatagtaactgaaatagatcacaagtttagccccctcgccgccggtgacccttgcgccgtgatttgcgtcgtcgccgtaattcgtgctctctggtgaggggataatcacgatggagtaaagatcttggcactagatcgactcgggctcggtcacggctaagctcaccatacccacttgctcgtcgatcggtcgggatagacctcgccgccgttggccacttaccgctgtgcgccacgtgctcaagcgttgtaccacgtcgctgtgaatcgcgtcttgcatgcctagtgatcaccggagagccgccacggtgaaagccactaagcttgcgcgacagtaaccttcttcctctctggccgccagcgcatcttcgcgaaattggacgccaccgctgtgggagcctataaattgccgacccc

SEQ ID NO: 82756 - DNA, 941 bp, Zea Mays
ggaaaatgtgggtactagctatggcttatgatgacaggtgagaagtgggaagctactaaagcgggttgcccatatctttggtgcttttaccttgcattttccctcttgtgtgctttggaaactttgaagacggaattttctcctgggcccaggccggcctggcgaagagctttggatactgtgacatgatgcttcttttctttttccccctctgtatctctcttactctctcaaaggaaggcctattgatgtatgtagtatggttccctcctgtatatggctagttttggcacttggatggatgatggtggttgaagtggaaccctagtggtcatgcctcatgcatgcattgtgtagtgcgtccctgcttgccagctatatacatactcctatgcctgcgtttgcgacgactggctttgttgctaaacatggtgtccacattttgtctggaaactgaaatgtgcattccacccagtgcatgaacacgatgacagattccctgattattggtgtaagtcatgatccaatatgctcgttattaattcagaaagactgtcctggcaccaacctccaaccattccgccgatcttgatagcacatgaacaagatccagggcccagctttccactgttcactgttgctagtgcgatctttggacacctactacgcacgtatggtatggcaggtcaagaacgtttcctgtacatcaggaccgaccctgaagtttgtagaatggtgaataggtgagtttcatagtgtcatacaggcaatttcctgaacataacaccgtgtttaagaagttcttcagcgcagccgttgatacgtatggttgggcaagtaaaagtttagcctccatttgccattgttttttggcagcatttgtggatctacttgacctgatctgccattggctggtccttccttcttcacgtgcacatgcc

SEQ ID NO: 82757 - DNA, 622 bp, Zea Mays
taaatatgcccttaatatgtgtaattattctttaaatatttaatatggcggagactaaactctaataatcgggtggaaccagcctctctgcatcattccacaaatgtcacgcgcagaaccgattcggccggggtctttctagtgcagcagtgctacgaaaactaacggcatcattaccagtagtaccgggggtggtgggctgatggccaccttcttggtcggttgttgcaagctgcagcatgagcaaaatcatgagaagcaaacaagccgtgagtagtacagtgtccctgcttcatgtacaataccgaccaggtcggaactcggccactcgacactagctagtgtccctgcttcacgtacaataccgaccgactggccgtaccacaaaggtcgacgacaggctcgtcacgggatcacggcgtttgggttggatgcgcacacgtctgtccctcccttcaattcctcgccttctgaagatatagacgccgtccatggtcaggcctgtcctgtgtggagtgcaggctctgtttcagcgatgaatgcacattcaggctggcagtaactactacactgaagccccagctgcctcactcactcaggccaccagtgcaggggtactgat

SEQ ID NO: 82758 - DNA, 359 bp, Zea Mays
taactataaatgacttatttgtgcgagagctagctctttctcgaaaaagaaatggatcgtttcagctccaaccgaacgaactgacgtaatatggtatgatattcatcattatacgagagaatccagcgtcctgtcctccattcctggctccttctgctgcctctgcaacctacacgcggattcccacacatggctcgttatcctgctagaaacgtcgtcggttctgcctgcgtttcttccacacgaatcgtacacgcgctcaatgtcaaggtgtgcaattaatgtcagctaaaatgtcgcgctggagacgcagatctcgagactgcacgaacaggagctgctggcatggcagctcctcc

SEQ ID NO: 82759 - DNA, 1154 bp, Zea Mays
ataaaactaatgcaactggaatgggttaaaaaggagttaaaatgagagagttatgaattttctaagattctaggtattttcatattatttctatacttgaaatcaatatttaaagctttttctgaaatacttaatttattctattcaaaaaggactgcgagttataatatgtagaagttttgggtcatatttgtaaataaaatggctgattcgcgatagtctttacacatatgaggaccgcgggttgatttaactatcttcggggtccatacacaaaatggcgcaagcgaagggggtatcatccaaccccaaccgatggattcacaacctgtggccaaggttagatctctttaaaattgacccactacgccaccggctccgttggatctaagatgaacatccaccacttaaaacaatagaaacaacccctaggcgcacgatctaaatctgacggtcgcgagcccacttgacgatcgacagcccagcttcgcccgaacgaagcggtacccgattgatcaaatctaggctgcaacatctgaaatcgacgacacacatccacttaagctgaagtgttactcttcatctaatttgatccgcccatggccggatcaacggtatcagctcatcactcacgcccacgattgctagagcgaccagctcatcactcacgcccacgattgctagagcgacggagcgcgcgacaccgcggtggaccatcgacggcgttgaaccatccgaccaacccgaggttcaatcttgataaaaaaaaatactatacatagaggggaacgaggcggatttggaggaagctctcttaccgagaatcacccagtatataatcccgacgactacacgcagcggcattgcgaccatctgcaacgccggcgaggaattgcctctgttgcagttgcttcccgtgcttggaagcgatgcctacttgctccatgttctttggcgccatcatcagagccttccctggtcaccgtttgatgacgagttccagtattaacggcggtggcacatggttccccatctctgatcccctcccctgcggtagcttctagtgctggtgttccggccacacgagtagacaacgaggcacaattttatagtctagtagggctcggtcttatccccggtgagagcgcaacaac

SEQ ID NO: 82760 - DNA, 694 bp, Zea Mays
gtcgtgtccaggagcctcgcggggtgtttgttgaaggtttcgtgaccgtctggggaggtagtgactatggtggtggctggaattcgttgctagactttggtttccgctgtgcgctgtgggaagcttggttcgcctcttcgaatcgcggtgagtagcatcctacgaaatgccctaccgttaccgcttcatgctgttgcgttcagattagagtttaggatcggcaatgccctaccgttacgcaatgccctatgcaatgtcgccgccgtgcgtaggtctgttgccatcgtgggcgaggaaaggagatgggcgggccacgtcgtccattgatcggacgaggaacggctctgattaggccgaggatgtcaagtaggggggatagatctgggtcgtccgattcggatcggtcgggagaggaatggatggggattctttaaatccgtggcgctggtgttcgatccaacgactggattcgcgtaccgattcactaatattgacttctaatctggcacatcaaaattggatccgacggccagacagccccgtaccccttcggccttgtaaaattgcgtaagagaccctgtattttagggaaaacaacccatggtccataaggactgttcactgagtccgagaaagcttgagcagagacccctgcccttctcgggatttatgcgcacataccagggggttaata

SEQ ID NO: 82761 - DNA, 673 bp, Zea Mays
gtttatcaaggtggagttgattaacatttttaatgactttcacagaggttgtcttgctattgataggcttaactttagggtcatcacccttctcctcaaagttagttgccccaaagaaatgaagaattttagacctatttgtttattgaatatttgctacaagattgttaccaaagttcttaacaataggctgcattcttgtatcacttaagtggttagtgattgttaatttggcttcatttgtggtaggtttattttagactgtgtggtggccttgcatgcagttaaaaggaaaatgcagagtggtgttatgatgaaggtggatttttgaaaaggtctatgacaaggtgaactggcattttctatacgagatgatggaaaataaaggttttggttctcaatggtacaattgggtcatgaaaatcgtcacgggcggcaaggtggtgattagaatcaatgacactactctcccctacttctctactttaaaaagggtcagacaaagtgacccattttctcccctcctttttaacattgatgctgatggcctggcgtgcccaggaaatgggacttattgaaggtctggtgcctcacattgttgagaggggatgtgcctacctccaatatgccgatgatactattttccttattcaagataatctggagcaggctc

SEQ ID NO: 82762 - DNA, 598 bp, Zea Mays
tagcaatatggccacctgaccataactacactgacctcaactatcttcagcatggtttcttcgacgatgttgacccttcagcttggctacctcaacatcgacacaaaggactatcatcttcatgagctctttattggtttctacttcagtcacaacatctttattgaaacatcgctacgactgctaggatgctagccttgggctcctattttagtctgatcatctacgatgcttccattacgactacaggggatgttagagtatattttgtagtttaaatattgtgtatcatagtctgcaatatgtatccgtgagttatcatccaagtccagtactctacataaactgcctaaggggtcaatacaatacatccatctatttacacgggttcttgtcctctttcaattagaaccaaaaagtcacatgtagtacccatccaattacttgccatattttgttactgaaaaccatccaggccgtctaatctaaaaaacaatgatgagcgggtgaggtcatgacatcatccattctgttactcaagaatccaaagcaaactttcttctggtacaagtaattaatgagtaccagatgtaaattc

SEQ ID NO: 82763 - DNA, 561 bp, Zea Mays
ctcccatgtattgattgtccccagatgaagggatgaatattaggtctaagttatgccccttgcgaccatagtgaatgaattggccaacaatgccgtgttctcgccgaaaggatttaattgttgctttataaatcatgagaaactacttcgggccaaactgtatatcatataaaggaagctggggtgcttgtacgcagcaggctaggaagctgcttgcaaatcccttgaaagttaagatgtactatcatagatgaatctagcttagccctactattcttcttggatgaaggtgcttgtgttgaggcattttccttgctcttgtatttgttctaggccttcttcccttcttgtgcgatagagctctttagaggctttgtctactcccttcaaaattgagcagcccaaagcagcttccacttctagatttccatgttcctttgaatggctttcaacccctcaatttctttatcgatatcatcttggtcaaccaagagctccagagcttttcccttctcctattgctagatttgatatgattggtgacttcagtgtaatcttttc

SEQ ID NO: 82764 - DNA, 462 bp, Zea Mays
cagcagggccggaaggcaggtaggctgtggcgctaaggtcaaattcgaacaagtcagtcatctacaggagcagcattgaaggtcatgaggacaccttgtacgtggagaacgggatctagttctacctgcagacctcgatctggggcatcgtggactttgtatttggcaatgcacagccaagttccagagctgcccgctgttggtgcgccgcccaccgaaaggcaagcacaatgtgctgacggcctagggctgcaacaacgcaagccgcgagtctagcttctcgttccacatgtgcaccgtggaagtggcgccgggcgttgaccttgacggcatggagacctacctcggccgcccctataggaacttctcccacgtcgccttcatcaagtcgtatctcagtcgcatggtcatccccaacggctgtgtcgtgtggaacaagaacaaggtcgtcgaggataccac

SEQ ID NO: 82765 - DNA, 878 bp, Zea Mays
ggaagctggggtagcgctcgataaaagcgtcggcatcttcccacgtggctgatgcggtgggctctcctttccagtgaacctgaagctagcggacaccccaggccaagagggagcgtagaacgtgatctggttctggaacaacagccccattgtggatttgcggtagggccgatggattggccggcggcgtgcccacgaatttcttcaagagtccgacgtggaatacgtcatggaggtgggcgcgaggtgggagctctaggcggtaggcgacgtcgttgatgatggtggtgatgcggtacagttcgtagaaccgtggcttgagcttccctgacgtgggcatgtgaggcaacacggtggtgcagacggagccacacccaatcgcccacgacatagtggacatctcggtgatggttgtcgtagaagcgcttgtagacggcctgggcctgctcaagacggtgacgtatgtcagccaagaactcatcccattccaccatgtgtttggccattgcagctaccctcgtttcgtcgggctcatacacgcggatggagggtgggtctcggccataaaccacccggaacggagtatcgctgagcgccgactggtaggcaatgttgtagatgtactctgcccagggaagctagcctagccactggcaaggtcgatcccctgtgaagcagcgcaagtacatggtgatgactttattggcggcctccgtctggccgtcggcttgcggatgaaaagtcgtggtcatgtgcatcttggctccggtgagacgcatcaattcctgccaaaagatggatgtgaatacggtgtcctggtcgagaccatgtaccgtgcaggcgcacgatctcggcgaagaagacccggaccacaaact

SEQ ID NO: 82766 - DNA, 655 bp, Zea Mays
attaaatttcatagtgtaaaatttagagttcgctattattgatttttagtccagactgcacgctacagggtaacccacgcaatgtttttggtaggacggcgatgataatcgcaacttgatggtacgtgcaggagcacgtcgaaatacaagggaattatataggttcaggtcggctgaatgcgtaataccatacatcatatgtggtgctgagtattgagtttgcttggagttcacagattacaggcgagtcgtggatggtggtggatgaaaactcctattggtctactagtgggcgcgatggtgagagagagggggatatttttgtagggtacctccgcggccttatatagccggcaggggagatatctatttacatatcgtgaaaatttatctgggcctatctactttcgctattcttgcgtgccgactcttttccggtgcatggttgcttcccttcgagtttgacgttgaatgatccgctatccggttgcatgcggggcgtgttacttctggcggagcgtgtcatcctcccgatagtacctgcttctcctgaacttcggcccaataacacaacttggtgaacaacttatcgagggtatgtttaattaagcggcctatggaacatgtccatgtgacgattacccatgggatatct

SEQ ID NO: 82767 - DNA, 380 bp, Zea Mays
cggacagcgatagatctagagtaataaaaccctcaccgtttgattcggatccaacggatgcgattccgtaccggttcgcaggaataatgatttaatctggcgcgcccgtatctaatccaacggctaggatctcgccataccccttcggccatgccatcatgcaaaagaaaccccgtagatccctataataaacccgccgtcctgtagggaggcagtctgtgtcttgggagaattgtagatgaacccctggattctatggaaatcgatgcgaggtccagacagtggataatattcataaaatcaattagaaaacgaattttagtattaaatttattgcagaaacttgctaaattcataggaaattcatatgaactccaaat

SEQ ID NO: 82768 - DNA, 2226 bp, Zea Mays
tgccgcaagccccttctatgagaaatgaaccttccaggcaccccattgagcaggatctgggtggaagaggtcataagaaaacaacttatcacatccctccacacaggaccaaagcctaatttttccagaaccttaagaaggaaaggccaagagatcgagtcgaaggccttggaaatgtccaccttcaagagaattctgggctgatttttagcatggagaaatcttgccgtctgctggacaagcataaaattgtcttgtatgaagcgacctttgatgaatgcgcgttgtgctttagagatcatcccctccatatgacacctcaacctatttgcaagaaccttagtcaccaacttggcgaaactgtggatcaaactaatgggtctgaaatccttggaagcaatagcatcattatgttctggtagcagcgtaatgaaagctatgttaaggaatctgaaattcctgaagtctctcccccaaatagttgaaacaactaccatattgtcattttttataataggccagcaacttttataaaactgcccggtgaacccatcggggccaggagccttgtccgcggggagttgcttgatagtgttcaagatctcctcctcagtaattaaaaactcaagagcctgaaggtcatgatgctgcagtcccaaggcatcaaggttgatagtttggtttctctacacttcacttccaattagattcatatagaaatcccagaaaacctcagccttcccatcatgggaggtgaacagctggtctccatcccgaattgaagtaataaagttcttcctcttgcgaaatcttgagcaagcatgaaataacttggtgttggcatcgccgtccttgagccaagacagccgagatctggtcctagacaccgtcttgagcagggaagcaagaaacaagcaatgtttcttcaattgccgtagtagccagcgtttgagatcagaaagaggtctaccatccctttccgattctagctgcaacatcacttctctagctaactcgagctgtaacttgaagttgcccacttttttgtcactccatcgctatagccccttggctgtagccttgaacttgagggagagagatttaagggggcaagcattattctatacagagtgccaagcattagaaactgcatcatgaaagccctcaaattttgtccaaaaggtctcaaagtgaaatctccttttgccccaaagattatccttcaatccaaggagaggacaattatcagagccctcggaagtggaacattggagtaagaaatctgggaatttctactgccgctccacagaacagaagactctgtctagtcataccaacacatcatgtgcccctgcccaagtgaacttccttccatgtagatcgatgtctttgattcctaaatcatgaatacatctcctgaatctccccatcatgaatcggttgagattaggattatttttgtcttcatctctataaataaagttgaagtctccaccaacaatccaaggtccaacgcaattagctctaataagacacaattcttgcatgaacatgagcttcctatcgttaccctgaggcccgtacacacaggtcaaccaccactcatcaccaatagttggacagaatttgacagaaacacttaagacatcaaccctggagtagacaatagctcccaatttagacctccaggccagcagtacaccaccactagcaccaacagaattaagagtcacgaaattgttgtcgaagtcaggacccaataacgagagaacaaggcgatgactacaactctgcatcttggtttcttgtaaacaaattatgtctgcacgaaccgactctactagactccttatagaatcttgtctcgcgatggagtttaagccgcgaacattccagaacataattatggaaggatccattagtaaacacttagaggacaacacacatccaccaaattagcagaccatggtggccgctccacccaagtcatctgggactgcccaaccgaaaagtgttgcaagggcttaaacctgtggataggaaagaggatggcagaaaagcttggcataagtctctagatccccacagttgagctgattcgtgtctgaagtattatgaatagccttcatcaccaatatcttggccctagggatatgtggaatgtgctcaacgcctagaccagccactcgtcgactacgacggagttcctgcaaagggatgccaggt

SEQ ID NO: 82769 - DNA, 344 bp, Zea Mays
gaagaaaggtggatatatagaaagcacttttagtccttcgtgactccaactaggactaaagggtgacatttagtcaaggttagagccagcatctaggactaaagatgcatgcgacctttagtatcagttggtggctccaaataggactaatgtttgttctttagtcccagttagagagaataactatgactaatgctcactatgatcatggataggcactaggatacctaaagtactaaaaagttattggatagagcgggggctaggacagcgataggtcgaacctaggcacaaccaagaattagcacataggcattttagagaagtccgatctattgtgtgca

SEQ ID NO: 82770 - DNA, 690 bp, Zea Mays
ctatcatctttcttaacagtaagccccttgttagaatttacagccatacacttctctgcagttgacagaataaagttatcttgcatcctatattcttctgccaactctttcatggagcttttttttacaatgtttcttgtcatgttaccttaggtagacaaattggaaacattatactcaagggtttcagaattcccagttaagctaacagaatcatcgactttgttttgggagttatcttctgcaaaggtatatggtgtaataatggatcatctctttcatatttttctacattagaggcatactcttcattttatctcacgttcattttaagaaaatagcaagtgtcttaacttttttacatcttatttcggctgcagtcctggttgaagaaagcaagcgattgccttgaacagaataaactgggcattatcgacatagatgtcctcaataaactaaaatcagaggtttgtccttttcaggaaccttttgctgtcaacttgatttttgaagttcatctgctctgacattcatatgtttctgcataaactcatactctgaattggtatatctgacaattactaaacctggctagataatacaacttcgagttctacttctagagattgatcttatctcaaagctgtggaaagatgtggaatcatggcaaacccgttgtcaattatatct

SEQ ID NO: 82771 - DNA, 394 bp, Zea Mays
ttagaactatggtttctcactcggtatataaaatgcatttatgttggttacgtggtagacatgtgagattgctcggtccacccctcgctctacgtgagaagttggggcgagtttcgttttttaccaggtcgatatgaggtaattactgtggcgatgtaataaaagtggtgtccattatgacttttggcatgggtggcttgatgggacatgaaacgacccgttcaccgtatcgtgcacaggtggcgcgatggggtggttaccaccttgcctgttactggagtaccccctgtggtgatgcacttatgaagccaggatgaagccagaaatcgatcctgaacacaactcaagatcagcgcttagtactatacccttggggctcctactttgttattct

SEQ ID NO: 82772 - DNA, 544 bp, Zea Mays
ctttgcctttgcaagttcaaagttttcattagcttcggcaagctttttccgaagatcttcgacttcggctgtatgagctacgcactgtgcagtaagtttggcttcgctgacttttactctgtctaccaaggaaagcagaattttatccttttctagggcttcattcctcagtttgataacctctgaccgaaggttcccaagggctatttggcagctttcgtcttcaacattcttttgtgcccttaaagcattgctcaagattaagccctacaaaaaaggggcgggatcagcataataataaaagatacaaaaaataatctgtttataagtcaaaacatctttaccttcagactgttataagcgaggctgtctgcaaggtcatccttcgacatcgcagataggccaagctcgagctttggaaaccctatattccttgtcatctcccggcaaacagatatctccttgttgtccggaaggcagtacaaaaagtcgtcttcatcagtgccattatacaccaaggatccttttgggtactttaaatccc

SEQ ID NO: 82773 - DNA, 370 bp, Zea Mays
ctactacgaatacccccaatgtaagtaacaccaatgaactccaatctcttaaagcttacatagacaagcaacgagagcaaatgcaacatatcgtagggggtatacaaaataattataaaaggctaatgcgtgcatttgataagtctactattgcaaattttccttcgcacgatgttgaactgggagaaaacacacgtgattcatcagctacaggttgtcacgaccagtcacaacctctttatgggatgccgatagacatgtaccctgggcaacaacaacctctcacgcacatcggcgataaatttgccaatctgcgcatgtccggaccgtccacacgtgagcgcggtccatccggaccaacggtggccgg

SEQ ID NO: 82774 - DNA, 1019 bp, Zea Mays
tagtagcgaacgatcttccattatcgtggggaaatccggtgccccgcgcccgagctatcatcggcggttcaggatgtctggtgcatggaacaaactcggcccgacatattcgtacttatgccgcggctaattcagacatgggcctctttctcatctagatcgggtcgcttctgctagctccgtttattcggcccatagcaggacgcctcaaaggggtgactgttgtgtggccccgggcgtatttttgcactcgtgtggacctaagggatatccatcccccatagcgcccactgcgggaaccgtcggtatgacgagcatcgatggaagggtggccatggccatcagcacgataggaatgcccgggacaacaacaagagcgacagggggtgaggcatgagcaagatgatgcacgacgtggcatgtagtgctgccgtcgccgatgagcatgatgaacaacatcgtcacgagcgccgttgtggagaagagagacaaagcgtcacaagtcattgctagcgtctaggagaagtgcttccttaggagtgagaagctacaaggccatcgtgtgcttgccacgggtccttggcgatcattttattgtatctccattcgaagttgagcgtgtattgtttcgccagagctaggccagttggaaacgagataaagatggttggtggccttccgatgcaaagcatggacgacatatacatagtggatggttgttgttcaaggcatttagttcattagctcatctatttctggtagctagatcagaatttaccaccgctcgtgcatgacacaagacgatactggacaccgatcaactcatgcgtggctcatgcatgctgcattatgaatccctcgatgacctctgtttgataattgttgaggcacgttttcttctctatcagattattgtgcaaaagccagagacatctttatggttctatatgtccatgaattgtatgtttaatgcgtgtgcctaagagaaaataaaaaacataggttcagtggaacatgtt

SEQ ID NO: 82775 - DNA, 774 bp, Zea Mays
cccggaggagctgtggccaaatcttgtagaagtctttcccagtaaaatcgctaagttacccgggaaatacctgggtctcccccttcacttcagaaccgctaaaagaattgagctacaaccattagttgataaaatcaataaaagactcgcaggatggaaaggaaggcttctctcaaaggcaggtagagagacattagttaaatctgtgttatccgcgcaacctatttatcatctgacgatcttcccggctcaaaaatggctattgaaaaaaattgataagataagaagaagcttcctctggaaaggaagtaatccagaatcatgcaacgggggtcactgtctgatcaactggtctactacttgcttgccaaagtgcaaagggggattgggcattctagacctgaatcgttttgcgagagctctaagactaagatggctgtggtttcgatggaaggccaaagacaaagcatgggtgaatttgcagctgccatgcgatgaattagatgaagatcttttcaacgcttccacttgtgtgaaggtgggtaatgggaaaactgctgtattatggaaatctagttggatccatggtcaagcaccaaccaagtcttttcaacaaagcaaaaaggaagaacatttcaactttttaggccttgagaaacaaccgttggatccaattatgctctccctatgatggtgcagaagaattcaaggaattgctcggcctttggcaggccatcaatagtacacacgagctcaacgatttagaagactcca

SEQ ID NO: 82776 - DNA, 751 bp, Zea Mays
tgtcaggcgctctaaatggtgttctgatagtacagtgaactgaagaagatccctggtgcagtgcaccttgccgccggctacccgtgtgcttggattcgcgccggcgaggtgattcgtgctcactggtgcccggataacgcttcaaggaaaaaagatcttcgccgcggatgatgccaggggctggccgccgtaccccccttgctttacggccggctcagataagctcaccagagtaggctgcccaccgatcgggtgccacgtgccttgaatctggctcgtcaccggtaagcctgccacggtgaaagacacgtagctcttgcgcaagtgttcttccctctctccgaccgccaacacgccttgaccaaattaggagccaccgctctaggatactataaattgagcacacccctagctctgttaagtcatcgcgaagccaaagcatccgctgctacctccgattagccaccagagagctccaatttctttctctctccaaatcagttttccgcacccgtgaacacctcgtcgtggccagacgcctataggttagttcaagcatccttgcttgatgttctagcctccattaagtcccctgctactcgtagacctgtttaattgagctagactgccctggatcgccaagaacatgtcgaattgttctcggtttccgccgtcatcgtggacagaaagattctgacctggattagtgcaattgatggaggggaaatggtcattaggagtagaatttaat

SEQ ID NO: 82777 - DNA, 1371 bp, Zea Mays
gtgggacacggcactgtcggactcagagttggattggagaaaatgttttcgggtccgatgcccgtacacgcgtcggcacgtgtactactgagtgcccgccaagtatggggaggctcccaaaccgggtcaggttttaagactttagattccaccctgtttttttaacctgtctccaataatctaatcatttttttagaatctttctatcattattttgaagttgaaaaaacccagtgagtgtgtgctctttctaaaaaaggcgaagtatcctgtgcacatgaagccttggtgcacatggtgcacatataacatctcagcctctaatcttcgatcaaacgtctgcctctcccacctcggcattttatcagaaaacaccctccacctcccctgaagctccctgaatctttaacgaaacccccctcaagctccctgtacgccagaaacaactctgatccttatttctggccgccgccccatcgtattcagactgccgcacccatgtattctggctgccgcttccacttcattccctggccaccgcttccacctcgttcctagccaccgcttccaccgctcgtcccccctgcatcgtcgtttcctgcttgtggcctgcggcgatcggcatcagtggagccaagccgttcctccagagaagggtacagtgcaccacggtctccaatttctcaggttcgtgtaaggtacgacgaccacgttcattgacctaggtgattgatcgtgatgtaggttctgcacgaccatggatgtgacctcgccagttgggtacgacgacgacttcatggctctactgacctcattggatacacatccaacaggcgttgcggggagcatagacaccggcatgcaaatgttgcagccaaacatggattatgtagccacagatatcgcaggcaacaacaccatggttctaaacaactctgatccttattacagtgctgatcgatttagaacacacaaaaaaagtataagaacaacatcaccggtgagaattttacattgttttaagctgttgttcaagatgaactagatatctgtattgatatattaacgattgattttgcagattacatcatttgtacctgattgcaatgagggattgaagcctactgttggcatgtcatttgattctctagaggcagttgaagaattctacaagacatatgctcatgaaagtggttttgcagtgcgtataggagcccaaaccaaggtgctcgatgtgattgaaaataagaggttcttgtgttcgagacaaggcttctcaaagaaaaaaatggtgacggtgtcgttacttctaaagttcatccctatggggaacaaaagaagccaaagatgtgcatggagacaagatgtgga

SEQ ID NO: 82778 - DNA, 378 bp, Zea Mays
agtatttctagagtagaggagcagccttgatttcatatctctaagcgaggcaaattcagaactctctaagaagaacaagtaccaccaccactcagccttggttacaagcgtcaagtttctaaatggagacaagaagacaccgagaagaaggtcgcagggttgctgacgctttccgagcaacttggtgaaaggacagataattggatccatactagaaaaccaagggaaactaaggctggtgtatcttttgatgatccaaatgttgaagaagctgcaaaaaaacatatatgcaatggcagccaagcagaaccaaggaacatttaagccacaaagggagagagacatcctaacggctggtctcggtaaccctgagcatcc

SEQ ID NO: 82779 - DNA, 672 bp, Zea Mays
gccatagtgactctgttgcttcactatgtgtcttgctgtccaacatgcaacaaaaggagaagtaaagctttcttctatgcttagctctacgtgggaagcctgcagttgatatagaggaacaatttaaacccagttggccactgtgaaagccccaagtgtaaccccaaccagtgcagctcatgtgtttgaccctagttaaagaaaaaggtgataagagaaggaaattgaatctgtatatatattccaattgagctcttggcctgctcactatgacatgccctccctcggcatctaagccaaaccctcaagccctctctacctctatgcttcgttgaggaggccagaacatcgtgcagacactaatagtggtgaccatcaccaccaaatctcccatctccctgtggtcagccttttcgagaaggtaacatgttcgatgtgctcacgtttcagaaccctggggtcatagtgatgctcacggaatcttccttttgaactctaccatagtgtttccaccggaacgccatcgagttatccggtgaacaccatcgagggcagtgtcaacgtcgactgacccaactgtagcttctttgagcgaactttggtgagtaccatatgcttgaagggtcactggtactcgtcgtgatctcggattgaactctaccatgcttgtcg

SEQ ID NO: 82780 - DNA, 294 bp, Zea Mays
gaaaatggctaccactgtgggtggggtatgggctgatctatcaaagaatttacagagatgggatggtaggtcattccctttctatgatgatctgcatgagatttacaatggtatgagtcttcacttatgtcttttgccttaacacagattctactcattgttgaatttttttgtgtttatacaagtaaaatagtagaaaggaaagaactgtaggcgatctttagaaaaagaatgcaaggttgccaacaaaactggacaagaagattatgtgcagataagtacacctagtccaac

SEQ ID NO: 82781 - DNA, 633 bp, Zea Mays
tgataatctactagtactaggagtatagtataaacgatctcgtcgtgcccagggagacagcaaggggacaggaaagcgggaatgcaataacggggggagcggaggacagatcgatgggatgagagaagggagagatgctagctagctaagcctcgccgaagccgaaagcaaataagcatcgcgtcagctaagtataataagatgccgccgggcgacgaggtcgatagcaatggcgtggaaagcgacgctgctatgtgcttactctccctctctctttctctgatggcgactcgctttttggcgatctatcgagatgagtgacgagggctttctgagattgcacactgatgttgggctcctaacaagtaaagtagctataggccgcgcgccacgcaccaataatttaacgcagggttttagtcgcgtagctgtgctgcgctgtgcatcccatggattggggagcggatcatgcatgcatgcatgcatgtccctttgcttcttttgagttcgtgaagatgtctagtagtattataataaataaagcactcaaagcacactaattaaagcagtacggacaatggagcagcatcgacaacctttttttttccttaggacaatcaaataacacaccac

SEQ ID NO: 82782 - DNA, 333 bp, Zea Mays
ccgaggtataagaggcatgtaacgaagctgcttacgtgcaatcttcgtagtcacggtcaaaccatcgtcgttttcaacctcaacgaatctatgctcaccacatacagtacacttcttctcacccgcggtctccttccagaaaagcatacaattattgtcacagacatcgattttttcgtagtccataccgagcctagataacaactttttggactgatacatgtcctttggcatcttgtgattctccggaagtacatcactgatcaagttcaaaagctccttgtaacagttgtttgagaatgcaaacttagacttaatagccataagtcgagt

SEQ ID NO: 82783 - DNA, 458 bp, Zea Mays
taactctttgaccactaacgcgacctgctccgctgatctatgctgactatggaagattctattgtttctttctaaccaaacgctccaccaaaaataaatcataaggccatcaaaagatcttctcaaatgcttgctgcacatacttcttaatttcctccaccaatcatacaaggactcagtgccaaagatccccctaaaggacgaaaggttcgcccaagacaagattatgtcccacacctccctgctgaagcggcagtccttgcataagtgaaccgtcgtttcaaaggtcgaattacagaggcaacaagaaggattgcaaggccatcctcttttatggaggttctctgttgtcaacactctgttgtgcaaaagagtccaagcgaagaagcgacgctttggttcagtttttgcttttcaaatggaacagattttcattgtgcagaagtttgttgagaact

SEQ ID NO: 82784 - DNA, 326 bp, Zea Mays
aggccccggttattggctatcgcaccaagtggccaaccgggtggactaatgaatggttttacatgaaagctgatgagaagaagagggaaaactcatgagtatggtaatgagtcccttgaagctgaacttcggcatgactcgacccttatgcaacatgcagttatggcccccttgccaattggccgaagtagaatttagagtggtggctgggcacatcagtactagggacttagtgcaagagtacttatcaaacagaacatatccaacttctagtggttggggaatgccgaagagaaaagaagtgggaaagaagcatgagcttgtac

SEQ ID NO: 82785 - DNA, 679 bp, Zea Mays
ataaatttttatatagtaggttggactaaatttaatgaagactagactttgatctaactttttctcggtgcttcactacttagcccgctccccacctgaatcgtggtgcttgtcgtcacgtcgggatcctgcaccagtacaactattttgccttctaatccgcaccggcggatggatatgatattagtgaaattctaccttggcatcacaacaccactcgccctcgctatctcataagggtcccatcacaacgcgacaatggctgtcgcttgctaccaccgccttttgccttgtcgtggccatctatcgtcgcatcgtcgcctgcactcgctatcccacgcctattgtcgcctcaccgtcgtcattttgtggtggagtcgctgactctccacaccgacatgctgatgcgcccgctttgccctaacgtccagtccgcgccggttcatccctttgttctctccaactctcctttagggtagccaaaataaagatccggtatttatgttattttagaacactactcatattatcacttaatctccatgttattatcatggaattatttttatcaaatggtatagtatattgatttgtctcctacgttatcgccccacctgaaattttgtcctgcgtccgccactgatcccagatgtcatcattttggctatgccgacccatg

SEQ ID NO: 82786 - DNA, 651 bp, Zea Mays
cgccacttcaaccccctgtccgccctctgcttccactcccacgtcgttatccggaagagcaacggggaggagaaagatcctctccctcctcctctgtactcttctttcccgtcccctccacgtctcgtctcctccctcgctgcggtgcgggatacgggctagattcagtcagcgctcatgatccggaggatcgagggcaacaaccagcgcggagcggcacaagcctcacgtgtccgggatctcttctccgcccagtaggcttccttgccttcgggcggtttccaggtgagggagggcgactcgccttcgtctgattgctttctctctttcttctttcgtgcgatgttgatagtaccacctcgccctcggtgccgcgcccgtcgccacgatctggtctgcagatgctcatcttgactcctgtgcgtccagtgaaaccctcacgtgacgggactgaaaatgaactcgactggaatcagtatagtgtccgattggggggggggggggggggggggggggggcaaatccctcgcttgctgccctcagatcgaggaccccgtcgaggaatcgctgtttttttttctggaagttcccatcctgaaattggttatccatgtcttttgagttccccgttccgattgctcaggaagtttc

SEQ ID NO: 82787 - DNA, 583 bp, Zea Mays
ggaaacggtatagttccaagacttagtcaattgttttaagtgctaatcatgtttgtccaagtgttagggatcatctaaagatgaacccaaagaagccaaaggaatttggcacaaaaaggataagatgggctggtctaggtagcactggatagtccgatgccacccactggacagtccagtgtgcacgggatagtccggcgattgtacgggtgaagaggacactctcgggttcagccgggcctcctcagctataattcaccggacggtctgcatagagcgccagacagtccaatgtggtattcagctaacggctatcagccatgtcagtagactccaagggtcatatggcgcactagacagtctggtgccagtctgagaaggaaagtgtccaattagtgatcttctaaccgttgtactgtggatggtccaatgcgtcaccgaatagtccgatgcgcccgcagacagggaaggctggaagcttccaaatgaagctccaacggctcctaggccccttggggctataaaaggaatcctaggcgcatagagcaaaaaacaagcattctaagagcacactacaactctg

SEQ ID NO: 82788 - DNA, 824 bp, Zea Mays
gtctagtgataagacactttgatggatcctccaaaaaaaattaaattgaaatggaatgtcactacaaaaataaatttaaaattaaagtggacatatgatccacatataacagatattaaattgcatatgctgcattttatcctagccaaaaagtccgcgaaagatatgagttgaaaaggaaatacgtctcttttttatagcttgctcggccaattgtcctctttcagctagcgaggtgatactgttgtgctgcctacggcttttgtgttgtgttgggctttgatgtcttctaatgatctagttaggaatccaccaaccaaattgaaatcaaatttgaaccaatttaaactttgtaaaactcacccaactaaatcaccccccacactcataaccttcactaaaatccaccaaagaaattaaaatcggatttaacacatcatcaaaacaaacagttcaaatcgttgaataactcactcaaatccaaatccctcaccctcaccagcaacccgccacccttatcctcaccctccctcacgtccctattccccctccccccacactcacgtcaccgccgcttgcaacctctcccattgcattatcatcgacaactcctcgtctccataagatcgtagcgttagcaccgtccataactatatatcagtagtagtggtcaaactgtctttgtgctagttagtgtttcaatcgcagtgatttaaggtactcaattggactacattgttaccttgctggatatttttgatggatgtaaaattgctggcttactagatgctttgatagacacaatatttgatgatgatgatgat

SEQ ID NO: 82789 - DNA, 572 bp, Zea Mays
cgaatgaatttctgcctacgccagccccgttggcagaatcactagccttcgtagctggatcgtcatcgtcagcaccgccagcaccagtagtccaagcccttgctcctagaggcgacgacctggacgactctggtgatgatgatgaagacgacgacgacgaagaagaagaggaggaggaggaggagaacatcaacgaagaagctaacgatgaacagcaggatcactttgtaggcttatggcctgtcaccaaacattatacatcaatgtttgagatgtggcacttccctaacctgctgtaggatgttctgcatgcgttgggaacctacgtccgacccctgtatgagaccaggcgagtgtgcgaaccccctcgggcttgctactacatcactcacattcatgtcagggtgatggatgcaggtgatagagggttcaggacactatctgctcatgagtctctgatgccgctatccacctatactgcttcagtcaacgatgctgctaggcaaactctatggtcccttagccacacctaccggtagcagctacacaaggtgaagtataggcatcttcct

SEQ ID NO: 82790 - DNA, 648 bp, Zea Mays
accgtcgtaccgccattcctcgtggtcatgacacactgtcggccatctcaccacgtcgcaagtaatcacaatacatagcccattggtcacccaagaacttgccacgataacatccacgaattccttgcgctagtaacctcttccctctccggccaccaccacgccatctccaattcacgggccaccgctctcgaatcctataaattgagcatgccatgagctccactaggtattcaagcatccaacacacccactcatgtctcggattgttcaccagtgagctccaatttgggatttccctcaaatcggtcaaaaacatcgcgtgtgtgagctcgtcatggtcagcgatctacaggtccgttcatgccctctgttcactcgtttcagtaccctgatgtgctcttgatgctccctgacctggacgattaagctagaacccataggatcaccgggaacgctttaagttgtccattgatcgcactgtcaccgtggcagagagattggggcctagaacgttgaaattggtcgagcggaaatggtcgttcgggtttgaattgggtgtcaaccaaaggaaagggctagctgttgcctattccagccagtacgagctcgccggagctcggtctatcgccgttcaccgtcggggat

SEQ ID NO: 82791 - DNA, 752 bp, Zea Mays
gagaaggtcggttaggttgatctccatccttatctagatagtggctagataatatttctataacaaaccacacctccttggactataaaaagggggggtggtagcgcccatctagggtagatcattctatcacaactgcataggcagtagacaccacatcgcataggacacagggtattgtctcacattgagagcccaatcctatctaaagtctcatgtcctttgtgcgttcaccttcagttctcgatctcgtctgggtacctagtattggcgttatcgataacttcattgatgaagtagactagtcactggacctggtaagcaacatggtgagagagagccaactcaagagggttagggcttggagggataacaacctctatcaaaatatgtgcagactttgtcttcaccgctatatgctcactcaatacactttcaggagatacagtctcccctacttctaggttaaagttattgcaagccttatcagaggctagggcaccctgctttcatcggggaccttggaagaaattattggcctcgagtgtttgcaggagagcctagaagctatgagaggctctagttttcactagaggtgaatctagaaccatggtcgtgtgcttggtcatgctccacaagccccaaatggccctctctctccatggtcgtgcacctagttgtgtctgtccaccctagttgaccactctctctatttatttttatctccctctctctctctccctagctacaac

SEQ ID NO: 82792 - DNA, 874 bp, Zea Mays
ctcgtactacctcgataaccctagttccaacaatttggtatcggagatgccaggttctggtgacgcaccaccaccaaccacagcccctacacctccaccatcgccaccaccgctatcgcaacaacaacctccatgaccaccggccttacgaccccaatttctgaagcattattacaataactgatggtgcaacagtttttcgccctcattaccgccattagcagcctgggcgaccgactgccaccaccaccatcgcagcaaccaacatctccttttcctacaatttgctaggttacgatgaaatatcaaacatcccaaccaccacttctccaatactaaccagtaaccaccgccaacccctcaccatccacacaactgtggccattacctcgtcatcagccatggcccccctaccatcacccacattcgccctagttctgccttatgcatattctgccgcaccaacaacgcccttacccatccgctaaataccgttctcgcactccccttccccgctccctagtttcatcgaccaccacattccaccgcatacctttgatgtcgttgctcctgtcaacaccacccctcccttcctcaaactttctttccctaccttcgacggcaaagaagacctcgtgggctggctgaatcgctgtgaacatttctttcgtggccaccacacactctaagcagacaaagtctggatcacctcgttacatatcattggcactgctcatggtggagctcaatcgggcaggtatggtctggagttgctggaccttggtagccatggctcgggtgacctggcgggcgacggtgtgctcgattctcgggtgatcaccggcggcggggctcagacgagtgtgaggttgtg

SEQ ID NO: 82793 - DNA, 284 bp, Zea Mays
cccgagggtgttgccggagatgatccggctcggatgggtagcacgagctatgacccagcccccgagggtgtccgagtgggttctccctctcatacttccatggatgttcatgtagggtcttctcctccgcattttggttgcatggtagcggcacgagcttcggatcaggaagtcgccttagaggtcggcgctcctgatgacagaattttgatttccgctgatgacactgagttggtccccacttatgccttgcgaattgcttcggttggtaatccttcatcaag

SEQ ID NO: 82794 - DNA, 801 bp, Zea Mays
ctgatttggggatttatttgagttgttttggctaagccttctcaatctttcttgttgcttaacaaatatactttaacttatataattggctcaattcaaaattttaaacttttcatcctcttttcacatcttcttgaattttgttcatggggtttacttagggttttgaattagggttgcacattcttatctttcaaaagtctcaattgttttgatcatgacacttttaagtatatacttggtgaattctttattacttaagttaatttgatgcccatgcttactttgattcacatgaaataatggttcttggtttggctttttaaagagaaaccctaggtgacactggggtgtcacaaacaccgtcataatgtcaaaatagcgaaaaaacgtgtgttagagcagtaccattttggtgagtcatggcttcagattactattccagcaaaggcagatgatgggcgtatcataatgtcaaatatctcatgcgacgactagtatacaagcagaaactaggtgtaaccttgcaaacgagcaccatgagcctttagatggagatccaaccgtagaaaaagcttttacacttaaatccctccaccagcacacaaaccattacgaaaccctccctgctttccttacctgctacactggcaccacccttcccctccgtagaaaaagcttttgcacttaaatccctccaccagcccacaattcctcgcatgcacaagcctagagctctactacagacattctgcaggcacaagcacaagtccttctcctgcttttgcctcttaacacacg

SEQ ID NO: 82795 - DNA, 582 bp, Zea Mays
cctggagctggtggacctgctcctccagtgcccgcactttcccctccaaacgcttccctttctcctctgcttcgagctcaagctcatctagcagcttgtttcgccttgcccacatctcctccctgaaggcgaggacctcctcctgccaggtgagatcagtcgctcgtttctccagggaagtttccctcgccttgaggctttcctcggtgcgagcaatgctgctggccttgtcggcaagttcctactgcagcttcgccttagccacagcctgcttgtcccgctgtttctccagcaacatattataagctttcagcttatcatggagcgttgtgacggcctcctccctttggtctaagtgttccttcttcttgaccaagcttttctccttctgggtcacctcctgctctcggtcagacagcttccgaatgtcctccttgaagtcctcgcgctcctgctcaagcttggcccgctctgaggcgaattggcaggacaccgccttagtgcgcttctccagttgggtgcaccagtcgccaaggcgctggtgctcggtctcgagcgccttccaatctcgccggatagccg

SEQ ID NO: 82796 - DNA, 1174 bp, Zea Mays
aagacacttcttgtggagaggatcagacatcaacgtgaaaaggccacctcaggccgcatgggacctagcatgtgaaccaaaaaacctaggtaggctagggatcatacacttgggcactcaaaacaaagctctactaatgaaaaacctacacaaaattctaaatagacaagacattccgtgggtgaacattgtttggtacaatcactataaggacagtgctacaccattggacaaaaatgtgggatccttttggtggagagatgtcctaaagaacatgaccacttacaaagagcttgcccaagtaaatatgggggatggccgtaccatacaactatagaacgataggtgggccaacaagatacaagcaaaagaattccctgagttactgtcgtggtaaaacaggctatgatgttgtctcacccacaagagatgttccacacctccatgtacagtgaggcttatcagcaatatcaaatattcaccagtgtgatacaaggacaacacacccacggccaattggacaggtggacatacgatggatgggcactcaaatactcttctcaacgatcatacaaacacatggccaggaatgtatggacccacccgatatacaactggatatagaaatcaaaatgccagccaaaacaaaaggtattcttttagctactaatcaaagacaggctcaacaccggatccttactccggagaaggggcatgaacttagactcatacatgtgaaaattgcatactacaaagagaggaaacagtctcacatctatttctaaaatgtaactcagctcgaagatgctggcaattgattggtgtcatgccactgcgcatctccaacctgcccctagcaatctagatgatcagaatgcacctgcccagccctggaaaatggaagccattacaaccatgtcatggtgcatatggaaatgccagctggatatttgaaaatatacccccatagtggaagcctgcaaagatatgtttagaaaagagatgtctttaatctgctatagggttaaacccgggctagcggaaggtataagaaactggatacaacacttgtaaagcacacatatacaaacagcttgtacagatccacattttgagcaataaaaaatattgtaggggcaatccctacaataacgcatttttaaaaaaataaccc

SEQ ID NO: 82797 - DNA, 431 bp, Zea Mays
tctttgttagtcgaccatgatctatccacatgctttctgtggacttgattggtaagagtcttcatctttgcataggcctagcctaagacggtaccgtgaaatggtttactttgttagttctatgcatacagcccttggccccattatgaaagagttggttctctcattttcttgtacaatgaaaatgtattgtcaaaagcccttagcctcacgacattcatttatcctaaacaaggcactgaattttggggtgttgttcctgcgtgagttcaccttttgattattaagacaatatgtatgtacattttcattaaggtagctcgtttctgtggtttttgtgctggtgaattgataattttgggagatttcattggagatattgcatacctagcagttccagtctcaaaaaaatcacttatttgtcaagctac

SEQ ID NO: 82798 - DNA, 339 bp, Zea Mays
ttcttttttactttttttaatcccccatcatttgtgtatgccaacgttcaagaaaagatctaatagaaacaaggctcccatgctaaccaaacattgagtaaagacccttaggtctcctcacaactttttcaatccatttattcctaattagctctacaaaaccagtctgcaggaaccagctattctcaaaaaagaagtattggggcctagtcaaaccttcctccccagaatccagaatgataggccaatgatcagaccacacccttgctagccccttagctaggcataatgggaatctctcctcccactttgtgacactaaaaacatgtccaactttac

SEQ ID NO: 82799 - DNA, 469 bp, Zea Mays
aactatgtggagcagatatggggtaactgagtgtaagtggctttatgagggtgtgaccttctctagtagcttcaagatccttccccttggaagctacaacatgattcttggcatggattggttggaatgccattgtcctatggttgtacactaggcacagaaatggattgaatttgattatggtcaaaagagagtgcgtctgcaaggcattttaccaaaaacacaaacctacaccggtattacttgtttacagttggattcactgatcagacacgaagctgtggaacaacttttggaactgcagacagtggatacaaccaatggaggcgagattcccaacattattaaacagttgttggccaagtatcaacacttattcgttaaaccctatggccttccaccaaataggtttgtggatcatgcaatcgagctgatactaggggcactgccattccgactcagaccttac

SEQ ID NO: 82800 - DNA, 2646 bp, Zea Mays
agaggaattcgagaaggggaaatccgtctcatcgaagataacacgacgggagatcatgagacattgagtggtgaagtcatgacatcggtacccattgtggtcgagtagtaatcaaggaagacgcgtcagatggagcgaagaacaagcttatgaggagcgatggcagaaaggttggggtaacacgcacacctaaaaacgcaaagatggtcataggagggagtggtgccaaaaagagcaaagcggggtgtgggggcgctaatcgtcgtagtagggagttgattaaggaggtgagtagcagtgtgaatgctcttagcccagtaacaagtaggaacaaatgcctaaaagagcaaagagcgcaatatgttgtcgctagtgcgaatcatgcactcagtcttgtccttctaagaagtataggggtatgacatctggagctagacatcatgaggggaggaaaagaactggaaggagttatcaaactcacagtccttgtcatactagacggtcttaatagtacaaccgaactgagtggaaacccaagcgaataagtgcagaagagataaaagtatcagacttggaacgcaaggaaaaagtccacgaataatgagagcaatcatcaagaaccaccagataatatttataacctgaaacactgataataggagagatctagatcacagtgtatgaggtcaaaattatgcacaacctgagagaagctagggagggggtcgaacatgatggcctaactgacaggcatggcataaatgctcagtggccctaatataagaaatgattgaactactacacaacttggacaacacatgagggctaggatgactgagtcgacaatgtcaagtgctagatatagtgaaagtagccagtgtgtgcaactgcggcgaaggtgtagcgaaagcatgatgttaaggggtaaacgcaggcgagaaggctctaggtagcgagatccttcacggacaagccaaaaggatcaaactcaatagagcaagaattgtcaatgggaatctaacgaatagataaaagattttgaatgatatgcggatgacaagacaattgtgaagataaaagggcccaagaaggaccgaatcacctacagaggtgaccaagaaaaatttcttgttgctcacaatgatagatggagtggacggtagagaggggtgggaagaagagagtatacccgcatctagagtggtgtggtaagaggcaccagaatcaacaatccagctagtgacagcaggagtcagggccatcgtgctgaaggagctagcgagtaactactgatcccacccaccgcgccaggggttctaggacgaaacaaagtggggtgggagaagcaggagtgacagcagaggtgtcaggggcgcaaaggggagggagccgaggtgataccctggatcaggcattatcagatgagtcggctagggaggaggcagacacttgaagggtccacctagggacgggccgagccatgtggagatgcagtcaatccatgggttgtagagaaagggccaaggagcatccccctagccacccccaccaccacggccaccctcgctccgagcctccgacggcaaccaccaccccagacccccccccccccgacccaagttggtagggaggatgtgcagagccagaggagagagggacagatgagcacggcgacaaatcccccaaggctggagtagaggagggcgaacgcaaagtcgcccatggcgtggagttgtagagtggcaacgacgtcggagcgaggaggggcccccttagtgagctcctcaaggatgaggacgttgcataccttgtggaaagacaggaacatgacaaagtgagtgatgcaagtccgaaggtgatggtagcgctcgttgaggccacagagaagattgaggacgagtgtgcgatgggagacactccctggggtcaacagaggggggccaccatgcctttcatctggcgataatactcggtgacaaagaggtctccctaaacgaaggtccaaaaggcagcgtcgaggtggagagcgtgagcctcacggttgccaagaaattgttcctcgacagcaacctagtcctgacgaacaatgccaccacattcgcggacatcctgcaactcaccgatgacggtccccgggatcccggagaggaccacactatccatccaccaccaagatgggatagtgagaaaagccatgtcaatgaggacgaggtcgcgtcgcgggcgtaggtggaagaaggcagatcggggatgagaaccagagaacgaatgttctggacacccaccgcctacgcgtggaggtggcgatgatgacaacctcatactccaaggagggggcgtacggagaggctcgaggcagaaagagccaagtaggtggcgctcaacctcagcgagctgcctggcaagggtatcagcagcaacgtgtccgcactcccagacgagagaaacgacacgtttgcgctcccatggagcaaccacaatggccttggcagttgtgagggccacaatgaaggtggattgggcagccacaacatccgagggtgggaggacggtcgacagaggtgcgaagcatagacctgcgaagcaaagacctagggcggaggttgaagcgccaaagccaagacgcccagtggcacaccgatagcg

SEQ ID NO: 82801 - DNA, 719 bp, Zea Mays
gccatcgggtcgggtctgggcaacactaacttgcatggagagcttccatgggccctcctcatcgtggctggccacctcatgcgtgatgaggttgccgaaggcaaaacccattaatggattgcttgctggtctacaccgatacactgagggatttgggacacaacccccttgagtgtgggtgacggtggagactcagcgcaccatgagtttgtgcgatggcaggcgatggccaccgcatgcgctaagggaccaggatacagatcaggacaacggactgcactagcccctatttctagcccatggggtcgtaccaatagattccggggaggttatgtttacgaatgcatagccttcgtcattatgacttcccaaaacccattgacaggtagaataagtcactccccacgagcgggggaggtgactccacttactatggagcatagcgatcaatagccagctacgaccttgcttgtgcttagctaccggatgacaatggcaacctcgtataccatcgtgctctgttaggggtcactgcctgcgatcccgggcatgacggagcctagggggagagcctatggtggtaacctcaagcaaggttcttgaggcttccaacaccttcttcctgatggtgtcggcgtggctgttgaggcacagcttgagatcaacgacgatcatcttgatatgtcacctttctccctttcgctatacatcggcgaatc

SEQ ID NO: 82802 - DNA, 466 bp, Zea Mays
ggactgatttgggggaaaatggcaattctccggccagggcggctaatcgaggtcaggaagggtggttacagcttcgcaatttggagacacaggtcagggcttggttgatttgagaaagggggggcgaggtcggggtgaatttatagccgcggagagtcactatcgcggtcacggtgataaccattgccggcccgagctggcgatcagcgatggcaccgaacacggcattcccctagagcttgccacgttcaaccacggccgtaaggcagtcaaatccgtgatggcgtggccgaacagaggagagcggcgccggtgatcggacatggccgaaaggaggaatgaccgcgtggcagccggagttagtgccctccaccgcggcggtcctatccggagtaaaaaggtcttcgcggggagatgctcgccgcccgatcatctcgaccccggtgcaaatcgtggcgcggatagg

SEQ ID NO: 82803 - DNA, 515 bp, Zea Mays
cttctataaactatccatgagctggtaacaaagttgcaaccagaatcagactatacatctagtttatgctctatccactaacttgtcccctgttccggctatgtacagtaccctggatgacaacccatctcctgaatcgactcacgtgcagacatgcccttctcccctaggccactgacaagtgtgtggttcgtctcctctttcaatctgcttgccttcccctagacacggacgcgtgactagcctccttgtcttcctctccgctcgttggctcacatcttcctgaccacctcctgatgcttctctatggtctgctccctcccttcctgatgtcgacttgccacctcctacatgatggacaactatgatcctccatcctacaagcattgcctcctccctgccctagctcgagtgcttgacagtcgcgcctctctgccttattgacttgtggcctcctccaacaccaccctgcctcaacagcagcctcgacccccctcttcactactggcctcttc

SEQ ID NO: 82804 - DNA, 605 bp, Zea Mays
cgttggtccttcagttcctgctgctgaagaagtgcctgtgcctgaatttactgacgttgaccccagtgagtgtgctccacctgttgctgaccccaatgggggtgctccatcttctgctgaccctaatgggggtactccatctgctgttgaccccaatgggtgtgttgtctgtgttgctgatgaaaacgacggggaggaaaaagatgaggtccctttgactcggaagaacagtcggcagtatgtcgccagtggggaaagtagtggagttccttctcctactctgtctgccctcattggtctacaagagttgtccctggcaaactttgatcagactcttgaagatatggttccagaggacctgctatcagagccagcggatgatggtgtgatggaggtttgtgctgatgtgcccgacgccgggttgggatcatcccgggcagcgtcccgcgcctcgtcgaccttagagcgcggtcttgagggtcgggaaactgacttggatcgtcttgctcccatggaagtaattgagggaccctcagccttagaggcggctactgcagagaacttggtcctcaaggatggtgttgacacttgcccagcccccaagg

SEQ ID NO: 82805 - DNA, 403 bp, Zea Mays
ctcctttcttcgcccggcgtcggcgtcagcgtgatcctcgtatggggggaagaaggggattcgtggaggccaccctcgcagatgcgcgggacgtagacggggccacgcacggcatgccatggatgtcgcgatgaggtggagatggatgtcgctgggatgcaatcgaggcgagggatctgcgcgggagggcgaggtccgcggagattccaccttcatcgcggcgagattagcgggagggcgagggtggcatggatgtcgcaggcgcgagggagggggcgcgagaaatggggatctgccgcggtgaggtggagatggatgccgcgggatgcaatcgaggcgaggaataatcggcggtgagggcgacgcgcgcgggtgaggaacgcgggcgggggcgcgggcgttg

SEQ ID NO: 82806 - DNA, 512 bp, Zea Mays
cacaatgaagctatgcgtatttggtcactatttaattaagcaagataattgtcctttcgagaacatctcgagagcagtgcccgggttctgtgggtagtggactggagtcctttgatctctttcggctctaagcagcaattgaaccaaaagtacccatataatacagctgtaaccatctttccctactttatttgtgacatagtcagcttttataatatgcatttgagttttgtttttcaggttagctgtgcccattttacactgatatgaacgcaattatgcagtatattcgttgcttgttcaccatcagctccaatcttcacctcaatttgggagattgttaactattcccaagaatgtgtacctttgcttttcactgcatgtctatacctcagtctggagaaacatatatatagaatgtctcatcatgtggtggttctgaaactctcttacactgttcttgtgcaaaatcgaaggctctgctgttcttcaaggtatttctgaattttgac

SEQ ID NO: 82807 - DNA, 761 bp, Zea Mays
gggctttctccacaagtcttgttgtctctgagtctagacgttgagctttgcatatgaggtcttccagcattggtttgacttcgagactgtcgttgtttcccagacatgcatttagttgcgctgattctttcttccaatcttctaaaaagttggttccttttattctgaatggtttttgactgagggcgtcggctaccacgttggccttcctggggtgatagtgaatttctaggtcgtaatccttgatcggctctaaccatcttcgctgacggaggttgagatctggttgagtgaatatatactttagactcttgtgatcggtgaaaatgtggcattggtttccgattaggtaatgcctccatatcttcaaggcatgcactatggctgccaattccaaatcatgggtggggtaattctgttcgtgcggcttgagtaggcgtgatgcgtaagcaatgactttctcgttttgcattagcacacaccctaagccttgcctcgaggcatcacagaagacgacaaaatcttgatgaatatctggcagtgatagaacgggtgctgttgtgagtttctcctttatgacctggaaactcccttcacattttggggtccacacaaatttatggcctttcttgagaagttctgtcatcggtctcgctatgctggagaatcctttgatgaagcggcggtaataccctgccattcctaggaaacttcgaacttcactgacgttggttggctgcctccattttgatactgcttcc

SEQ ID NO: 82808 - DNA, 480 bp, Zea Mays
gcaggacagtggatcagagaattgccatatgtagtttaaagcctgagaactcaacctagtcgagccctacatggaaataccccgttcttcatggtctatggttcgaaggcagtgctacccaccgacctcaagttcggggcacaaaggctggtcttcgaaaacatagttgaagcagaaactaccaggctagaggatattgatgtgctggaggaagaacgattgaacacagtaattcagtcagccagataccaacaaaccttgaggcgctatcatgataaagccatacgacactgatcctttgtagtgggagacttggtccttcgccgaattctaacaggggaaggacgacacaagttgtcaccattatgggaagggccattcattgtatcagaggtcacttggccgggatcataccggcttactcaaatggatggcacggaagtggggaattcatggaacatagagcatcttagaaagttt

SEQ ID NO: 82809 - DNA, 1214 bp, Zea Mays
attgccgacttaagccgattgctccgttagtagggtatagtggtcaccctaagtcgagtaagcgcgagcatgttgcaccatcttaagtcgttgccgacttaagccgattgctccgttagtagggtatagtggtcaccctaagtcgagtaagcgcaagcatgttgcatcgtcttaagtcattgctgacttaagccgattgctccgttagtagggtatagtggtcaccataagtcgagtaagcgcgagcatgttgcaccatcttaagtcattgccgacttaagccgattgctcagttagtagggtatagtggtcaccctaggttgagtaagtgttttgattccaagtttaatcaagtcgaagtcgatggataaccgttagtttgaatgcctttgagagtaaaatcttttattgattacgtattttccaattacataatacaacgttgctctgatagttcttgctaagggtaaaacttcctgaggtgctctatattccatgaattctctacttccgtgccatccatttgagtaagccgatatgatcctgaacgagtgacctctgacaccatgaatggcccttcccatagcagcgataatttgtgccgtccttctcccgttagaattcggcgaaggaccaagtctcccactatgaaggatcgatgtcgtatagtcttatcatgatagcgcctcagggtctgctggtatctaactgactgaattactgtattcaatcactcttcttccagtacgtcaatatcttctagcctggtagctttcgcctcaggtatactttcgaagaccagccttggtgccccaaacctgaggtcggcaggtagcactgcctccgaaccagagaccatcaagaagggggtgtttccatgtagagctcgactgggttgagttcttaggctccaaaccacataaggtaattctctgatccacttccctgcgaacttttcattcttgtcgaagactttcttcctgagtgcttccagtatcattgcattagccctttccacctgaccattggcttttggatgtgttaccgacgcgtatttgatctggatgctccgtttttcgcagaaatcaaagaattcagagctagtgaaattggatcccaggtcggttatgatgttattcggtatcccaaacctgaatattatatcttgtatgaattccactgccttggctgaaattagagaagcaatgggtttg

SEQ ID NO: 82810 - DNA, 381 bp, Zea Mays
aaacaactagcgtgtctagagcaaagcagttcctatccagctggtacctaattttatgtttctagggttcaagtgcaagcagcagcgcgatgaacgtaggtacatatagggggcagtcctattaattatctatcatatccttacacaagctggaacaacagaatagcttatgaatgtctaatttctttgctgagttcccctctaagtactttgcttctttgcctgacagtgttgctatcatgaccaaggcgtactcaaatgttgagaagagagtcgattttgctctaggagatcgctagctacatgctccttgagcgtggaactttttcctattggctgggcataagaaaatatagcgtagctaaaaggagaatgacgtgc

SEQ ID NO: 82811 - DNA, 810 bp, Zea Mays
cacgccccctcctgatctctcatcaaacatccaaaccctagccctcattgtaacctccagatatcaaagtaatacaacccaccgcaaataggatgtagggtattacgcatctcgcggcccgaacctgtataaattgtgtgtcatgtcgcatctcgaagcgaaccattgagctacaattgatgttgtcgactcacaaaagcatcccatggtacaccccatggtgcattgccggtactaaacaccgatagttgacacgccgggtaggggaggtgacatcgacatcagctagctccatggatcatcttcaacgacaaacaagttcaagacggagcatatccaatctactaccaagccaccgccagtggctattctgtcatcgtccgatggatctgcttcggcacttgtgttgctgccacacgaggatcaacgaggcggatttcaactaagatcccacggttcctattggagacaagttccaccagatggaactaaataatacagttctagatcaacgattggaatcctccgctagagtcataagctaggagttctcatgccaggctacttggtccctgcgagtcgactgcctccatagtccataccagttgtccaatggttggactactccaaacagctaagtcatttcaattatgcatttaaatatgaatacactaattatttttcgtttatccacattgttcggaaaattatcacgacttcgcgtaaagttttagcggtttctagttggattatttctgtatcactcaggatgtcagatcactcattatttctagattattcatattattt

SEQ ID NO: 82812 - DNA, 847 bp, Zea Mays
agaacgatctgattgagatggaagacatcaaggggattatccaacatcctatgtggtctcaattcgacattaggagaccatcccttgccctcgaaaacgacatacaagcgtgccaagttgcttataacacagtatgcacttacataggcactagggacttagttcaggaacacattgctttcaaggtgtggccactcgagaatgggtgggagatgccgaaggagactgctgctgggtctagccaaggtggcttggtttacttgaattacacattcaaattcaggagccaatttgatgagccaaacgacgactggctagatgccattgacgcaaccagcgatgagttgctcggcgcctactcaagggtcgaggatgatgccatgacagtggtcttcggaggtcgaggcaagaaaaggttgaatagggtttttgaagttattggtttcgtatacccagattacagctatccttcacgaaagcaaggaaagaaaagaagagctgccgcttcgacaatttcttctactccaaagctaaagaagattaaagttctgacacatcggcctaggcacattgaaacggccgaagtgccgaagcttgctgaagggccttcttctgccttggagttaaattgccccgctcctgccgaagctaagacggaatcgttcgaagaaccaaaattgaagatagcagcggagcgagtgaaagctttgagtccattgcaagaaacggaacagttgaaggtactaaaagtggtttcagtgaccccgaagagaagaaggatggctagcatactagacactgttatggaatccacaaaggcgctaactcctgctctacagaagcacct

SEQ ID NO: 82813 - DNA, 949 bp, Zea Mays
caacattgactcccaacatggtaccaacctttgagaaatactggaggtccctcatccttgcctaactatctttggccccctatctactagaatgcaagtccatcaaactcaaataggatgcttactccacaaatgttatggaatacatattctgtgttgcttacacccaattttcccccacctccatccatggtgcccccaccaaacatccctgcatacataggttccataggattgacccccacacatactgcaccattagagcagcttgtttgtgagtctaaaaccccaaatagagtccaagaaatcaatagcacaaccaaaaaacaaatttgaagaacccttcaaagaaaaccaaagaacacaacttcaagcctgatgaggacatccttctatacaaaacctgattggagatacggaatgatctagttgtgaacaacagacaacacagggaaggaatgtgggcacgaattgagaaaaagtacaatgaaaggaggagcttgtatccaagtaggctcaaccggccattaagcagcaggtgagagaagatcaggcctgaatgtagtaagtattcaggttactacacacaggtcttgcgagagaatcatagtggtacgatagaccatgataaggtacaagttacttaacagttacacatgtttgattacctcgcctacatatttatcacatggttctctcacaccagattaaatcgttatctataatccattttttcagacaatgcgagctcaaatgttatttgcaacggaggaaggaaatgttttctagatgatggcattattggggtgttttgaaaggtgaaccgaagtgggaatccttactggctggcagcaacacacacctaagagcaggagaaaatgatgttagtatgagtggatcggccataagcattaatgaaaatgatagttgttctccaggttctagaagc

SEQ ID NO: 82814 - DNA, 658 bp, Zea Mays
gttttttggcgttttgatggccgcacgcacgggcgaacgcgcgggagtgtttccttgaagactggctgtatttttcgtgcatttgtttgtacatgcatcaaaccaaacagcaactttgctgggccaggttgccccgcatgaaaaaaaatgtttacacgcaagcaaccaaacataaccctcctgcattcatggagcatggctggtgaggcctggatgcctagagggagccaagcttggccgggaagcgaacccaatcgcgtcctagagtgattatgtacatgagctgatggcaatcaacgttcttctcaaaattacacatgtttgtgtgctcgatacacaagttgcttcgtaagcgaaattgtgcgcttgattttattgattctgcaaattttatgcttgtgcacctatcttttgtatgtcttaataggtatgtctcacacacttttgttttaataggtatgaagcatacaaatttgcgctttatcgaagaacatcgggtgtactcactgagtaagaaggggacagctaccatgttgttccttctgcactatgatcagactgtcgatagcaagcttaaggaaatgcctttagatgccctgatcgaaaggtttgcttttccactatgcctactctgtaccattgcacgttgcagacctag

SEQ ID NO: 82815 - DNA, 627 bp, Zea Mays
ttgtattatattgtgatctttgaaggacaagggcacttcaacaattctaagtaacaacatgaaccaccaaataaatgagcttgttcagattccattcatccatccgcataccttacatttaagggtttacataatttctccttccatttcccaagaactaattaataccttagcattatacctttttatatttaagggtttacatataataatttgaacttggtttgtaataacactactttatgtacataaccatgtatgaggtgtgagaatgttgtagctccatgagggaaaagtgtgcatgatgtcggtccttggtggatggtgagatcagttgccatttgggcactggcggactaccaagtttagcttggttcaagcatgttgtggggaaaaggtggtagatgtgcttgaggtagatctaaattggttggttccactatagcccccccagtacgccatagcttccctgcttcactgaactatgggcatgtcctactgttgtctatctgcattgtctccccctcctagccctatgggttatagtgaaagtcggtccccaagatcacatatacccctggatcaccaaattccctatatatttcccactcctactccaaacttttt

SEQ ID NO: 82816 - DNA, 718 bp, Zea Mays
tttttcacattcgacagtcaggatccgtagccgaatatatctctgatttttctcaattagtcgatcagttacgagcttatgaacctatgaccgaccctttatactatacaactcgttttatcgatggtttacatcacagcattcgttcatcaattttgctgcaacgtccaccggacctcgatactgcttgtgtccttgcctctctgcaggaagaagcagccgacactggtcagcgcaaagagtatcgaaggcttgctgattatagcactacatccaagccagattacaagcaattatacaaacaagctcatcctctcccttctccacctactgctgaaatgcgtaaaggagctgatccagtcatcaattctgatcaatctggcaagttggaggccttgagagcttaccgaatggctaaaggattgtgtaaaatctgtgctgaaaagtggtttaaggggcataagtgttctccatcagtgcaactccacgtggttcaagaaatttgggatatgttgggccctcccaattgtgagtcacctgcagattgtacagacacatcatcacaactttttgttactttatctcaagctgctgtgtctggcactgaatattccaagacacttaagttttggggctatgtcgcaggatgtcagatattgatccttgttgatagcggtagttctcactccttcatcaatgctgcagttgctagcaagct

SEQ ID NO: 82817 - DNA, 834 bp, Zea Mays
ctagggttcttggatgcgagcatcgtgtgggcattgatgttgtttttgcgtgagaaatgcttccttgaaaaaattgtaatctccttcactgcaaatgcctctgcaatgcagccctttaccctggccttgtttcgcactgtatggtagctcccagagaaaggagacgtgcatccagttgtgttctttatcgtacccttcgaacccacctccttctgtcgattttaggtcatgatgttgtctcatgatatcttcacatgtttgttgcttcggaggcccatctctaaccctcttgcctttccaaaatgactttgtatcttttctaaaaggatgattggcgggaaggaaacgttgatgcacatcaaaaaatgtttattttttccatgatttaacatatatgcttgcgactcactcatacatatcagacaacacagcctaccatggacacaccacccacaccaaatgccacatgccaatagatcatgaattgaccatagatatgtcgctcatagattaaatctacaattcagatggctatcataagcctccaccccatgctacaacactttctactctttgatcaacggttgcataaatacattgatttttggacacggattcttagggctcaaataaccagagcaagaaacgtgacctcttctttcatgcatttggtaggagggagattgtagggcatcatgaaaatcggacaacacgagtatggagtggaacatctgctgaaaggagtgaatttgtccgtcaacagaccaagacgaacacttctagggtcccttacaaattctggatcaaaacggtcaagtgcctgccatgcctcgc

SEQ ID NO: 82818 - DNA, 719 bp, Zea Mays
ctccagcttacatagtaacacgggtgccattctttccaagtctgcaatcacggtatgagataactcatttgcacaaagccagtggaagaaatagctctactctacaagcactagccagacatgctcagggacaaatcctcgaaccatcgctgaaagaatttgttcaatccatatgtagtactcatgactcttcatccctaagactcgcatagtagataagttaacccctacttaggttagctacatacccgtcaaggaacattaacatcttgatccactctattacttccttcctctaggccttgcttaggacaaaatcggccttaggccttctccatctctttccactactaggtggcttcatctcttggtttggtttatcacataacactaccagatccactcttgcctttacattatcctttgacttatcagaaatgtccatgattgttgcccatagtgcttcgacaacattttattcagtgtccatcgcgctaatgttgtgtggaaggagaaggtcatcataataggggagccgagtcaagcctgacttatgggtccacatatgctgctcaccatatcccacaaaaccaccttctggattgaccacgagactgtctatctattgaggaacttcggcaccaatcatcattgcgggtgggccgtctatcacaacaacacctttcataaagttcttgatgtctagtctaaatgcatta

SEQ ID NO: 82819 - DNA, 420 bp, Zea Mays
gatgaggggtggcgggctggggctactcacggctcacgggtaatggacgctggttgtttctacttgggctgaaacatatttggttggtaggtttcaagggtaatggacgctggttgtttctacttgggctgaaacatatttggttggtaggtttcaagtgggctaaaatgatagtaggataaaacgggaacaccaacatgattttcccgtataaatacgggtccgtaaatgcggtcggaaaaacacctcaatcgtttctgttcccgttcccgtcactttttcccgagaatttttccgttactgtttttttcggatacggtatatgagtagttattacggtatacgatgtcgatcggtacgggatttttccatcctattttcatttttaccgtccggattagaacacgtataataattttt

SEQ ID NO: 82820 - DNA, 391 bp, Zea Mays
taagatgtgcttcatccaaaatttgctggcggagctcatcatttttaggcacaactatgtggttgttgaaccatacaacaccttgatcatcttttcgaaagcagtcggcttttccagcttctatcttctcatgaatgtgcttcattccctcatcatttttttgtgcgtcaattatttgttgcaggatgactgactcaagcttcaaatgatttgaagttccatgttgaatcattcccaggttcaacttctgcatttcttggcataatgttttgtcagaagtcttcatggtaagacaatggcagaaagccttacgactcaacgcatttgtcactacattagctttgcctgggtgatagtgaatctctaattcataatccttgatcagctcaag

SEQ ID NO: 82821 - DNA, 1009 bp, Zea Mays
ccacaaatctgatgacgtctctcctcatcttgggccaatagaaatgatcactgagcagttcataagtcttcttttgtccaaaatgacctgttagacgtcctccatgtaacttttgcaataaaagcaatctaaccgaagaatttggtacacaaagtttgttagctctaaacatcaacgtataacactttagggcgtgtaaactctcatactttctccttttactctatgaatacatgcatgcaatgatattggttaagggttgtgcctccatgtagtatgcaatggatggacataaagaaagtaaacatgtggaagtgttgcatcttgaacccaacctgggtttgcaaggcaacttttaccatcgacttaaacaataacacaaaggatttcaaaaaaatgaataaaaaggagtttaataaggaaatatagaataggaatattggaggccttccttagtttaaggtcctccaaacattaattgttaagtatgtttcaagtatgatagggtaaatgtcgaagggcacctttattcggagatgacatgcagttatcacagatgcgaagatgaagctacaaactttagatcgggcggcgtatgcgcctcatgggggagctggcaagagaagggaaaaatctccaagacttgttcagcaagactactaaagaaaatgatgacaatgcccttgatcatttttgtagctcatatgtataggcttgatgacaagattgtaactttacaaagctatacctctcaaatataaataggggaacattgccatgcataggacatgctttttgccagagagaatcgatctgctccgactacgaagttgttctcttttcttacctttgaattgtcacttttaaaagccgaaggtacaattgtatttgtttgtcatataataaaaaatggagcaaagtaatgttcaaccaagatgagttattttctttacccttatgttttacatatttcatttctgtcatctcttatttaacctctctatcttct

SEQ ID NO: 82822 - DNA, 675 bp, Zea Mays
caaatatgaacaccacacctctctgaaacacaaatagacttgtttacaaaatagagaactattcgtgtggctgttcatctgaaaatttaggtttgtatttctaagttttatatatgttttttctctccaattgactgtagctttatcatccgtgcaccctttccgtgaataaatagagttttagttgtagttgaatcaatatttgtgggcaatgtatcctgtgcggtattttgtatattgagtgtaccacatgagctattttagcacttgtcagatttttttattttataaaaaatcagtcactcaaatctgaacaccacacctctcttcagaaacattaatatgatatgtagtatgctatccagagttttgtctaaaaatatatctacctgatctcaaaattcatggtttccctttatatgaactgtagttcctgtgagatcacgacatttatatgaaactgtagatttatccaaaaattttgatggttcaaactatgtcctatatactagtttaatctgttcaacatgttgcagttcttgtcagatcacgaagattaacctgttcaatgtgatccaatccccttagccatatcatttgtcttattagtccatgcttctatacactgtgttgttttagttcggtatctctatcctgaacttctgtgtctctggt

SEQ ID NO: 82823 - DNA, 550 bp, Zea Mays
cattgaaacggccatagtgcctgagtttggcggggaaacctcttcggttactggagcaaaagaacctgctcctcccacgcaaaagattgaagagccggctgcaatgccgaaggcaccctcagctaaattagctgagccgaagactgataatattgaggagacaagagttgaagggacgaaaacattagaagttttaagcccttcggcagaagtgacagtgtcgaaggcataaaaaggtcttgcggtgacccccaagagaaaaaggatggccagtgtgctagatgtgctggagacggtaaaggcttcaagttctattccttcagggaaaattgtcgaggcttcgaaaatacaaatcgaagctgaaacaagaccggccaaagttgaaggtgcagtgagccaagctattgccgaagccaagccttcagagcctattgataaacaaccttcggaaattgagaaaaaggcagcagaggaagaggctacatagcagagtttgcctgagaaaactgtcactcctactcccgaagctttgaaagaaaatattgaatat

SEQ ID NO: 82824 - DNA, 565 bp, Zea Mays
ctttcattgctctgctcattctatatcctgcgcttttcttctgctgctttatcagatttggctcggcgatgctctgatattgaagagaagtatacctagagccaggccgacttgagccaaacctctgctttcttggacggtgctcgctccctgaactcctctctgaatgcacaacttgaccccgagaagatggcacatgaggtaaactttcttggctgcttctgtcttgcttcccttgcttcgatgctcattgctgttcttgcttacaggaggaaaaacgagcacttgttgcctctcgtgataatctggacatgctgtactgtgatgccagcacctccttggccattctagagaggagtcaccgttttaccatgtcggatttggaacatcatcgtgacgaactgagggcatcccaggatgaagtgtcctgacttggaaagctattgtctaccaaggattccgtcatcaaggagctgcgcgcctccaagaaacttgttacacaggagctggaggccgcccgcctctctatcaaggccttggaggatgaccgcgttgttatgaaggc

SEQ ID NO: 82825 - DNA, 446 bp, Zea Mays
cctccctaggtcgatgtggtgggtcttctatgggccatgtgtggccgtacctccggtatggcgctgcacatcacgctggtccctgtagtccatcgctaacgtcctagcagtagtttgtagtgggtttcgcggtcagtccaaaggggcgctcataagtgggattgttttgcctaccgtcatgcgccacatgtcacctttcgtcattcacggacgcacatacgttcggtatggcgcactgtcctgtcttttccgatatacgggtcactgttgagtctccggtgttgagatctcctacaaccaaggctgacggacccacaaggcagctagagtacgcctgaaccggtcgagggacacatactaccatgctgatggtgactgcacgtctgggcgtggctaagtgatgacatgtcttgtcgcatctatcgtaggctcgtagcactggactt

SEQ ID NO: 82826 - DNA, 422 bp, Zea Mays
acaaaatagtggctcttgtaagcaacaagttcccaatttcactttcacgtaccaaacacgttttggatactcctagacggggtcaccccaaagaaccataattccataattcactttgacattgtttatgtcatgcaccaaacacaattttggatacttgtagacgggtcaccctaagaatcatatgaataactcgccataaggctttagcaagcacgtaacaaacaaaaagatgttatacattcaatatgctttgaattagagcaaaagcacaagaaacatttcccctctattttttggataaaaaattatccttggttagaacaaccccttttaaatctacattgccaacgtccgaaaaacgccacactttggctaccgccaagacacacttagggatcccgactcaaaagactaacttt

SEQ ID NO: 82827 - DNA, 608 bp, Zea Mays
gcaattttgtccacaatagtctgagcttgctccctcttcaacttatgaagagagaggggcaaaccatgatatttgcaaggaaaaccagctatctggcaaggccaaaaatgattacaacctcgagatcatcgtcttgatacctgatgggatagacattagatttctggttgttattgtagagcccagaagcctcgccaaaaagttgaaggatgtctaaagtaacattaatatcctcagccactggatgtatgaaaagaaccacatcatcagcaaaaagggagatacgatgttgcaaaagcctagatgaaagaggctgcaacaaaccttcatctgctttagaaaaagccgatcaagcacatcaatcactaggacaaaaagaatcgaagaaagtgggtcaccttgccgaagccctctctgatgtgtgatggtgctcccagggtggccattaagcagcacacgagtggaggaggtaaggagctgcccagacaagatgtctctccacacttgaccaaaacccagtctctgcatgacctcaaggaggaagggctaggataccgaatcaaaggctttagttatatctagcttgagcatcaatgttgttgtcattc

SEQ ID NO: 82828 - DNA, 534 bp, Zea Mays
ccgtccacaatagggtcccagggtcctaggacagagcatacctaggccttaatcaggacccaggcgggggtccggtgccgacacgtgtccagacctgatctggtgggatccagaccttatcacatacactcctgctccctgcccaggcatagacccgatgctgccacatggcctactttgcgcggcgtaagccaacgagcggagcctgacataaatcctctgggctacgcgtgtctttgcatttattacggataagatgtgtgtctgtccattccagtgacaggcggcgcgcccagtccacgttacgtgggccatgttgttactcacacattaccatagcaaggacaatgactcatcattactcccgcgttaccaggaaaagggtcactgcctatcaatattgcatggactgcagtcatcatgactcccgctgattactcatgcgttacaaaggcagagggaatctgaacggctccgcctatacacctctactcatgtgtgctgtcagcattagttattcacataatgtattcc

SEQ ID NO: 82829 - DNA, 1489 bp, Zea Mays
cttaaatcaattgggtcacaaatatgtgaatttgcaagccaaaccctaagttttggatcaaattgcaaaaatcacctcttaagcactatagagcctaagtctgaaatcagtgggttttcttcaactttgaacccttgtatctttcatgttctagggattttgccctagggcaccacatcaaagttgtagacctatcaaaggtgaacatttttgcttaagaatgtgagctcagttgttaaaaagaatttagagataaatgagcctgaagttggactgtcagactgcatgaagcctgaaattcagattaacagtgtgatgggatgaactttgagctcgattttgaatgggatccagtgactttttgtgggagcacattgtatcaaagttatagatggattatagctctacaactttgctgcagaatgttggcataggtttcacataaaaataggagaaaatgaagctccaaaatgctctgtcaggctgtctgatggagctagccatggtacagtgctcgtgcagatcagaccgccagcgcagcaaaagaatcccaccgccggtgacccctccgccgtgattcgcgtcgccggccttaagattcgtgtgcggggtggattgataaggttgcggggtaagaatcctcgccgacggtgagctggaggtcactccggtgacatcaccgtggctttcttatccactttgcggctgggcagatcacctcgccggtgaccgccgcctcccggccaagcgccgcatggctctcgctttccaccgcaccgccgcgacttaccctcgctctccgtggctcgtcggagtaattgccacgactgtggacacgaatccaccgcgcccgtggtcttctccacctccggccgccgcgcgtcctccccgaattcactggccaccgcttcccctcgctataaattgagtgtctccgccactccgtaggatagttacgcatcagttgcaccaaaccttgcaccggattatccaccagtgactgagaatttctcatttcccccaatcacggtttccgccaccgtagaactcaaccccgccgcggtcagcccaactcaggtcagatcttcccctctgctcccttgtctaagcattctcatgcgcctgtgatgctcaccaacccacccgatagaattggaccgccaccaatcgtcgggaacgcgtcgatccagccgccatgatcacggccgccgtggccagagagttttagtgcgcgattggtgaaattaagttaggggaaacattgattaaggtatgaattaggtgttagttgacggagagcgccagtcatagccccaatcggccagcgtaagtgctcgccggagctcagccgtgcttgaacgccgtcggggatctcccagtgcgaggaaacagaagttgggggacccctatgtaaagtgtcagcgactgttttgaatagtgttcggactttctcaggttattcaaaactctgggggacctctgcgcaaac

SEQ ID NO: 82830 - DNA, 423 bp, Zea Mays
ggccggacccaaaacgggtcgtgtttcaccgagcccgggccgggccggacgacccgtttggccatctctagtagagatagagatagtcacgaaccagtcgagcccacttcgccgagttgacttttcgttggcagcgtgtcctcccactccttgagcacttgtagcagcagtaatgcagtatttcaacatttatacatgctgcgttgactcaccataaatctaaaattattataaattccgggtcacacattcttgggctctttgccttgcgctcccgtgcaatgcgcaggatccgtagccactgcacaaccccacgccacctgacacccacgatgatccattccattcgtggcttcctcaccggagctcgccggagccgccacaccactccgaagatcaagtatgttcgcgctcttgctgccg

SEQ ID NO: 82831 - DNA, 589 bp, Zea Mays
gccagttcagtggtgatccggccaattcgaacgctgaaatcgtccacggatttaccgtcttcaaacgtgagtgcgtcgaagtcgcgcttgagggagctcgccttggccttcctcacacgatcgacaccgacgttcctgagtcgcagcatgctccaggcctccttcgttgtggctttgcccgccacgacacccatcagttcgggcggcaacgccttcgagatcacctccaacgcgttccggtcgtcggcgtagttctccgtcccctcgctcgctgcgatccacaagcctctcgcttgcagcatcacgcgcataagggccgcccagtcgtggtagttggtcttcgtcaatgttggatagttcccggacggcgccactcgctcgacgacgacgtgttcgacgacgcgctcaaatccgccgccccggttaccacgcgttccccagcgtggcggcggcgaccttcctttgcgacgtcgggatggcggagtcatcgaacgctcgtcgcgacctcctgccggaacactgctcgccataccggctctgataccacttgacaggtcccgattgcctcacgaacacccgctgtcgctgg

SEQ ID NO: 82832 - DNA, 624 bp, Zea Mays
gttgacgaccaaggatgaggtgtaagttcatagtgcgttagttttgaaactatttttgttcataagaacgtgataatgggttgactagcttgttccctgaataccagtgggtggtacgagtaaaaattgaacttgctaggcttgtggaccttcatgtccacaatagttccagctgggacgtttccaccttgtttgtccaaccctatgcaccatggtttctaggaaacaggcgagctcgatgatgcttttagctagcaaccgtacatcactggcatagatcacataaatccatctggctctaaaaagcctttgtcttccaccttctggccagcatcgtccttggtcggggttagtatcccacgcaaccttccttttcttggaccgctaaagaatctcctcttcaacccacaatccttgtacaaatgtttgatagggaaagtatggtttggacaaggctgctccaatttcttttcaaataaattaggggtctctttaatgggtaattgaacttctttagggtcgacgacaattgcaggcaggacttccgtctacttttccccttcctagtcttcttgttgcatttcatgtgcttgttggcacgaccaagggtcccctcattaggag

SEQ ID NO: 82833 - DNA, 407 bp, Zea Mays
gtttgaaatttttgcctagtgaatgcactctaggtgtgtcaaacatatgcaatgctaatgcttatgatgtcatgctcaagttttagttacggtaacaccaggggtgttacatccttccccccataaaagaatctcgtcccgagattaaaaatcctagggtaggtaatggtaaaggaaacacatcacatttttatttcccaaattctggtacaaggcaggggtgatgtgagggtcacctctctattacacagttatacaggctttacaatttacaagaggctaaaaagcctgggaaattcttattcaaaaagtcttgagtttcccaagtagcctcatcttcaaaatgttggttccactgtatcttgtagaatttgagagtctttcttcgggtgatcctgtcctttaga

SEQ ID NO: 82834 - DNA, 913 bp, Zea Mays
caaataaatgaataaaagagtgggcatctcatacttatgaatttgttgtgatacattttatttgacctcaaatcacaaatgaaaatgtaaaatagaaacaaaaaaattgtaatactcatttattacttctagaatttgaaaagaaagaaggaggataaataataatattataattagtgggattaatattcacattaggatggtaattaataattggaaatctgaaacataaaccaggattttaagggttaattcgaatctttaaatttggaactttaaaagaaatggaaaagaaaaagaaaaaacaaataaataacaaaagcgctttgggctcaaactgcttccaccgacccatttcacctgcgtctccagtccagtccaatcaccagcaccgcgtggacctctgtcggtgggtcgctcttgccagcttctcatgcgcttttctctccacgacaatcacttgctctataggcccggttcgtcagcgcttatccccttcccaggtccgactcaatctaaacagacgcggcgagctcctctacaggaagcgaactccgtgacaaactcaagaagatcccgcgggttccgcctgatttctgcgcgcgcgtttcggagggccggtacgatgctgggcctgtaaagtacagatcgctgcgaacgcctgtaccaatccagtagccatggcttgcagagttgggggagagaaagagatcgtgcgcctatgcggatcctcaacgagtgtgtgatggttggcctcggttcattgatcgacgggggggaattggagctcagtgtcgtggtggtgctcgtcaactctaacccggtcaccatcttggccgactcgggcctcaccgtcgaccccccgacatgttcctccctcgatgccgagtcctcccatctctcctccctcccc

SEQ ID NO: 82835 - DNA, 303 bp, Zea Mays
ctactccggccgctgaaatgacatgaccgagataggataactgaggcttggcaaatgaacatttagtcaacttaatttgccattgatactgcatgagtagttcgaagactgctcgaacatgctgaatatggtcttcaaagctcgaactgtagattaaaatatcatcaaagaaaactagcacgcaacgacggagtaatggtgctaatgttgcattcatggcgcgttgaaaagtggctggtgctccggtcaaaccaaaagccataactctaaattcatagtgacccgagtgtgtttggaatgctg

SEQ ID NO: 82836 - DNA, 278 bp, Zea Mays
gtgcccgccgcctgaaaactcgtcgggcacgaatccattgcgaagaacgagttgctgttatggttgttaggatttgagcgaatctatagcgattcggttgtgcggtctagcacgtttttgccgcctctacctatatagtctttccgtggcccttcccctgtagctcgcccaaccaaaccaccttgatccaaaccatcatcatcgagcgcagggggagatcgaacgggaaagcgaccgagaggagagagggcagggggatcgccgccatggaatcctgt

SEQ ID NO: 82837 - DNA, 412 bp, Zea Mays
gtactgatgcggtagagaagagattgatagcacaatgagtagtatgatcgatagttgatggtaaaggctatgtactgatgcagtagtatgtcgatacattgataacacagtggggctgtgttaggatctagcctagaaacgaaaacatgatgtgaggtctaggttcctcctcccctctggcactgcgagactagtgattgatgaggcatatgtcctaccgcgtatgcgccttcgggtttgtgtggcctacgagccccgatcctcttagatcaacatgggtatgcgtgtgaactaggaacatatcgggcccgattggttgtcatatggtcgagatagttcatatctagagggccttgctctttggccaagagcatgtagtatccctatgtttggttgcatgtatgtgttcggc

SEQ ID NO: 82838 - DNA, 562 bp, Zea Mays
ggaccaaggcagcgtcctgccagtttgccttcgaacggtccgagcttgagtgggaccgcaaggactataggaaagacctccataaggtgttcgcccgggagctagaggtggcccagaaggagaagaaggtggccaagaaggaggaacacttggaccagagggaggaggtcatcacggagctccaggcgaagctaaatgccttcaacaagatgctgtaggagtagcgggtccagcaggtcgcggctgtggagagcctacaaaggctacaacgggggctagatgacagggccagcagccttgccctggccgaagagaacctcaaggagaaggatgcttccctggataagcgggcggcggatctcgcctggcaggagaaagacctcgccttcagggaggagatgtttgaaaggcgagagaagctgctggccgatcatgaggtcgaggcggaggagaaggagcgagcgctggaggagcaggtccaccagttccatgcggcgtaggcggcacaggcagcactggcccccaggcggtggaggcgatgaagaagacgcttgaagatctc

SEQ ID NO: 82839 - DNA, 753 bp, Zea Mays
cttgggtatattggtcagaaagaggatcagatttgcttgtagtgaaaccattccggggaaggatgatgtagtggttgtgttcattagcttcttctaggccatgcttcatttcccaatgtatgagatgatccccatggttctaaaaaattgaaatatacatacatccactgacaccaaatgcaatagatagaattactatttacatatgggcactgtggagccaggatatgagtgcaaaggtcgaaggcttttgcagagtgcattcactccattatcagacaaagacaaggccttcagacaatctgcataacaaattttgagttttgtaactttgtgtatcaaaaatgttggtacatgatttcaatctcttagaggtatcaaaaatcaaggaaacacaagttaaatatttggaccttcgtcctttggtttaacacttctttgaagtgttagcgtgaaggacgaaagttcttaatggagatggaagtaaaatcgatataaaaagacaatgtaaagtgttataaggtactcatctcatatgccttaccattctcattccatcttcttttttattaaatgagtttagaagtatatctacggctccttgacatgtggtgatacgaaggctcttcgaaggctcagctattcaaagctatgttcctccccaaaggcatcttatacatggcactgttcttctatttatacggaagatgaactgccttcgtacaaaattacaatcatgcccctcaaggtttt

SEQ ID NO: 82840 - DNA, 283 bp, Zea Mays
atcttgagtaagatgacgtatttcttcagcagcttcatcgatcttcttctgtagatcggaaagacgaagcattttctctctcttcctttcgacctgctgatggatagctttgagatcccttatctcctggtgcaactcctcctcctggggtgttgggcttgtagccttcctcttttgagttcaagcttcgcgcagcgtgtcctggttgacgtccagtggctgcagtgcagcccctagccctgaagaagttttcttcggcggcatgacgaaggtcacggcttgc

SEQ ID NO: 82841 - DNA, 711 bp, Zea Mays
cgcgcggggagaagctgctcgtgcacccgttctacgccgccggttcgctgcgccggttcctgcaaggtctgtttcgcttcatgcatttgctttcgacccaagctagctttgagtaaggataatcatacgaaatgatttgctcgattgtcgataaggtttcctggttctggttccattgcttggatttactgcagaatttgaaactcgcctcagatttagatgattagctactttcgtcatcccatgcccgcggcccgcggggtgcggtaaaagcgtcgcaggcaatgatgcatcgcggattaagcaaattgctgtggtggcctggtgggtattatgttccagccttgcagggtggttttattacttttagccatgttcttcaccgttacgcaagatgctcttgtccttaactacacaaagggacggttcataaaatgcttggtaaaattttcatagttgcttggttgttatctgctccacagtgcatcttcttcttgttgcgtaagatctcggtttacatgtggcaagcttcactccttttcaatataacgctttcaagcttttaattgttgcctttacaatttgggcgatgcaagtcctctatcaaataaggctatgggggaaagccgatttttttccccagacgtacatggtggttgttttattatccgacagagaaatgcttctttagcgggtttcatgacttttctg

SEQ ID NO: 82842 - DNA, 426 bp, Zea Mays
atttgagctagggacaaggtgaacgtgctcaagttctaggtgagggctgaaattcagcaatctgaatttcaggttgtccctagagagcttccacttggatggcctttttggggattttaatcaattattttggccaaacttttataacaattattgtagcttaattagtgtatttcaacttttataattggcctaagccatgattccatgtttttcatggtctttttaccaatttctttctttttacttaaatggcccatttaaggttattctagggtttagacattttttccactttgagtgcatgatgtgatttaggcatgagtcttaggacaaaagaattagttgaattttttctctcaagtttttggtgtcttttgctcaatttgattcacatgaaataatggttcttgagttagcactaag

SEQ ID NO: 82843 - DNA, 770 bp, Zea Mays
tgatgatcatgagagagagctcaagctacttcatgctctagatcagatggtttggtaggtgaaggtcttggtgattattgagtcacccaattatgagaccctcaccatggatgagcttttgggccagctcaagtccaccgagattgaccaccagacccaagccaagattgagaacccaagtgcacccaccatggccaaggtctctagaggtggttcttaatctaacccctcaccacaggagtaggtggagagccttggggatgaggagctagcacttgtagccagtcagtccatgcagttccacaacaaccgctagaattagcggcatggtgggtccaaggacggttgcttcaactgcgacaaccctgaccactttatcaccagctgccccaagaatgtcaagtagaaggttgctcacacgaccaccactctggtcggcaaaagagcaagtgggagaacacatttgacaagcataagtacagggagaggttcgacaaggaggcactcaagaagacgtacctccagaaggaaaagatcaaggagcgttttgtccttgtctctctaagcgacctcgaccatgactccaacaagtccgcgtctgcttcaagcgacaaggagctcgagaggcacattgaggacaagctcaatgggctatgattcatcgccgacaccactagaggtctttgcaccatggcccttgttgatgatgcggtgggtggcgatagcacgaacatcagtgacaactctacttctaaggtatcacatttcat

SEQ ID NO: 82844 - DNA, 537 bp, Zea Mays
caaatttgctgcagagcctcgggtaggttgctatggaaatttgagagaaaacgtgacctaaatatgatctgtcaggtgctctgatgaggtctcgccatggtacagtgtcctgaaatggatcagattgccagcgccgcgtgttcgccgccgacgacctccctgcacgaagattcgtgccgtcgccgccgtgattgtgaccaaagcaactggatagcgcttggttcttagaaatatcgtcgtcgtggataactctggccagtaaacaattccggccgtcatgtccacttgtcgtgcggtcggtcgaagttatcctcgccggagttggctgtccgacgaccgaacgccacgtgcctctgttgttaccacgtcgcaaccccggtgccatactggtctgatgaccgccgggagggccgtcacggtaaggaggccacgaatcaccatgccggtgactcacttcttctccggccgccaacacatcgcggtcaaattgagagctaccgacctcggggtctataaattgagtgtgtcctcaactcc

SEQ ID NO: 82845 - DNA, 1183 bp, Zea Mays
ctacccgccacgtagggcaacctcaaattcaccttcgtcgcagtggaatacttcaccaagtaaattgaagcaaggaccatatccacaatcacagcaaagacaacacaaaagttcttctggcagaatattgtctatcgcttcggagtcccctctgagtagacggtggacaacaaaaaacaatttgacaatcaagactttagtgaattttgtgcttctatcggtacatgcacagccttcgtatctgtctaccatccactgtccaatagagtcatggagcatgcaaatggcaagatcttcatggcaatcaaaaagaggctgctagaagacaaaaaaggcaagtgggcaaagtagctacccgaagcagtatgggcgctaaacacaacggagtcccaccccacaagattcatgccattcaggttgatgtatagagccaaagcgatgactccacaggaactcaagcacggctcacctcggaccaacctcaacacgaccccagacatcgatgaactagcagcaaaagacctcctcgatgatgactgggttgaggccctcaacgcactaaacaaatatcaagcaacaacaaaaagctaaagggaaaagccatcatccctaaggagtttgaagaagggacctcgtcctcatcaggacaacaaaaacagaattcaagggcaaacttgaaccaaagtgggaaggatccttcatcatcaagaagaagacgtcttcgaactcatatagacttgcaagtcaagcagtacataccccaaacattctttgaacatagtcaatttgagaaaatactacatgtaggacaacacgctggcagggccttcacgcccttgtaaggacattttatacacttcttcattaggcacgtgttcttttcttcgcagcgggcgatatttttaatgaggcggctccatgtaataataaaatataggaaatcccccacaagaaaaagtactacgaaaaaacattgaaaaaaggccacgatgaaggccttcaatatttgacaaaaagatagtcaccacgacggcaaaaaatcaagttagccatcatgtgcgacaacatgactccaagcaaaagtcacctaaggttgcagccggactagcacaaaaagtgtgtgaagacacctaagggtgtgaagtcatcctagcagacacaatgactctgagcaaaaggatcc

SEQ ID NO: 82846 - DNA, 332 bp, Zea Mays
gaaacacgatttgttagagcaggagcaatctgtaacaaagattggccatgtatccatttatctgtccagaagagagtgtttgccccatttccaacaatagaacaaacagaagctacgaagagggttgtagcaaatctgtgcacctttatttcaaaatcagcccaaggcctatctggttcagttttctggagccaaaaccatctcaaatttaaagaccatcccatcacttctaaattatgaattcccaacccaccaagggagatgggtcgacagaccttggaccacccaacaacacaatgacctcctcttatatcagttattcctttccaaag

SEQ ID NO: 82847 - DNA, 607 bp, Zea Mays
ggaaaagaaaagaatgcgacaattgaggtctgatggttgggaaggtttcttagaaaagtttacatcattttgcatcaaacattccattgatgttccacccatggatggcaaatacgagcctcaagggagatctcgtcggttttacccggagcaaacaattcttttatcactatagaagagaagtgtacattggtgtcattgataaaattcatcaagaaccgatttgatgaggttagtatggagttgctttgttgtacgtcagcacttaatccttccaatgcacttgcctcttttaatgctcagaaattaatcaagtttgccacttttatcccaaagactttgaaagtgttgatttcataagacttgagccccaacttcagaattacattgatgatgtgagaggggatgatagatttgaaggcttgaataaccttaatgagctctctactaagatggttgagacaaataaacatgatctatatggtttggtgttcatgcttcttaaattggtattgatcctacttgtggtaacaagtgtggaaagagtattctctgcaatgacccatgtgaagaatcatttgaggaatagtatgagtgagaatttatt

SEQ ID NO: 82848 - DNA, 301 bp, Zea Mays
tggaagaggaggaatgggggtgcgcggcgtgcggttgcaggctttggccaacgattgatgaattgtgttaattgtaaacggttgtgtgaacagagaatgagaactcgtagtccctttctattgatctagtacatatttatacacagtgaagaggtgtctttgtaccctttcgtggattacagagagagagaaagagttacaacttttcactaacagacaccttttctaacagacacctaatcactaactatctctatttcccggagtcctttgcttcatgcatcctggcgacgaacggttg

SEQ ID NO: 82849 - DNA, 320 bp, Zea Mays
atggtaggccgaactaaaattcaattgtgtatccaagctctcatgcaacttcttccaaaaccgagaagtaaactgtgaacctcggtcagacttgatcttcttaggcactccatgttgacaaactattcgagtcatatacaattcgctagcttggctcccgtgtaatttgtcctcaccggtatgaaatgagccacttttgtcaatctgtccacaatcacccaaatagagttatacccagcaggggtgcggggtagtccaacaataaaatccataccaatttcttcccatttccactcaggtatcttaagcaggtgcaatag

SEQ ID NO: 82850 - DNA, 810 bp, Zea Mays
aattcgaaataaaaggacttaaagttgggctgacagttagtctttgaactcaatattggctaacagtgaagttaggtgaactttgagatcggatttgaccatgatccagtgattgtttgactatgattgctatagcaagattgtagctggattatagggcaagaactttgttacagagggattgaccagttatcacacaaaaatctgagatcaaagcttagcaaaacgctcggtcaggcactctgaataaggatcccatggtacagtacacagaaagatctcaggttcagccccccctcaccgtcggtggcctctgcgcaaggattcgcgctgattgcggtgattcgtgcaggactcgggcaggatagtaccgggagggtgaaaagatcgggaggggagtggatttggtcgcggggtgaagcttatcaaccacgcttgtagccgtgcgacgtggctggaccacaggtgccatcgtggaactctagcaacccagttacgccacgccttagttctttaccacgtagtagtaatcctggcgcgcctggacttaccatttcaagaaccgttgcacctgcgaacgccacgactgagccactagtgacctcccctctctccggcagccagcgcgccattccaaaattaggagccactgccctgggacactataaattgagcataccgctagctctgttaggtcatcacgaagccaaagcacccgctcctgcctctgattagtcaccagagagctctaatttctttctctccccaaatcagttttctgcacgccatgaaccaccgcgtcgtggctag

SEQ ID NO: 82851 - DNA, 877 bp, Zea Mays
ataatttctggtccaaagaattgtcttttactctttcacctgtctgatcccaatacaatggggtcctacacttccttccgtataatgtctcaaatggggacatcttcaaattggcatgataactgttatgataagagaactctgtgtagggtaaactcttgtcccaactgccaccatgtttaagagcacatctgctcaacatgtactccaacacctgatttgttctttcagtctgcccatctggttggggatggtaggctgagctaaagctcagttctgtgtccatacactcatgtaacatctactagaatcataaagtgaactgtgatcctctatcagacacgattttcttaggtactccgtgcaggcagactattcgagagatatacaaatcagctagtttgactcccatgtaattggtccttactggaataaagtgggctactttggttagtctatccataattaaccaaatagtcatacctagcagaagtgcggggtagaccaactatgaagtccataccgatttgttcctacttccattcaggtatcttcagcgggtgaagcaatccagctggtctctcgtgctcggcttttaccctctggcaaacatcacatactactacatgcgaggctacatcttgtttcatgtcataccaccaatacttctgtttcaggtcctggcacatcttggtactacctatgtgaatggaataggctgagccatgagcttccttcaatatggtctcaaggagattgtctatctcaggaacatatatcgtgttcttgaaccagattgtgccttgctcatctttcgtgaagtctggacctctaccttccgccatcaggtctttgatctcttgaatcttagcatgac

SEQ ID NO: 82852 - DNA, 614 bp, Zea Mays
ctaattttgatctaactttttctcaacagtccattgctcagcccgctctccatccaagtcgttcgattccttcctctagcgactagctactcgacctactcgtggctcaatcgctccttcaatcatgactattcgtattggatgaccaaactcgtccgctactagtgtcaccttgtcttctcgtcactcgttagttcatcacgttgtctggatcccacatgcagcgccactactttgcctcctagtccgtatcgactggtgggcaagctattggtgggatcctgtcttggcaccatggtgccaccaccatctgccctcactatgtcaccagggtcccaccacgtcgtcgcaatgcaacaattgttgtctcttggcactgcctacagccgtttgccctcgctgcccctcgcatgttgttgtctcatcatcgccatcgcaaggcagactcgccacagcgacacgtcaatgtggtcgcttcaccccgtgctctcccctcgccccttgttggcccaccccttccgcctttttcctagggtggccaaaatggttttatgatattcaatcattttagaacgctcctatattatcacgtaatctcgttattatcataaaac

SEQ ID NO: 82853 - DNA, 374 bp, Zea Mays
ctgcccgcaagctacgtcactactttgatgaccacaaagtcatagtagtcaccggttttccgataggggatattcttcacaacaaggaagccattggccgaatagccaagtgggcatgtgaactgggatctcatgacatcgaatttcgacctcgtactgccattaaaacccaagcattagttgacttcgtgttagaatggactgaacaacaaataccagagaacccagaaacaacagaagtatggtggatgtattttgatggctcgctgaagctgcagggagcaggcgcgggaattctcttcatcgcacctggaggcgaacacctcaaatatgccctccagttgttatttccagcctccaacaatgcagccgag

SEQ ID NO: 82854 - DNA, 780 bp, Zea Mays
aatgttttcaaataaaatattttgtagataaattaaaaccatgggaatttaggtgcactcgaattcaatgtccaacgcttacatatgttttataatattcctaaaactcaaaccctaactctatctctcatttctttatttgaagtcttataattaaatttggtgcacccatatagttccactcacatgagtgtgctcagctttgttttggagtttatttcacggaaacaccgagaaaagaaaagaaaaggtcatttctcttcttagctagccaacaggcccaaactatccttctacccttccctttccacgggtctagcccacaagttgaatagcaaggggattcctcccccatggatcccctctaattctctggtcaccaaatcagacctaacttctctcacgccgaactcccctcctatctatttccccattcatggacataaggcctagtggtcacacccctttgctcctatgaaaccctaggtatgtcgatgcctaagagaaattgtctccactttccctctacgtcctacacaatccatctaggggtcaagccatcacacccttgccactcacatgctcaccttgcgtgtcacaagaccgtagcggaaaccatctctagctaggcccattagtcaaccacataaattgctcccttattttcccttttgtcgcctctctatcagaagcaatgtcgtcttcttcccttcactagtgaactcctctatttttgtttctcgatgctttgcttttcgtcggaaggcaaggaagcccccg

SEQ ID NO: 82855 - DNA, 539 bp, Zea Mays
ttaaaattgcctacagtctttcgactccagatctttagagctttagccgttcgggccattttcacatgcagccgaaggatggcatctgaggaactaacactagacgtccacgcttgctgaaccacctcattgaacccatcaatttttgtccaaaaagcctcaaatcgaaacccctatagaaaccaaaatccgagcaaccttgcataactagagggcaatgatccgaggtcatggtcccaatggcttgcagatcggcctgaggaaacgtatcatgccactccgtagtcgccaaaaatctgtcaattctagtcatcgtagggtcgtcttgttcatttgaccaagtgaataatttaccattgagatcaatctctaaaagctgaaggtagtcaattgtgtgattgaattgtcttatcactcttctatttattgaacctttgtttttctcccttgctctccttatcatgttaaaatcacctaggatcaaccattccggcttcatcatatttcgaatattgcgcagctctgttaagaaagtcatt

SEQ ID NO: 82856 - DNA, 522 bp, Zea Mays
ccctctaggtgactttcaattgatattggagcccgacacttcattagagtctaacaactcgaagtcatatcgggagaagccgccaagaacgggaaggaaccctcgggaggaaaattcgagccttcgataataaaatacgaagacaacgtgtcattcggtgagaagtgcgaggaatcccatggatcctcaacatcgcacaagaagaaggaggacaagaagaagaagaggaagaggatgatggtctactacgagtccctttgtggtctcaaggagttccttcgtggttcacgggcttttacaccccaacttgtgcaccagagtctcacttgtggttcctaagatgaaagcgttgataatgtcgacattggtgaggtaagtcagctcgttgcattgccacgagaagcgccagatgtaatccctcaaggtttcgtccggtttatgtcggcaattcttatggtcccacgggttacctgtatggcttgatgcacgtacgtgccctagaaatttccaacaaaaaatttc

SEQ ID NO: 82857 - DNA, 794 bp, Zea Mays
acccgcgctcatctacggtcacggtgtcatctcttcattccttccccagtgacggcgttaggcatcccacagttgcgagcacgccggcgaacggcggcttaggccttcgacacgccacccgaacgctatgttgtgcaaaagttagcagagattgcggcgaacacaatggggggcagtcttaccagtggttgtgccgcgcaatcccgaggccgcgaccgcgcgcggcaacgcgatggtgatttaactccgacgaggaagttcgttgggtttgtactagctaccgtgtgaggccacgactaagcgttcgccaagggtctggcttttatacccgaaagaagcctgcatggacgcacggttgggatagaatcgaaggatttcttccccgacatcatcgtgatctgttggtaacaaaccccacataagtttgagatggttctggtgcgcgggcccatgcacgcaccggtgtaccgaaacagggtcacaagaggcggctagggtcaaggcggtcaagatcgagcctagatggcatccggtccatcgcatccacagggtccagtggccaaggaaggagacagtaatgacaactagggcccacatggcggcgaccagctgagacttgcacgacagggaggaggcaagaaattgtcctgcgggtcccacattgcagaggacgggacctgcacccgagcgcgtgaatgaggtgaatgggttgcgcggcagaaatcgacacctgggccggaatggaggaactcagcccaagatccaatttgaccattttcttttttttataattt

SEQ ID NO: 82858 - DNA, 500 bp, Zea Mays
ggcaaaatgattcatcattgatggtaacagcaataaattgacgcttgtggatggtatcggtccaatgctaaccggacagtctatacagtcattgtcaaaaccagaactgaaagttcagtctatatcatcagaagccgtggcccaacattcttctgcatcagttttttcttttggtgcctcaaatcaccataacattgttctgcatcagtttttttcttttggtgacaacttacggttagaaatgggagattctgtgaaataaactatttagtctctggaggcattctgctgcaacacaaccagaaagaaactgcttcttatttaattgtttggaatacagtcacaatcatcagatacaaaattactgacaatcagggaaatgtcatacaaccaaatgcgtctactttcacttggcacaattgctgtgcacaagcaatccactgctctgctaaggaagctattagtctattactatggtaaatctgacttctaacgggata

SEQ ID NO: 82859 - DNA, 306 bp, Zea Mays
atcctaattgtttcaatcggattggactccttgtcatctactgataaatggtgacaagctccttcttctagttcaggtaagtacagcttggttactacctcctttctggatggggacaccaacttaaatgttctcttgtcacaactgacagtggcttgatttctatgtagccaattcatccctaggatgacatctaacccttgagttctcatgactactaggctagcggggaaggttatcccccttatttcaatccttagattcggacaaatcctatcggactgaacttttcccccaactgaatta

SEQ ID NO: 82860 - DNA, 368 bp, Zea Mays
atcgacaccgcctcgggccatcgcggtcaaagggggatggctcctagtcgtcgaaccgttgatggagggatcgaattagaacttcgcataaactttcatttaggttagtcagagccgttgagatcttgatgggtggatgtgatctgattaggcatgggcaactaccagccgtggatcacggatcggtcaggccggactagattgcgatctcatcaaaccgatatggtgtctcggtcctcaaatcatgatcacctggttggatcacgtttcattaaaacacaaccgttagatggtgatcgggtggcccatgtggcgtacccgttcaggtgggagtggatctaatccatgccattggattttgatccaac

SEQ ID NO: 82861 - DNA, 1246 bp, Zea Mays
ggaaatggaaactgcgcttatccaatagaccgatacggagtaccacctgacgacctggtcaaccatgatgtgcatatgaagtggtcggagttggtgcgtgtgatgctggtgggtggtgctaggcatgctccattcctccctgtgttcctactgactgactgatgctgcagagatcctgctctgctcttcaccattgtgatgcactggagtaaccaaacaatagagagtataaagtcatgatgagcgaagatgatgtatctgtcttccactgaaaagtgcaattgccgctcagaacaaaattcgggtccatgagtgatgtatgagcatgtattagaactaagtacggattaaagtcaaatgaacaggtatgacttaaatattgtcttcagcctttttggatgagagatcatcaaaaatctttacgtctttaattcttggtgatgtcaatattagatgtgcgtgacatcgatttgaaaacgtgtgcacctgagcaacaagagcagccacaacaactttactaacttactgtttctctatggcactgtgaactcgaacaggttgaaatgacgacggggattgctgtgagaatacatgtggtgccactattaacctagcttgctcataggtagtgtgatagcctataaggtataaatacacttacctactattcatcctgcttggtcatttggtaagtgccccgacccaccatgtacaatctttagcctttggaatggttttccaagtacaagaggtagctaagagactgtatgatacaactctaagccactaggttataaatgcagtcaagacataatatgtacaaagagtcgtgtatctcatctctttgtttttttcacttacccctaaataatagggttgtacatgctcttagggtgtcgtcccagatagtcaccacccaacccatgccaccaccatccgtcgtttggtgctagcggcccccttctccatcttcttcctttcttcttccaactcatctccaataatttgtgcctccattgttgtctcctaccatggatttgcaatagatggatgcatcacccctccatgatgacaccattgtacatcgttgtcacgacgacagtagcctcctccttatcatcatcaccttccttcatatgtcgtggttgccctcaccaaacttgcatgcctcagcctagcgcacatggacactaacacctagagactgggcggctcgaccgcccggacactaacgttgcaagtggag

SEQ ID NO: 82862 - DNA, 872 bp, Zea Mays
atttcagactcaaaaatatacaaacaaaaattacatatcactacataaattaggtcgcgatgaactaggggtagacacataaaattataaggcctgtgttttagttcttttgaactgaaaaaattttagataaatcttacacaaaattaggggctaaaaataaaacaggttcatcttctaccttggtgtagttgagcaaaagtgcagagcacgtgagaaggagaacttgctggtgaggaggaaagggctccgacaaacgacaacgtatggcagcagggcgctcgggaaacttcagcgcagcggcttcacgggctcaagaacgacgacgatgaaagcaaagacaaacatgaaatggtgttgtgcactagagaggagagcgggaggctgcgacctttataggcgagggagagaggtgagattaaagcaggaatcaacgctcctctatgccaattgttgtgccatattaattcacagagaaacagaagtcgtaactgctccattgatgaagatttgaagcaagagtcggacataagaatcagaacggtcgcgagaggaggggagagggcggacgactgttgatggcgtgttcaactacagggaaggcgagtagacggggagggaggcgaggtggtgtgcagaccgtacgaggagacgagcaggcgcaacctgctgaggatgatggcgacgctgccatgtccgttcgttcccagaagctgtgtgagattggagaggagagaacaatagaagtgggtcccacatggcattgaaatatagagaggcaagaggtatgaatggaggcatgtacagtacaggagccgactgggcctggcctggtcggccggctaggcatgcgtggttttttttcttttttt

SEQ ID NO: 82863 - DNA, 488 bp, Zea Mays
ccatgacgtctgtcggcttctgagcatatcatggccgccgctaacatagcctaatcgtgacctggtcgcttggaacttgccacacggggttaagcaaggtgaaacataacttaaacttctgtccttgcatttgtcatctgtctggttacaatttccctgctgcaattcgcaacgattgcgcatattctgtcagtgactcggcgtctataggtgacttgcgtgatgaactataggaagagtcgaagacggtgctgcgtgctgggccaactgtgtgtgctgcagatgggcgaagaaggagcactcgggaactaaagatgaatcctgtgattcagatctagagtggagggcctgaccaatgtgaagaagattagttttctcaatagtaggcgagtgggtaaaggcatcatgtaacagcatagctacaagcttgttcttccacaagtttctccccttcctgttcttccttccttcgaagttttcccgttctg

SEQ ID NO: 82864 - DNA, 1001 bp, Zea Mays
gacttcctcatttcggcccacatcgctctcatccaccgcgcaccccactatcctggcgcgagtgtcactgttgtcgcggggcccactgctcagtcttaggaacgtcgcacgttcccaaatctcaatgactcaccgtgaaaactgctgggatccctcggctgggtcctttggatatttattcaacgcggataaccctcccttatctcctccctgctcctacctagtcttcaggtcgtggcgcaccgccggcgtcaaactacccctccctggccgatacccacctcgcgtcaaccgaaccaccgcgcatcgtccgtctttctagaggtctgggtgagagtcgcgatttcgaagcgtcgcacggtattgggtgtcctgtgcagccatctttccaccgttggtgaccagcgaacccgtgctcttcaggctccggtgacagcatcttggcgtggagtcacgcgcctccgtaagctccatcttcgctgtgacgttgtcgaccggtgcgtttctattgcggtgagtatttttttcctgtgcctcgacgtattctagtcgtgcgttgacggtggagtgtcctatccgccgccgtggtgttgtgcacgcgcaagcctgggcggagggtggaagaaagccagcaaatcgttgatcaaccgttgtagggctaagattagatctagagggacttggctctcgaccatcgatcgtgtagggaatggcctagatcgatcctggacgtaccccttcgtgtcattaaatcgggaccgccgatcttggactcatcggcgtagatttaacgctggctccactaggaatgaatctaatccgggccgttcagggaggatccaacggcccaggacgtgtgataccccttcggctgcgcgatttacacttgaacccctctgtttatacgaattagaacctgccgtccactgcgcattagtcctgtgtctgtgtggcttttgcgtcgttgccctgccttctctgcaatttgaggccctgtccag

SEQ ID NO: 82865 - DNA, 657 bp, Zea Mays
cgattttaaattgattgtttgatgcactaaacaaatttaaatgaaaaggtcgtcaaatataaagttgcataacttttcaagatcaataacttttatgttggtagttacttcatccgatgtcatttacaaaattttaatttcaaattttaaacttcaaacgctggttgttaggcccaaacatcttgggtgtggcaatagtgtgccactatgggtgcatgcgtggacatgatcgccatgaccaatgacgacatccaccccatgacgtgtggatgatgatgccatagaaccggggatgtacgtttacacctcctttagtaacggtgggcagggtctggctgccaatccaaccccacataacttgtaatcccttctcctttgggttgtaaaagggagaaggtaaccccttcattggggaattagttctccacgcacatagcacttagctatttttttgcttccgcgcgagataacgaagcgacctagaggacatagggtattacactccagccgtcggaacatctctaaatctggtgtccctcactctatcacgctacgccctctcttgttaacccagagttctctgaatccctatagaggtcctgaacacacggtgatcatctaaacccttgccaaacctaaaagggatgctcattgtac

SEQ ID NO: 82866 - DNA, 412 bp, Zea Mays
ggccgctgaggctaagtcagttgcaggcgataactcggcacccccacgacgaggggtgaagggtccgatatgtgagtgaaggcttctaacacacgaggtacccgtttcctcttagctagggcctggaccaactttaagccccttggaggggtagacttttaggtgtgtttgggtgtgcgtactttgatgtgctgtaatgaccctggtggggaatattttgggaatgtagcaggtaactaggggcataatggtacttaggaccacctactcgcctggttacctaaaagtaacctcgttctgtacatggatgggacacgcataacaagacgttgcagtttcctacctatcgttttgttgtgcacctgaaccctatcagcttccgagtgtttgggtccacctgaccatgtgttag

SEQ ID NO: 82867 - DNA, 1976 bp, Zea Mays
atgggttccactacattagagacagagctccttctgggacagtggcaccgcacgaccttagctgggcagacattccatcaaccaaagcttgtgatcgaagatagataagcataagaaagataatttaccaatatgaacaataaaaggcaagtagttgactcacctgaagattggagaggaacgatggcagacccaaggcagggggagctatgtcatggcttgatgggggaagatcaacaggaacaatttgaagggcattgtcaggggtgatctcagccccgtcagcagatatcagacttctcacatctatcttgccgacctctaaggcgacttgtttgttcaaagttgtggaagcatgcaccgccgtcgccccatcggaccgaggtggagacgacccaacatggacgtccatggaggtgtgggaaggaaagcccacctaaacaccctcgggggctgggttgcaacttgcactacccaccagagccggatcactatcggcaacaccctcgggggctgggtaactgccagcaccaccctcgagggctgggtcttctgcagtagccacctctaaggctgagggctcctctatcacctccatgggagttgggcgactcggaccagcatcttggcattgaagactaccctccaaagtcgacgatgcacgagacactgctcgggatacctccagtccaacgtctagaacctctgaacaaacagccatcacgtcatcggcagttggctctgacagcatatcctcagggacgacttcctcaagggcttgatcaaaatctgatattgacagtccttgaagactgacaagagccgatagagctggagaaggaatatcactcccccctcgctacctctataatgccggctgttcttatgaatcaacgagacttcttcttcttcttcttcttcatcttcatcaaatatacagacatcagcttgtgcacgatcacaacccttggcatacacctcaggaaggacctctgctggcacttcatcacgaaccggagcagaaggacctgcaccctggtccaagcatgacagtcaccgaagccacctcttcttcttcttttcctcaataggtgctgtcgggcggctaactcggcgtggacgctttgggcgagcaccttcaggcttctgagtctccaccgctttgccaagttcttgtccagccgtgatagccattggcttggcatgggtcgagtcagatgattccccagccagcatactaagcacaacatctatctctgcatcatctgtgctacctggcatctcaaaatgagtctgcctctcatcatctggaagactctgaagtggttacaaattcagaaaatgacctatgtggtggcagattccaggcagaataggcaacaggagcaccgacatttgacactctgcccctcagaatcatatatagtcggctcaccagatcttcagtggggattctcttgtttgtaacccgggtagagtcattgatgccactgtacagataaaccgggtatgccctgtccttgaaaggctgaatattcttgaagacgaaatcagcaaccacagcctccgcagtcagacctctgtttttcaacaagcagaccttggcaagcagtacttttgcctctgttatcttcgaatgggttggagattctacccagcttggagtccggacatctggctgcctccctggccgagggggtagggacttgcagtggttctccacaatgaaccactcgaggcgccaccccttgatgctatccttgagggagatgtcgaggtactctgttttcctcccgcgacgcatctctagtcttgcgccgccaacgagctggtgctgtcccccagccatcccggaccgacaatgatacagatacttctagaggccgaaatgggggagaatcccaagataggcctcacacagatgaataaaaatggaaacttgcaagatagaattagggttcaagtgggtcaagttc

SEQ ID NO: 82868 - DNA, 409 bp, Zea Mays
atctggtgtttgacgcggtgaatggttgattgaatgatcggtcgttgttgctcgaggagacgagggcgaggttgcccgctgcgtggcatcgtggtttgagaaagtggaatcctaggatgattgggtgcgaatctgctagaagccgagaaccttaaaagtcgtcagcgacttctgttacggctttcagtttattgtaggactttcgtgactggaacatccagtgcttttgtctatagcaaattggcaatcgccatttgagtgatcgacgaagtacatgcccaacatttccactcttttctggtttctagtttgctcatcagttataggcggtttggcattagttatggagtgtacggatgaaatgttgaatctgagagatactcagaagtcaccgatttgtgactagggg

SEQ ID NO: 82869 - DNA, 425 bp, Zea Mays
ccactggtgagctcggctccactcccacctttcttggcctcgattagcacgcgcgcctcctagctgcgagagatgtaggttagctcacagatggtggttcctgtgccaaacgcgccacctttcacttgaggcctagacctttcttcttgaatctggcgttcttgtgcgtaaggcttggaggattacgagctttggggattgttggaacttggatgtctcggtttgggtcctttagggcttggtttgggagtctagatccagttgtccatggaacgcatcttctagcggttagtttccttactgtttttgccttgagtattgttagctgcggcgtggatatgccactttattgttaaggaaccaaatgagtatcactataacatctactgcattttatattggccccacttgccacgaagtcgtcc

SEQ ID NO: 82870 - DNA, 454 bp, Zea Mays
gtaattaccctgttgcacaacatattccaagaatgtggttggtaactaggggcacaattgtatacctaacgttttgtaatgcatcattcctcttactttgtccctcgagtgtctgggtccacctatcaggacccaacaactatttattatttacttgctctcgtcatgttgtcgtcaatcataaaaagtgggtggttttaaggaaaatagattgaggttgtgggagatagatatcccatgggtcattgtaacatgtatacgttccatgggtcgtctggtaggcccccgattagtcatccaacagggtgtattatcgagccgcatccaggcgaaacaaaaactaccaaagagatgacacactaagtgggaagcagtcccgaagaatatggtgcaagaatgctatctgtgcacgtttattgtagaagtatcgttgggattctgaggcgcgtcccgc

SEQ ID NO: 82871 - DNA, 628 bp, Zea Mays
ttggttatatcaattcagcaagaagtatgaacagggccaggaaagcattcaacgttgccaattaaagattcatggttacgtgtaccctgacctattcagcaagaagtgcaagctgcatttctttcttctgtgatgatggtgcatatctgaacagactctctggtctcctagtccctttaagcatgtaatcagtcttcttgaatcaggtggccttactaatctcacaccatatacatcgtggagcttccactggcatctgtagaatgtaagggaagctcaatctgaaattaaaagtacatgtaatttagcttctattgccaagcatcggacacaagtttttccccccgaaaaggcggcaagagagtttatgtttgcgtactttatggtaaatgtttgcgtactttatggaccaaacaaaatgtttgcttctagcacctacttgaacagctggattgcctgcatctaacagcataagaaattctatcgaaggggaaaacaaatcataatgtgttcctttatgttcaacttcagcaataaaaggcatacttttaaaaaaattatcagacagtttagaaacaaacaccatccatcttgctgtcctactcgaaaattaatcggacaatacatg

SEQ ID NO: 82872 - DNA, 476 bp, Zea Mays
gatgaccttgatgaagttattgctggacatggtgacttttgtgcccttgtagcttctaggggcacatctgttgccttcctgaaatctagctgtgaccatggaaaggttaccaatagacccaatttcaacctgtcaccagcagatctggataatattcccaaccttgcccgaagcatagcaaatagatttgtaaaactggtatggacaaagggtggacgaagcaaagctggtgatgaggctcggagtcatcttaagccggtaacaaaatcataccttatgcttacctcttccttcaaaattcaattttgcttacaatactttaatacgtacaggatgacgaagccgaggctgaagctgaggagtaaaaagacgaagttgcatggatactgacgaagcttgaatagtctgtagaaaaagctctaaaaactcttgtaataacttgtgtaaagaatgatgtaattaaattttacttcgtg

SEQ ID NO: 82873 - DNA, 705 bp, Zea Mays
acagtattcatgaatattggtgttgtccaattcctttcaattatcacttcttattttcttgattttgcagtcaaattcatttggagctttcttgacaaatgtcttgaacattgatgcaacctcagacttgtcatgaataaagaacacccaagtgtatcttgaaaaatcatcaacaataaccagacaatagaggttgccaccagcactagcataagttgttggtccaaatagatccatgtgaagtaactctagtggctttgatgttgacataaagcttttgtaggatgagtgttagcaacttgctttccagcctgacatgcactacaaagcttgtctatttcaaatacaatatccttcaatcctctaaccatgtctttccacctaggaatgcgagcttgaggcggctgagcgcaacaccaggctcccacacgatcatctacctctcccgcgcaacctacagcctgagtttgctcgagccatgcagactctgagccaggtcggtggcatgctggctcgaatcacaaatgacttattgcgcacgcccgatgttgagggttaccgacagattctcacttgggtgacaaatcatcttattccattagctcatccggaggacgacgtgcgccaccacctcaacagccgccatgatgtgcgaagcaacatcgaggcatcacacgcttagcgacacgaagaagagatgaggca

SEQ ID NO: 82874 - DNA, 642 bp, Zea Mays
caatactagcgatgatcatgaatgtcatggagaaatcacataataatcaattcaattagatagcttaaatatatcggtgttgttgtatgctaatatcatcaacgacatctccattattagtttatcatgaatgtcatagagaaatggtatagtaatccattgagttggatagcttacacaagctgagttcttgtatggtaccttcaccgcgcaactgctgctgaattttaggaggggaactagggaaaatggcaatacaaaagctaagatgatctgcaagatgaacaatagctattagcattctacgccgctactgatactgattattcatctatgacgagaagagggttaagttaccgcagacacgttgatgagttgtcgaacgtgaggggcaccagcaacactgcaaattatcaaactaggtatgacggtgaaacagggagcaatgataaaaacgatgcatttcctcatcccggagaaaccctgcatcaaatcaagatggcagaagttttcactccatagaatttgggagcaaaaataaactggtatttttcaattgtcattcaaaaaaaatttgcaggggctttccctaagatctacagcctctagaatccatgaatagagggactttatttttttttc

SEQ ID NO: 82875 - DNA, 709 bp, Zea Mays
aacaagggaataaaatatctcatataagtttataaaaatatagactttgccttcattttggatgttgcagatagattagaatttgaaactcatatttgaaacataattttgaatgtgggaattagaatagaaagcatgaataaaaaaacaaaagaaaagaaaatgaacatctattcactccgttaatccagcccacctaaactcttcttctctgggcgcgtggtcagccgaccagtgggccatccccgtcagcttcttcttccctcgctcgatgctgccaaactaacaaactccacggtctccactgtgatcctgcgcgcttggggccggactccttccctccctggcgagcgggcccagggggacagctgcgcactcatgggttgctcagcgcaccgactggtggggcttccctgtcaggccgatcctcaatctcgcgaccgcaacttccgtgttcgtcggacaccagggccgcgcggggaggttggttgttttcttccccgcgacttccgtgggagttgcaaatcaatcgccccaatcggacttcttcgcagaatataaaagtgatgccggggcaccccttcccttcaaccagtcatcgcaagctgcgctacgagtctagatcggggtggttcatcaccagtgtcgctccgttcgatatggagtagagagaagccgctgcccggatttttccctagcgtcacggtcc

SEQ ID NO: 82876 - DNA, 373 bp, Zea Mays
gagcaagaacgtagaaaagcagaggcaaaaagaatgaatgcaaaaaaaagcaaatgacgggttggacagtggtgcacctctcagcccccgtgaggcaggcattcaggtcgtcgatgtgtccgcagcgagcgcgtgcttgcgctgcacttgcaagctgtaaatttcttcgcaggtggagtcgtcgatctggacgagtagcccggccagagtgtgctgactctgcactgtttgcgtagccgcatagaagttgtctgcgtccgtgacaacaggtggactttggtcgtacgctcgcacctgtagttcccctctccaagactccaacaccactttagactaactgcagcggtgtacgctgcccttccccctccccttg

SEQ ID NO: 82877 - DNA, 984 bp, Zea Mays
caaagaaagagttcaaagacctgatgtctcaaatgctatcaaatcctccaccagaattgatgcaacagttggcgagtgcgatgtttgttcaatagatgaccactccacagctgcaaataattctagcagctcaactgccaacttccaccgattgtacaaccatcccaagctctgtcatgtcaatgggaaataaggtccgttatctagttgatgacataacaaggccagtgacgtgcacactagttataagatatgatattaacaatgatcgcacaaagaaagtaggaacaggcgttgcgatcccaggacgcaagtttcatggaagtgacatacagatgattattgcagggtagaagtgatgacggtcgtccaaggatccgaggacgacatgctagacatcactgggcccgaaggaatcgagacacttggacaagccataaaaaatttcatcctttagcctcgaagggatgtcgaattggttgatccaccaatgtcgtcgtcgtctcatccccaaccatctccgtctcctcaaactttagtacttgtacatccatcatcacctccacaatcttcccatgctactcctcatcctctttctaatccatcgtctctgccataagcatcaacatttaggacaccaccaccttctccacagccatcaagggattcacggcaatcaaagaaatctaaattccctgtaccaaaattggcacattcgagaaaaagaagagtaaagctactactgttggcacaactcgatttttgaaaggaattgcacgggacctcacgtcacatacttttgatttggccgagcacgaggagtctgcagaaaaggctaatgcaatggccgcaaagataaagatcccaactaaggcagattataaaaatgtgcctaaataatatgtgtcgggcagacctctactaactcttgagaaaccgaggaaggtccctgctgttattaaaaggttgcatgactggcacatg

SEQ ID NO: 82878 - DNA, 814 bp, Zea Mays
tcaaggacctctgcctctcttttgctctattcaagctccagctccggcggttcattgggtgcccactcgccgaagccggctgtcaccgtgctatggcatttgtgcaggacggtctccttgctggtagtggtagcgcagagagggtgttccaggtggtcgaggccgagctgtccttcctcgccgacttcctgtactcgaagctcaccgtcttctatgccagcgggtggtggttcccagcactcaactcaatcctcgtactggccacgtggatcagctgtctagcagccggcggcgccatcgtgcacgacatgacgaacccaggcacggcactcgccgtggactaccacatgctccgggattacctgcaacaccacgacacggtgttccacgtcattgttggccttgacatacttgtctccgtctcattcatcgtctccattgtgttcatggaaggatgggagatcgccaactacgtctgttccgactggatcaaggtgtccaccatctgcgagtacacccgacgtccatcgtggcagaagtcgctgtgggcgcgtcgtaagctcagccgcctattttggctccgacccatgcgacaatgggatgaccgattctgccaggtgtcaatattgcagcttcggttctgctactatggctgcatctcacagcaagtcgaccgaatcgtgaagaagaccgtcgcagtgcccgcaacggtgaaatctgccattgtgaagacgctcagagcaaaccagggtaggctcgggaacggcgagctatccttgcaaggcaacggagtcggtaacctctcctgggcttg

SEQ ID NO: 82879 - DNA, 506 bp, Zea Mays
aaatttttgttctaccgtcatctcccagtctaagtaagtttcagcatcataaaaacccatgaatggtggaatagagaacttaatcttagcaaatggatcattgtctcgttcaggattatgatgacgacgtctaccattacctcccataccttgtcgattacgtgcgaggcgtcgtcgcagcggtgcataaacatcaccgtcgtcgtcgtccataggagagagcagtactgcaccaatagctgcggctggagttggtggtgggggacgagcctccagtacgtccatgcgtgtaacaagttcagcaactcgtcgatcaagctgctcataggttgtcgccgtagagtcctggtattctttaaaagcttcagtcatcgcgcgcatcatctccttcaattctagctgagagacacactcatcgtcgttaagcttaggtcccttctccttgtccatttggttctttggtcctgtcattgttagcacaaaacagagacaaaaaggcaacaaac

SEQ ID NO: 82880 - DNA, 497 bp, Zea Mays
gaaggatgtttataagatagctaggattcgggaaaggaagacaagggacctcaaccaagttaaatgaattaaggatgagatggatgaactcttggtgaaaggacaatacatcaaacagaggtggcagaggtattttgacaatcttttcaatggtgagaatgagactatggacacccaactatatgactcctttgatgatttaaatatatgctttgtacgtaggatccaagaatcagaggtcaaagaagctttaaagaggatcaaagggggcaaggcaatgtgcccgacagaggtgtggaaatgccttggggatattgttatcttttggctaaccaagttgttcaaccatatttttcgatctaacaagatgcccgatgagtggagtacattagtaccaatcttcaagaacaagggagatattcaaagttgtaccaactatcgagggattaagctcatgagccacactatgaagctatgtgagagagttattgagcatc

SEQ ID NO: 82881 - DNA, 460 bp, Zea Mays
actgaatgatattgccgaaacagttttgaatgaagactaaagaagtattgtaaaaacatttgaaggatatgtctgctgtgtatatgaacaattgtgtgaaattcctgttttgtgtaagtgaggattctgtgatatttctttatgcaacgtgaaataagtagacatagtatttgagctgaaggtgaaaaaacaccttcccttcttttcacgcttcataaagaaatcatctttcagccaaagttcttattttagtcgaaaataccttggaagacacctcactgctagagaaaaatgatttgcccttctttgcccttttattcctctgtatactctttacaaagatatgaaataatggaaacatatgcgatacaaaagtacaataacaacggagaactggaatgtgccttcatcttttggatttgactccgagttcccttgggaatggctttgtagtcctttg

SEQ ID NO: 82882 - DNA, 450 bp, Zea Mays
cacagtccaacggagttgtggaacgcgccaatggaaaattttttacagctgtcaagaagatgctcctcgacgaaaaaagggcaggtgggccgatttgttacctgaagcggtctgggcgctaaacacgactgagtgcagggcgactgggttcacccctttccgccttctatatggatcggaggccatgaccccacaagaaataaaacatgggtccccgcgaacagtttcgtcagctgtcctcgacgtggacgaacccacttcgaaggatcttatcgatggagaccgcgtcttcgctctacaggctctaaataaataccaagcccagacaaaagcatggcgcgaccacgcagtcatcccgagggaattcagcgaaggggacctcgtactcgttcggacagctcggacagagtccaggggcaagctggagcccaagtgggagggccctttcat

SEQ ID NO: 82883 - DNA, 537 bp, Zea Mays
tcactacctcatagctcgttagctctctcacagcaaccacgccaccgctaaatcgagaggagaactcactctccaccggccacaactcatttgtaacccgtgaataccagttatactcaaatacttagcctcgataggaagtagggtgttacacattctagcgatccgaacctatataaacccctatgtgtgatccgacgtgcatccacacgtaccatcgagtcgcaataaacgatgtcgtcctgtccaaaagcattacatggggaacccccatggtgcgcaattaggtcataaacaccgacaactggcgcgtcaggtagggggtgcgacgttgattcccgacgactccatggatatcgtcttcaactctccgatcatcttcaatgctggggaggttttctactttggatccccctcctgcatcgtgaatcgagaaggcattctatactgcatcacggatcctttcgagaagaggccttctccgagggcaccgatcgtgaaggcaggctcgtctcgcccaacctcagcaagaactac

SEQ ID NO: 82884 - DNA, 639 bp, Zea Mays
cggcagaacaagtcgagggctcttttagaaaataaccgcggcgaaggggtaagatggaatccgagccacccgatcgcaaaacaagggttcagattagaatcccacgcacccgaaccggtatgcagttctagccatccgattttgagtagacgtccatgatttaaaaaccctggatcaaaccactgtcgtccgttaacagattaacggtgctggacgaccataggcgaaacgctaccacggccaaatccagtgtgtccatcaaaagatctaacggttgatcctttttcttctaccactccctgctgatgatggccatacacggcggtgctccatggccggacccccctcccccacacacggctgcacaaactcaaatcctgcgggtgctacgtgatgagaaggcgaaggtgaacatcaaaggagggtcttaccaagggatgcgagggcgtagagacccagtgacggtggatggcggcgtcgctgtggtctttggctccggcgagcaatccccatgcttcaagcccccaataccgccatatgaggtcgcggacgcgttcagtgtgctctggagactctcctcgaccgtcaaccaagcctagagtaaagctcccgacgagatgcccatgcgacggaccttcc

SEQ ID NO: 82885 - DNA, 854 bp, Zea Mays
aaaatatgtggcataaccgccattgcagcaacttttctagtggtagcaataacattgttctcttgcaacgaaagtcatcactattgcaatgtacaaaaacagtggcgaaaatgtgcatatattgcaactagttctaacggttgtgacaacaactatacataatgcaacaaatttactactgtcgcaatatccagtgtggcaatacggtgcttgtgcaacatcttttctagtggtagaaataacatctttctcttgcaacaatacttatgattatcgcaacacacaaaagaagtggcaaaaaatgtgcatatattacaaccacttttaaaggttgtggtaatatctaacacctattgctacaactttagtgttgttgcattatccggggtggcactagggtaattttgcaacaactgttctagtggtagcaataacacattactcttgcaacaaaagtcatggttatcgcaatgcacaaaaatggtggcaaaatggtccatatattgcaaccacttttaaaggttgtggcaataactaacatctaatgcaacaaaaatattgttgttgcaatatctgtcgtggcattagggtgattttttagtagtgggaccctcctcgccccttgaggcaggtcaaaggcaagacagtttaccttgagcagcaggagggcagaaagaagggacgcatggacagagccgctcgtgcagcacttgctgcagcaacagagcaggctgagcagggaggctagctccagatttcctcagatcagatagcctatcgagttcgtcgccttgtgtctcagcctcgctccagtgctccccccactccttccgccatagcttccactcctcctc

SEQ ID NO: 82886 - DNA, 651 bp, Zea Mays
gcttattagcggtggtagagctctagcaaggtgttgggtgaggttagggaggcttcggcgatcacgtcattggtcgggttttggctagtggtggtcggagctgctcggtccccatgcgcaggcggtggcggctccgaattcctataaacgacgatggtagagttcaattcgaccacctggggagcttcatgggaggtcgaggatgctaataggaattgggtggcggtgtattgggtggttctggccatgttcaccggtgagcgagtgaggctcggcgagcgatggcatgtcgctgaatggaaatagagggtgaatgggctgaacgagaatcttcactatgacttagggaagctaacggtggagctcgcgtggtggaagggtggctgtaccggttggaccacgatggtcggcgctcgggtgacaagggcggtcggtggtgcgctcggctgcggtgaactcctagcgaagtgggcttggcactggtcggggaggaagagacaagggcgggtcattatttataggcgcgggcacacgtgattgcgtttcccgaccacgcgcagggcatgaacatgggcgctggttggcgcgcgtgctgacagacatctcccgtttggctgctgccagccgacgtcgaacacttggcacgtgttc

SEQ ID NO: 82887 - DNA, 715 bp, Zea Mays
ctattgctactattagaatgttgtagaagcatccgaaaaactagttaggtctgagaagacgtctagaatgagcatgcatcatgattgtcgcatcattgtctcttgtgcaccaacatgcttctctcaccttaattccaataataagaacttgtgaataatgtgatgtactgctatctcaggaactataagaaatgccttacctcgtgtcaaattggtaagtcttgttaggtcgtgttatgtgtttctcttgtcttgctatctaggtggtattgtaattattcaacccttttgcccataactagaaaaaaatttgttgcgtgttctgttcataaaaagacccccgtccaaacaaccttgagtttagcaagtgaaacctcaaaaaaatatttgttggtattctctaccccttgtgtgttttatacatgaatttacacctgcacaacttatagacccccatagcttaaccgctagccaaatcgaaacttccttgtgcacgtggttatgtcaaaaaaacatcgtttggtgtctagttgcgcaaaccatgtccaagccatgtttctttccataagtccttgcccctaaaacttcatagcatttctgttgatcatcctagttgatcttgtttgcttacctctcttttcgcctagatctggtgatcttttttcttgtgaatcatgttgtggctttatcatccgaatctctggatccttcattg

SEQ ID NO: 82888 - DNA, 293 bp, Zea Mays
gcgagatccttctcccgcctggcgaggtccgcctcccacctggcgaggtctgtctcccgcttgtccaaggaatctcatctctctttaagcttctcctcggcaagggcggcgtcgcgggccttgccctcaagctctcgctgcagcctttgcagattctccacagccacggtctgctcgactcgctgctcctccaggattttgttaaaggcgttcagcttggcctggagctctgtgatgacctcctccctctggttcaagtgctcctccttcttggccaacctcttctccttccg

SEQ ID NO: 82889 - DNA, 404 bp, Zea Mays
tcttgtcaaaatcagaaagttgcagcagcggtgcttgtgtgagcttcgacttgagggcatcaaaagcttgttgttatgctggtccccaacgaaacggcactccattctttgtcagcttgtggagaggtgctgcaatggtgctgaaatcccgcataaatcgcctgtagaatcctgcaagaccaagaaaacttcaaacctgcgtgaccgtggtcggaagtggccagctcatgatggcaacaatctttccctcatccatctcaatgccctatgatgtcacaacatatccaagaaaagacatatgatcgatgcttaagatgcacttctcaaggttaccaaagaaacgtgcattacacaagacattttgcataacaaagtccaacagaggcatgtaacccatcaagatc

SEQ ID NO: 82890 - DNA, 678 bp, Zea Mays
gcgcccatattgcattttaaaaaacgcctccagcccgagaccgagccagaggctctcatttcccccactctctagctctctaccctctctagcgatccagtcacttctccggcgatctctctcgccagcggtgatcttccggcgaccaagctcctgctcggccttggttcccctctcgtgagcagccctgtcttccctcttctctcttctctctctgttcagcctagtgagctcacctcttccccaccttgattccctatatcaaatctgtgaattctctgtgaatcaaagtgttggatgtggttcctttgtgtcccattgaatcccctgcaggttcctagctccttcgggagggtttcacagcccaaaatggccatatctccaaaaacctaactcaccgcataccaggtgttcggtgaaatgcccaaaccagccaataatgatccaattgaacccaaatttttcaggcaccttcacaatacctcgcgtaacatgttcgccaaatttcacgccaatccgatataccaggattcaatttcacacatttccctgtttcgagcgatcgtttccgagccgagtgcccaaattccattttcttcgcctcaaatcaaaccaagcacacacttcactcatatttacctatataaacctattcgtgaagtatcggctcaattccat

SEQ ID NO: 82891 - DNA, 607 bp, Zea Mays
gaggtcgaattctttttaaggggggtagactgtgatacccagtttgcaaagaggagaagttggaggtcatttttgctttgttttcttttgttgtttctctctcgggtggtgcgtttttgggggtttggaatttttgggaagcattgaccagtaaaatagtagaatgaggtttagtctcatgcgctggggtcgggagctagcgtgtgaacgagttgggccgtggttcatgatccggcccactagtttcccctaaccctagccgccctcccctaatcccttgggattttttcagccgccccctcccttatctcttgtgcagctgccccacccctctctctagccttggacgctaccccctctcactcctccacccatttgcagccgccacccaccacccccatcaaaccctagccgcccctcctcaagcccttctctccaaggtgccattcctttcccgctcggatctacgtcgcgttggtgcaagtctcccattggttttggtggagggaagaagaagggaggaaagggggaggattcaaggtgatttttgtgtttgtatcttgtttaattgtgctgcaatccaatcgattatatgtttatctatgcg

SEQ ID NO: 82892 - DNA, 582 bp, Zea Mays
gtcaatttgcagcaaccgcctattgtgtctagagtccatttaattaggcccccactctaattcaattgcatgctcccagtcccttatttttcattgatcgcttggcctgttgggcttcttttggaggcccacaaccccacactgcagacctgatcgctcgggcgctcgactgctatattttgctgccgtagtacagcgccgccaccatcgtttggcatttgtgcttgtgctcatccatccatactggtgcctggtggtctggacgacgtctggttccatcgcaggttaggtaagcatcttatttttacttttctaattcttctactattctgtagtgatcttttatcgttttctttatccacaccaaacactctaatcaggattttttaaattagggcagtaacaaatggataaattttttatcaagagagggccaacaacaaattgcacaaatattggaggcagttcaagtggagatgcagcaacaacaaccaggcataattcggcagtgccacaattagttgatttaagcactctttctcgtgatcctgctaaaagaaagagaatggtggattatcaccc

SEQ ID NO: 82893 - DNA, 404 bp, Zea Mays
cattaaacatgcttgtaagttcttcgtcttggaaaatctcagcagcccccacttcctgctcgatttgactttcaacataaccagcatcaccaggagcatatagtcgttcacgaggattaactttgtacactaccctccaatcaaccaaaccctttttcttagatggatatgtcatataatacacctgctcgcattggtgggcaaggattatagtgtcgtggccttttaatctatcgttgtgtttgacttccaccatgccatattgattttctcgcgttgtatttggagaaaaccaatcacaatcgaagaacaccactttgagttgtttatctccaaaaaaacttgtactcgattatatcattaatgactccataataattagtcaccttcccttcatcatcaat

SEQ ID NO: 82894 - DNA, 812 bp, Zea Mays
gtatatcgtagatcatacaccagaaaagaaaaagatgagtagttctccctttacttttttttatcgaaggttgtggccaaggttttccctcacacacacttgtagcaaaaccaagatgggtacggttaggtccaacagttccatcatagtactaccatatacacaatcggatggacaacggcaacacgagagaggtcaacagctcggtgcagaaaaatgaccccccaagtattttatattgtgcgaattggaagctatgcaatcagatgaggtaatggttcagttacatatactctggaaacattagtttgccatgtctggtgctaggtagctatcccacaccactcaggcatagttgtctgtctgagctttactaaagcagactatccgtatacgcttcttcgtctagccagacatccgagagcatcctcaatacaggcagcagcatcatataccagtactgtatctgtatcatccacttgttggcatctacccaccagttggcaatgcaagtaacactacgcccagcctgattgcataggggggcttgtcctaatctatcaatttttaatgcgggggagctgcttcaccaggatcccacagtgtatgctgtgttgcttgtgggcgctcacataactgataatgtgcttgtggatgggcaaaatcgcgcgttcaccaattgggttgaacctgtgggattgggaatcgggatggtggcttgggcacatcagtacatatcaatcagtattgaccttgtccgaataatgatattcccaaattgcacacaaaagtttcttagtacatattaatca

SEQ ID NO: 82895 - DNA, 695 bp, Zea Mays
aggtcccacattccaaatggatttaattcggtcagggtctatctctataccatgttcatgaatgatgaatcctaagaacttaccagccgacaccccaaaagcgcatttacgtgggttcattttcagaccataccgacgcattttatcaaaggctttgcgcaaatcagttatatgagaactaaactcagccgatttgactacaatatcatcaatgtagacttccacagtgtttcccaacaactcgtgaaagatcaaattcatagccatatgataagtagcaccagcattttttagaccaaatgtcatgacaacccattcaaataaaccaatgaagcctggacatataaataccgttttagacgcatcttcttcggccatgaaaatctgattatatccggcattaccgttaagaaagctaataattctatttcctggcgcattattgatcaatgtgtcggctatgggcatgggatattcatctttaggagttgctctatttaaattgcgaaaatcaatgcatactctgagcttacctgattctttcttttccaccggcacaatattggagaccccctctgcgtatctgcaaggtctaataaaattagcttctagcagcccgtgaatttcgtcctttattcgtgggagaaggtctggacgaaatgctctagctttctgcttgaaaggtctgaaaccgg

SEQ ID NO: 82896 - DNA, 396 bp, Zea Mays
gaaagtgtccacaattgtagctatcgatgctaaaagaatgacaactagggatattattaagataggcacaacggatgtcatcgtacaggccaataatgaagggtcgatgatttttgataagtcagccaatgaaaatgaggaaaagacataggagctactagcaaaacgtctgacccaaattactccatgccccaatggtgttcattagggctaacacgctctcaaaagagcaaattgcagtgcttatgagcaaaggaaaatagagaaaatgaggtggagaaaacatttaatgatacacatccattgttcccgccaccacaaaaaatatggagaccaaaggtcaatgaaactaacacaaatgaataagcatccataaaaaatcaaaatacaaatacg

SEQ ID NO: 82897 - DNA, 691 bp, Zea Mays
aaggacccaacctcgcaagacgacacgtttggggagggggaggaggaagcgacgaccctccgacataagataacatgaccaggttggggccagtgaaaaccaacctcacgaccatcacggaacaaccgacaatgaccggggtgccgatggtgccggccggcggaaccaacgatgcaggtttgtcgccataagggccagccttcgactccctgtccggtgaacaagaagatgaaagcgatatgacctctcctccgacacttaagcccaccaccctatgaggaaagttagtcaccaatacaatgggggagcgggagtcgactgagtgcttggtcactacccaccattcctgcaacgggcggcgcttggaccgaccttggtgagaggactctagagctagactcttactgtgatccatggccagtcggcgcgaccccaagagtttggaggtaacgaaaccctccctactaatactgcttttggaaaacacggggtgatgattaaaaccagttagggaaaacatagagcatacccctacttatagcgtccgactggttccaagaagccagcagtggactttgctaattccactcgacaacgacaagcgacaaaaaggaataggacaatgtcaaacccaccacatggcctgttctttgcccccaaagggagacactctccccttgggggctcagtt

SEQ ID NO: 82898 - DNA, 345 bp, Zea Mays
gtcatcggtgaaggtaaggtaacccgtaaccgtgaggaaccagtgcgcgtcggcttgatctccacgacgagtcggcgacgggaccggggctccggatctaccgctaacggcggcctcatctctgcgtccggcacagagtttagtgaccatctggtgttcaatggaaaccctaccttattgtggatgtcttccctatgacctgatctgcttattcccttcatcctttttctttgcaagtcttccccgtgagttgtattgatccgtgaggaaccagtccttttggaaccggtgctccggatctactactaacggcggcgagttcttcgtgtccggcgcagaggtaat

SEQ ID NO: 82899 - DNA, 326 bp, Zea Mays
agtcccgctactgtactttttgattcaggagcatcccattcttttatagccactagttttgtggaaaagcatggcattccctctacccacctagaaattcccttagtcacccgaaccctagggtcagaccttctatgccagctcaaatgctcccaagtcagaattctttttaagtggggtagtgttcttggcagacttaaccgtcttgccatcccaagggattgatgtgatcttaggaatggattggttaaccaagcacaaaggcatcataagttgcgcaaacaagacagtccttctcatggaccaccaaggaaagtcagtttctt

SEQ ID NO: 82900 - DNA, 655 bp, Zea Mays
gttggtcacctagttgcattgtcatgaaaagcgcttgatatagtctctcgaggccttatccgacttctgccgacaatcgttaaggtcccatgggtttctcgggcgtacgtacatgccctagaattttttgatgaaaatctcttctaggttcgcgccgccctagatgcaccgagggctgaggctatcgagctaggtccacatcgaacttgctaaatacagggggaggttccagattataaaactgtcgcaaccccctcccccccgcacgacacgtaagtcggtagtcctccagccagggaccggggttcgattcactagtgtactttgtgatggcaggggggctatagtgttgtggtgtaggcgcccgcaggatatggcgaccgaaagcccatggcctcggcggctggaggcttaggcttcgatcctcgtcggggtcaaattggcccccatgtcaccagctgtatcgatggtcatcgtttggccccttccatacctcctcgccagtccctgggtcaggcatgctccatgctcccttgcctattttcaggttccaacagggtggggtccgctctaggcccacttcagacttgaacagttgtctcgtagatgcatcattggttgtcgacgttgtcatagcgctctagtcagcacctag

SEQ ID NO: 82901 - DNA, 534 bp, Zea Mays
tgaaagaaggataaagtagaaaaggatgggataaactgagataacccgcctgctgagacattggtgattgggccttttctttgttgttcgaaaagcctgaagaaaggcgagactttgttgatggtgttctccaacgccgaaatattgatctaccgggcgtttgccaactcaccattgtctggatcccttcgggctagtttgggagctagaaaacttgagggggattggagggactagaatcctgctgtataggacaggcccgacggcgcgaacgtgaggtagtacatttcgccgtccacctccagcagcaggttccacaccggcacgcgacaacgtcagcttgtgggcgccgtccaagtaggacacttttgcacgcgcatgcgcttaggtcgtagcacctagcacgtgtccagcagccatgtttttttatagcttctcccgatcagtatagcacagatgttggatccaagacctgaagaagtcctcccggatgactgtaggttttgaagtttgagaacggaaatcgaatcacaa

SEQ ID NO: 82902 - DNA, 485 bp, Zea Mays
caagctccttcactactttgacgaccacaaagtcatagtagtcaccgaatttccaataggggatattcttcacaacaaagaagccatcggaagaatagccaagtgggcctgcgagctaggagctcatgacatagagtttcggcctcgcacggcagtaaagactcaagcaatagttgacttcgtatcagaatggactgaacaacaagttcctgacaacccagaggctactgaagtatggctaatgtatttcgatggctcgctgaaactacagggagcaggcgcagggatcctcttcattgctccaggaggcgaacaactcacctatgcacttccgctattattcttagcgtcaaataatgcggcagaatatgaagcactgatccacggattgaacatcgtcgtgtcactagcgttgagaggttgatggtatatggagattcgctagtagtcataagccagataaataagaactgcgattgctcgac

SEQ ID NO: 82903 - DNA, 308 bp, Zea Mays
gattaccgtcgtgcaccacgtgctaaagcactttaccacgtcgcagtagctcggcttgcgatatttgctcatcgccggtgagttcgccacgacggaagacactaatcccgcgcgccaataacattctatttccccagctgtcgcgcgtcttcgtccaaatccccggccacttcttagcgatcctataaattgatgtctaggtttgttgcgccatgttatcacgaagccaacgcacccacgcttgcctcgaatcaccccctagaactcttcaatttcccattctccccaatctctgtttccgccaccgt

SEQ ID NO: 82904 - DNA, 509 bp, Zea Mays
cgcgaaggggtatcgaggtattctggccgttcgatcgaccacagatggccccgattagatcgaccctcgcctgagccgatacgggatcgaggccataggatccgaatcctacggcccggatccgtttgatgaaggggtatgctgattccaatcctgaccgcacaagctacatctgacggctgaaacgctatcaaccacggatctaatcgcatgcgttcctaccggatctaacggcgcataactcatcacgtgagcaggcatgccagagtgaatcccaaccgctaatcccaggtcgggcggtgcagggggcttcatcttcatctgctccgaacacagacaccaagcgcacgacggggcgcatgccagggacgacggcgcccacaccggagaatgcgaacgcggcatgcaaggatttccctgccaaatccaacgtgtgctacactaattggagaggaaggcgaacctagaagaggggtccataccggaggaggagatggagagagaatccg

SEQ ID NO: 82905 - DNA, 683 bp, Zea Mays
ctctatccacttcgtgaatttgtcgatggccactagtatgtgagtatactctccttgagctttcttaaaaggcccgatcatgtctagcccctaacatgtgaatgaccagataacatgaatggtctacatctgctgcgcgggtaagtgttgtcgttttgacaagaattggcacgcctcgcacttctggactaactcggcagcatcactctttgcaattggccagtaaaacccggatctgaaagcttttcccactagagtccttaatgcggcatgcacaccacattgcccagcatgaatctcatcttgtagctgtctccaagtagccgagtggatgcacttcatgaggactcctctgcgcctcttctgtacagcaggccccctatgatggtatagtgggccgactgtcttgcagtgcactctgctgcggccttgtcatccagttcctcttcgtttttatgtacccgatgatcggctctctccagtcattgggatttgcctctggctaactcagggcgttgcattcttccatctgatctgtgataatgcttggttgctgtatttcttggacgaagatcctaggtggaacttgggcccgactggaccccagttttgacaatgcgtcagccgctgcattgcgatccctttccacgtggtggaactccatccttcgaacttgtcttcca

SEQ ID NO: 82906 - DNA, 662 bp, Zea Mays
aaagggttttggtgacatttggagtgattgggttatgaaaactgtcagaggtggtaaagtggctatcaggacaaatgatttaattggtccttattttgcaactcataaaggtgttcgccagggtgatcctttttcacccctgttgtttaatctggtggcagatggtttggctagcatcattcatcaagctcaggaaaaaagtctggtttgtggtttgattcctcacatcattccaaatggctgttgttgtttacaatatgctgatgatactattttcatgattcaagattgtttagaaggagcaagaaatcttaaattcattctttgtctttttgaacatatgtctgggctgaaaatcaattttcacaaaagcgaaattttctgtttgggtgaggctaaagaatatactgatttatatgctgacattttcacttgtcctattggtagccttccaatgaaataccttggtgtgccaattgataataaaaagattagtaaatctctttggtgtcctatgttggaaaaaatggacaaaaggttggctggttggaaggggaggttcttgagtctgggaggcagattgacccttttgaacagttctctttctaatgtaccgctgtacatgttatcgatttatccggctcctaaatcagttattagaa

SEQ ID NO: 82907 - DNA, 877 bp, Zea Mays
cattacttacataaagaaaagtaatatgacaatattcaacccatctaaagacaaatcctctaaaacaaggtttcgttacatagaccatgaggcaaccatgtaatttgtattggagagcagtcgacaacatttagagaaataaatacataatgtgttggacatagctagttaaatggttaggatgacatttcactattaaaaccaacaatcagtgccatcttttgcgtagataaaacatccacgtcagtttgtttatgcaaattgttaactactatgaatctacccgtgaggttctcaactacatagttttgtggactagagacatgctcagttggccgaaccatcgtgctaacgttgatgtcggaggaattcaccagagtttagctgacaaaagagacaaagtacaatccaagtcaagtacgcgagtcaactcgttagagaacatttcgctgccagtgaggccatcttgaggagcgactggcacgctgaggctactggcacctccagtacgacactgctagtaaaacttatttcacgctcctatagaaaagagaagagacaacattctttcgcataagcagacatagagcccacattctttcgcataaagttctaaaccaatggttatgaactattataaaaattgacttgttaatttgcataggaatatatatttcattacgatgtgaaaacaatttgcaagtatgtgagatatgttgctttactaaacgaattgaccaatctatatttttcggtacaaaatgactaaaaatagttatcatagttataattgatattaaacgcaaagaaaatcatataaatcatcgaggtagcaaactcacgtaaagaagtatcatggttggcctaaacatagccc

SEQ ID NO: 82908 - DNA, 980 bp, Zea Mays
tgtctggccacgaaggggtactgtccattctgagtcgtcagatcaccgatccacgacccacaacagaacgcgaaccgatattctatttccgcccttggatcagaatccaaccgtccacgatcgatacacggattgcaacgcggggccggatccacccgctaatttctaatcggacggtcacgacccgatgccacgaaacggtattctgtcgccgatcctagccgttggctacgcattcaacgacccccggccgtcttctccaatcgaccgaacaaacaacggcatacacacccatacggcggcgccatcgccggcaccccgcacggtcggccccccctgccccaaccagcgcatgacatcacggaaaatagagaggaaggtaaggaggatctgatgggggtagacttacgggtgatcgagcagcggtgaactctgcccacgcggcacggcggcaaggggaaggaatctcgccaccgacaagaaattggcgcccaaggaatcgatgctcccgcccaaagagacaaccgacgtgcacgtggaactctggcgaatcacacaggtaccctaggatggtcaaatcctcccagaaatcccgatattgccatgcgtctgaatcaaccatggcggctcccccattgtttccccctccctctcggtgatggtgatggatcgcttgatgcacatcgatgaggagccgagagacatggggtatgcctttatacccccgtgttggtgaggcggctgagccattggggtggttacgccagctggggatttctacggagatcttgcgctcattcggttaagatgacagttactgggcacctaatttgttgccgagaaagcagggggagaaggagggtaagggggcctggcgatgggcggttgtcctgccctgtgggcccaagcggtggtggacaggagtgcgcgcgtgcctgctgcgccctgagaggccctacctgaaacgctccagctgctgg

SEQ ID NO: 82909 - DNA, 2130 bp, Zea Mays
ctgagaactgtgtctatgttagctgtgcttttggtgaatgcaagcccatttttatagactggcagggaagaatttgttgtgggtatgttgatacaaatgatacagatgttgtgatcagaattgttgatccggactatttgacagagcatcaagaggatggtgctgagggtgagatatggatcagcagttctagttctggagttggttattggaacaataaggaaacaagccagagaaccttttgcaattggctcaagaattaccctaacataaagtttacaaggactggtgatttaggacggatcattgatggtaaactttttattacaggaaggatcaaagatcttatcattgttgctggtagaaatatttattctgcagatgtagagaagacagtggaatgttcttctgatgttcttcgaccaggctgttgtgctgttgttggtgttcctgaggatgttttaacccagaaaggcatctcaatccctgattcttctgatcaggttgggcttgtcgtgatcgctgaggttagggagggtaaagtaatctctgaagagatcgtagacagtatcagaacacgtgtagcggaggagcatggtgtaactattgcatctgtcaagcttatcaagcctagaaccatatccaagacaacatctgggaaaatacggagatttgaatgcatgaagcaatttgtcgataatactcttagcttggcaagtggtagtcgtatatctaataagaagtctctttttcggtctctcactacaggaactggcatggacatcaggagacctttcttgaagcacactgttgatcctaccattcgccctcagcctagaagcaaagtgaaaaatctcatggagattattgagtttttaatgcagttagtatctgatcaaaaaggtatttcaaaggataaaatttccccaaatgacagcctaccttcttatggctttgactcaattgcagtggtccgagcagcacaaaagctctcagattttcttggtacacctgttggagcaatcgacatctttactgcaagcagcatttcagagcttgctaattccttggagaatctggtgcataagtcgcaaccacagctggcacctcaacctagaagcaaagtgaaaaggtccagtgacattattgagtttctaacagagatagtatcagatcaagcaggcgttccaaaggacaaaatttctccaactgatagtctaccttcttatggttttgattcaattgcagtggtccgagctgcccagaagctctcagattttcttggtattcctgttggagccattgacatttttacagcaagttgtattgctgatcttgccagttttttggagaatttggtgctcaagtcacaaccacagttaaaacctgatgtatctcactccgctgaagatgagaatctagttatcacagatgccactgatttagatcttagcgtgtttgctactgggatcctccaactcctggctcttacttatgtatgttttatcctgttacttccagcatatctcgcaagctcgatgtacaagagcatgatatcttcagtcagtctagtgaaatcatcactactgagctatcttagttctttggtcttggcacctgttgcatggatctgctatgccttgttcacttcattatccctgtctaccttggggaagccattccttcagccaaattatattctaacccctgatatttcaatatggtcagttgactttgtgaaatggtgggcattaaacaaggctcaatcattagcagcaaagatgctagctgtgcatctaaagggcacaatcttcttgaattattggttcaagatgcaaggagctcggattggttcacatgtcgtcattgatacagtagacatcacggacccatccttactagcagtcgcagatggtgcagtgatcgcagaaggtgttctcattcagagccatgaagtccgtaatgaagtgctgagtttcaggcatgtcaagattggtcggaaggcatcagttggcccttatgcggtgatccagaagggaactgttgtgcatggtggcgttgtcattccaccgttgcaaaaaactgagcaagggaaatcagcatatcctcctagcggagcttctgcttaca

SEQ ID NO: 82910 - DNA, 609 bp, Zea Mays
agccgccgccgccccttttatctcctctccttcccactttctatcttcactctctcatttgttgcagccaccgacgccctcacctttctctctccctctctcacatcctacactccaaatccctccaaaaactattagatctttgtggagattgttggagatttgatcccctcaggctcctccaccatctctccactcttcgttgggattttcgtggttgatgtcacagattgaggtattgtctcattttccctatttttgactcgatccaatacagttcttgattatcttaagtatcttttcaaggatattatgtagtttaggtgtatggcacacttaaactgttatcattgtctcgaacattgtttgagttaagtaggttggtattgttcattgtagctaaaccgctcatatgaacggttgaagtgcatgctcaatatcatacgtgtctttcctcaaacgtgttcgttaaactccttgaatatcaaatatctctctcaccatatgttcttctttgtttaatcttaaggatggtgcgtcgtagaaatccttctgttgttgagtctgactcagatgacgacgccccagaaattcgtgaagacactcctc

SEQ ID NO: 82911 - DNA, 623 bp, Zea Mays
ctggtttaatgaatcgaaggggtacgcccagattcgatctaggccattccctgcacgatcaacggtcgagggccaactccccctagatctaatcttagccctacagcgattgatcaatggtcttggggcttcttcctccccatgaccccggacgactgcgtcacgaactggggaaacgtctagctcgcgtgtaggttgactaaccacccacgggtatggatcggagcgcggatagaacctatgcagtgaggatggaatgttgaattacagggacgtcttcttaccaagttcgaagcgcaagtacagttgcccacggaggcttgcggcatgatgtcgattcctcaacaccgcccgtgaagctcccgatttccgaattggcgaatacatgaatgagtcttcgcgcagtacggggtgatatcgcagcttgacaccccacgcaagttgttggagaacccggctcccaccgcgcggcagagacgacgctcacaccctcacgacggcggtgaaacacggtggcgcccgcatgaatggcttatctgctggcaaccgggacagcgatttccaaggacgagggttttgtagggtgagggaaggcggggtttgcggcaagcgatttaagcccg

SEQ ID NO: 82912 - DNA, 364 bp, Zea Mays
ggcgggttagttttcctaaaacagaggggcttatgtgcaaaactgtcgcggccgaaggggtacgggtgtttttcggccgttggatctccgtcagatggcacagattagatcgctacacgctacgaagtgttatggaaccaggccatcggatcaacgttcaacggttacgatttaaaatatgcccgattcgatcctgcccttacgtcgatgatcctacggtcagcaagagatcaggccgaggcgttgcaatctccctaatctacaccgtccatcccaaatctgacggtcagaggccatctccccaaatgatcccgacggcggcgggacagtccctcgcacggcggcgcccatcaccggagccaag

SEQ ID NO: 82913 - DNA, 952 bp, Zea Mays
aatttttttgttgctttgtaggaagaggaagccaagaaagaatacgacgaaaaattggatcccgaaagagttgcggacttctacatcacaaactagtgctcctaacgaagaaacaactattgtaccacaaactgtggatgcagaaacagttgtaatagacaatggtagccatgaagacatcagtactgatgcagcactagtccgtgtggacactcctcctagttctccgccaaggagtgtcaagtggcttgttaagaaaattactccgaggaaaaacttgaagcgtgctgcgacaagggaatagaactatagatgatccaagaaacttgaagcgtgctgcaacaaggaaacaagttcctgtctatctttgatgtcccagaaacctgaagcgtgatgtctgtgtttgatgtcccagaaacatttcagcgtgctgtctgtgtttgtgctcccagagtaaacattctgtttgtgctctcagtgtgtgtgtgttgatgtctgtgttatgtttagagccagaaattctgttagtgcccagaatgtgtatgtgctcccagaaattctgtttgtgcccagaaattctgaatgtgcccagactagttatctgtgcatgtgtgcccagaaattctgtgtgttggcggctagttatctgtgcatgtgtgcccagaaattctgtttgtgtgcccagaaatccctacattggcagctgctgcacccgcaaactgcttgctgctgtaggaatttctgttagtatgatcagctactgcccagaaattctgttagtatgagcagctgctgttcaaattctgttagtgccctgaatgtgcccagaaatgatgtgagtgccctgaatgtgaacagaaatgaatgtggcaaaaaactgcttgccaaaaatgatgtgagtgcccagaaatgatgttagtgccctgaatgtgcccagaaatgactataattg

SEQ ID NO: 82914 - DNA, 1177 bp, Zea Mays
gttgttatagtcaatttgtagctgtatcatagggctaaaactttgatacagagagtaggtcgagtcactacatgaatttgggaacaaatctccctgcaagttgctctgacagactgactgaataggcagcgtgatggtacagtgtccggatcagaacgccagactcagatgcctcaccaacgatgaccgtgcgcccggatttgtgcctgccgcggtgattcgtgcccagcgcagatggataacaacgaagggtaaaaatcttggcgctcggattagctcgggctcgctcaccgttgcgcccgtcgtacccacttgaaccgcagctggtcgggatcatcctcgccggcgttagccgctcaacgattgtgcgccacgtaccttggtgtcttaccgcgtcgcaatagctcgggttacacatatccggtgatcgccgatgaactcgccacggtgaaagcaaccaatctcttgcgacagtgcccttttcattctccgaccgccaccgcgccatctcaaattcccgagccaccgctcagggatcctataaattgagcatgccatcagttccgcaaggtagtcaagcacccaatccatcaactcgtgcctccaattactcacctgagcccccgaattgctcacttctcccaaattggttttccgccaccgtgaaaaagctctcaccgtggccagcgtgctacaggtccgatcatgtcctctgctctcccgtttcagtacccttatgttctcctgatgctcctcgacccgtttaatcaagctagaccgcgctagatcatcgggaacacctctgttcatccgtagttcgcgctgtcaccgtggacagtgtgattaagagctcagatcgttcaattgatcgaggggaaacgattattaggtattgaattaggagtcaacccggttagagcactggtcgttgcttatatcagccagaacgagctcatcggagctactgctctgccgctccgcgtcggggacctgactttatgaaagaatagaaggggagggaccttgatgcaaatgtcagtgagacaaaacaatagtgttgcagactctttacgggttgtttaaaaagccagggtcttctgtgcaaagtcaacaccgtgggcacgggcgcgcgcgcgtcttcccgtctgcaggccggtttgggctgaattcaacccaa

SEQ ID NO: 82915 - DNA, 1822 bp, Zea Mays
tagacgacgtgtagatggcgccatgggcagcagcgctagacccaggcgaccatggccccgcaccagagcttgtcggcgctgtgatggcctcgtgcatggggtgtgttgctgaggaagctgtggtacctgcatgcacaaaacgagctccaggaactgaagcggtaagatcatgatcatcgatgagaaagtctagggtggatggtgccatgggtgtgctagacatgttggagaaaggaaaaaaagattcgtcaaaaatgacatgtctagaaataataatgcggttcgactgaagctcgaggcatcgatagcctttgtgttccgaggaatagccaagaaaaacacatagggaggagcgaggggcaagtttgtgaggtgttgtggaggacatgttaggataacaagcacacccaaaaactttgaggtgatcataggagggctcggtggaaaatagggcgctatatggcgtggaggatgcaagggttttggtggggaggcgattcacaagatatgtcgcagtatgaagaccctcaacccaataggccggagggagacttgcctgaaataaaaaggagcgcaggatattgttcagggtgggaagagagcgttctgctttcccattttgttgagatgtatatggacatgacatgcggagggtaacaccatgggagagaaagaacgtgcgggcctgagaattatcgaattcgcggccgttgtcgcactggaagctcttgatggtggtcccaaactgcgtgcgaacaaacgcaaaaaagttagaaagagcgaaaaatgtctcggatttgaggcagagcggaaaagtccaaatgtagtgggagcaatcataaagaataacgagataatatttgtatcctgacacactaacaatgggagatgtccataaatcacaatggattatatcaaaattatgaatagcgcgggagctagatgaactgaaaggcaaacgtgcatgtcgaccaagttggcatgcatggcagatgtgatttatgtcatctttattacatgaaatgacactggaactaataagtttggttaaagcttcacgcccaagatgaccgagacgttgatgccaaagggaggtgggtgcggcgaggaaggcggaggtgctggtggatggtgtatagaacgggtagaggtcgccggagctattgcacttggcgatcacgttcctggtttgcaaatccttcacagaaaggctaaaaggatcaaactcaatggagcagttattgtcggtggtgaaacgacgaatagaaatcaaattcttaatgatgttgggagacactaaaacattattgagaacaagattacgatgcggtaaagaaaatgtgtgagatccagtggcagtgacaggaagcaaagcaccatttcccacaatgatagatgaaggagtagatgaaaaaggcggggaaatggtggagagtttactagcatccgaggccatgtgtgagccagcaccagaatctgcataccactcagggcccggcggagtcagggtcatggtgttgaaggagtgcgtcagggagtcctagttccaggacccgccgtgagtgggattccagggcgccgctggatacgccggcgtgggcacctagaacactggtggtgcaactcccccgtaggtgctgttgtaggtgctgggagagccactgaagccaccatagtgtggtacggcgtggaacgcaggtggtggtgttgggcgcccggatgggtcgtatggccacatgcgcacggtgccggcccagggatgggcgaacgacgggtgcatgcctggtgaagaggttccctgcccaccatgtgccgcaccagc

SEQ ID NO: 82916 - DNA, 456 bp, Zea Mays
gctgattgttggacttattctgcctcggatatggacagtctttgataaaatgactagacttcccacagttgaagcagccagttgaggaactagggagggcggggaaacgagcaccaggggcactcgggtgatttgtagatgtgggggcagtggtaggacgaatgaaatcaggctgtttgaacagataggagggtggatgaggcaaagaacgattctgattgaaaggtcggattaccaacctggttcgcttctcaggtccctgattggacctgtcacctccaaatccctttgattttccttggcatgtattcttggcttctactgccagcgctgtgctgatagctctgctgtatgtaagatctagacaggtggccattttccgttgtagctggtcgttgagtcctctcatgaagaagttcttctttttcaggtcagtgtttacttggtcaatcgcat

SEQ ID NO: 82917 - DNA, 326 bp, Zea Mays
ggcccccgtaattggataccgcaccaaatggcctactggctggacaaatgagtggttttatgtgaaagctaacgagaagaaaagagagaagcttatgagtatggtgatgagccctttgaaattaagcttcggcatgacgagaccactatgcaacatgcagctcggctccccatgccaactagccgaagtagaattcagagtggtggctggtcatattggcactggggatttagtgaaggaatacttggcaaacaaaactttcccaacctccagcggatggggaatgccaaagaaaaaggaagaagggaaaaactatgaacttgttc

SEQ ID NO: 82918 - DNA, 628 bp, Zea Mays
tgtgtcgaagggcaaaaaagtgaaggttctgacccaccggccgcgatatattgaaccggtcgtagtgcctgaatttggggaagggacctcttcaactatcgaaacaaaacaagctgctccgattgcgcagagcgccgaagagccgattgtagtgccgaaggtgcctacagtcgggccagccgaagccaaagatggtgcggccgaagaaccaaaagtggaaaagatagtgaaaatgccagaaattctgagcccaccagcaagggcagaattgctgaaggtgcaaaaagctgctgccgcaactcccaagaggaggaggatggccagcatactagacgctgtcatggagaccacgaaggccttgacccttgcaactaccaagaaagctgccgaagttatcaacgtccaggccggagctgaagctagatcttcagtgtctattgagatgaaggctgccgcgcctgaggataaaactgagcaacaaacttcagataccggcatggtggtggggcaaggtataacagaagaagcaagatctcgtgcccccgaagcttcgtccgaagatgctgattacattattcgacatgcttcggggaaaaaattgtccaaagaagaaatcttagaagctaga

SEQ ID NO: 82919 - DNA, 946 bp, Zea Mays
gcgtgtgggagcacctccactcaccacagtcgaccagttactgcccaggtgattaagaaaattattagtttctattttgaatttgaacatataatatcaagattatatgaagtagtagtgataacatctaaagttactcacctttcaccctcgggttgaatcaccggacgtctctcaagaggtatctgtcgcttagggaggcttgtgggacctcgcaagtagacgttcgacgaaccagaggcagtagaatctcctgctgtcgccccctcgacgtcttgttgcatttcctcagtgtcaccatgtgcctcctcggcattgttccgcgcctcctcgatctctaagggcagctgctcttcctcacatgacggggcgggaggcgcctgctccgcgtccgccctgcgagtgctcctcctctttgaaggtaaatcaagcctcggcctttggtaaagcgacgctactctcctcatcccaccacccaccatctttattcaattatctgcaattaagaacactaaactaataagcacatataaagaaggcgtaattatctaccgtaaatccattcaaccaaagatgttcccccatgaccttctttgtttgtcttttcctgtttgcacatttactgcagggacaacaaattctactcgctcctttagcagcctcactaaatgctcgttccaagaaagcatcagtcttgttgatccattcattggtgacctgaccctgacctgagcggcccatgtacatccactcaaggtcctccatcgcctaacatatatagtagagagtaacataaacaacaattgcatctacacaacgttcctactctctaaatgcttgtaagagaatatgtagggaccaactagtaaaaacaatataaaacaatactagtaatatactctagctccactccagtaaaaagaagcaagtaaaatttatcatttaa

SEQ ID NO: 82920 - DNA, 534 bp, Zea Mays
ccttcgcagctggatcgtcatcttcagcaccgccaacaccagcagtccaagcccctgctcccagaggcaatgacccggacgactctcgtgatgatgatgaagacaacgaaagtgaagaagaagaagaagaagatgagaacatcaaggaggaagccaacggtaaacaacaggatcacttcgtggggatatggcctgtcaccgaacattatacatcaatgttcgagatggggcacttccctaacctgctgcaggatgttctacatgcgttgggaacctactccgacccctgtatgagactaggcgagtgtgcgagccccctcgggcttgctactacatcactcgcattcatgtcagggtgatggatgtaggtgatagagggttcaggactctatcagctcatgagtctctgacgccgctattcacctacgctccttcggtcagcgatgctgctaggcgaactctgtggtccctcatccacacctactggcagcaactgcacaacatgaagtacaggcatcttcctttgcgtcttcg

SEQ ID NO: 82921 - DNA, 1269 bp, Zea Mays
cttttctatagcacatatctacagaaaatacaatttagtttatcaaacatacagcacagggaaatcactgcgtgcagtccaaaacaacaattaataaatttcagctcctatacaattcaagaattgcagcgttctagacccttgaattattctaacactttgacaattgttagagttaaaatgaccaagttagaactaacaagtagatttactaatttttatacaagttatttcgcgctctagaactaccatacacaattagtaacgcatctaccacaataatcttacccagcatacatatatatcgatgcgctcttcacatagtaatttgtattttaacttgggcatcacatgaacactactaatttttacccgcgaccgtaaccatgcgcatttaggccataacaagcaaatcatcgtgattacgagcttaaccaacccatctaacacttcggctaactagagcaacgacatagcccgctaaataaaatacacgtcggcttgactattattatcactatctaaggcacaacatacaacacaacatttttataaacatatatattcacatgtatattcacacatcgaccaaatcatacgaaccgtaaacctctaatctctaactcaaaaccatcatgcgcttatttcccaattcatgaacacataacgcgtattgacccgactcaagatatagaggaagcgattactattttggcatgtcaccacctctctaattaagccaaaacaatttctacttatatcgaccaaacatttgtgtcgagcacaccttatattaccttgtctcgtatacaaccatgttgtagcgtgcattcgagacactaccgattaacttaacgcaattaccactacaatgcacttcgatatacacgttcgacatcacagtgcttcgacaaaccccacacttccaatctacttgtcacatccaaacacaccacgtgcccactgcgttctcatgaccaattttagcacaattatttacgacaacatttatcgactagacaatgaaacactaaccgatcattcgcacatctcatcttaaaaacacatcacatgtcacataatttatatcttcgatccactctatcctacactacgatgaatacataaaatatttttaacatagacgaacatcttagccgactgcaaaaattaccaagcaggctttacgctttttttaaaatttaccacaactaacacactattttacgacgaagtgtttttaacaaccaattaatacttctatgaacc

SEQ ID NO: 82922 - DNA, 606 bp, Zea Mays
gagagggaatgactttatgtctttcccaattgattgcaaaatgtttctaatgtcaatcaagaccatctgttgcacatgggttttgctttgagtacaatggtgatagtcctctgacattgcatcaaggtgctctgccataattgtgccacatcgttcggctcacagtaaaccagtattgttgcaaacagcctttgtagcgctgatggcatttggtaaagagcatcttcattgagagactcatctattgtgtcatctgcttcaagcagtccccttctttgtgctgcgtcacggaaagatgatagtgtgtcaccatctaccgtccttagatccacataggaagtagccccagtcacatcgtttaagagaagccgaagatagaagcgctccccctcagctggatgagaagaaactattctagcaacctatccacccgtattttatttcctcctttgccacaccttgccctgttgtaatgtgtaccacttagggaagtcatgataaaggatgccccgagcctccttgtgtagcctatttgcctcaaaatacgctgtaagcattgacctatcagcacctagacattggacaacatgatttactttagcacgc

SEQ ID NO: 82923 - DNA, 534 bp, Zea Mays
cgaaaatgccagacccctctcatgtggtccaacataggggaaaaggcacttgaaggacctgcctttgtcaaagaggttgaggagaaagttgccctgatccgcagaagattacttgaagctcagagtcggcagaagagttatgcggacaacaggtggagagaactcaaatttgaggaaggagacttcgtctacctcaaggtctccccgatgcgtggtgtcagaagattccaagtgaaagggaagctagcaccgtgattcgtcggcccctatcccatcattggcagagtgggacccgcagcgtaccgtcttgaattaccagaatccatgtctgatatccacaatttgtttcacgtgtcccagctccgcaaatgcctgcaagtaccagaaagtcacatcaaagaagaggcaatacagattcagaaagatctttagtaccgtgagaagccagtaaagattcttgactcagcagtccggaagacccacaactcagaagtgaaactctgtaaagttcagtggagcagagaaggagaagag

SEQ ID NO: 82924 - DNA, 452 bp, Zea Mays
ggcaactgatctggcttcgctccgacacacaacagataccccaaatgtaagtaacaccatcgagctccaatctcttgaagcttacatagatgaacggcgagagcaaatgcaacatatcgtagggggtatacaaaaagattataaaaggctagtacgtgcatttgataaatttgcgtttgataaatccactgttgcaaattttgcttcgcacgaggttgaattgggggaaaacacacgtaattcatcggctacaggttgtcacgaccagtcacaacccctttatgggatgccgatggacacataccctgagcaaccacagccttctacgcacatcagcagtaaattagctgatctgcacatgttcagactgtcctcacgtgagagcggaccgtccaggccagcgacggccgttcccatttttaatgagttaccgagatatgcgtccgagccac

SEQ ID NO: 82925 - DNA, 343 bp, Zea Mays
acaccatatacaacacctcctagctaaaatttgacgatccaagtgcccgacgatttgcggcattttcgattaccggaggtatgccggatgaaacgctagccgagttcttcgtcgattcgttttggggagaatatgctgatgaacacacagttttggggagaatatagagctgccgtgcaagaaaaaggttttgaattccaccggatgcacaaagtgtgcaattacgaatcacaacaaccacgaaagtggcatgcttactttccttggtcatggcgttgaacatacataaatcgccaccagatgtttaatgttttcgccgtcctcacaagcaatcgaaaacgat

SEQ ID NO: 82926 - DNA, 564 bp, Zea Mays
ccaagatgataatggagttgacagttgagtccctttcgggcttgaccatcaatcccaatatttgtgcatgtccaccagtcatcaaaggatctgttttcaggatgcggggacaggaaatgcaggccgaccttctaaccacaattgacgggaaaacaaacatgatactagcaggtggtcaattgtttcctcatcctgatcacatagcaggcagcgattgggatgagctagccctcttttagcaaggcagtcctgctgtccaacatctgttatgttctatcagccacatgaaaaacctgcactttcttggtgcccaactcttccaaatcctctcccatggtcttcatgtatagctccattgtaaacccccctcataagcagactgtgcagagtaagttcctgaagcagactattgccatttgccagacatgcaagtcatctatacttcaggttgcaataccacttctcacataattaaggtcccatacctggagaaattctttcaacacagccactgtctgaacccatcttaactcaacgcagcaactgtgatagcgactgtgcaag

SEQ ID NO: 82927 - DNA, 468 bp, Zea Mays
ggaacatgctaatacaacgaagactaatagaaaaatgaaaaaagatcgggcgacagagatttgtggacgaaaggagtatcagtcagtttgttggatgtctcttctacttggaaaccaatcagaaaaagtataataagatgatgtgaataggttgcaaaagatgacatgacagatttgtggtgacatgaaaataaagaaaggaagcaggttgctcactagttgtcaatttctgaaaccaccggctagtaatctacgtgttttgcgcgtctagtgcggatggtgtgcaaggaagacacaagagttttatactggtttggacagagtgtccctacgtccagctgggtgacttgtgttaccatgcactaagttcgtaataagggttataaactggacgatagagggacgaatttctaagtctctcagtgaacgagtgggagcagagtgaagtgttatgtgtgtcacaaatat

SEQ ID NO: 82928 - DNA, 399 bp, Zea Mays
atcttatagccgatatatataatggttagaaattggcaattaatatatggtccacttgtctctcacataattttttagttcccttgtataagttggctattcgtttgtagtctgcttttagtctctctcctcccatgtcatcttccatatcagcatttagtcggcttacaacaacatattatacttgctctcattcgttcaccccgcgctcgctcgtttacgctatatttcgctcgcacggtaaaagctccacaatcgccctttccatccagcgcccaagccagttcttagttcccaccgttccacctgcatgcatcgcgctcgcttataccaccatactcgcttgttcacgccagccatgccatggatgtttggctggagtgtcctgcaccggatgtc

SEQ ID NO: 82929 - DNA, 456 bp, Zea Mays
gaaaaagaggattgtaagcattttgaaaaggaaagcaattcaatccattgaaaaagataagcagaggactgcttcaaagaaacaaaaaatttaagcggagccgaagctttcggctcccaagaagcgaaagtcctcgactatggcccctatcaaggtgaaggtacaagattcactagagaagattactggaacctcttcgtcctcttccatcagcgtaacataaattctaaaggtaatgactgaacccttcctgtttgctatgctaagtcctctagggtcaggtcttactagcttattgcagtgaaaggagaatgggttgaaaaaggtgcagaagaggagaagaagactgcttcggcgactaggggaaatgagggtggtaagaagaaacgacacatgatggctgtgatgagggccatccataagaccccacccctggtctcgacagaaaaaattgct

SEQ ID NO: 82930 - DNA, 465 bp, Zea Mays
agtatcccgcacgactaccccaggaggacggacgcggtcaacctatctgggcacctaattggccggtacgtcttcgtccatcgtattcctagcttgctccgcaatcgtttacgaggatcgtgggttacaatttcgggctggttcgcggaaccgcattaccacgacgggtcttcggcgagtgtgggagggtggtgccgctgcgtacggttgggggatagaagacaaatcgtgtgccatcggatgtagggtcaggccctgattagatataggttatcggttcaggggtgttgatctagagggttggtgttagatcgggcgatccgcaatgttttggccaccataaaatcttagtcgttcatgtcccatcctagggctcctattcgataccgattcattctaacccgaatctgatcttgaccgctgaaatttaatcgagcggccgagaaccaccaataccctttcgcc

SEQ ID NO: 82931 - DNA, 342 bp, Zea Mays
ctgaaacaatgtgccatgatgaaccacgaaaacatgtgattgatgaccgtggtatatcgtattccatgggtccgtgcacagtgcactgtcaatgtcatcatcagtcaggtgtactggtatcagtgtttaaggcttcagaaaacttcatgagcctttgggtacctggtgaggcattacctgttggtatcatactatcatctcagacttgatgctgtcagcagaacaatacccaatctatgcttgacggtctttagtgttagtatgatcaacaacatggtgaagaacctaactgtgggtgacaaacgaatttgatgtgatatggataatcatttgcacgtgttg

SEQ ID NO: 82932 - DNA, 641 bp, Zea Mays
ctcaatctatgtacttcatgtatttcttgagattatcttcaaggagtagtaaggattaggtgtttgtttccttcttaaacaatcctcattgtcatgaacattgttttgaagatgaatcagtgggtattgcttattgtagttggactgttcacatgaacggttgaaatacgtgctcaatatcactcttgatactcttcaaatgtgttatttaattccttgaacatcaatacctctctcaccgtgtgtatctcaattggtctcaaggatggttcgacgctgaaatccgtctgtcatcgaatccgcctctgatgatagctctcctgagattcgtgaggaggtgccctcacagtccagatccaagcgaggcagaggatctggaaatgttatgatgggtggtgaggcctctaggtctcagggtagtcgcgggtgtacggctagaaccccttctagtcgctctcgtcctgcagctaatccacagacatgggagccttctagtgatgatgaaggtggaaaatatgatgtcatagatcttccttccgatgatgctcctattgttcatgggttggttctacataaggctcaagccaggagatcccccaatgaggaaatcatagatttcagtcccagcggaggctcagctc

SEQ ID NO: 82933 - DNA, 767 bp, Zea Mays
cgaagctaaaacatattacaaagctaaaatataacagatgtacctataagcctagcccgctcggcagcctcttcagcccttctcgccgcttctgaagcatcatgtgactccttttcgttctttttaatggcttcatcagcgacttctcgaccgcccttcagccatatctcgaagtaaaatttcccaccgagcgtagcagctccggctgaaggattcttgatgtcatcaactgagaaagcgaagtttgactaagccacaaccttagtatgttcgcaaccagccttctccaatatggacgtggcccccgcgcactagcaaaggcacaaaaatactcctcggtcacttagaatttcgtcaaaagcttcggcttccccgctgatccactggacaactccatcagggtcgccgcggatgaatctctgcttagaggaatatgccccaaccctaacaaagttttcctctaatttcctggcgcattccaaggatatttcataacatctttctttggaagcacgaagctcatcggcattcttttgtgctcttgacctttcgatctcgcatatctcatgcttcaccacctcaacttcaaatttttcggttgcttcagcaaccttccttttcagttcttccactttggctttatgagctttggcttgtgcagcaagtttagcctcgttagatctcagcctatccactaaggaaagtaatatcttatccttttcaagagctttgttccttagtgtgatgacttctgaacgaagattccc

SEQ ID NO: 82934 - DNA, 521 bp, Zea Mays
caagtttattgatttatttgtgtactaaaaatcaatttctataagtatttatccaatttatttgttctctgggccgagcactaattatagagaaccatgggggtggaaccagaagttttcctcacactcagaacaactcagaggtggactgcaagtttattagttgattccctagggtctctttagcaaaagagcgcggcgaaggggtatcggctgtgtctggccattggatcagattttaaaagccaggattagatcatgaagcggtacaccactctttttaatccatgaatcacccgatcgatggcgcggatttaaaacgccctagatcgtgctggattcgttcgatcgcgatccgatggttcgagcctattctactccaatccgaacacctaatctaatcagcgtcgttgccaggctaaccgatgtcccggatcttttcacccttaccctctcaccgcactagccagaacatgacacgacaacgacggcgccctcgtccgcggtggcgctatggccgg

SEQ ID NO: 82935 - DNA, 313 bp, Zea Mays
ggaaggctgggcgagccgacgagctctttggtgtgccttgtgtggctttccgtttgtttgtacaactttttgtagccagcacgggctggaatctgaaggatgattatagaatggtggcactgccatttgctcccttgcacgcacatggggattatggagtggtattttagacatcagcgtgcagatctaggtgtctggaaaatgttaatgtgggacagcttaattaaacttgccgtagtcaactgccatcagccaatcatcgagtaaaaaagtttggactcgtcgaattaccgtccagtcctttcatccccga

SEQ ID NO: 82936 - DNA, 722 bp, Zea Mays
gcaccaatcgcagttaaacctttgttcaactaactgcatgtgttaattataaactaaaatttaaataacccatccagaatccaataaaaacatcccgaaagatattaccttttctgaagagttcaattccgttggctaaataaggaggacgggcatgagaagaaagaaaagatgccagcaggcccttaagcgaagcaagttggaagtccgatatgtttggctccccaaatgtggatggcttttgctcataactccctcccatgccgcaagcacttctagccacgttaattaagagcatgtccacttctgacctccagcgatccatccgcaatgaacctccctgctccgtgataagttgataatgacataaaaatctatttataattaaataacagtatatatgctggttgcataacaaattcaatacgcaatttgttcctgttcaacatagaaagttaaggtaagtttggtacttcttcctttgtagaatataatcattaaaaatagttatagctactgtttcagctatggtatgagtatacttatctatgagcaccaagatgtacagcacaatgctgtacagatttgcttcaaaaataacttcaaccatttaaatatcttatccactatcccatttggttcaatgcttaaaacttagaacaagaggtgtatatgtgttgtgatgaactttgaaccatctttatgtgggaaaaaaggcgttt

SEQ ID NO: 82937 - DNA, 530 bp, Zea Mays
tcactactcacccccgttggattcccttgctacagagagcaagttccaacaggcagcaaacatactacatcggatcagccttcgagataaggcctgcctcccaaaaattaaacaacatcattttcaactcctcaccctcaaaaagattatgcaaatccccctcaccaatactcgtcctgaacgacgaggacagcaaatctcgttggccaccccgatctacgcgaaggcgggttcgctccatccccatcggacaacgcctaccacttggcgacatctcaccaacgctatgcttcgacactacttttcgtcgtcgatgatcgatcctcacgccagccgggggatcaaacgcttcgcacacctccagccgcggcgaggactctgccgcagccacatctaacgcagcaaaataatccaaatcttcatccgacgactcagtccaggaaaatgggctcccaaactcaccaccatcagatgaccaagacccagattcagaaccagacaaactatcattagtaggcaccgcatttgcg

SEQ ID NO: 82938 - DNA, 946 bp, Zea Mays
caatattgaagaaatgggttctcaatggatacttgatataatgtgacttgaggatggcttgataaggtgaagatagcaaggaaagagcttcgaggtactaagcgaaggtgaaggccaagcgacaacttgagaactgaggtaccatggctaaggtgaagaagagagtacctgcattgagtcgaggaactaatcaagctatgaagagtcatattatgttgaggatcagatcattagtggaagtgacttgaagccaatgaagtgaactcatatgtggtgaagttgtttaagtcacatgctcaaggtgtgtttgcttgaagaaatgagacaaagatgattgcaagcccatatgaagtgatattgagaggaaatggcatatgaagacattgaagactcaagtggtcaaatagttatattctctttatcttgagtataggtatgtcgtactatcaagggggatccaatacgaataatagacaagtctcaattgctcaatctaaccaagccccgagtgctagcatgagagaaacacaaagtacaaaagtttaacttcctgatctttggtcttgttctttgctcggttggatagccctagaaataagctttctaaaaagtccaatatcactgaaatcggagtttagagtcaaaagttatggtgtttttcgtgaagcaggttgtgcagcggcagtgccgctcaaaagcccggcactgtcagggtgcggcagtgccagacctgtacagcccccaacgactagttttgaccccaatcactagtttcgagttagagatgtatatatacccttcccacgcccctgggggtcctgctgaagtccagaatcgttccaaatcatcacaagccatattggagccatctctaactcatctctttgtgagagtgtgagattagtgcttgatcaagtgttagagagtaattgttgtgtgattaaga

SEQ ID NO: 82939 - DNA, 611 bp, Zea Mays
ctgaagttgatcccaatgggtgtgaccgtcctggagttgatcccaatgggtgtgaccgtcttgaagttgatcccaatgggtgtgaccgtgcaccagctgttgtctgtatatttgatgaagatgaagaagaagaagtcacgttgattcgtaagaacagccggcattacaaaggtagtaagggggatagtgatattccttctctagctttgtcagccttcaggaactgtcaatatcggattttgatcaagccctggaggaggttgtccttgaggatatgctatcggagccgactgctgatgacatgatggatgtttgctcagaaattccagatgtgggattggaggtatctcgagcactatctcgtgcatcgtcgactttggaaggcagtcttcaatgctgagacgttggtctggattgcccgactcacatggaggtgacagaggatccttcagccttagaggtgtctgctacagaaaacccagccctcgaggatggtgctggcggttacccagcccccgagggtgtcgccgttagtgatccggctctggtgggtagcgcaagctgcaacccagcccccgagggtgttgccggtagtgatccggctctggtgg

SEQ ID NO: 82940 - DNA, 619 bp, Zea Mays
aaatagatcatatcatgggaaacctgaatacgagtgctcacattgtcatgctattttttggtatgctgaaagagtacgaaatcaacacggtgctacatctattacatataacaattgttgtaaaggtggcaagatcagcatacctccatatatgcctagacccgaacctctattttctcttgcaagatttgatggtgatacaacctcaaagagattcatcagaagcataaggcaatacaattgtttatttgctttcacatcaatggttgcacacatagataattcagttaatgatggtcgtggtccaccactgtttaaaatatgtgggcaagtgcatcatcggattggatctctattacctccagatggctaatcaccaaagttcattcagttatacatttacgacactgccaatgaggttcaaaacagaatgaattgcctagaagatgaaatcaatagccaagataatttggattctgatatagtcaatggattaattaagatgctagacgatcacaatccattcgcaaaaaaatcgcatggcaagagaccgtctatctaataatgaaagtgaagatttcattattagactcattggagctaaggaaggtgactcatt

SEQ ID NO: 82941 - DNA, 765 bp, Zea Mays
tttatgtgagatgaacagaatattgactagacaaccgatattttattacttgtatcgatgattctactagattttgttatctgtatcttttaaaattaaaagacgaagctgaacataaacttgagaggaaaaataaatggttaaagtatgatcttggtggagaatatgtttcgagtgatttttctgacttttgtgtggaacatggtattgttcatgagaggacagtgtcatactcaccacaatccaatggggttgctgaaagaaagaactgtattctaactgatttggtttacaccatgttaaagacttcggggctatctaaggaatgagggagtgaggcgatcttgactgcgtgccatgtcctgaataaagttcccacaaagaacaaaaaatcaaaccattcgaggaatgggaaaagagtgataagtttgggaattattagtgtcttgagaaccaatatgcgatagatcaaatgaagtcaataccatatgcttcagctatcataagcattgtgtacagtataatttgtaatcgccctgacttagcatttataattatgatgcttggtagatatcaagttcaacaaggcataaagaactagaaagtagttaagaatgctctcatatatttacaaggaataaaaggcctcatgcttacatataataaataaagttcccttgatatagtcgggtattcggatgttgactgggcaagatatatagatacaatgaaattcacttttggatacatcttcacacttgtcag

SEQ ID NO: 82942 - DNA, 329 bp, Zea Mays
gagcgattgaatacagtaattcagtcggctagataccagcagaccttgaggcgctatcatgataaagccatacgacaccgatcctttgtagtgggagacttggtccttcgccgaattctaatgggagaaggacggcacaagttgtcaccactatgggaagggccattcattgtatcagaagtcactcgaccgggatcatatcggcttactcaaatggatggcacagaagtggggaactcatggaacatagagcatcttagaaagttttacccttagcaaggcctcaaaagctatcaaagcaacattatactctgtaattggagaatcca

SEQ ID NO: 82943 - DNA, 326 bp, Zea Mays
caggctccaaagcaaggttggatgtggtggctgtggctctcagctggctcgctcatggccaaataagcaaaactttttttgcaatggagtcgagttgcttcgtgtacctcctcaatgcgacttgcacattgagactgaagacgacacctccagcgcccttcatctgccactgccatgcctagcaagcgtacgttcacgagcagtggtcctaggcagccacggaccagctagcagagcagacactcctcctaacaagtcggcacgacacgttctccctcctaacagcagcagctttcgcggggcgaccagtggcgagccgccatccg

SEQ ID NO: 82944 - DNA, 355 bp, Zea Mays
gttagaagaatatcaatgttttaatggtactctaaatagttaccttgaaaattgttggggcataattcattcttttgacgaattcagtattcggcatatctctagagttgagaatcatagagctaacaatttggcacaagatgcatcaggttatcggataaagcgagggagatttcacaacactaaaaatttgataaccagtgtagggccagttccctaggttgcggaccgtccgagcaaagactccggactgtccggggttgccaggaaggttctcctaattgattcagctgataatgaagccgatacaagtgattggaggacggccataactaattatttatgaaatcccaat

SEQ ID NO: 82945 - DNA, 601 bp, Zea Mays
aaaaaacttagtttcaaaaggcatagaaggaatttttctgtgggcgtgcattctaaaagaaaaaaaagaaggtcattgttcatttaccgtgtgattggttgcccgttttatcacctcctagactatcgtgtgcattaactttatctaaactcgtgtttggttgcctgcacgtggaagacgtaaccccgtatgaacagatgtaaaataagccattttaaaattatttatccgtatccacccatacatttaaaacatctatatccggtcaaccacgctcgcgcgagctagattgtgtacaagcagcgaaccaatcaagtggaaatgcgtctggcatccacgacttcctgctcctccacgtcccacttaaccaatgaaactcatccaaaaaggaaggggaagaagccatgaaatgaaacaggtccatccgtccattccgtcaatccggacacatacttgatcaggctcacattatgggcgtttactagtacgcatcacgtcgagtttctagctcattaattcgactaggccaaatgggttttctgctttcgagaatgtgatcggttaggttttggtgtgttgccggtacaagcaggcaactctc

SEQ ID NO: 82946 - DNA, 581 bp, Zea Mays
agtagattagatggatgaaaatgaaaaagagtcgtgtataataggaataagtcgttataccataaatagatagtagattagatggatggaaagtttagtttggaagcacttatcacttcaattcaataaggctatattgtaacagataatgatcataaaaatagaaatctattcgtttatcaagcaacaggtgcttctcatcactttgatacatcgccaccccttcctcaatggccttccatcgtaagtgctatgttatcctgatgtggtctctggtagattgtgttagacagtggcggacgcatgaccaaaattcatggggggccaaaaaaccacattacaaaatcaagcaaggcggtaaaaactatagttgcataaaatttaagttccatatctatcaatataagatacaagttcaaagaagagaagcaaacatataactaagttcttcctgaccgaatcaagtcgtgtgtacattgtcgaatatcgatttcctcgaagggtggggcatcgagaaagaggcgggtcagatgatgtctccggctaagagctagggctcgctggttcgtcaagctcgccag

SEQ ID NO: 82947 - DNA, 511 bp, Zea Mays
gattagcaaagataaactctagtgaaattgtgacttattggagtgcctctttagagtggttatcatagagacattatcgtgggcttggcgtgtgatgccaattagcacgtgagccacctagcttggactcacctccatagttcgatgataccttagaccttttatacgacaatcagaaggagtggaaggagccaccagctagaccattgactcgctcttcgtcacaaacaacacacttcacagccttgacccaccgcaccagcaagatggtggtctacgacatagacgatgacaattatagtgatgctaatgatgatggtggtggttatggtggtgacgatggtgacaacaatgaggtcccatggtaggatcttgagtaggaggtttgagttatttgtattctttttatcactctcttttttgctatttgatgctaaaggggcattgaagggggtacaaacacttttaggcgccatggaaaagcctcatgtcttatccgtgttgcaagaat

SEQ ID NO: 82948 - DNA, 511 bp, Zea Mays
aattcatgttataaaagaactcggactcacaaccatccatgtggttgagatatggattaggcgttgagtctcctccttacaagagaaagccatttacgcttggatgatgatgaagtcatagcttctcctttagcttcgagcccttgatgttccaagcttatctggtctagcatgtggatcgaggtgctgcctcgtcttgataaggacaacctagaagtaaatgaggaattcaccgcgctgaccctctggtaccaccatcaagctaaaggggaagaatgactcgaccaccaagacttagtcctagggagacacatccactctcctaaaaacaaagacaaggaactcttcaaagtatgactcaaaacatagttagtattgtttcaagtaagagtattctaattatgagtattagttattatagggcatcaatggtgttgcataaagacaaggcaaactccacaccacctgagcccagtccaccagttggtgcgtttgttggggtcgagcttgc

SEQ ID NO: 82949 - DNA, 601 bp, Zea Mays
gcgctcttgggcttgtcattgtcttatgtaatcttcaaaccactgttgatcttcagccgacagactctgcagagtcggcttcatgatgttgcttgaggaaactttggtgcagtctttggaaccaaccattttggtgccaatttttagcagatgtagacaccctcgtccccagcggattcaccaaacatgtgtgttgaaactcttttgggctaatcacctaacgaaccctaggccttgtctgctggtagcgagggcctggggtcctctctacaggagtgcggatcatccaagataggtggccaaaccgtccgtgactacgcagagggggctctagtcttctctgagggcgcgtggactgccacgatagggaggtggaccatccttgtatgtgccgagggatttgggatctccttcatcacttggatctcgccccccgagagggacctcgttagggaggaaagaccctaggccatccaagacgcctctaaacaacacagagtcgagaagatgtgaagattggggatgggaaagactaatctagactaaattacgattactcctaggacaagaaatataaaggtaattataatagattgatttg

SEQ ID NO: 82950 - DNA, 1706 bp, Zea Mays
gatttatgtggattgtgctgtagcaaagtctagctaaacaaagcctcagttggattttgcatcatgcattatccacgaatcacagttctatgagattacaatgctactgacgccaaaatgacctgtcctgccacttctacaagagtaacagcttagccaatggtcccacaggaaacaatttcgattttcgagaacggggcatgcattttttcggccctaagttctgttagtcttactacactaattcaataaaaagtaggattagctttcctactataatgctgcacaaaaaggaattcatactcaacttccaattcttttctcggggatttatctgtacatgttcacaactcagccaaaattgatgtctgagatgaacacaactgtggccaaaactgtctcacatccaatcatttctcgggttccaagttgagatgtgtactctcgatttcatcataagcaacggcatgttgaagtgtaacttgaaaaaacaatagtatcacctcaccgaggctctacgtcaataggtttcattgtatctaggaagtatggaccatcttgggagacaaatcccctgcagcttcgttgcagtccttatctttcgtgcttctagaagttttttcgtgcttctagaagtttccggggcacaggacctgaagtttccggggcacgttgttgattctaagagcctcggcttccatccccttcgccactgccatcagaatttttcgtgcttctagaaggcgagggggggccctccttatctttcgaacaaccatcagcattttcaggctttctgtgaggtggatcgaatatttatcatcgccatcagcaacatcacaatccgcaagcccaccagattatgccagaagagaaaacaaaatatcagtgagacacaagatacgaagttcagaaactgaagatagtgcagtaaaacaacaatcaacaagttagcatcaatcttaaccagcaaaagcaagaaaataaatgttagatacaaatgaactgaacatccatctacacttgcagaagattgagataccttgctgggatagattgctcctgtgaatgcattgtaggtgtagaagaatctactctgtcactaaaaggggaaagaaaaggaacttcatgttggttggttataaacaatggaactccaaacttcattgggctcaccaacataaaataggcagcagacaaagaaaatgaaacagacaaacctgtcctcaaaataaccttcctgtcgtttatcagcacctctttcgtctgctttcttcattctcatgtcaaccacactggtactttgctttgtttcggcactctcctcaatctaacaagaacacatgccaaccatcattgcctgactctatagtactccctccgtcctagtttataaggccccagtttacaaggtgtaagtactttttattcttatcccataataaaaggcgtgcttaattacttcacaaggagatggcccctccacgctcagcccctagccccatcccctcatctcccaaccccagccccgtcccctccctccgtggcgtcatcgtccaccacctcagcccctcacccgacctcactccaaacccgacgaacacctccacgaacccccctctcttatggcgtcagggcccacagcaaacactgtttggcttcccagtccgggcgggctaaggttctagagatgcagtgacgccagt

SEQ ID NO: 82951 - DNA, 895 bp, Zea Mays
cacagaaacgctccatcgatcacttgatgggcctcccgatggtttgcctagcaaggcatgccctcgagtcacaatcaggttggatgatcttgacctagggagacagatcaagataaccgagttatgcgcagaaggagcactgatgcctcacacatggaggttgcacatactcgaagagctagaaactcgagtataactcgaatgaagggcgaccaaactccagataaggaggaatgcatgctgtgttaaaatataggtccatatagagttagatagtcatcattgacttgtaaagggataaccctctagtcacctgtataagggcgaggggtaccccttcgaacacatctcatctcgtcacatttcatcactacctcatagctcattagccttctcatagcaattatgctatcagtagatcgacaggagaattcaccctccaccgcccacaagctcatctgtaattcgtgtagtaatactcagatactcaacctcgacaggacgtatggcgttatgcattccagcgacacgaacccgtataaactcatgtgtgatccgacgtgtacccacacataccattgagtctcaatcaatgtcatcgtcctgccgaaaagcaccacgcggggaacactgtggtgcccagtcgagtcataaacaccgacacctggcgcgctaggtagagggtgcgacgttgattcacgatgactcaatgatcatcatcattaacaagttcaagaaccaatcagagaatattctgatcgttcgacatcaagttccagatcaaagattggaatccttcgctagggtcacaagaaccaaaagtgttatcggagttgtttagctctttattatgcagcagtccgaggaggtttgatcaagcacagtcatacatgcg

SEQ ID NO: 82952 - DNA, 882 bp, Zea Mays
gtctcaagctaataaacatcgttctgaatgctccttcgaagtgggtgacttggtgtacctgcatctacaaccatacattcaatctttgtttgctccaagatccaaacaaaaactggcatttcgttactttggccctttcacaattctgtccaaggtcgggtcggttgcttatgaactacaactaccatcctcttctcggattcacccggtttcccatgtgtcccaattgaagaaagcaatttctccatcgatcatcatggctcatttgcctcaaacattggagaggttctaggttcctaaaaaggtcttacaataatgcttgaattcttcacggttgcctcagctcctgattcagtggtctgggttgtcgtctacattagctacatgggaggatgagttgctcctgcgataatgctttccacatgcacctgcttgggggcaagcagactcgcattgttgagggactgttacaaacacagtgttgacgcaaggcacatgcattgcgagggattcagtcattattctagttcaagcaacgcataactgcgttctaaaggatgatactgggcttggacctgaaaagtgcacaaggaagcccaacgtacatctggccgacctagagtggcacaagtgatcgcccgcgtgtgtgtgttgcgttgtcgtattataaataatggcaaaggaacgtgtcttgtaagcttaatcaaaacaacaactctgcttctagaataccaactcagtcacatcatgctccctcttcttcttccttaccccttctccaagtttctcgttacaatcactttcttaaacatttagagaggttggtgagcatttcccctacttcactcttagaacgatgcactcaaccacaaatggtttctc

SEQ ID NO: 82953 - DNA, 642 bp, Zea Mays
ttctcttccaactgatttaccattgtctctactgttgctggcatattgacattgacttcaattctttctccttgtggactggttaatataaccatcttcttggcacaagatatcactccatcatacttggtcaagtagtctattccaagtatcacatcgattccacttgattccaaaattatcagctctactagaaaacttaggcctctaatttcaatcttagtctgagggcatgagtgagtagctctaagttcacctcctggtgatcggattaataatttcttcttcaagggatggtttggtatattatgtttttccacgaatgaatttgttacgaaggaataagatgctccagaatcaaataaaactgatgcaggtatggagttaataagaaacataccatacaccacgtcggcatcctcaagaactgattctgctgtcacatggttgactcttcctctactctggttctgcagagtcttgttctatgtagatccacgagtaggggtgttctggtcattcctctggttgttgttcttctggggtgtctgtgggttacgtctggggcagttgttggcatagtggccaagttcgccacacttgaaacaaccattcggttgaactagagtagttgcattgttt

SEQ ID NO: 82954 - DNA, 507 bp, Zea Mays
aaatgcaactgtggccctcgacaagtacatgtgggttgtggtgacattcaaggggagcctttggtcaacatatttgtcaaacattattgtttgcactggcaagagaagaccgtcaataggtgggttgcctagctagtttggtagctacacttttaccccaaagattagaaagacttcagaagcgattttcgagctagtgccttgctccaagaatcgatagggaaccaactggagtgagggttggttttatgtgaaggttggtggggagggcgaagacgccgccgactggtcgaaggcaagcgagatgctaccttttcaatatacatcatttccatggttcgaggctgcggagggagattaggacgaggccgttttttgataggcagcggtctacaacagtggtcgagaattggtggagttcgtggtctgcgtcatatggctcttgagccgtagttggacagttggtttggttcgacgcatgatgccattggtgaaggtgaaagtgtg

SEQ ID NO: 82955 - DNA, 494 bp, Zea Mays
gccgattgctccgttcgtagggcatagtggtcaccccgagttaagtaagaatgcaagtcaatcataaatgagtcaagtatctttgaaatctctctttattgatgacgtatttcccttatacagaatacacggtcaccctggttgttttgagatacagctaggggtaaaactttcggaggtgctctatgttccaggagttcccgacttctgtaccatccatttgggtgaggcgatatgatccggggcgagtgacttctgctactatgaaaggtccctcccataagggtgataacttgtgccgtccctcccccgttagaattcggcggaggactaggtctcccatcgaaaagaaacgttgccgcacagctttgtcgtggtagcgccttagagtctgctggtatcgtgctgattgaatcaccgcattcagtcgctcttcctcgagtacgtcgatatcctccagcctggtggcttcggcttctgctatgctttcgaaa

SEQ ID NO: 82956 - DNA, 476 bp, Zea Mays
gcgcatccaaatttaaatgcaatggacatcactaatttgccatagtgtttcgtcttcaaatcttcaaccaaataacatattgcctctctaagcatgttgtaccatcgtagtgactcattccaccatactcccgaacataaatattccatgatgctaaccataggagacatataaacgtgtatgtatacaaaggaaaaacaccacatagttaagccacatttcttcacatccaaacatacacacatcaatatatacaactagagagagtgtgcgtagttgtggctagattgagattatgcatgacagtaactatcaaaatttggatgtttaggtttgggaggcattaaggaaagttttattgaggggttcaagagcttcacaaggtttctgtggccatcttctagcgcgacctagaataagtgacccggtttcgtggaatagcacacggtgatgcagtcactttcttagaatgcaat

SEQ ID NO: 82957 - DNA, 822 bp, Zea Mays
cggttccacatggaccagtacgcgcgtcatgaggagtaaccacgtggatggaccccggtttggctgttttaaataaattagttaaaaatgttttgttaacgggataatgagttaaactatatttctatgtcacgcccgagtggttactcattgctacaagtctatatatataatgggataatgagtttttactatcgttacattatcagctatatcatattagatgcatggctcctcagactagaaaacatttagtataggagactagctagaacctttagcagggatactgcctagctacatgacatcttccaggctgaaattaaaatcattagaaacgacggttactcattccactgctgcacgaggtcggtcaatggcttgcattgggctggtgagcttgcaagcaagcacggttggtgcacgaccctcaatcaatggagaagtaatgccagcacgcacgggatcatatccctcagctcgtcgtcggttgatcgttacagcaacagggaagcagccctccgatccgccgatgggtccgcgtctatgatgttcttttcaactatggtttatttacttctttttttccccctttttgaaaagacaaatgcgcgaattgaagtctgtgtcgcgtttgtcatcatctctggatctctcgctcccaattaaattgagtgtgggagtactacacttgaatacggcctcgccgacagtctttagctaggttactttttggtttctcttctcgtgcatgaatcggacgttttaacggccggctcgattggtgagctgctcaaatcagacgatcgagtagctaggtgt

SEQ ID NO: 82958 - DNA, 381 bp, Zea Mays
ggggaagtcgatctcaacagctcttccctcctgcggatcgggatatgctagctttgccagctcccctcgtacgggtcgggaggtgtcggctacaccaatagactagggggaaccatcccctttcaaatgagcttcgatcctctaggctacccttatacgacaagcacttaaaccagcaagtacacggaattcctagaaacctcagagtacatagactttgaggtagaggatgatctaggtccaggcctagacttctccggactccgtgatcctaggaccatgcgacatttcttgtccgcatgtgactacttcctctccaacggctccaacgactacagctccgacgatgaggggtacgacccgacttgggagtgcctccac

SEQ ID NO: 82959 - DNA, 324 bp, Zea Mays
ttcacgcaccaacgcgtagggggggcagaacggtcatcagatgctggacagctttgggaattgaggacgctggggccccttccgcaaaacaccatcgtcaggccactccattggtgtgccatgggtctgccactaccattgtcacgccttcactttcaccccttccctagcgatctttattttcttcccttctggagtacgtattttgtttatttggcttcagatgtctagtcgcctcgtctacaagagaaaaaggcggttggcgagcgagtgtgccacacacgctgcaatttggcatgcatggcaagcagtgcaacacagctg

SEQ ID NO: 82960 - DNA, 673 bp, Zea Mays
gctagctgaaaggtacgctgtggtgcctggccagggaatccataagatcgaggggcaaggaatgaaccagcaggtcacttgataactatcctatgtgttcccatgccactagaactttggtagtagtatgcaacatgtgctataaggtttatctatagtgtcctacccatcacaaagagctttgccacctaaatgacagttctacgagcaataactagactatcaaagtactgtaggaatgcaagtgaataaacttgagcaagtgcaaaaacaaaattgtggtaagtaaatgagatgagaaaaaagtgtgcaaacactcatcatgatggtttaccccatgttattggtgggcaaaaccctgcctctagccaaagttgaacctccaccaaggacattctccaattaccaaggttctcctagtccaaaccttagactatacactataaatacttcgccatgactaatgatccacttactacaaaagcaagcctcactactagcctcttatcctgaaccctatgaattttaacctagcaacaaatgacaaggtctttttgctactccatataagaggacaaaaggtcaccaaggatgtcagcgagccacaaaggccccaatgataccttgggtacaagtgtggtacaccatagaaccaacaacaacttgagatcac

SEQ ID NO: 82961 - DNA, 629 bp, Zea Mays
cgctcagaaagaaagtcttcgacaagaatgaaaagttcacaggaaagtggatcagagagctgtcgtatgttgtttggagcctgagaactcaacctagccgagctctgcatggaaacactcctttcttcatggtctatggtttggaggtagtgctacccgctgatctcaagttttgggcaccgaggttaatctttgaaaacatagtagaggctgaggctactagactggaggatgttgatatactagaagaagaacgattgaatacggtgattcagtcagcctggtatcagcaaactctgaggcgctatcatgacaaggccatacgacatcgatccttcgcggtgggagacctcgtcctccaccgaattctaacgggggagggacggcacaaactgtcgccactatgggaagggccattcatagtagcagaagtcactcggcctggatcatatcgtcttactcaaatggacgacacagaaattgagaactcatggaatatagaacatctcaggaagttttaccccaagctatatttcaaaagctattgggacggccttgtattctgtaaactgggaaatatatcatcaataaaaagacttcattctcaaaggcactcaaattgtttactg

SEQ ID NO: 82962 - DNA, 418 bp, Zea Mays
gaacagcgggtggcgccaccacccgcatctcgagcgaagatgacctcttacaaaccgaaggtcaggagctcgcctacccgaagaactccgctgtccacctcgcccacaaaggagtggacacgaatcactcgaaaaaaggaagcaaacaccccgagtcagtggacgagaccacgctgagccatctttccgatgctttcgccctcaaaggaggctggctcctttctaccccgacatcctcttcattggggggagattggagtcagcacccatctccaacgatgagcctaccatgcaaggggacggaggaacagacgccggaacatatggcgacatcacaaagttggggaacgggatctggcgcagcccgtatcttgtgacgaaacttcagaagtgggagaaactcccgacgagcgagcac

SEQ ID NO: 82963 - DNA, 588 bp, Zea Mays
ccatggtgacaggaacattggggacagtgaggtggagctttctagtggtggtggcgaggaagttgagggtgtcgaacatgatgtgtctccccggcacaaaagtttcgccgctagcgaatgttgacgcgtgggccatcggagtgatggatgtctattggcacgctaagagtccccctaccttgcgcaccaactatcatggtttcagaaacggggggacaataaagatttgtgttcggaggggaaacaagcgtggactcactccgaatggtgagccatggagactccggcgatgggtttgagacagtgggttatactagttcaggcttgcaagctagtccagtgttgtgctaaccgtagtattgctcgaaggcatgttataactggtgtgctcttgtctaaagaaagaggggccctcctcttttatagctcaagggtcggactttacagtggggacttgtattctactggagggagctcggcctattgcccttgggtggcgtggttcttctgacgtcgtccgtagggtcatgcgtagccatactcccatcatggtgtgttgtcctgtctgctcgtcatatgggttcctat

SEQ ID NO: 82964 - DNA, 957 bp, Zea Mays
ttcctggggcatatcttgactgcagaagggatagaagtggacccatccaaggtggaagccgtttcaaaatggaaacagccatccaacgtcaatgaagtacgaagctttctgggaatggctgggtattaccgccgctttatcaaaggattctccagcatagcgaaatctatgatcgaacttctcaaaaaggacaataagtttgtatggactccaaaatgtgaggaaagtttccagatcatcaaggaaaagcttacaaccgcgcccgtgttgacactaccagatatacaccaggatttcgtcatcttctgtgatgctacaaggcaaggcttagggtgtgtcttgatgcaaaatgagaaagttattgcctatgcatcccgcttactcaagccacacgagcagaactaccccacccacgacttggagttggcagccatagtacacaccctagaaatatggaggcactacctgattgggaacaaataccacgtcttcaccgatcacaagagtctgaggtacatcttcactcagccggacctcaacctccgtcaaagaaggtggcttgaattgatcaaggattatgacctcgaaatccattaccaccccgggaaggccaacgtagtagcggacgccctcagccgaaaacctttcgggattaaggggaccaactttttagaagattggaagaaagaatcagctcagctaaatgcatgtctgggagacaacggtagcctagaagtcaagccaatgctagaagatctcgtatgcaaggctcaacgcctggacgcagagacagccagacttatggaaagagctcgcaaggagcaacttccggatcttaggacagatgatcaaggagtcctttggttcaagaaccgtctgtgtgtaccaataggagaggcacgagaagtcctactcaatgaagcccacaactcagcttactccatccacccaggaacc

SEQ ID NO: 82965 - DNA, 495 bp, Zea Mays
gaccatcgtaggaagggtctgcccataaactgctcaaatactgagtgaacccccaagcaatcaacatggattactcgggggctacatctagcatatgcgcttgcacacacccaagaatttggtgctaagagaaagcctccatgcaactccaaggtgttacatgaaggctcgggggctgctggtgagtaaccgggaaccgtgtaccgaaataggcctagcctcttcaaaaacgacccacctaccgaccaagtctatgtcaagcaactctacgaggtggatccaccggccaactttaagaggcggacaagctgacaaactctccggtgaacaactttgatgaccaactcggatgaccaactctctgatgaccaactccactgaccaactccattgatcaactctgcgaggcagaccagctgaccaactctccgactaccaacttcgccgaccaactctatgaggcggaccgactgaccaactctccgatgatcaact

SEQ ID NO: 82966 - DNA, 848 bp, Zea Mays
gaattttttaattgtgcttttggtaggtcaatgatcggtgccaatgttaggtgcccttatagcaagagattaattatttccatgaaagaaggattatatcaatttatctttgtaagaatgtatttatgcttggctttaaggtgtggtggaccacaacgaggaactatctcatccgaatgtatcgaaagttcaagcagatgaagagggagagtacaatatgatgaaagagatgtttgaggatgcacgacatgagtttctacctaaagactatgaggatctgcctccacccgtcgattatgaggatccacctccagctgatgattataaggatcaacctatgccagagattttgaaattagttgagctctttaaggcttctaaagagccattgcataagcacacaaaaagtgtccatcctcacttccgtgacttggcttatggctgttaagtccaagtttacattctcaaataattgttacaaggaggttctaaacttgatcagtgatgtacttccgatgaatcactagatgcccaaagacatgtattgatagaagaaattgctcttaggtctcaagatggtctatgaaaaaatggatgtctatgataataattatttgcttgttttggaaagagacaatgaatgagaagtgcacaatatatggcgagtcaaggttcatagaggttgtaaaagaggatgtgttaccatgataacaaatataacacttaagtagattcgttgcatgcctcttgtatctcagtacaaacttttgtttgtctcgaagaataccaccagagatgtgagatggcacaaagaagttgcaggtgacaatcctgatatgatgacaccc

SEQ ID NO: 82967 - DNA, 405 bp, Zea Mays
gcgggagaaagatgcaagcgtgaaagcgcgcgatgtgagcctttagatgaagatccaactgtagatgcatcttttacatttaaatccccctgcggcgtaccggccttcacaaaaaccaccctgcctttacccgccgcagcacctcctgttcctatcctgccgccgccttgaaatgccctagcctagacgccatcatagcccctgacccctgacgcgcgcatgcccttgcacgtaggtgtggctgctccttctacaggacacgcacatgcccttgtcgtaggtgtggctgctccttctacaggacacggcatggacatgcatggaccacaggaatcagttgagggcgaccgctcaatgttggacacagatgtagatcagtacgcgaagcaacatgccatggtaccg

SEQ ID NO: 82968 - DNA, 439 bp, Zea Mays
gcttgaactatttttcaaatttgaaacgataaggtaattgaacaagttcatatttcttctttgttcccttcatcttcgtcatcccctagtcacttgacgttggatacgtccggttggctaggtattcctgcaccaagtccctagtgccgatttgttcagccactaccctgaattctacctcgaccagctggcatgctgaccctagatgcatgttgcagagaggcctggtcattccgaagtttaaggacagcagacacatgaccatcgtcatcagtttccccctcatcttctcatcagccttgatgtaaaaccattcacctttccaacaagttggccatttggtgcgataactgagaactggagccttcgtatccttgcgatacgcaaaattgtagcaaccaaaattttcatgaagaccgtctgccctggccttcgtctg

SEQ ID NO: 82969 - DNA, 439 bp, Zea Mays
cagaccctgaggcgctatcatgataagatatacgacatccatccttcgtagtgggagacttggtccttcgccgaattctaacgggagaaggacggcacaaattatcgccgctatgggaagggccattcatggtgtctgaggtcactcggcgaggatcatatcggcttattcaaatggatgacacagaagtagggaattcatggaatatagagcacctcaggaagttttaccattagcaagaactatcagagcaacgttgtattatgtaattggaaaatacgtcatcaataaaagattttactcttaaaggcattcaaactatcggttatccatcgacttcgacttgattaaacttggaatcaaaacacttactcaacctagggtgaccactataccctactaactgagcaatcggcttaagtcggcaatgacttaagac

SEQ ID NO: 82970 - DNA, 1008 bp, Zea Mays
caactgcagatttagaggaaatatcccttgcaacaagttcagtagttgcctaatatatatatttgttagtaatcaacggcataaataattatgtattgtagtgtacatatataaaaatataagaatatgacacgacatgactaacttctgtcaatggggttctgtcaaactgtggtgcaccagatgcgggagtatcatgtttaacagtattttgtccttcctgaaaaacaataaaattattaatatatatgaaatcaaacataggttataactaatattaacataatatgatgaaggaataaatactgacagtatttatgggtggtgttaattcagaaacagcacgcttgtcggttgttgaagcctagtgaataaaataaataaaaacatgcatctatattattgttactatcataaattgtaattgaaagtataataattgggaataaagtaaaacaaacatttgattttggagtcttgtcaaatattgggacatccataactgaatctttttcgcaaacgtttccactgacaacctgtaatggaaaatatgaaattggagtaaatgataacttgtatgctatatttaatatatgattaatatataaagtttgtatgaaaaaacttacatgttctgatactttgttatcatcactaggaacatgtatttcctgatcgtgttgctgatgatcaggggttcgaacaggaggagtggatacaggagcatttgttgggggcattgaggtaatgggatatctacatttgaacaatataataataaattagttgttgctgaaatgaaccagaaatataaatgtagagtaataaaaataatggttaaacatacatattagcacaaactacatcaatatactatcggggtgcataaaataaataagagttttcaaaataaaatcaactgaaaggtgttggtgatgtattagtgtaaatgaatgcataagtaatatatgctatgttgcataaaataaagtatttgaaatcgtatac

SEQ ID NO: 82971 - DNA, 870 bp, Zea Mays
cggacaaggagagcgagggcggacctagagatggcttgccacgacgcgacgtctcacgatggcgtggacaatagattcgggggaacagtgaaattctccggttatggtggctaatcgagggtaggggtgggtgctctggcttcgtaagaacctagcggagctagcagcacactcaatttatagtgttcgagagcggtggctctgaattttgaaaggggagactggcggccgaagagagggggtgagtcaccggcgcgaactaccgtggcgttcacctgagcaatgtctcaagcgatggacagactacctatggctatctactgtgacgtggtaactcttctaagtacgtggcgtggctacaaagggcggcaaactccggcgaggacacctcagtcaatcgcgcggcaagtggcacagtgaaatagtccggtgataaggctccaacccttccctgcgttgagatctttcaccgctagccgttatcctcaaaccagagcgcacgaatcgcgacgaccggcttcaatcgtggtgtaaggtcaccggcggcgagatacactgaatctgaagatcttttcgctactgtaccatcaggatcttcttcagttgttctgacatagcatcttcagaggtgtttttcttcaatttctacgtgacaagttaccgaccggtttacaacaaagttattaacctatatataggctccaattcgaccatagggacgttggtcatccgctcactcaatcaagctcaaatcggctctaaaactcgtcagagttcattgtcagccatgtttgagtcttctgactcgactgacagccaaactttctgcccattatactccaatttttgtatagcatcaaggctcagtca

SEQ ID NO: 82972 - DNA, 416 bp, Zea Mays
catgtggttaccggcaaacggaagctggctattaggatcgatgggcagaatgattggaacaacagtactctatctcttactcttgggggccattgcagtctctcaagtgaagtgagcgggctcaagaactcagaaaacagagaagcgatggaggaaaaagcaagagttagggttcagaactcaaggggatgtgtcagcataaatatgagttggctcgataagtcgggcgcaaaaaatgccagatcataactcagaaaagcgaagatcacaatcatcactcgggcattacctctaaaatgccagcgagccactaatgcgcaaacaaaagcacgcaacagtggataagcaaataactgcattttttattcataagggtagctcgtcacaaacttgaaaccgactcattatgagtcggc

SEQ ID NO: 82973 - DNA, 2619 bp, Zea Mays
aatactattgctaccaatttcattacagaaaaaacaaccaaatccatatttgtgttacggtttattatcaagtcaggctaaagtggatgccagagcatgcattgatgaaaatagattgaactatattattaacaatcataaaaacttgaggattgaaagcatacaaggtattacagatgcaattagtcgtggttgtattagtggcgacgaagttggtaaaactatcatactccctgcgtcacatacaggaggacgaagatatatgattcaaaattaccatgacagcatagctatctgccgagttcatggtccgcctgatttttttgtcacttttacatgcaacgcaaactggcctgagattttggacagcatgttcgagcgtggacagagccctccagacagatctgatattatagttcgagtatatcatatgaaattagaagatttaatgcatgacataaaaaatggatctatttttggcccatgcattgcaggtacgaccacttttgtattaaaaacacatgtatatatatatatataaagatagcaaaccagtattgtacaagtacttcacaaactaataaaattaccatcatctcctacatgcagtgctttacacaattgagttccagaaacgaggactgcctcactcgcacatcatattttggatatcgaattctccatcacaacctacacccactttcatagactcttttatcagtgccgaaattctagatccaacaaccgatcctcttggatattgtttagtggcagaacatatgatgcatggtccatgtggagcattaaacccaaattccccatgtatgaaaaataatagatgctcaaaaaggtatccaaaagaattccatgaagaaactaacttggacgaacaaggatttgctacatacagacgaagaaacaacggtcgctatgtcatgaaaggcggttacagattggataataggtgggtagtcccatataatgagattctgttgaagacttaccaagcccacatcaatattgaatggtgtaataaaacaatatttataaaataccttttcaagtatgtaacgaaaggtccagattatagcaaagtatatttgcagaaaataagaaatggcgaagacataccttacgatgaagaaattaatacaagaaacgaggtcaaagaatatttggatactcgatatttatgtgacaaggattcctgttggcgtgtgcttggatatgagatacacagacactatcctgctgtagaacgaatgccggtgcatttacctaacgaaaattacataacatataatgcaacaagtaatatatcaagtatattaactgaatcttttctccggaaaacaatgctcactgagtggttcactaccaattcaaatacaaatgcagcgcacaatctaacatatatagaattcccatctaaatggcgttgggacgacaaaacaagaacttggaaaccgagacatggaagggaaggaaaaattggtcgtatatactatgtacatccatctacaggggaaagatactatctaaggatgctactaatgatcgtcaaaggtgctaagagctacgaagacttaaggacatataacaatatgttacacccaacattcaaagaagcatgtaaagcacatggccttcttaatgatgacaatgagtggtataatgcttttgatgaagctgccagatgggccacctcagagcaactgcgacatctattcgttacaatgcttctttattgcgaagttggagatgagcatacattttttgaaaaagtatggcaattactagcagatgatatccaatataatatgagaaaaacattgaaccttccctcttaccagatgcccataaatgaaataagggaccatttacttgacaaattatctatacttttcaataagtgcggctcaaatataagggattataatttgccacaaaaaactaattctgcgggatcatcctacggtaatcgatatattgaagaacagttatcatacgatttcaatgctttattaagtgaagcgcagaatcttcacatgaaattgaatgagcagcaactgtatgcttttaatacaatagttcatactgttttatcaaataaatctggattcttcttcttatctgggtatggaggcaccggaaagacttttctttggaatgcaatcgtgacacatttgagagcgcaaaaaagaatagtcttaacagttgcatcttcaggtgttgcttccctactccttccaggtggccgcacagcacattcaagatttaaaataccttgcgagctggatgaaacatcaatttgtgatattaaacgaggttcaaagcttgccgagctgattgaaacaacttctttaataatttgggatgaggcattcatgacacatagacatgcttttgaagccctagatcgatcacttcgtgatttactttctttgaaatctgcccaagcagctcaatgtccttttggcggtaagaccattgtattaggaggtgatcctagacaaatactacctgtaatagagggcggcactcgggcacaaattattaatgctgctataactaattcaccactttggagttcaataacaatcttacatcttacacaaa

SEQ ID NO: 82974 - DNA, 1082 bp, Zea Mays
gcgaaacagcagtatccaaatcgagcggacgatgaataaagactatggcccgaatttcaggtgccagaccatctatgaatctattgacaatagcagcaacactaaactggggatcattagcaagcatttggtgcatcagagtatcgaactgttcaacatactcaacaactgtatcaatttgtctaatgtggaaaaattgtcgaataagatagttgtgctgatcacgctcaaagcgagcacagacagctgcacaaaattcagaccactgtgccaaacgtaacctcggatcggatgattacaaccaaaacgctgctgacccgacaaaatgcatcgtggcaattttcacccaaagctcacggggtatggtgaacacatcaaaataggactcacacttagctttccacattttaggatgatgtccatcaaattggagaaaatttagttgaggtaatgtagcagttaagcgagactgatataatgcccaatcaggatccatagtatgaacaataggagtatgaaaagcatccagtggtgaggttttggaagtacctttgaccggaggcggagttagggtggtcaccaccccaaatccatcactccggtgcagtggtgtctggtgcagagataaacccagagatgtcgacggagggaatccaggatctgaaggcccaacatcgaagggaatcttcggtgcagtggtgtgcgtctctttacaagccagcaattcctccagtttatctgacagagaacccacatcttggcgaagatgcagtacttcagttttgatctgtggcttccacgaagaaaaatccctcactgctgcagtattaacatccaaggcttgcttgatggagtcgttttgaagttgcatcgcttgcagcagcgctgtgagatcactaacgcttttctccatggcttggagctcactttgaagacgagtcttgtactgcgggcgaaggaggtactccggcggatccgccaggatcactacgagaatctgataccaattgtaatcacacccagggatttagcgacgatgagcaccgctcccggtactctccctctcacgaagttctctgttt

SEQ ID NO: 82975 - DNA, 379 bp, Zea Mays
cttggtgatcttcccaatgatgagaggcaagttcactttgagatgcctatgagtccaggtgatgcagagataagtgctatgttggacatgttggctggggattcttctgactcgatccctgctgaaacaatggttgttgcaactatcccagagcctgaaaaaactgtgaatactcaaaggcctgatggtactcgcccgaaacgtctccgccaggccagtcatccaactgcacctgccgaggggaagaaaaagaaaaagagacggcttcggcgagtgtcgcgtttggactaggatgctggcccttctgctcctgctgctgaagaagtaccggtggaactctttactggagctgatcccaatgggtgtggccctgctaatg

SEQ ID NO: 82976 - DNA, 531 bp, Zea Mays
caggaacggcaggaaatacgataggaaatgaggcaagaacgccaagaaatgtgccaagtacggcaggaacaacaactactaccacctccaccaccaccagctccgcccagggataaataccaggagtttatgagtcacaaaccacctacattctctagctccttggatccactacaagctgatgactggttgaagtctgtggacaagatgctcaacatagcccaatgtactgacagggagaaagtactctatgcatcgggtcgccttaccggccccgctgcggattagtgggatgcatattgcgctgctcacgccgctgtcaacaccattacctgggcagaattctccactcaatttaggaattaccatattcctgttggccttatgaagattaaagaaagaattcctatcccttaaacagggaggcgtgtccgtaagcgaatacagagacaagttcatccagctatctcgatatgctcttgggaggtcgatgatgatgagaaaaagcaagagctatttctagaaggtttg

SEQ ID NO: 82977 - DNA, 755 bp, Zea Mays
ttattcaaacactggaatgacaccaagtccaattccttcttgatttctcacttttggcctttctatcaaagtctgcataacaagtgagcgtctgaagcacactagtcaaacttggacttgtggccatgcttcttgactcctcttgagctgtcatacattgagccttatgatttgaatcatcacatcttatatgagttaaactgatggcttcaaatcatgtcttctaatgttgtgatcctcagcacaatatgactcttcacaatctaattagtttcttcattgtagccatgcatggtacctcagtccacaaaccatctgtttaaccttcaccttcccttggtccttcgaagccttttccttgttgtcttcaccctaaccatctatttaaccttcaccttcgcttggtcattcgaagccctttccttgttgtcttcaccctatcagattgtcgccaaatcacatcacattgaaaaccaacttaattaatgcccatcttttcttctcatcttattctaacaaagattactcaacattgtatggcttctcttatgcttgattagtccctcgaccaaatgcaattacttacttcttcaccttagccttggtaccttgttcctcttgaccttctcctttgcttagtccatcgaagtccttgtccttgatatcttcaccttattaagccttctttaagtcacaccatcttgagcgtacattgaatatctttcttgaatatgaataatgcccttcagttttct

SEQ ID NO: 82978 - DNA, 1190 bp, Zea Mays
gcaaaagccgcctaagggtgcaaccggataagcacaacaagagcacgatacgaagtctttacaaaaagacaaatccgagcaaaagtcgcctaagggtgcagccggataagcacaacaagtgcacgatacaaagtctttactaaaagacatccgaacaaaaagtcgaccaagggtgcagccggaaatgcacaacaaatgcgtcatacaaagtctttactataagttatccgagcaaaggccgcctaagggtgcagcggacttgcaaatacgcgacatcaccctaacgacgcaaagtgtattacgatcaccttaaaggtgcgatgtctctgctatctgacacggtcgaacaaaaatcacctactgacgcaactaggtacgtgtcataagcatccacacatcgccatggcaagcaaagtccccatctcatttcacaacaagcaatgtcgtcatagtttacatacacacagcgaagggccaccggccacattgcacaaataatacaaatcgcattttgttgccctccctctctattgcgagccgggggagggcagcgttttcgctcaccaccgcaacacataagcgagggcagcaaacatgctacatcagctcagccttcgggataaggtctgcctcacaaaaattaaacaacatcatcctcaactcctcaccttcaaaaagattccacagatccccctccccaatacacgtcccagaagtcgaggtcagcaaatctcgttggccacccctttctacccgaagacgggttcgttccatccccatccgtcgacgcctaccacttcgcgacatctcgccaacattatgcttcgacaccactctacgctggaggtgctcttcgatcatcaccctagccgggggagcagacgcttcgcgcacttcagactgcggcaaggactccgtcgcggccacatccaacgcaacaaaataatccagtccgcatctgaagactcctcagtccacgaaaacggactcccaaactcacccccgtcagatgaccaagacacagtttcagaaccagacaaattttcattaataggcactgcattcgcagccaccacaaaattaatatcatcagtaagggttttttgcgcaggcccagacgttggaacctgcacagcaaccgactttcagtatcacaaaaataaagtcctaaacccaacgcccctaacacg

SEQ ID NO: 82979 - DNA, 730 bp, Zea Mays
cgggagtataagatttagcttcttctgtcacgtcctgcctcgctaccatgccaatatctggagtttgttgctcagccttatcctcaaacacggctggcttcgtctcaataggcactgaaggcccagcttcggcttcggcctgggctgtggcagcttcggcaactttcttcgtaggagcaggagtcaaggcttttgtggtctccatgacagcgtctagcatgctagccattctccttctcttgggagttgtggcgggagcctttgtcacctttggcaattctgcctctactggtgggctctgaatttttggcatcatcactgttttttccaattctggctctctggccgcatcatctttggcttaggctagcccgattataagcaccttcgacactacaatcgatccttcagcgctctgagtggagggagcaacttgttttgcttcgacagtggaagaggtcccatcaccaaattcaggcactatgaccgtttcaatatatcgaggtcggtgggtcaaaacctttattttcttgcccttcggcacagcagtggtggccgaagcggcagtttccctcttttttccttgtcttcttaaggggtagcagtaatcaggatatatgaagccaattgcatcaaaaaccatgttcaatcttttcttgccccgacccccgaaggctgaggacaaggcatcatcttcggccctggtatatgtcccaagcaattcgtcgct

SEQ ID NO: 82980 - DNA, 829 bp, Zea Mays
gatatagtggtcaccctaagtcgagtaagcgtgagcatgtcgcaccgacttaagtcgttaccgacttaagccgattgctccgttagcagggtatagtggtcaccctaagtcaagtaagtgtgagcatgtcgcaccgacttaagacgtcaccgccttaagacgattgctccgttagcagggtatagtggccaccctaagtcaaataagcatgccgatttcaagccaagcccaattgaagtcagttgtatgtcaggagtctgagtgcttttggaagatgaaaacttcattgatgatgaagtcctcagattacagagtacaatgttccttcaagaattttgaggcctcgcgaaggatagaattttctgaggtgttctatgttccacgagttccccacttctgtgccgtccatctgagtaagccgatatgatcccggccgtgtgacctctgatatgatgaacggtccttaccatagtggtgacagcttgtgtcgtccctcccccgttagaattcggtgaaggaccaagtctcccactacaaaggatcggtgccgcacgactttatcatgatagcgcctcaaggtctgctggtatctagccaactgaattactgtgttcagtcgttcttcctctaacacatcaatatcttctagcctagtcgcttctgcctcggctatgctttcgaaagttaaccttggcgtcccgaagattagatcggcaggcaacactgcctctgatccatacaccatgaaaaatggggtaatcccatgcagagcccgactgggttgagttcttaggctctagactacgtatggaagttctctgatccattt

SEQ ID NO: 82981 - DNA, 804 bp, Zea Mays
tctagttaggtctgttcaaatgtcgggaccggtcgtgggtcgtttggtatggcctgcgtccgacccatgcttagtgtcagatcggggcgggttgatccgtgcctccccgtcgaacgcttcgagtcagagtttttcaggttgggccgggtttcgggtcaaaaacatgatctgtacccggcgtggattgttgcgggtcaaaaaactatgactcatgcatgcccgtcaattggtcaggtcatatttttttcgggtcggttgggtggctcatgctcaaatctaattctaatcatatcactagtgtcggtgtttcgaacctcgctctgacaagtaaatttattgtgcatgttcccggctccggatggtgtgtgtgatggacacaaaatttatattggttttggcagtacgtccctatttccagtcattgatgcttgcgctaccggcaccattgatgattaaaactcgtagtggagctcccaagtctcttatcggagtggaaatggagctaagagctacagagtggagtcctagctaagtcttgggactcttggcttggcagcaaggctccggcctttgagtcctcgtcggtgctcctcctcctattcgtcggttcgtctggggtccatcctgggtgcgtattcgaaagaactccccactttgcctaggggtcaacccctccattttataggccagaagagaggtcagccaacagtggtttccaaggaaggagccataaggcaagggtaaaaacaaacaccgggtagagccacacgtactcttgggccccgggattgcctaactgtcttg

SEQ ID NO: 82982 - DNA, 1672 bp, Zea Mays
ccttgggacctcgtcataggggtctttccacttatgaaaaagaatgcctagctatccttatggcagtggatcagtggcgatcatatctaattggtgatgagttcattattcggactaaccatcgcagcttaattcatttggatgatcaacgcctgacaacaccatggcaacagaaagccttgaccaagatgctgggccttaggtacaaaatttgttacaagcaaggacagaccaatcaggtagctgatgctctctcgagattaccatctgatcaccttctagcagtgactgtggttcagccggattggcttcatagtttatctgcaagctattcccaacactcggacactgcatccttgctgcaaactctctcagtacagtctccttcgggtccttacaccatcaaagatgggctcattctctacaaaaaacgagtattggtaccagctcaatcagaattccctaagaaaatttttctcactttccacacatcccctatcggaggtcactcaggatttgctgtcacctaccacaaagtcaaacaacttttcaggtggtttggtatgaaacggatgattcaagattggtgtcaacagtgcacgatctgtcaacaggccaaaaccgagcgagtcaaataccctggtctactgcaatctcttcctgtaccggacgctgcatggaaggtaatctcaatggactttgtggaaggcctcccgcagtcagatcacttcaactgcatcatggtgatagtggacaaattctccaaatacagtcattttattcccatgcgtcatccctttactgccctgatggtggccaaacaatttatggacaatgtgtttaagttgcatggcttcccacaagctatcatttcagacagggataaagtttttaccagtgccctttggaaggaactcttccggttgattggtgtagagcttcgcatgtcaacagcctatcacccccaaacggacggccagacagaacgagtcaaccaatgtcttgagacttatcttcgatgttttgttcatgcttgccccaccaaatggaaacagtggatttctctggcagaatattggtacaatacaagttatcactcttcccttcaactcactcctttcgaagttctgtatggtcatactcctcaccagttgggaatggacttgcgtgatacttgtatggttccctccttgcagtcatggcttcaggaacgtaaagtgatgattcaattggtgcaacagcagctccatcgggcacaacaacgccagaaacgtcaagcagacaaacataggactgaacgttctttcgaagtgggtgatctagtgtacctgaaacttcaaccttatgtgcagtcctctctgatcagaagagctaatcacaaacttgccttcaagttctttggtccgtatctagtgattgccaaagtggggtctgtcgcctataagctggacctgccggcttcttctcacatccatcctgtttttcatgtttccttgctgaagaaagcgctgggcccccaagaacaggtcagctctgagcttccttcattttcagatgctttacagtatccagaatctgtgttgcagcatagaatgcttcaccgtaagggcactcaagttcctcaactcctcatcaagtggtcctcctggccagctgaccttgccacttggga

SEQ ID NO: 82983 - DNA, 618 bp, Zea Mays
tagtcttgaccatgatgtcatcgatgtatacctctactctgtccctaattaggtccccgaaagtcttactcatcgcccgcacaaatgtcggcaaggcgtttttcagaccataagccattacgacatagcagtaaagcccatccactgttacaaaagcggtatgcttcctatattccctagacatatggatttgatggaaaccagagtaagcatctaagaaggacaagaggtcacaccaggaggtagaatccatgatttgatctatacatggaagtggatacaggtccttgggacaagccttattaaggctggtgtagtcgatgcacatccgaagcttcccattcgccttggggacaatgactgggttggccagccacactaggtgatgaacctcttcgatgaagccggcgtctagcagcttccggacctcctttcggatgaagtcctgccagtcaacagactgtctccgaggcttctgactcaccggtttggtgtcagggttgatcttcagatggtgctcaatcacctccttgaggatcccaggcatctgcgacggctcccatgcgaacacgtcggcatttgcctggaggaaggcgatgagcgtgagttcctattttt

SEQ ID NO: 82984 - DNA, 644 bp, Zea Mays
ctcgggtacggtggtcggagtaatttagtggccggagcatatccacggtgcgatatttactgaccccaagcactatccaaccgatccgggcgtcaatcgccaacggcgagcacgaatccgagcgcacagctcgtcgacggcgatgtgatctgaacttgagcctatccggttcactgtaccattggaacccctatttagttaacctcacagaccaactttgagttcgattttctcctaaatttacatggcaacttgctgatcgactagtaccaaagttgttgtctaatgatccatctataaaccaactgcagtcaacctactcaaacatccccgggatcatcttcaaaatggcccccaaagttcatcttatgtcactgaatatccaatttcatatttcagacagactgacagcccaacttggggcacacttatctcagaattcttcatggtaccaaggcatgatctctatagtaaagttattctcctttcatagatctacaaaattgatgtggtgacctagggcaaaaactttataacttggcaaatatagggctccaaagttgagccaatcccactgaaattcagacttagccaatagagttcaaatagggctttttgcaaataagcccaaatctcaaggttta

SEQ ID NO: 82985 - DNA, 586 bp, Zea Mays
gcggaacgccgtcaagccgcctcgtgtcgtggtcagcccgactgtgtgcccaatcctcggtaaattcacctccctactctctgcgctgtcctcctctacgtgtagctcggttcaatttgtatatggcgctcgggaacgaccgattgcagcctcgccggcgtgcgccgccgtgcgttctgagcgcgccgccatggctcggcggtgggtagggaatgggtcttcgaacccttggattctagccaacggctgagattaagtgttgcataccgtttcggccgggcacgctgtgaccgtagatctgcgatcctacggctcagattaaacctggtctcattaaatcgtaggcgtcggagttggatcctgtggcttagatcgcgtaccgattcgcgtatacaacagtctaatctggcgcgcccaagtctgatccaacggccgggatcaaaccgtaccccttcgcgggtcacttttgttaaagagccctcagactttagtgaaatcaacccgccgtcctatatcactgtgcgctgtgtcttaggagttttactccgtagcccctgcgttttccatttattgaggcctagtccag

SEQ ID NO: 82986 - DNA, 1199 bp, Zea Mays
gatgtcggtgatgccgatggggtgcttccttcgccgcctcgatcgctcagttggcttgctcgtaggtgtacgtggccctgaatgaagtggaaattgtgatgatcccatgtggctcgggcatcttcagcttcaggtatgtgtagtttggcacgaccataaacttggcgtagcaggtctcccgagtatggcgttgtaggaccccagaaagtatactacctcgaactacagtcgctcggtgcgaaagttggagggatcatcgaacgtgacgggcagcgtggcccgtctgagcgggtaggcttggtttgcggggataacaccgtggaatggcaccatacttggtcgtagcgcggagcgtgcgatccctaccccatcaaaggtctgaatgtacatgataatgagtctgcacccccatccatgagcaccttggtgaggcgcttcgagcctacgactggctcaacaacgacggggtaggccccgggatgtgggaccctgttcgggtggtcttggcgtccgaaaactattgagaactacgaccaccaaagatatcgtgggatggcaggttccgtagtgtggacttcctggtgtgttgccttgatacaacgtttgtcgtcatatgcttccgtcccaccgaatatcatgaggcatcccatcgtctcgaagaattccacggtgagggtctcctgctctgcaggtttcaccggctcgtccaactttgccttcttggtgggtggcctggagatgaagtgcttcaggagttcacaatcctaaagcttgtggcggacatgaaaactgtggttttgacacagtgagtccatcaatttctgaaaatggtcaccatcgctcttggtcggtggcctggacagttaatctgtggtggcgacttcttcttcaccgtgccgggtgtgaaggttccttcggtgcctgttcgggtgttttccgacgctctctcctctcgccgctgggtttgccggtgtcacggggccctttcccttatgatagatagcccctaccgtgtcttccccgtcagtgaacttggacgttatgttgagcaaatttgcggttgtccttggccttcctcatctgagctcgtggacgagtgcctcgttagtggtgtcgtaggtgaaggcactcactatattggcgttgatggcatcaaggagtttgtttctcttttgagaaaacttccgaatgtaatctcg

SEQ ID NO: 82987 - DNA, 683 bp, Zea Mays
tttccctaagcaagttctgtattccatatgcaagaccccatgtctcatatatataaccaacccaaatatacttgctttcatttcacacctaccaatatataagacatttcatcggtctcctttggggtcggggccaccaacgagggctcctagtgctccatcatgggtctccttttggatccagaccgccaacgagggctcctagtgctccagggcataacatgcccctaagccctactctggagtctggacccagacaggggtccgatgacgacacatggctgctggacgcatagtgcaaactttcctatgatagcaaggcttcagaccgcattaaatgcaaggcatgctctgaccaaacgtgaggtataggctagcttgtgacaggtctctgtaaccgcccggcgcgttaccgaggcgcaatgtagcatggcagcgccgcacacattaaatgatcgtgcagagctccgcacgttaccgaggccgttgtgccacgcacgtggaagacgccatcatgtagcgtcgttcggtcgagtattgtgtttgttacagtgaccatccacacgtgacagcacgagcaactgcgcatgatcctacgcacgtcagcgtgccggtgtacgctgcaacctgtaccagagccttcgcccatacgctgacaagacatggcgaagaagaggcttgtc

SEQ ID NO: 82988 - DNA, 755 bp, Zea Mays
atcggttaatacaaattgatctttgaattctgcctcaaactccaagtacattctctttgtatatgattcagctgcagcctttaacataggtaaatctgggctgtaagtaaccaggatcttacgacgtgaatggaaatctgcattcaccttgctttcacgaagattggcgcacaccttctcacattctacaaggagttctaaaagacctagtttcctacgaaaccttttcttgaagacattattcatgcattcgctcctttgagtagaggtcatgtcggctgtaaaagagtcacggtagataatagcccattttcccctcaagttataaaggttcaccatccagtcattatactcaagatcgtactcccgcaacaaatcatgccactttttattgaagtaatattctgatatatcctcatagacacaactcttaaaagcatgtagaaactccttatgcttactaattacatatccaagatgtttagcagcattaagataaatatgacatatacaaagacgatggcttgtgtttggaaatgcataagcaatagcacatgccatggttgcgtcttaattagtgaaaattgtgcttgggtgcttaccggacattgctgtcaaaaaactttcaaagagccatacaaatgatggaattgtttcatcaaatagcaacatagctccaaaaattatggtttgcttgtgatgattggtaccaaggattggagcaaaaggcatttcaaacttattagttcgaaatg

SEQ ID NO: 82989 - DNA, 727 bp, Zea Mays
aaaataagtggacatgctttctatttttaattaagatggctatagaaatcttcatcaacaaccttccatgacgtcttgagaggagaaagctatcaacagaatgcaagatggtcgcagcaataggcacacgccatccaccgaggtcctcgctgcgacgtcatggaggcagaacagaaggtgctctgcgacgtctcgacacaagaggttgtctagtggtggtggcatcaaggtatctggggaggtgaagatggatttgtggttgcggggcggtgggacaacacgaaatagtggtaggagtaggcttttgtgatggactttaggagtcccaatgaggttggtaaatgtagagatgaaattaaattttatagtgagtgtcggtgtttggaccgcgggtccttaaccaaccattaaatgtgttgcgtggccaactctagatggtgtgcgagtagacacaagcgattatcctgattcgggctactcaaggccctatttccagtagagaggatgaggcttatattacttgcactgtggtgcctatagtaggggtttacaagcaaggcaggagaggggaagtcaccaagtccctagagaggattgaggcaagtgccaatatctaagacagaatgagagagcgagcgttcgtctacgagtgtcgtgtgtatgtcgatgtcgtcgatcgatcgatccttccctcgtggagggaccattgccctatttatacaccaag

SEQ ID NO: 82990 - DNA, 613 bp, Zea Mays
ttttagggattctttttatattaaaaatcaatttctgtatttatttacctattttatatgttctctggactgggccacatttcctggaaagctcaggggccctggcgtaagtttccctagactcagtaaatagtgaacgtggacggcgggttctattctgtaaaaccataaggtctcttgtgtaaaacgtcaccgcgaaggggtacggtgcggtttggaccgtccggtcacacgcggacggtgaggatttgatccgcgtggtcgggagacggcatgcgcagggaaccgttggatgtgaatacgacgggtaggattttattacaccagattcgtttccacccgtccgatctagatgaacggaccaaaacaactcaacgcgagagggtaaacggggactaatcctagccgtccggcaggagatcaacggcccacgcgttttcccccaatcaccagacgagcgacggcggcgccgcccggaaccacggtggttcaccaccggaacccggccaagctcgcacccagaacaccaatcccgcgctcctacggcactacgcttagccctatcgaccacgaacccgatggcggctcaaccatccccggattccaaacagag

SEQ ID NO: 82991 - DNA, 296 bp, Zea Mays
ggaccatgctgctatgacgcctggtgcctcacccattggccatgatgccgctcagaatcaaacaggggccagttgattagctgggggacacggaaatcgttcgtggcagtggatggcagggttaaaatctcgatcggccgacagattgtctctagcattgatattccaccgagaatcatggactccaagtgcggctgggtgagaggaattaaaagcactggatgtcgggtcttggtgatccttgtcatcgccttgtcggcgatcattctggatctgcctcgaccatgaacagcgtg

SEQ ID NO: 82992 - DNA, 832 bp, Zea Mays
aagctactgtcatgagcagaagggttggagacaaattcagagaatggcctatttggcggtaggttccacacagaataagccacaggagcaccagcatttgagaccctgcacctcaaaatcatgtctagtcggctcagcagatcttcattgggaatcctcctgttcgtgacccgggtggaatcattgatgccgctatataagtaaacacgataaattctttccttcaagggttgaatgttcttgaaaaagaagtcacaaccacagctttagcagtcagacccccatccttcagcaaccagatctcgacaagtaatactttgacctctgttatctccgaaaaggtaggagattctacccagctaggtgtgcgaacatctggttgcctccccgaccaagggggagagatttgtagtggttttccacgatgaaccactcaaggcgccatcctttgatattgtccttgagaggaatatcgagatactccactttccttccctggcgaagctccaagcttgcgtcgccaacaagctggtgttgttccccagccatcccgggccgatagtgataaagatacttccaaagtctgaagtgggggagaatcccaagaaaagcctcgcacagatgtacgaaaatggcaacttggagaattgagttagggttcaaatgcgtcagattcaactcatagaaatcaaggaggccatggaaaaagggggagatgggaagagcaagcccacgaatgagaaatggaacgtaaacgacagattcatgagtgtcctctattggaatagtgacaccacagcacattcgccaagagcagagctccttcagaagc

SEQ ID NO: 82993 - DNA, 394 bp, Zea Mays
ccaaggttcggctgtgtgttttcatctgggctattcgaagccagggggcatacagatgttgatgcattctacaaggcccatgatttgtattatcagacaaaggccaaggaggagtcaggccttcacaacaacttcgggtgctacaattttgcatatcgcaaggatgtgagttgtctagtcttggcctatcgaacgaagtggcatgacgactagataaaggagtggttttatgccaaagtgaactcggaacaatgtgaatacttcaagggaatgttgatgagccgtttggaagtaagttttgctctgaaaaggccaaagtgcgaaatgagtgaagccattgtcgaatgcttcaaggatttcagtgtggttatcaagaagattgggtcccaagaac

SEQ ID NO: 82994 - DNA, 382 bp, Zea Mays
gagggcgacgtcagcgttttagaggtaacgccgagtgacttgagggggacgtcagcgttttagatgtaacgccgagtgacttgagggcgacgtcagcgttttagaggtaacgccgagcgatttgagggtgacgtcagcattctagaggtaacgccgagtgacttgagggcgacgtcagcgttttagaggtaacgccgagcgatagcgggctgtgtgggccactttgaggataatagccgagtgataatgtggcgcaccggtgttctggaaataactgccgggtgatgacgtggctcgccggtgttttggaaataactgtcgggtgatgacgtggctcgccggtgtttggaaataactgtcgggtgctgactgggcgcttttt

SEQ ID NO: 82995 - DNA, 545 bp, Zea Mays
tgtatgaaagttttttgattgagcccctgtattgcttcagtaaatgtgtctcgactctagtacagtgttgttgactgtccgagcttcagactctttgtgtgcgtcgcgttgttttttgaacctggcggtgcccttctggctgttgattgtgagatgaagttggagccatgagtggtggtggtagcggggctcatgcagcttgcgagtggcttgccgaagcaactgatgttgtgggttgttggttgcccacatacttggggatgtatggggaatagcatgaagaagtatgcaggacctgcttcggctgattctggcgcgcttcggtctcagctatttccttttgcttctgaattgtgacttggcatgtccttgttgtatgccccttatcttctccacagaataggaaaaacaaccttcttggttgggagctgaatcttccaccgaagcttctacctcctctgcctcttggagctggaggcctgaaggagctttgttgtgtccctgatgattgggcgctgtgctgatgccctagagtatgatttccc

SEQ ID NO: 82996 - DNA, 339 bp, Zea Mays
gccacgccacacgtaccatcgtcgcccccacgcgaggtataaactttttatgcgtcaattcaccatgtagttgtggatctaccaagttattcgcatctccatcatgaagcattgtgatggcttgcaatgggaaataagaaatgtgacaactgctagtagtgtatactttaggtgaatttcttcttactgtgtggatgtcagccatcgtgctgttagttttatttgcaggttttaaaaacctcaacgtacaggggaggtgctgtcgatttttttgtattaacatacttgtgtttcttttttacagagaagatacttgtcttcctagccgctgcgggtctg

SEQ ID NO: 82997 - DNA, 482 bp, Zea Mays
cggaaagtgggcatttgctttgatagagtacgatctaatttatgaatctttatcttctatgaaagggcaagttatagctgattttataactgatcatagggttgatgtagagcaggaaatctcatgtcttaatgcttgtacttggcaattattttttgatggttctgtatgtaaagaagggcagggaatcagctatgttttggtgtcaccaaatggtctagtacatgaaacatgaattaggattgaatactgctgcactaacaatcagattgaatatgaagctttgttgtttgggttaatgcgtttagatggtatgggaataaaagatgtagacatgttcggggattcgttgcttgtggtacagcaggtgagaggggagtttcagtgtttagatggtatgttgcgtagttatttagacagatgtctagatattgttaaaaaaattggatactttcactattgtgcatatatctagagataag

SEQ ID NO: 82998 - DNA, 829 bp, Zea Mays
ggtcgtgtttcttccatgttttagtcggtgatccgtagttagtctctagtggtgtgtgtgctgtattggggttctcccccctttcttttcttctattaatacaaagatgcgcagctctcctgcgtattccagaaaaataggaagcagaacactatttacaggtcagagaataagattcaagaaagagagtgattttactgttggagagtttaattagttattcacatgacacaatagaactgcgaagaatataaataagcacaaatctgattttacccatttgtagcagtgttaatcatttagctcggaaataacaaccggaaagtaatcaacaaagtttgcttgtgaattggcacattctaattaacaatttgcatcataccttcatggattaaaagcaatggttgtatgtatgggtattaactcgatctgggggtagggattgggatggcggttcgtaccttgcaccgagttagcagaaacagaagctgtagaggaggctgcgcttgcaggtgttggtgtcgcccttatcgtgcctcggttgcggcgttcagaaacaccacacacgcattgttggtgatgaaggtctgcacaccggcgatgtttagctagctcgaaaatcaacaaagttttcttacaaattaaaagcaataccttgccagagatgggagacgtgcacaagaggagcagtgagccggagaagccgacaacggtgatgtggtcggcgtcacagtagagcaacccgactctggtgtacacgcgtgctcggacgacacatagtccccacatgctcaccatttatcttcatcgaatgtgtgctgacccaggc

SEQ ID NO: 82999 - DNA, 509 bp, Zea Mays
gataaagtaaaagaagatgaagctaacttcaaaacccaatctgaagcccaaaaaattgagattgaagaccttcagaagcaactagccgaagctaaagagaaatgcgcagtcgcagaagctaaacgagaaattagcgaacactggacaaatcatttagagaaaaacgttgaagaacttcgcacatccaaagaaagatgctttgaaagatctatggactgtgtgaagaaaataaaaaccagctttgccaaagtgggtgcctattcttccgaagaaaacttcatacaaggcgaccccgaatgcgttattgaatggttaagtggggaggtcgaagcctttgaagaaattctaagtgaccacggggatgtatgcgcgttctctggtgcgaggggagttgcgactattttggaaaagtcaggctgtgaacatgttaaaaccttggcttaggccgaagctgccctctgcattgatgatacgaaggacccctcggccgaagcaagcttaataggtgg

SEQ ID NO: 83000 - DNA, 425 bp, Zea Mays
ctgatataactgtctctttggcatcatcataattttttttaagtttcataccggccttgcattgtgtccgcttcgagctggtattacgtacctttgggtttgatattccccttactgcactctttccttccatcgagcaattcaaccacttacaatttttccgttccctatactttttcaatgggaagccaacttcatatacatacctactataaaattgatatgcttcatccacaccactgaatgtcataccaactttaggtaccaacctcggatcaattgtaacttcctgtgcaaataaataaaatatatatgtatgtacatatatccataacatgtacgctgtatggtgtcctacctaattttccatcgtatgcacaatataacatttcataccatctagctgcataatattaccctcgatt

SEQ ID NO: 83001 - DNA, 538 bp, Zea Mays
cgacaccacatcaaaaatagggattgtgtagagatgccaaggggaattaattctggaattcacgaattatgttgaggtcgccttgcttcagggatctagcattttgttaggttcatatgattccaggtaatttcatctgaccacttagggccatatgttttatgattctagtacataatatcttctcgcatatgttataaattgttagaaaaatccaatgcttactagatactcgacagctgagttatatcagtatttgtcggtagtcggtatgctggtccacaaataatgcagtagcactagcacaagaactctatgataatttgagagtcatgagagtgaataaacaccatcctctagtccataagtatgcatgtttgtatcctttaaatttgacgctgcaactcatatgctaatgatgacccaaacaatttaactcatatgccaatttataaatgaaatttatgtcattgtgtagtggagatgccaaggggaaggaggaagcagaccgttgaaagcaatgaggagtatctatcag

SEQ ID NO: 83002 - DNA, 1325 bp, Zea Mays
gagaaaaataggcttaaagttgtgatgtcagtcactctgatgactgaatttaagtcactagtgacattggccagacttttgggtcaaattggagtaggatctagtgctcgattaaggataattgctatggacgatttgtagctagttagttgagctacaactttgttaaagacggattagcaaattcttacatgaaaatccgagatctgggcactacaaatctgtctgtcaggcactctgaacaagttcctaatggtacagtgtccggatcagaatgccaggttcagatgcctcaccgctggtgaccgtgcacccagattcgtgcccgcagcggtgattcgtgcccagcgcagatggataacgaagaagggtaagaaatatcgtaccatggattaactccggccactattctactccggccgccgtacccgcctaagacacgaccgcttcggataggctcacctgagttagtcacctcgcgaccttgtgccacgtgccttggtgctttaaccccgccgcagtgagtcaccgtagccacccaataatcgccggtgagctcaccacggtgaaagccaccaattgattgcgccagtgcaccccttctcttcggtcgccgcgcgtcattccccgaattagtcaccactgctcatggatcctataaattgagcacaccctcggctccgctagatattcaagcattcaatccacccactcgtgcctccaattactcatcagagaaccccaatttgggatttcccccaaatcggtccgaaacaccacgcgaagtgacctcgtcgtggctagcttgtttcaggtccgttcatgctctctgctctcccgtttcagtgcccttaggttctcctgatgctcctcgacccattcaattaagctagaccgcactagatcatctggaacacctctgttcatctgtagttcacgcagtcaccgtgggcagggtgatttaaagctcggattgtgcaattgagcgaggggaaatgattattaggtgttgaattaggtctcagccaagttagagcactgaccattgcgtgtcttggccggtacaggttcgccgaagctcggttcttcgccgctcgccgtcgaggaccacgggttgtgaagaattagaacgtggagggctttggtgtaaatgtcagcgactgaaacaaatagtgcacatgattcttccctagttagtcaaacccctgagggactcgatgcaaaaccgtcacgcgggcgcgcgcacgagggcgcgtttgcctgttcgcgggctgacttgggccagtttcggcccagtactattcatgtttttcctttttcctttt

SEQ ID NO: 83003 - DNA, 668 bp, Zea Mays
cacgatgttctccggcagacttcaccacagcggccaagtttctatatcagctcatgaggcagacgcttctaccacggatgggttacagggaggctgccactcatattcagctttggctacttggtgccttggtctctcactccgagtttgacgttgtggatttcctcatttgtgagatcgaggacaccgtgttggatggacttcgtgaccggcatcagctgtcgtatgctcactatctctaccacatcttcgcacaactgatccggccaccgtagtttcagggcactcttgaggcctcatgcctatactttggttcctaccatcccacccctgaggaccccgtgccagcgccagatctagtggccgacactcaggcagaggatacaaccttccatcagttcgagactcagggcgcagcagtccatgatgatgatgatgatgacgactttggggttccacctccgcctccgcctcctatgcctcctcgcacacatgatcatgaggttgggagttccagtggtgctgcccctgctgcccctcctgccttgatcatgacgatgcgagctcttgtgacgatcctccaaactcttactcagcagcaggctcacttgggagcggtccagcagtagatgtccgagagaatgctctcgatgtttcagacgattcag

SEQ ID NO: 83004 - DNA, 1139 bp, Zea Mays
tgatccttggtcgtccgatcacgatcccatggaccatattacaacccgagatataccgaaccggtacacaataatggccaatggatcgagatccgatgacccagaccataagcagcgaaggggtatccgctacttccccccaactgttcgatcagaatcggacgctcgggattttataatgttgggatataatccccaccgctccctacgatccaacggtccgagcgttcttctacccttcttcctatctctctctctctggtgccagcccgggcagcgcaacgaggaggcacggcgacaccattggtgaagctccgaccctactaattactaggtccaacctcggaatcaaacggtgatacactatgcggaggctactgtgaatcgatttaggtagttcttacccgggttggtgacgaaggtggcgttgcccgcacgccctgagttttccgcggcggagtccacatcagcgagcaattatggcttccgtaatcgatccaatcagtcgggaagctcatccccatgtgcggcgcccctagatgctcccaaaccgaggcctagatcgtgaggcagctcagtgttgataacaattgagacgagctctcccctttctcttgaactggccggtggtggcatagcacccagtggcggcgacaacctggtggtcaggggaaaatcgggagcgtgcatcagcgtgcctccccaactccccaccaatgtctatctaggccctaagcagcagtatagacgcaccgagctcacggtggccaccgcggcatcgacccacctcgacatcttcatggtgggggcatgccatgcttatatacctaacgttgagggggagaaatccaatcccaggcccgaaacgaccgacgagagaaatctggccagctcccagaatctgcatcaatcgcgccagcccggggttctctcggtctattacagtggaggggaaagtgctaacgtgggtggcccaccagtcagtgccctaggcgcgaggatgggctggcttgcaacgtggggcctaagcgtcagtgtaacaagcgagaaggtgttatgggccgcgcgaatagccatggaaggaggtgggttggcaggtgagggcgagttggaggtgggctggcaacaaagttttggcc

SEQ ID NO: 83005 - DNA, 374 bp, Zea Mays
aattcggctaactagagcaacgacctagcccgctatgcaacctactcgtcggctagcctattgttatcacaatccgagacacaacatatactacaacgtttttataaacatatatattcacaagtattttcgcacaccgaccaaagcatacgaatcgtaaaccactaatctctaaatcgaaaacaccatgcatttacttcccaaaccgtgaacacatacatgtttatcatatgaacagaacattccaataattattctaaagcgactaacttcattacacaacttgtatcacgatcctacttgatttacttgaagtgtctactcgaaatcgtgagcacaatcatacactatatgcgaagcataatttaacgaac

SEQ ID NO: 83006 - DNA, 393 bp, Zea Mays
ttggcgagccaagtggggtaatcaattggctcaatgaactttgcctcaagtagaccactgccttcactgcttcagttttctcatcgatcattttctgtaacttttgtttcttagggcgcacggtggggtcgatgctcaggccgtgttcgatgatggtgcgactaacgctgatgagatccagggcaggccacgcaaatacatctttattgcggttcagacaagacatgagtctttcttcttccgcctcgatgtggtcctcgctgatcaagaccgtttgattgggggtggctgtgtctagagggactttttcacccctttgttgctctatagctgggcgttgatccttttttctttgattgggcgaaggctaccagggtcttcgtggtcagctat

SEQ ID NO: 83007 - DNA, 350 bp, Zea Mays
tttagctgcatgtttgattggcttgtgcacccatgcaatgttggttaaacacggatggattgtagtgaggtcagtactgttgttaaccccggaagaagaagtgaaggtcgttctgaaaccactgatcagctcctgatggtgttgtcatcttcaacatggtgtagtactaaggcagctacgagattgtgtttacaaggtcaaattcatcatcaatatattctggtgctcattgattccagatcctctcacgtttttctcagtaacagctcgcgctcagagttatctggtgtgcaaccgttggtaaccccaatcaccattcaagtggctagtggtcaaatgattacctagtg

SEQ ID NO: 83008 - DNA, 478 bp, Zea Mays
tgctcggtaggtcagtagggtttggtcgtttggagcggcacgccaacgagcagcgggcgagacagcgagttcccattccccagctcccccaacccgacgcaatctattccctggcttcaaggaatcaaggtaatccataatcttctagtatttatttttactaatgttatctgtaaatttcttatatgtagatgtattttgtaagcttcattatttaaattgaatacgtttaggatcacgtctgttgcttgctggactggtgctcgttcattgtttgcctgtttggactttggagtagtgtttgttcattatttggtccgagattgagaggctgtcaaactgacaatggctgccaatccattagtgctaaggtctggaagtgggagtgtatgtgcaagcacaggagcatctcctgctgctatatcacccattggcactaatcagtctgcacctagaacacaacaacttgtcggtgcta

SEQ ID NO: 83009 - DNA, 537 bp, Zea Mays
gttataactcgccgttgacaaatattctccatccggcacaagaggaaggaggtgggaaatacccctagccctgccagactccaattgaacagatcctccttactgagcaaaagtgctccagacatgttcagctaagctccatcatacacacaccgattgtagtgtttccaaattatccaagccccaaggatgatagaattgagatcttttctgatgggatgggaccatccacccttgcttcagccattgcccacgagtcatcagagcaaacatcttcattttgtggggagggaccttataaactgagtctttacagcaggaggaaaccagaattctcgtgcgattaactgaagcaggtgattgattgtttcattagcttgatcacaaagtgggcaatgggaaggatgtgggagaccccctcaagagacgatcagctgtccagcgcctattatgagccagcagctgcataaaaaacttgcatttttgtggactccaggatgttagaatacaagtgaattgctcacctctctccatcag

SEQ ID NO: 83010 - DNA, 565 bp, Zea Mays
gttttggaattggaataaaaaaatcagaagaaaataaaaagagaaactcacccactaacctgggccgaatccccctccttcagcccacctaacggctaattcgcgcccgtcggcccactactgacttttcccccggtcagcctgcttctctcctctagtttcactgacggctgggtcccacccgccagaagcttcttcaccaaatcaacggtggcgtactctgaagtctgaacacgcgcgacaggcgcttgggcgatgaatgtggcgtgcccgtgatgcacagaaatcgctaccgcgacttccttcggtgcgaaaataggacagcgacatcaccggataacaaacctttcctctttccccgtgatctgatccggtatccttcctccccgtaccaatcgggatttcagttcccgacagcgggcggaacatggccgccattatcgggtccccgtgaaccgcgccatggctaatgcggagagagataagatggagagggtccgccttgtgctcgtcggattgccgagagattgagagagagaacgttgtggttcgtgcggctggcgca

SEQ ID NO: 83011 - DNA, 375 bp, Zea Mays
ctttgtaacaagttttagccactaatacttattgggtattttactgtgattttctaaagttcttggccaatgggggtgctttctactaccactatacttgaaaaatgtcaaacaatagatttctaatttttcctattttcttctttgtgcaagagcaatcaatctagaattttgcaagtttttgcttaagggaaagggtggttaaaattcttggatcatatggcctttttcatggggtagggggtaatgggtgttaccttacatttttaaataggtctcatatttttctctggtggtctactccatcattagttgggtaaaattttatttgcctaatgttgcacattttttggctttcttatgatttaattagaa

SEQ ID NO: 83012 - DNA, 326 bp, Zea Mays
ccacctcatcaggatgaggaggaagagggctacacactaaggaagagtcatgcgttgtcgatgtggtaccttctcgtaatcgaccgcctacgtgctctatttgggaaacctgaggatgccaagcctatgtcctagcatgccttagatgagagcaccaaggatgatggcaaacaacaaaacccttccaatgctcgcctatggaaacgttttcacaacatgttccccaagttgatgtaattgatttttatgctagccacatacaccataaatcaagagctctttttttcattgtgcacacgaaaaatatcgcatgtggtacattggtg

SEQ ID NO: 83013 - DNA, 526 bp, Zea Mays
atcaagtggttacctcattgcaggaagctaagaaagatgggaagtctgatgtctcgctggctgagttgcttagggcgatgctggagaaggtcaaggataaaggtaaatcactgattaattctgagacctcttctcttgttgaaccaactttgggtgatggggccagtcagattagtggaggggcagtggcagaggtaccggagggttcgaacaaagggggaagcaggaagaatgtagctaaggcctattgccatagatgtcggtctaagggacactacttggcggattgtaaggaggaatttttgtgtgaggtctgtgacagtgtggaccatcctaagagtagatgcccggtttttaatcatctcaaacagagacccggatgcatctatctcagcggattcacgatggggctgggatttttccatattcatgtgactgtcaagaatctgacaaagagggagggtctagatgcggtgatcaaagttaccgaaggtgagcttactgtggtggaagttactgctgaact

SEQ ID NO: 83014 - DNA, 839 bp, Zea Mays
gtaaacttccatagtatttcaaaacaattcgtgaaagatcaaattcatagccctctgataagtagcactagcattttttaggccaaatgtcatgacaatccactcaaataaaccaatgaagcctgaacatataaagactgttttagacgtatctttttcggccataaagatctgattatatcagtcattaccatcaataaaactaataattatatttcctgatgcattattaatcaacacgtcggctataggcatatgatattcatccttaggagttgctctatttaaattacggaaatcaatgcacactctaagcttacatgattctttcttctccatcggcacaatattggagacccactctacgtatttgaaaggtctgataaaattagcttctaaaagcaggtggatttcgacctttatctgtgggagtaagtctggacgaaatgatcttggtctctacttgaaaggcatgaaaccaaatttaataggcatccgatgttctactatctctcgacttaatcctagcatcttagtgtaattccaaacaaagcaaacataatactcttttaatagatcgatcatttcatctctaggatcagcctccagggtcttgtttacaaaagtcggcctcgcggttttgccatctcctacgttaatctcctccaacggaccagccgatgtaaacccctgtcctaacttgtagaaaagtcaactcctgtgagacacgtagcactctcgtaggtccaaagcacgggggcatcgactacagcgatgcaggccgatgcatcagcatgcacttgttccacatcatcgtctacccattgtgacaacatttg

SEQ ID NO: 83015 - DNA, 479 bp, Zea Mays
agctaatggaatgatattagaagcacttaggtagaaagtattcgataagaatgagaagttcgcaggaaagtggatcagagagttgtcgtatgtgatctaaagcctaagaactcaacctagccgagctttgcatggaaacactcccttctttatggtctatggttcggaggcagtgctacctactgatctcaggtttggggcaccaagactgatcttcgaaaacatagctgaagctgaggccactagactggaggatgttgatatactagaagaagaacgattgaatacagtgattcagtcggccaggtaccagcaaactctgaggcgctatcatgataaggtcatacggcatcgatccttcgcagtgggagatcttgtcctttgccgaattctaacgggggaaggacggcacaaattgttgccactatgggaaggaccactcatagtagcagaagtcactcggcctggatcataccgtc

SEQ ID NO: 83016 - DNA, 579 bp, Zea Mays
gaaaagaatatggatcattgaatgacatctttgggttaagacactttgacgcgtgaccaagaacatatggtaaaatggaattccagttcaatggaagttagagttctaatgtgtgcaacaatagatttactttaactcagatggtacaaataagctccattggtgaatctattgtgctttttggcgtgcatgtaagatttaagctttacaaatatagcatgtccattatatttctctttcctcgagcgatctgttgtttccatttggggtaattgtactcaataaattaatttgttcctttgaaggttattgaccttcaggcatatgttgttaagggagttgggaaggttcaagccaagtggtctccagttggtacaatttctatagaatgctccatgagggaaaattgtttcactgttgcatttgcaataagatggttgaatgtaacatgtggagttagaattattgttatatgtttccctttcctatacgccatatgtctaatttttttgttatgttcatgctagctattatcatctttggttatttttatttttaattattctactttgatagatg

SEQ ID NO: 83017 - DNA, 563 bp, Zea Mays
ggcctgagtgctctggatgcataggcaataactcggttgtcttgcatcaaaacacaacctagtccagtgcccgaagcatcgcaatatacatcaaatgatttggtgttgtcaggttgtgctagcacgggtgctgtcgtcagatgctgccttaatgcatgaaaggcatcttcacacttctaactccaatcaaacttcactccttcatacaacaattcagtcattggtttagcaatcctggagaaatccggaatgaatcgccggtagtaccctgccaatcccagaaaactccgaatctgtcgcacggtggtaggaggcttccaatccatcacttcttgtaccttctcagggtcaactgatatcccatcctgagaaatggtgtgacccaagaacttgatctctcttagccagaaatcacatttggagagtttggcgtataagtgatgatcgcgctgtcgctgaagtaccacatgtaaatgcataatatgctcatcttcatttcttgaatataccagaatgtcatcaatgaaaaccaccacaaatttgtagggatgaaagcggtaatc

SEQ ID NO: 83018 - DNA, 831 bp, Zea Mays
cgacaaataccattttaagggaaacaaaatactttcacacgatcatgaagaacggtggaagtaataccacaatcgtcggaagtgattcatgtgtaataggctccggtaaagccacaattacactcccgatgggtactcaaatcgaaatcaaagaagcactattgtaccccgaatcaaccagaactctcttgagttttagggacattcgtgcaaatggttttcatgtagaaaccaccgaggaaaatggtaaggaatacctatgcatcataaagtatggggaatatgacaaagaagtcatagaaaaattcccatcactagaatcagggttatattatactaagattagtgcacctgcaatatacactttcctaaagacggtgtttagacattctgaattattctctctatggcattgtcgactagggcaccttggtcttagaatgatgagaaatatcatcaataactcacaaggacactgcataaatgtgaaacacttcccaaatcaagaagattttgtgtgccatggatgtgccatgggaaaattgatagtgagaccatctcccttgaaagtaaagaatgaaatgcccaccttcttggaacgaatccagggagacatttgtggtccaattcaaccactttcaggaccttttcggtattttatggtcttaatcgatgcatcctcaaagtggtcgcatgtatgcttactatcaactcaaaaccatgcatttgcaaagttgatctcacagatcatcctaattaaaaatactttccctgaccaccgactaaagtccatcagaatggataatgctggagaatttacctctataaggc

SEQ ID NO: 83019 - DNA, 1281 bp, Zea Mays
tggagatttgcaacttaaaccctaagtttgggtctatttgcaaaaagccacatttgagctttattgggattaagtctgaaattcggagaattggctcaactttgaagctttgtaacttccacattaggaggagtttgcactaggtcagtacatcaaattggtagagctatgtaaggagagtaactttgctacagagattatgcttgggttacataagaaatttggagaaaatttgactccaagttgacctgtcaggctgtcttaggtctgaaatcatactgacagtgacctagaactaggtttgagagccattttgagctagatctgtttctcgtttggtggttgttgctataacaaaattgcagctggtatgaagggctgcaagtttactactggcgaattagcaagttcttatatagaaatttgtgttctggacgctacaagttgggctgtcaggagctctgaatcgaagttccgatggtacagtgtcctgatcaggtcgccatctctgtccctcgccgccgacgagccgcgcgcggattcgtgctttcgccaccgtgattctttctcggatcggttggatagcgcttggggttgagtaaatatcatcgccatggatatactccggccactaaattactccgaccaccataccgagctagtcatggatgcttcggatgtgttcaccggagacagccacttcacggccttgcgccatgtgcccgggcacatttaccacatcatcgtgactcgcttaagccatccgatcatcgtcggggagcccgccacggtattctccacgaatccactgcgccagtgaccacccattcctccgaccgccgcgcgtctcaatccaaattcaccggccaccgctcttgcctgctataaattgagcccgtcgtgagctccgcagggtaatcacacatctaagccaccaagtcttgtcttcaattgtccactaacgcccgtgaattgctcagtttccccaatccatgtttccgccaccgcgaaagagacctcactatggtcagcttgctccaggttagttcaagctccctggacgtttgttctagtcttcttaagaccccctaatgctgttcgacccctttgattgaactagaccaccctggattaccgtgaacgcccgtgttcatcctttgtctacgttgtctccgtggacaagatgatttagagtcgtagtcgtgaaattgagtgaggggaaatgatcggtgggtcttgaatttggtttctgccaaagtagggcaccagtccgcaagtaat

SEQ ID NO: 83020 - DNA, 456 bp, Zea Mays
ttcttcttctcgttggcttttcattgcacggtttgctgaatcttttctagaacttaaaccggtagggaagccgaacaagttcatatttttcccttcttctttcttctttagcattccccaaccgctagaggtcggaaatgtcctgttcgccaagtattcttgcactaagtctctagtgctgatgtgctcagccacgaccctgaactccacttcggccaactaacaaggagacccctattgcacaagggtcgagtcatgccaaagttcaatctcaatggactcatcaccatgctcatgagtttctccctttttcttctcttcggctttcacgtaaaaccactcattcgtccacccggtcggccatttggcgcggtagcctatcacggggcctttgtgtccttccggtatgcaaagttgtagcatccgaagttcttgtgcaggccatcggctcttgcc

SEQ ID NO: 83021 - DNA, 388 bp, Zea Mays
tctatgttgtgctcctatatgcccccttgccaaaagtattttattctattatggtctatacttctctcaatctattagatctgatctcactcttatgcttgcgacatctttgtagattgccccctgaccataacctttttgtctattgggattcttccctcttccgtcacgaaattgctaccctttgactgtcttttttccccttagtattgacatgttcgtactcctagattcttcagtacttttgtttcaaatacttacatctgaatttctcctgcctacttaaacactctagtttatatgtccatgaacttctggtcttccgagatccctccctgttccgctgttaagtcattatcctctgcctttttgtattcccttgtctggg

SEQ ID NO: 83022 - DNA, 343 bp, Zea Mays
aagaaatctcctagaactagaatacaccgagatcgctctgagtgcgtcatttctcagagaaaaaatgccggatctcgatagatccatcttgtgtgcaccaacttcggaacacgggctagatctgatcgtgctcgctgggatccattcgattctcggcgagattcagcgcgctaatgacgagattcgctaataactgctcgataatcattgtttctcactcattttttgtttgtgcacatttattagtagtattccatgttcagtggtaggccatgatttgtgtacatctttagttgatttttttaaaatagttgatagttcatatttcaaatctatttgttag

SEQ ID NO: 83023 - DNA, 766 bp, Zea Mays
gggtacccgtaattttgggtacccgtactttcgggtacgggttcgggtaatatcaaaatacccgatatattcgagcatgtagcgtttagcaacaatatttaaaaattgaaacagtgaaacaatattccagttgagatgtcacacatagtcatatagcatagagcacacagtcacagattcactaatagtattagtctcgctatcacacataatagagagcaagagaacacaccaacacaagtacacaacagtagtatagtacacacattctccactctccacttctctagcactcgaccactctccagtaaacaaccgcacaggcacaggcgggcgcacagcaaagtagcagacacaaccgcacaggcacaacactacaacacaagtgcacaacactgcatactaagtgcataggcgaaaaggccaaaagcaccactccatgtctgatgtctccataccatagtacatagtccatacatgtacggtgtacctgttcaacagcaaaaggcagacaacaacaaggtaattagtaaagagcagaactaataaaaacagcagcaaggcagacaccagcacgacagcaccactcaatagcacacagacagcatcacaggtcacagactcacagcaacaaggtaactaataaagagcaggactacatgtctacatgacagcagcaaggcagcaaccaaaaaagatgtagatggactaataaatagcacacagacaacaacaaggtaactaataaatagcaggactataccag

SEQ ID NO: 83024 - DNA, 566 bp, Zea Mays
ttgcgccatgccttaggacatcttaccacgtcgtcacaagtcgtagtgactgcccagtgaccgccatagctcattacccagtgacctccatggtagatcgccacgatgactcacccctctctctcggccaccagcgtgatttcttcaaattggacgccaccgccgtagaactctataaattgctgccctcgtgagttccgttaggtatttacgcatccaacgcaccagcccttgcctcggatcatccaccagagcgcctcaatttctcatttcccccaaatcggtcagaacgccgccatgagagagctcgccgtgaccagacgtctacaggtccgttcataccctccttgccctcgtttcagcacccttgtgtgctatggatgcttatcggtccagctaattgaactagaccacgttagatcgcagggaacacctcgggttgtcctcaatttgcgccatcaccatggacagagagattttgagctagaacttcgcaattggtagaggaattagggtcgcccttggtgaaattcgatgttgaccaagtaagaagcctagtcgttgtg

SEQ ID NO: 83025 - DNA, 565 bp, Zea Mays
gttagtgatgtagacatcatagtggcactaatgtggcaggacatcgacaccatagcttacgccgctgaggtctaaaataaataccacacctagttctgacaaaattaaagcgaacatcatctatttctcatctctctctaattctttcatccttatttaatcttttgattcgaccaacccacgtgtttcaaccagggcatccagatatagatgttcattgcttctacacatgtggttgttttaatgtaaataattatttgtaaatattctacttctttgttccttgatatatgttattaaattactgataagtcgttggcatcacttatttggaaccatgagaggtgacttttctttgagtggatcaatgattctaacaagtttgatcgaaggtatctccttttcaacatgtgaagatgtgatataagtctagtcgaattcagtcgtgcatctacgtcaacgaaaggcagccagtgagtgtgtacaggagactacaggctgcagccagagccagactgctgccttcctcacatcaatcatctcggcccccgtcatcacacgtacg

SEQ ID NO: 83026 - DNA, 441 bp, Zea Mays
gaatggttccggtggtggagataattcagctgaagtgggaaaaatttaattagtccgaagccacagaaacaaatgccgaagatgaacatcaaaagatattacatatacatctttcacgctctacagcttcttcagcttgtctcgtttttatccgggcgtcatggatgtctttttcacttttctttataatttcatgagccatctctcggccaccattcacccagacatcattatagaattttccgcccattaaggttgcttcagctgaaggatcctttgtgtcatctgtagagaaggcaacttcagcctggaccatggtcttgatgtgatcacatcccgccttctctaagatagccgaaatcccccgcgcatcggaaaatgcatagatatccccgcgatcactcaagatttcttcaaaggtctcatcctcccaacttatcc

SEQ ID NO: 83027 - DNA, 1143 bp, Zea Mays
tggatcccttgctggtggcgtagacagtgggtcaccaagaggatggggaggaaaggtggtggagccctgaatggcgatgcttgtggtggagacggtgggttagaaagaggatgaggaacaatgtataaagtttgaggaggcgatgatgggtgtacaataggaactacaatttgaggaggcggagacggttgggaatgcaacgacgacggcggtggtggatcaaccaattcgacatcccttcaaggccaaaggatgaaattcttgatggcttgtccaagtgtctcaataccttcggacctagggatgtctagcatgttgtctaaactcgctatttgtggagacagattatttcgcgttggtgcgacagagttcgcactcgccatttgctacatcaattttggaggaggattcaataacatttgagacattaggtctctaaactctttcttagcctcctccttaaaataatctgtcatctcctccttgtatcgatcacatttcttgtatagaccggtctgaatccttccttctatccttccttagacgagattcctcgtacaaaaccaggatgctcagggttgctgagaccagccattaagatgtctctctccctttgtggcttaaatgttccgcagctctacttagctgtcattgcatatatgtttattgccgcttcttcgacaattggatcatcaaaagatacaccagactcaatttcccttagttttctagcacgtatccaattagccgtcctttcaccaagttgctcggacagcgtcggcaaccccgcgaccttcttctcggcgtcttcttgtctccatttaggaatctaacgcttgtaaccacctatgcctaggtagtggtggtatttgttcttcttagatagttccgaatttgcctcacttagagatatgaaatctgggctgctcctctgctttagaaatactgcccactaacctgctgagattttatattttttgtcgggtctaggccattctttgcaaactttgtattcatctcagatatccagtttcgaaaaattggttgcaaactgcttcatcgtgtattccttcacgagttcttctgaaccccaaggcagaacgaaccttgttaatagcttcttccacatttaattcttaacat

SEQ ID NO: 83028 - DNA, 339 bp, Zea Mays
catgccggtgtcggggtgtggccgtgtgggaagagctggagactgcactgctgcagataaggtcagacacgacgggagaggaatgggatggatggaaattggaatggaaccagccgtgtcgaaacggacgctgataggatgggcggcggcggcacatgtgccgctcgagcgagaccagtttggtctttggtgacgctgaaggtcagcccgttgctggcggctagcaccgtagcacgcataggaataggaagcgaatccgggaccgggatgcctcggctgctatgctccaggagtccaggtaaacgctgacccgaaatagttggtggaggcggcgttgag

SEQ ID NO: 83029 - DNA, 317 bp, Zea Mays
ccggttaagcaagaggtcgatgttgggaatggggcgaccaaggtttcctgtaactattggaagccatatactcctaatataccttccctatatatacacactactttaaagcaccagttttgtgtgtcgtgcgtcatgtgtgaagcgcgtaggtctattcctcttgctcacttcttgtctaacaatagaccattacaccatatatgggccttgagaaaccatccaaacccaacgcgatagaaagccagatgcagcgcaacgcttacacatagtaccacctcgctagctgaaagaggacgagcgacctataaaaatgg

SEQ ID NO: 83030 - DNA, 345 bp, Zea Mays
gccggctgtaatgctgaagttactttcagtcaagctagttgagacgaaggctgataaggctgaaaagccaaaaaatggagaaataaccaaaatgccaaagatttggagccctccaacggagataacagtgccgaaggtacaaaagggttctgccacaactcctaagaggaaaaggatggcgaatgtgctggatgttgtgttagaaacaacaaaaaccttgagtcctgctcctccaaggaaagttgtcgaagcttccaaggcgcaacccgaagctgatcctaagcaggcagaaatcgaagctgcaacaattcaagctgaaatcgaagctgggcctttagtgcccac

SEQ ID NO: 83031 - DNA, 843 bp, Zea Mays
gttgccgacttaagccgattgctccaatagcagggcatagtggtcaccccgagttaagtaagcgcgagcatgttgcaccgtcttaagtcgttgccgacttaagctgattgctccgttagcagggcatagtggtcaccccgagttaagtaagaatgtaggtcgatcatgaacaagttgtgtattcttgaagccttttttattgatgacatatttcccattttacagagtacattgtcgtcccgatagcttttgaaatacagctagggataaaacttcctgaggtgttctatattccatgagttcctgatttccgtgtcgtccatctgagtgagacgatatgatcccggccgagtgacttctgctactatgaatggtccttcccataagggtgacaacttgtgttgtccctcccccgttagaattcggcggaggacgagatctcccactgcaaaggatcgtcgtcgcacggccttgtcgtgatagtgtctcagagtttgctggtatcgtgctgattgaattactgtgttcagccgttcttcttcgagtacatcaatatcctccagcctagtagcctcggcttctgctatgctttcaaagaccaaccttggcgccccaaacttgagatcagcgggtaatactgcctctgacccatagaccatgaagaaaggagtatttccatgcagagctcgactaggttgagttcttaggctccaaacgacgtagggcaactcccttatccattttcctgcgaacatttcatttttatcgaagacctttttcctgagtgcctctaatatcatcccgttagctcgttcaacctgcctgttggctcttgggtgtgcc

SEQ ID NO: 83032 - DNA, 461 bp, Zea Mays
ttacgttgcattaatagatataatctatacaatgagcttttaacgtaaatattcatcaaatagtatcatgatcataacatttcaatacaatcctatagaatgtttttgtataaatgttttacaatcatgtcaaattatcgtcatctgaaccatgttctgcagaatcaatatgtttatgcttttttgatgtggatgtctcattccactgcggggccattgttgaatttttgtttctagacccaggcggtcgtcctctttttctatcagcaaggctagccaatttaaccctattttcctctatatacaggcaggtgcgactgttgtgtccattagtaatgccacatttttggcactttcaagtcttcttcttttctcctttcgcacccagtttcacaactctttgctcactagttttgatcgtccttccctttggccttgcattatttgggcgcactaagctt

SEQ ID NO: 83033 - DNA, 557 bp, Zea Mays
acaaaatgttgccacaagtttaatctcgatgatccttgatgtgcgcatgcagcgcgcatgcatgcaagaattaaaaaagcacacgtacgctcaaaacagctagaactaaaatttatcgaagcttatcaagaaacagaccggtacgtgtgggtacattattctactctaaagagatacaaaacttaacccctttcttccacgcaaggtttttgccatgctagtcgtcagcaaatatcgtctcaacgattgtcaccaaactagaggggcaaaaggtcacgaaacttctgcggctgtagaaatctcaccaatataatgcagattggactgtcgacatcgatcacgagatcagataatcatcccttacacaggagcacaaaggacgacgccttcaaatcatgaagcctgcattgcttgcgttgcgtgcagcaaacataagcgtgtcactgagtttggccttgctgtttccgtcacgcacgtccggcccgggtctctcgcatcatcaccgtcactgcacgaacgccgcctgttccgtccgtgcccccgtgacgcgcgcgccc

SEQ ID NO: 83034 - DNA, 538 bp, Zea Mays
taggtacctctaaaccctaccactttaaaagttaggacctcccacctgaagttggatagggtcctaaagcaaacgggcaggtcgatctgcatgagggggtgaactcttctatcgagagtgatgccgtgaaatggcgcgaccccagcctagacctgggaccggccgatccccataaggtccaaggtttctgcatagatgatgttgaggatgttgcctccatacatgtgtaccttgctaagtctagtgttgctgatgattggggacaagcgggtacctcctaggatttgggacgtagtccgggtgatcgtctcggtcgaaggtgatgacgcggtcagaccagtctagatagacaagcgccgctatctcaatggagacctcacgtcgttcctacttccgctgtcgtgtggagaggttcaccgtctgtccaccaaagatcatgtagaagttgtggacgtctgggaactcttcacctagacgtcttcgttgtcaccgaaacctttgttcttgccatcatctgtagaggggtcaggcttgttgt

SEQ ID NO: 83035 - DNA, 946 bp, Zea Mays
aatcatgatccagtgggaaattgactaggaatgctatagcaaaagtgaatatggtttgtagggctacaactttgctgcagagcattggttgtgttgccatggaaaattgggagaaaatatgtcctaaacatcgactgtcaggctgtctgctgaaacatcccatggtacagtagctgaatcagatcccagatgcatccccctcgccgccgatgatcttcacgtcgtgattcacgccgtcgccgcgattcgtgttcgctggtgaggggataaccacgacggagtaaaaatcttggcactggatcagctcgggctcgggcgcggatgaggttcaccgtacccacttgctcgtcatgcggccgggatagatttcaccaccgttgatcgctcaccgttgtgcgccatgtgcttaaacgctagcccatgtcgcgttgaatcatggtatgcatgtccggtgatcgccggagggctgccacggtgaaagccacttatcccgagcgccagtacctcttttcccctccggccgccagcacatcctcgtgaaattggacgccaccgccgttggaggctataaattgccgcccccgttcgctctgttaggtaattgcgcaaccagtgaagcaacccgtgcctcaaatcctcccctaaaactccccaatttgggattttcccccaaatccctcaagaacaccgagcagtttgacctcgccgtggccagcgtgtctcaggtccgctcataccttctgccctcccgttttagtgttcttgtgtgcccctgatactccccgaccaactcaattgagctaggatcccttagatcatcggggacgcggttgactgtccgtgatgcctgctgtcaccgtggacagagcaaattaggtagcctttcgtgaaattagttgagggaaaacgttggttagggattgaattcagtctctgccatagtagg

SEQ ID NO: 83036 - DNA, 1561 bp, Zea Mays
gcaagagtctaccttatgctgagttctcatataataatagttatcaggccagtctgaagatgtcaccgttcgagactctgtatggcaggaaatgcaggactcctctatttttggaccagactaggggaagacaattctttgggcctgaacttattcaagaggcagaagaacaagttcgtataattcgagggaatttgagggtagctcaaaccaggcaaaagagctatgctaataatagaagaagaccacttgagtttgaggaaggagattatgtgtacctcaagtgtcaccacttcgtggaatgaggagatttaaagttaagggcaaattgtcccctcgctatattggaccattctgagtttttaggcgagttggagagattgcctatcaactcgagctacctggtaatctacctgatgtgcataatgtatcccatgtgtctcaacttaagaagtgtcttcgtgtccctgaggaacagttaccaatggaagaactcagtgttcagggtgatttgacttacacagagtattcgatcaagattcttgacactatgattcgagttacaagaaataaggctataaagatgtgcaaagtacaatggagccatcatgcagaagatgaagttacttgggggagagaagaactccgtatagattctccccatcatttccctagtccttcctaaatctcgaggacgagattctcgttaaggggggtaggatttgtaatactcaaatggtagacaataaaagtacgagatagatcttatatgtattgcctaccaagcatgagaaatttgaagaatcataattaaagggaatgagtaactaatgaagcaattaatctatgcctcattttggagattgtatttgtgcattaaaactcaaacaaataagtaaaacaagcataactttaaaaaaatcaaatctagttagaggattaaaatataggggcaaaggggtgaaaataatgggaagaaaaaaataaataaataaggcaaacagtatgaactatattcacatttagaattctattaaattttcgcaagacttagaaattcaaaaccataatttgaatttagattgaatctttgatttggggataaaacaggaattttttaaaaaagaaaaaggaataagatgtttgttgggccgtcagttccccattcggcccactcctgtcttcggaaccggccaattcgatcccgcgcagcccatctggcgcgctcgcttaccagccactgccgtgtggggccatctggtcggcgtcatccgcatcttcctcgccacgacgcaacgcaacaaccagggagtaccgaacccagccgtaagtgcggtaaaacgccatgattctcggggcggatttgtagctgatagttacgatgtggacttcggcctcgtttccccctttccctggcatataaagctcctgtgtggctgcgagttctccacccgtgccgcgccgggcaagtaatatcatcggcgtcgtccgcggttcaaggttcgtggtgccctgccttagcaattggggtcgcgtgggcctgcccgtgggtgctagcgac

SEQ ID NO: 83037 - DNA, 375 bp, Zea Mays
acttcgaattggtcgaatgccgaagaccgtcgaagcgatcttttttgacatgttgcacctgagtttttgtttttgcgggggcttttgctggtatattacatggctccgcctcgttaaaaacctcacccccgggaggaaaagagtgcgggccggaataacattgtttgatgaattacaagggcgcgtgggccctgagggttaatcaaaaaattttcggaggctgtcaatgttctaggagtgctctaagtcttcgccggaaggcgttactagcctgtacgcgctgggggatgccttcgaattgacgatgaatggaccctcccatttcggctccagcttgccctgtgattctgtccgggtggtccggacgagtacgag

SEQ ID NO: 83038 - DNA, 344 bp, Zea Mays
ttttgcaccttcggcaaacatgtcgttctcattggactcaggatttctggtatttttgtcactttttccatctgtggctctttggccttattatcttcagccttggctggctcaactgtagtcatcttcggtactacactcggctctacagccctctgcataattgaaacactctcttttgcttctgcagctgaagaagtacctttgccaagttcaggaatcacggctggttcaaggtaacgcgccgtgtgagtcagaaccttcatcttcttgcccttcggctcagctgtgatggccgaaacaacaatctttcccgaagcagtaatctttctctttaaccctcg

SEQ ID NO: 83039 - DNA, 446 bp, Zea Mays
ttgcaacccatgattaccttacttgagcaaggagtatctttttaatgctttgggaacactttggctatgactactctggtagatcaaaaccactggctgtaaagtatttatacttcaagtaatatctgatggcgctccttctatgtgctcttgcatttatcagcactcaaggttccgagatttaatcagcttatattgcacgatgacttttgctagtgacagtggggtgggggggttactttacaaatatgttactggttgagtcctcattccgattgttcttcttttcaaaatccattttcaatgacaccacacacacaaaaaaaagaagttatccattcagttttggaggtggcccattttgtgctcctcagttctcatgctcctgtgtgtcaggacatatgttttctactacggttcacgcggctgctctggttttctggtcg

SEQ ID NO: 83040 - DNA, 564 bp, Zea Mays
tgggctcaagcactagcagttcaagatgacatagtcattgaagtcatggtcaaggggctcaggccagggtcagcagcccagtactttgcaaataagcctccacattctcttgagaagttgttgcaagagtacataagggccaacaacgacttctgccaaagaagggaggagttacaaagatacaccgaagccgccaggggctttggccaaagatttcatccaaggcatgtccaaagcatccataacccggtgcagagtgaagaaaatatggtccagtcttatggtcaatcaggacagcaacaagcagtctcttagcagcaaccttctcatagcacattccgaccgcctgctgtgagagggggaaggggaggccgaacttttggaggcaggttcaatgcacccccaagaaaacattttgtttgttttgtggtgacgacaaaggccacacaacaagaacctatcaccatacaatcaacaagtaaaaagagcttcctttgtcagccactcaaccttcccagtaaaaagagcatttgaattgttgaagttgtggataatatgggttag

SEQ ID NO: 83041 - DNA, 304 bp, Zea Mays
aagtggcataggaggctaggtcatttgagcttcgatcttttgtgtcatttgagctcacttgacctcatccaaagattgcctaaattgaaatttgagaaagatcttgtttgccacccttgtcgtcatgggaaaatatattgctgcttcccattcctcagtcacaaaggtgatgacctcgtagccccacgaattgcgtcacatggacactattggtccaactcgtgtttgctcttttgggtaagtggtacgttcttgtgattgtcaacaacttttctcgctatcttgggtgttcttcattgcggcg

SEQ ID NO: 83042 - DNA, 685 bp, Zea Mays
ggtgctagactgctagtaaattctaagatcatcgatgcttcatatgcatgcatgaatgggaataactactaaccttccaatgttaatcactcaatgaaagtaaactattattatttactatgtcataaataatttctacattatttgcacattaatctggatactggaaaattgacattgacacgaggaattatcccctcctgtttctcgtcttttgcatgatgtcattgtgtggttttcagatgtagaatatattgtttgactgcgtatcagtttgtatactctgtgaattatgctcattatgacagagatataccaaatttctgctggttacgtgcaggcaatagggaagccagtgaataatgttaaaatggcaacactggtgtgaaacttatttgtctatgtgtgggaacctctgtatttagtgagtgaagcatctttattctctctctatgcagtgttgttgcattcgtcacagatgagtcttcagttacatgctagggaaatttcgctatgggatgttaaacaaacatgatactgtattggtcagttcacactgctattaccgaaatttgctaggttccattatgaaatcatgtttatttgtcgtaggacactgcaacggttatttttgttattttctcaggtctatggagtgaaaaagtaggaaaaatgtcctttttgc

SEQ ID NO: 83043 - DNA, 556 bp, Zea Mays
ttttgatctatttttctatcgacgtttcactgctcagtccactcttcatctgagccatttgattctcttccctagcgcaagcccactcgtggctcactcgcttcttcggtcatcgactgaccagtaagtcgatgacctaactcgcccgctgcagcgcaccttgccttctcatcacccatcagctcgtcgactcgtggcgtcatctgtctctcgctaactcattagggtctctccacgccgtcgcaacacgacaatggctatcgcttgctgacaccgtcatctatcgctacctcgcctcatgcactcgctcctcccacacgtcgtcgtctcaccaacgccatctcacgacaaatttgatgactctccagaacgacgcgccggtgcggctgctctgccctagtgcctcgtccttagtcagtccacctattttctctctctagctctactttaggtagctaaaaaggtttttggtattcatatcgtttttggaaacactagatattattatttagcattcatgttattatcattaatctacagttatggtctagtctga

SEQ ID NO: 83044 - DNA, 832 bp, Zea Mays
ctcatctggttgataagatgtacatggtcaacgagatttaggtcacaactttttaaaattttaataaacctttaatttcaactcctataaagcaccgtctccaccatcatctatcataattttattaaaccccctcaatttttcttcatcaacccaccgttctcccctctctctcctcctagtgtatctcttgcaaccacccttagactcttcttctctgcaacactccggtccctagcttctacctctccttccaaacccgaggtcatcactaggtcctttgtggcccatgacccgtgagcggaccccacctcctcgtacatcattgtggctaactaagactctacctctgtcatctcctgctactcaaactaacacgacccacccctcctcttcgcattcgcagatcggtgatgcctccttgtcccgtggtccgtgtgtcgatggctgctgtggacccgccgtcacacggggaggtcgtgcccatgctgaagcaaagtgccggcatcgaccaggtccctaagggcacgtgtcaaaccctgcaacgcctcaacgatgacctttgaggtagtgacatagacccagcgcactcgttgtgtctacaaacataaggttgtgttgtcccttatggtttgggttgaacatgggtagtagtttggtgtgagtcttggactaactagagtatgagagcttgtgttctgcaaccatgtctgtcggcttatggtgtgcaggtgtggagcgtcgggatggtggttgatggtgaaggtcatgcttgttcatgccgaaggactcgaagtcgtaaaggatgagcgaggggacttgactgagagat

SEQ ID NO: 83045 - DNA, 531 bp, Zea Mays
agagaactcagtttcgaggaaggagattttgtctacctcaaggtctccccaatgcgtggagtcaaaagattccaagcaaaagggaagctagctccgtgattcgtcggcccctatcctatcattggtagaataggaccagcagcttaccgccttcagttaccagagtccatgtcagatatccataatgtatttcatgtatcttagctccaaaaatgcataaaagtaccagagagtcacatcgcagaggagtcagttcagattcagaaagatctgtagtatcgagaaaagccagtgaagattctcgattcagccattcgaaagactcgaaactcagaagtaaggctctgtaaagtccagtggagcagagaaggagaagaggaggctacctgggagagtgaggactcattgaggaagaaatacccttacctttttctcaaacctagcctgaatctcgagggcgagattcttttaagtggggtaggtctgtaacatcccagttttgatcccaaggttagaaaccctaaactccta

SEQ ID NO: 83046 - DNA, 505 bp, Zea Mays
aaaaaaactaagctcagtcaagttagcacttcaatattttaaaagttttccagatatgaagaacaagcatacacatgaaatttattgatgtaaaagtacatagatattcacatgatgaaaagtgattttgaccgatagaattaccttgaaatggcttaaataagcattgttgtcatgtctaagttaaattggcaatgatacctcaatcaggtcatttagcaacacctttacagtttatggccatctagcaacccctcgaattttcttaagctcgatcaggtcatcgagcaacacgccaacacctttcaagtttatggccaacaaatttcatgttgggacagctccagggtccatcttggacctagatttcctatgctaaaatcaagtcaagagtccttttactagaatggaaagaaaccaactcaaccgaacaactcaggtgtatccacaggccacagctccacctctaaatatggatttctctctgccaaacagggccacacat

SEQ ID NO: 83047 - DNA, 1113 bp, Zea Mays
cagcgtgttcttgggctcgacgcacgtcacaggccctatggcacctggtgtacacttgtttgaacatgacatctccctccccgtcgagagccagctcgtccacgagctggaattgggggaacttggtgtggaaaggcacgacgtcttccaaggatgctgatgctgccaacgtgcccttccactgcatgagcacctcatgtacgccgcgagcaggcggtaccacaccacatgctctggttccgggctaatggcgccatgatgctggagcggcagtggtggaggttctgtgggtggcagcccctggtacttcttgagcagccccacatggaacaccatgtggatgcgagcgcggggaggaagctccagccagacggcgacctcgatgacgagttcgacgacgcggtagggcccgaagaagcgctgcttcagtttgtcgcccaccacttgaggaagagacgacgccacgtgctgacatagtcgaagcagcgcccaatcaccgaccatatatgtgactttgcggtgcacacggttgtagtggcgtttctggtacacctgtgcctgctccagacggtagcggatgttcgcaaggaacttcgtgcgctcctccatgctcttggcgacgggcggcaccctggtttccccgggttcataggaccagatggaggaaggatcacacgcgtgtagaccacgcggaacggggtgtcccgcagggacgtctggtacgccgcgttgaagaggaacttcgcccatgggagccatcggagccactcacatggtctgtctcccaccaagcaccgcaggtacatgaggatgacgtagttggccgactcagactgcccatcgggctaggggtgaaacgccatggtcatatgcagcttagtccccatcatctgcatcaactcctaccagaatgttgacgtgaacaccatgtttcggtcggagaccatggactgtggaacaccgtggaggcggacaatgtcgttgaagaaagcttgggcgacggattcagcggagtacgagtgtgccaatggaatgaaatggcagtacttgctgaacctatccaccatggtgaggatcactgtctcaccgacttgccacagacccgtggcagcg

SEQ ID NO: 83048 - DNA, 1015 bp, Zea Mays
gtggattcagtgcccttcagtggttgatggttctagcattgttcgaagcaagattgtcgccgcagcgaggttcaggctggccctatgaaaggtcagagggggtcagccctgtgtctttcatgatgcggcggtggacatcgcgtgacttggtacgtgccccccgttggggctcggtctgttgtttcctgcttgagaacgtgctgaagctgttgtagccataccttgttcttcttggagcttggcatgtagctcgcggagctattcaaggtgcgcgatctgactcctcatgggggtatgatccgcaccttgttcccttggttcttcggcgtgtggtgctggcgtcagggcgttggcctcccaaggcatgccaagctgctttccctctctgtgctcctcgtgctcaatatggaagcactcccgaatcaggtcgtaaccctcatcagtggatctgtagtcgttggaaccatcagagaggtagtagtcacatgcgaacaataaatgccgcatggccctgggatcatggagcccggagaattctaggccaggactcaaatcatcccctacctctaagcctacatactccaagtttggagaggttgcaagcagatctaatgtcgaccgcagatgatgacctgggagttcctcatacatacttgtgtaggtgcttgtcgaatgggggtatcctggaggatcgaagctaaaccggaaggggacagaattgaataccgatggtacctcccgactcactggtggagccagcacctctcgacccacaggaggggagccggtgaagttggcacctcccaatccgtgggaaggggagccggtggagtcagcgttggagcaacgtatgttgatgtcgatgcttcgagtatgaagctaacgcacgacaggtccctcgcaagggagtccgcattgtcagtctgcctagaagcaccggttgggcgtggagcgctgcccatagcacagttgcggtcgttccatctctatctcctcccgcgagaaggacggcgac

SEQ ID NO: 83049 - DNA, 518 bp, Zea Mays
gcagaacacaactgcagaccgcctcgaccagcttttccatgccttctctatccaagttcgtgtgagcaccataacattggtgagctgctggtcctttccaagccgattgattaaagtctactatcttgtgtagctcgaaacaggctcaccagagctcgggctccgccatcgtcatgggcagacatgaattagggttgggccattcaaattaacttaagagaagtgctcgggtagcctccgggaggatgtccatgtacttgctaccgccggggagggtcaccggcaacaagaatgcacagctccggccaggtgctcgaccggtgcatggtcagggacctggagttgtaaagatcagagaaggggagggcttatgggaaattgttagtgacaaagtggaacagttccacgagctctttattagttgttaaaaatatcaggggcctttgcgcaaagtcatcagcgtgggtgtgggcgcagtcgcgtttccctgtcagtgggccgatttgggctgaactctg

SEQ ID NO: 83050 - DNA, 476 bp, Zea Mays
tttttagatggagggcgtaacataatttgttactaagatggatcactatattaccctgatacgacgatatggatacgtgatacgccgattctcggatacgttatttctcaaaaaatgtcgatacaacgatacacaaatatatattataaaaataattaaatgctggaataatggaccacataggttcgcaactagtacatagttaataaagttcaggccatcaagtcatcaaacctaggaactttagtctttaggttcaaatagaccataatattgcatcaagctagagatgtagcagtcagtagatccacaaagtcaaattgtcgcatggtggctcaaattgggggccgacgacataattcagtgagtggcggcgggcgagtcgaagcaccgagacgtctttgggcctttggctgctcgatataggagcacgactatgccaaatagttatgtcgggtatcataactagggatact

SEQ ID NO: 83051 - DNA, 437 bp, Zea Mays
gagttctggacgctgcatgtactccgcactgcccggcatggatttcatctaacaattgcttcccaatagccgagtgaatgcacttcatgaggactcctgctgcacctcttctgtacagtatgccccctatgagggtgtagtgggctgactgccttgcgacacgttccgctgccgccttgtcatccggttcttcttcatttttatgtacctgatgataggctctctccagtcattggggtccgactctggttggctcaaggtgttgcactcttccatctgatctgagaggatacttggttgtgatatttcttggacgaagatcctgggtggagcctaggcccggctggatcccagcttcaacaacgcgtctgctgccgcgttgtggtctctttccacgtgatggaactccaatccttcgaatttgtcctccaattttc

SEQ ID NO: 83052 - DNA, 350 bp, Zea Mays
gctcaacatctcgccgcatccgaggctaatagaaatgagtaaacaacacatcctcggtcttcttaacaccaaaatgtcccatcaagccacctccatgtgcttcctgcaagagtagaagacgaacggggctagctggaacacacaacttgttagcacggtagagaaggccttcacgcagcataaatttttgccacgttcttccctctctgcaattttcaaaagcatctttgaagtccaaatcagcagcatataattcctttatagtctccaaaccaaatattttatgattaagttgggacaacatagtataacgtctagataaagcatcaacaattacattatcctttcct

SEQ ID NO: 83053 - DNA, 923 bp, Zea Mays
ctccgggtctttccctgggcctaaccgaccactatcccacagaaaatcggattgtcacggcttacggtctaggttactcggttcgtggcagacatcgaggtttgccgggctcggttgcagagctacaatgcgatagaacttaattgataggcacaacaagtattaagaactcaccagaagcccaaaacggtagtgggacggcttggacgaagaacatagagggcggtcgacgttgagatgtctgacggcagagtattccaacgtcgaagagctgttccgatgaggtaacagtgctgacattaaattaaatggatcgatgagcatccatagcaccggaggaagttcgaacggtgcagaattaatggaatacttgctctatctgacctggccacggagagactctccacggcggcgacgatgaccgtttctagggaaatccggtgatctcggtcgatggtggacaaaaagggatggttggtgggttgttagctctgtaactgggaggtggagatcagtgcacggtcaatttggatgacggggatagggacacagtgaattttaaagggccgatgacccacggtgaaaacacaggcgatgagcttcaccgagcctcgctggccttcacgggtgacgccgagcacgattcttttctagagaccagacacgtctcgccatggctatgatgtggttaattcggcgatttcatggaccaacggagggaagcggcgtcggtgacccggtacggtcataagggccaacaatcgcgtggcggccagggcgttcacgcgccacgacgtcgatcttactcagtccacaaagatcacgacgaatagatgcacgtcgagcacccatccagaactctgcgcgtatcacgacgccgatcaacgacggcggcgagatgcagtgcatctgactctggatcg

SEQ ID NO: 83054 - DNA, 730 bp, Zea Mays
ttcaacttctagccacttagcttctgggcatgtgacacttggccttctgtcgtaatttataaataggaatgcctcacaaactttgaactttcactagcccattacctcctagtgttttgcctctgttgtagcttcgacttccatgaaaccctacatcatttagccaccaccactagatttcgaaccacctccaactacatctatggttgcatcacaccctcatgaatctagggcttcctctgtgtattcgaaagaattgaagtctttgatgataatgggctactacaagagaagaatttgatccaatggaaggttccaggcaaggattcctttcccatgcctaatgttgactcgatagttgtctttccgtagttttttcttcatagatttggtctccccttctctcggttctttagggagctcctagatcactattcgatagaacttatccatctaaatcccaatttagtttcacacatttccatcttttctcacctttgtgaagcttccttgagaattcttttgttcttcccctttttcaatatctcttcttcctctaccctcgcgcaagcaaagagtagcccaaggtagtgggggcttagggatttagttatgcgcaaaccaccaataccttgattgcttatgaaaactctcataagaattagcataagcgttgattttatttgggaaatcacaaatctaagcttctagagtttataggatatgcatg

SEQ ID NO: 83055 - DNA, 624 bp, Zea Mays
agcggtggccgagaattggaacgatgacgcgcggcggtcggaggagggggggtttcactggcgcagtggattggtgtcctataccgtggcattcactccagtgatcaacagagagctaaagcaggtcatggcgatgcggtggagatgcctagacacgcgacacaaggccggaaggcggcggtcaccggcgaactcatccgattacaccgtggcgagtgcggtacaatagacggaatagtttactggccggagttatccacgtcgacgacatttacgcgaccttgagcgctatctgatcaacccgagcacgaatcgaaacggcggcggcacgaatcgcggcggagagatcgtcgacggcgagaaactgagttggcggtctgatctacttcagatactgtaccatggccattcctcattcagtgcacctgatagtcaaagtttagggcgaattttctcttaattttatttagtaacatgatcgacactctttagcaaagttatagctctaggatccagctataatcttggtatagcaaccctaggaaaattcttgctcgatcatgcctgaattcgtgcccaaagttcttgcagttgcactgttagtctgaaattcagacaccaaac

SEQ ID NO: 83056 - DNA, 392 bp, Zea Mays
tttttggtttgattcctcagggccatcatgcccttgtaattaaccaaacattatcattctggcccgtactcttttcctcccgaggggtgaggtttttaatgaggcggagccatacaatatacccacaaaaatcccccgcaaaaattaagacacgtcgaaaaagaccgcatcgacggtcttcggcattcgaccacaccaaagtcaccgcgaggggcagcgcttactaccctcgcgtgcgacactccatgcaaaagtcgcctacgggtgcagccggaacagcacaataagtgcgaaaaatcgaagtcttttccaaaagactatccgtgcaaaagtcacctatgggtgcagccgaaatagcacaataagtgcgaaaaatcgaagtcttttccaaa

SEQ ID NO: 83057 - DNA, 572 bp, Zea Mays
gcgccgtcgagcagcaacataaatcaatgttgtcgactactttgtgaagaggaatgacttctttgtgaagaggaggtgactcagcacttctccgcaagtctaaggagaggggcgatgggagaagctctagtggcaccaatgacaagaagcacggtggttacgagtgaggttatgggcatgacaaaggcgagagctctagctatgtatcacgcgatggcaacaagggccagttcaatgatggacaatccttgaaccacgaccaatgcaagaattgcggaaaatacaagtattggaccagggattatcgttgcaagtccaagggcaaggcccacatcgtgcaagctaaagaagactcaaaggtccactactaatggcatgagtcgctgtcttccctaatgtgtcgtcgtcaccacaagccgctgtggatctatctctatccgagctcctgcccctacacatcatcaaggagaaggtcttcacgtagctcgacggcgagatagagcgcgatcacaattaactgttatttcatgtttgatccgaccttcgggatagggaacctctcttgtcagaaa

SEQ ID NO: 83058 - DNA, 510 bp, Zea Mays
ttgatcgacgatgagaaaaagggaaaagtgtggcggctagccggattggtgtctagctcaacgacggtgatgatttttctaccccgcgacgttatccatttaccctgggcacgaatcgagatgccggcggcacgaatcgcgtcggagagatcatcggcggcgaggttctgaaccttatcctcccggggcactgtaccatggcgaggatcattcagtgcacctgacagccaaagtttagggcgaattttctctcaattttatgtagtaacatgatcatcaccctttagcaaagttatagctctaagatccagctacaatattgttatagcaatcctaagcaaattcttgctcgatcatgtttgaattcatgcccaaagtcactgcagttgcactgtcagtctgaatttcagacattaaacagcctgacagcccaacttcaggctcacttatctttaaattcttcataacaacaatgcttactcccttaagcaaagttattctcctttaata

SEQ ID NO: 83059 - DNA, 480 bp, Zea Mays
cgaaggcagcagcaggggcagtgacggcagcggtgaaggaagcggcgacggcaacgccggtagcagagcgccaccgacataagtattattatagtatagtagtagtagtggtagtttagtagtagtataatgtagtttaagtagtaatgtaatgtagtgttggatcgagcggcagtaggctgaatcataatgagtcggtcttccttttgtaatgatccccaactgatggaatgatgaatgaagcctattttcatgccaccttgctgttgcgtattctgttcttttgtctaacgatctgttagctttctagaggtaatgatcgagtcatgttactttgctgcgaccaaaactctcctgagccatcggcctatccttctgcgcccaactcagtgtaccaacatgtacttttgtcgacgtcctcttggcccctgaaccctagttcatgttttctcctccgtcgctttccagctttctaagttc

SEQ ID NO: 83060 - DNA, 585 bp, Zea Mays
agggaagtggatcagagaactaccatatgtggtctggagcctgcgaacccagacaagccaagctctacatggaaacactccattcttcatggtgtatgggtcgaaggcagtgctaccagccgatctgatctttgggtcgcccagattaacttttgaaagcatagccgaagcagaagcaactaggctagaggacattgatgtgctggaggaggaacgtctaaatgtggtaattcaatcggccagataccagcagaccttgaggcgctaccacgataaagcagtgcggcatcgatccttcgcagtgggagacttggtccttgtaacaccctaaatctagcaaaaacaaacaaccctatttggattattaaattttagtagaaaggaaaaatatttatgttttcaaataaggagaaccttgatatatatgatttgaagaatttcttgaatagataaaattatcaagtgtttgttacactcatgccaaagcatatattttgtttgaattgatttgaaaatccaatttatgaattcgatcttgtgaagaaaatctcattttacaaaacaataattaattgctaaaataag

SEQ ID NO: 83061 - DNA, 871 bp, Zea Mays
ctaggtacgacgggtgacgactggtggcggcgcacgagcgcgactggcgatggagtggcaacacgcagtagtaacgggcgcgccgacgcggcttgcggcggtggcatgcaattgcaaatcaatctgactgtaaggattcaatatacaacatacatctgaccgtaaaaattcaatttatatcatacatctgatcgcaagactttaatttagattgaacatatgagtttagaattgattaagtatgcatgcggagataaaccctttagcatagaatggttcggtaaggacggtgacttgccgacttagtggagggttggtatagattagattcataacaatattgaggtagagaagtgttgataacatgttctataatgttattacagatttctgaatttgaggtctaagatcttacgtcgataacgagagaagacttatttcttgtttatcttcctgcggcaacgtacgcagagacaggagacaattggacgggatctatgcctctctagacgtgcttcagtgattcattccatggtcgacgaggagctctggactctggtggtttgtctccggatgttcggcacttcacacttcggagcagcgacacgtggcaactcagagctagagatgggaatggaatgggatgggaaagaaactctggactgaaaggatgaagatgtgaactggaggcccacgggctcgttttctttatgaaccaaatttcactacgatccagataggtcgttcaggacactggattagggccccctgtttctctttcactgcttccgcaaaagctagggcgcgatctgacagcatcaggccgtggcatctaattaaaaattgggctttgctttgggttggtagtcag

SEQ ID NO: 83062 - DNA, 737 bp, Zea Mays
tgagccacgaggggctcgaaggtggatttgagagaggggttatactggttcaggcttgcgccctagtctagtgtagtgctgatcatagtattattgcttggagcatgttacagttgagtgcttgtgtgttgaagatgggggttgtcttgtccttttatagttcaagagtagattttacactgagaacttgcattcttcccaggagaagttcgatctattgccttgggttgccttagccctcctagcgtcgtccataggggggtgctggcgattcttgatgtggcattctgtcttgtctacccgatgtttttgtccctgtagcttatctgatgccaacatagtggtacacggcgggtcccgcagagtggcctcatggtgaggtttagggttgtatttagtacaacttcatcatctatcatgacccttgcgtcacctatcggtacgcgttggcatacaactggtatggcgtactatcccgttctttcaggtaatccgatcactgtagaggctccgatgctgaggtacctgtgaatgggtttaactggtcccaccggtgaacgggggcacatctgagaacgtattgggagtcgtgtttgatagaggccctttgacattgttcccctggtacagacatggtttggtgatggtttgttttatcgtactgacgttgctcagtggtactcagtcagcccccgccccctccccttgacctgtgggtctgcttgctagagggttgg

SEQ ID NO: 83063 - DNA, 1037 bp, Zea Mays
atctcccagccacttccaagaggccacactctgtaagcaatatgctcctagactaagtccctagtgccaatataagtacataaagtgttaaagtccgtatggcatgcttgaatatcatgtccatggacagtggttggcctcctaatgccgaagcgagaccagatagggcattgaatgatcccctttatatcttctctttcaactaagttgttcttcacataaaaccactcttgcatccaggctcctggccacctcttccaaaatgttgggacgggatagctcacaccagagcgaggcatgaagccgtaacaacgaaaattattatgatattgttctatgccagtagcctttgtctcataggacaggtcatgcatgttgcagaagcattttgcattcggctctaaaccctggcccaaatgaaaactcccattctgatgatatcttcgggggtaatttgatgaaggtaaatttcaaaagtcttcaaaacttcaactaaaaatttgttcagggagaatcgaagccctgctttcatagaactcctgtagacaacaacttcgtctgcttcgggcataggggcactgctatctcctctggccctcatgatagaaatatcgcggaagtatcttcctttcattgcatcaatctgactctgtttgatggttgatttagcaaagatggtatgactcggtcgccagggctgatcttcgacatcttcgtttccactttctaagtcaaaactttcactatcgctggaatcttcagacaacccaaccaacatctcattggtgatcttcttcatatttgtcttctccatagcttcataaaacccggccaatgcagggtcagcaatcttcttctctttagccatttagacaacgattgcacgattgtcgaagcttaaaactcaatcaaaactcgacagagcaagagaattcagaatgtctaaaatagcgcaagcaactgaaatagcacagcaaatgctgccaatgcgagtttctatttatatgcctcacgatttggtgggccatacatgtcag

SEQ ID NO: 83064 - DNA, 520 bp, Zea Mays
atgggggcaatcttaccggtggttgatcggtgtagagagccgacgacggggtttggcggcagtagcggcctccgtcgagcaattatggaggtccaggggcccttctcgtccagcgatgtgatgagcggctccagtggtgtcaggcgaaactccctgcactccaattcggccacgggtggcgcggtggtctgggaacaagtacggcggctactttctttcgcaatggcgcacggtggcaatggggaaagggagaggaaaggagggggtcggtccgcagatatagaaggtgaggatcacgacgcgcagagttcggtcaggtcatgggccagcgcagattgtggcatgcgcggttgcggcggcttagctctgaactcggcggagttaggcgacgacgcgcgggttccgcgtgccagagatcgcgctcggggtggtcaacagttctcgcgacgcgcccggggtctttgtacccaggttgagggggcaaatctcgacctgatcctccgatcaacgcggcggctgt

SEQ ID NO: 83065 - DNA, 742 bp, Zea Mays
ctcggcaccaagaatggctgcaagacagtcaccttgaaccgcgacatggaaacgaagcttctgaagtaacggatctttagggtcagcaaagccatccaataaaggactgccaaaagaatcagctttatcatcaaaaaagtggtctaaccaagcggtaagactcactaatcctgggcctggctgcagctctgatgggcataagctagcataaatagcataaagagtctccaagtgaccatggacgtcagagcaaggaggaataaattcttcataaagacgacctgaaatagggatccccatcgcatcagagatggtatgtagtggatatcccatctccccttgactggtaaccaatgtatgtccgtcaacattccaatatgtcaagaaggcagctaccaatgatgggtcagcttgaaaacaataaagtgaagctagtacaccgcgatagatatcagatttttgcagcatacttcggtcttcgtggttcaccagcatcatacgggcccatattaacatcttccgacatacaggcacatccaatcgaagctgcggccgacagtcgttgaaccaccttgatgagggatgcttgaccattttttgggctagtgtggaggtcgagctaggaatgtcgagtgacctcttggatgagtccagtaccgggtgaagaatgtgtgcacgaccagcgtaatctgacacagacggttcttgtgggttcttttgaatgccaaagggaatattatcc

SEQ ID NO: 83066 - DNA, 646 bp, Zea Mays
cggcaatccgacgggaatgggaggcactcgaggccgagcgccagtgcctcggtgattggagcacctagctagaggagtgcaccaaggtggcgtcccactggtttgccttcgagcggtccaagctggcgtgaacccgtgaggactacaagcgggacctccagagggtgttcggccgagagctagaggcgagccggaaggagaagaggctggccaagaaggaggagcacctgaaccagagggaggaggtcatcacgacgctcaaggaaaagctaagtgcctataatgtaatgctggaggagcagcgggtcgagcagaccacggctgtggtgagtctgcaaaagctgcagtaggagctcgacgacaaggccagcaacattgctctcgccgaggagaacctcaaggcgaaggatgcctccctagagaagcgggcgactgatctcgcctggcaagagaaggacctcgccttcaaggagatgtgtgagaggcggaacaagttgctggccaagcatgagcttgaggcagagaaagagaagcaattggaggagaaagagcggacactggaggagcaggtccaccggttttaggcggcgcaggcggccctgggcccccaggcggtggaggcgatgaagaagacgctcgaagacct

SEQ ID NO: 83067 - DNA, 626 bp, Zea Mays
gctgggtgcacgagaagcgaggctgtcgaccaggaacgcgagctgcttgccacgatcggcttccgcctgagcggacccacggcctacacgttcgtggaccacttcatgaggcacagccaggaggagggcacggcaacggtcaggtccctggcgcaccacctggccaatatggcgctgctggactaccagtgtgtggcgttcctgccatctgccgtggccgcgtcggcgatcttgctggcgaggatggtcctgaactgctagacggagacgccggtggcggcagcaggatatatgctcaaggagctcagcggctgcatagaggctatatgtgacatgcatgagcaccagcgggtatggccagggtgtgcccagatgatgcgacactaggagatcaatgctcaattcagctatctattgcctcccctaacttaataatagactcttgtcggtctaggtagcagcagtacctcatcagcttcaattctctacgagtgttaattaattatgatcttctttaatttgtacgttgtatctatataccaccatatgcaggagaaaggtagctaatcaagacatgcaatggatcatacgttaatggaccttagttttgttttttttcagtttat

SEQ ID NO: 83068 - DNA, 275 bp, Zea Mays
gggaattttatgttgatgcttttgaagtttttgtttgttaccactactgtcataattttaaagatatgaaattgtcaagcagcgccgctgcagttggtcggtgatggggtgataattcgctcgcgacgggttcggaattgtgcgtaggtgcggcgtcgtttatgagcgtttgttatgtggatttgtgcactaagttgtgtgtcaaaaacaggtggtggacttccggatcgcacttagggctttgtccaaattccccggtgaaggcaggaaaaata

SEQ ID NO: 83069 - DNA, 354 bp, Zea Mays
gtcctctaggatgacattcgtcgtggaacaaaaccaggcatgtttagggaaccctaggatatccacatccactaagagggacatgtgagacgaagaagcacgcgaaaacctagaccatcttttgaacatcaagcataaatgaggtctagtgaacaacttgccatcattgagaaccctagatgttgtttcctcatccgacagaaacaacaagaaatcctccggcgaggactggtggatggacatttcatcaatgttgacatcgaagctacgagccacctcttccaacacctctgatccttgcaccacatgcctagttcctgcagtggtgacgaacaaggccttacgtaatttgat

SEQ ID NO: 83070 - DNA, 656 bp, Zea Mays
cccacggtggacggcgggttgaataataaaaacccgagagtttatttaacaattttaccaggacgaaagggtaacttctgttgtgagccaaccgatcaaattttagtggctcggattagatcggcgtgattgcgaaccggtacgccataggggccctcggatctagatccaacagcccgggttttacacaactgagttctaatctcgtccgctcattcggatcgaacggcacagatccacccacagaactggtgcccacacattcaaatccgagccatccctccaagatccaatggcaccgggcacgtctcctttcccagctacccagccgacccaaactacggcggcgctcattgttcggccaccatgccccgccggagcacggtactgagccaacctggtggcctagaactaagtgaatccgctacatgatttgacgacgacatgatgaggaggttagtagccaacttactggccgttgaagttgtggttggagcctgcccaaacgcctcgcggcggctcggtccaatccaacaacgacgagaaattccccattacaagctagcggttatcaacgtcgttgatcttcacacgtcataccgacacgcgtgaacatcccagggcaatccataccccaggggaatggcgcagagaag

SEQ ID NO: 83071 - DNA, 587 bp, Zea Mays
accaaaaccctcaattagggttgattgcacttacacaaagctagcactacccaagcatgtccaggtcaaaactaatcctccctctgtagctcaattacgcaacgtacaaaaaagcatgatccctccctcccctatctatctctagtctcgcagaaccttctagatgggtagccattattggacccacctcacctgctggctgcgtttcttctcacttttctagctccgggcaaatcgttaacttcagttccctgatcatagcaacatatataatcagtattgtgacaacttcaaccaagatttcagctctagcgcgttcatcagctattattacttattaagagcctaaactatgcttactgtttcttctgttattatatggactaccattgctgattcatttggtgggaccgcaaaggaactccttgagctagctggcaagatacgagcatgttactttatttagtagttttggacttctgatgttggtttctagagggattatgtattagggttgtttgctctattctgagaattgtaatctgcatgacccaatagtcaccccagaaattagtgattcgggacag

SEQ ID NO: 83072 - DNA, 465 bp, Zea Mays
ccagaaacttgagacccaatggaagttcaatgagactttgcaggataacaagttatgcgctaaaggccagcaccaggattgaccccaccaggatcacagttagcaaccccaggtgcacaacatcgctaatccataatagctagacatggtaccccacttacagtcaggacaacccttcgcaacatggttgagggggcggtgcagcaagaggccacaaccgaggtagaggccctcagcagcaaatgaacctttattgtgtctttcatggagaggatgttgagtacaccactaaagattgcccagaaaccaaagaaactaaagatcacatggctagagcagtcccaacaaatagtccaagagccatagttcacacttatcaaccctagtatccccctcgcgatgaagacccccacccaactttcccttaataccacccaaacatcaatccacaccacaacatatccc

SEQ ID NO: 83073 - DNA, 610 bp, Zea Mays
atttcttcaagtgaggcaaccaaagcactaacttcttcgggagagggtcgcactctaaggcccaaaccgctatcaccagcaggaggatttgacacaaaactggtaaatgccttggaaagaggcagattcctggccgaatatgcgacaggagcgccgatgttcgacaccttacctctgagtatcatctcgagccgactcactaagtccacagcaggaattcttctgttagttacccgagttgaatcagcgaggcctcgatacagataggccggatatgctctgtcttttagcggctgaatgttcttgaaaacaaagtcagcgaccacagcttccgcagtcagacccctttctttcaacaatccaacttcagcaagcagagcccctgcctcagccacctcctggtctgtgggggattcggtccagctcaaagtgcgaacatctggctgcctccctgaccatggggggagagaattctcgtgattctccacgatgaaccattctaggcgtcatcccttgatgctgtccttgagtgggatgtcgaggtagtcagtctttctcccacggcgcatctccaagctcgcgccccccaccagctggtgctgccctccgg

SEQ ID NO: 83074 - DNA, 525 bp, Zea Mays
ctccatggtatccctgctcacctttggggactggagacagcggaggttttgcttggtccatactgcctgattcagggactacacccggattctatcagcggggaggacttgtcagtcatcaggttgagtgcatggtgccgctctcccgtggagttgcctgaggtgttggaccttcatgctgtggagccagcagtccccgatgaagatggagtttggattccacgttcgttggtgttccctgtgttcgtgaagattattgggccggagggtgtccttgtggaggagcagctgcagccacctccatcggatccctctgatgatgagccggagcagagtcgtcgggctaggcgggtgcagaggctgggtgatcagcctcattgcctcggacttcggtgcactcgcggctgggtcctcgtcttcattcctcgtcgacgcatgttggaccctctgatgatgtggagcttttggatgcattgatggataacagtgatgctgtggcggcgtctgtctcttcagattcattgg

SEQ ID NO: 83075 - DNA, 1158 bp, Zea Mays
ctttgacacttgggaatttgaagttcaaaatgagagtttggaatttggaatgtgatttgaagggagaaaagagaataaagagagagaaacattataaaatacaagttaaatttgtaaataaataaatttattccatgatggtatgactcaaaatatatattcaaatttagcgcaaatttgccacaaaacttgaattcaaatctggaatagaaatgaaataaaaaaatgaattagaaaagaaaaagaaaaggttacctgcgcacctggcctgaaaccccagcttttcggcccattaacatttcatctcccgccggcccactaccctgccgttcctttccattttcggatcacaggtttgggtcaccgcctggtggggcccgctcgccaggagcttcttcctcaccgtggtgtgcgcgcaggggaaatcggacctccgtaacaaaactctcgagatttccgggctcggttccgtcttcgttccaccgtgaagctcggcccactcagcatcgcgcgcgcagcgccaacctcacccatggcctctgctggtgggaccctgttgtctgctgacccagtccgagtttgcgcgaaacgcggtagctgttgcgaatcgatcgcggtagttgggatttggtagcctcgacctgcctctacgtgcctatatttacgtcagtggaggtaccgtcgacctgagtgtcccagaatctttcgcgacggtggacaatagagtgaaattgagcatccgcgaaggaagaaggtgggagtgcgagcaatcggtggttgcgccatcaattgagctaaggaaaagggacctggggcttcggttgttgacgtggggcgtgtcctcgggcggctgcgtgggggtttgtggcggaatcggagtgaattgctcgccggacccccttcatcgcctctgtgtcgctgctcgtcgcgggcagtgctgttaagcacacggaatcacggtaagaaacctctgttgtcttcgctcccttccttgatacgtttaggaccgtattaatcgggagttcgtgtgccgggtcaccactgatttctcgccgaagatcatctccgccacggatccgcattccgccgtggccaacgatctgtgctacgtaaccaccagtgagttctagacgatcgcgttcacctcttcctcctctt

SEQ ID NO: 83076 - DNA, 859 bp, Zea Mays
gctgaggaccggagccttcgtatccttgcgatacgcgaagttataacagccaaaattttcatgtagcccgtcttctctggccttcgtttggtaatgcagctcatgcacttggcaaaaagcttcagcattcgggtccatccctaggcttcgaagggcccagatgaaaatgctgagcctaacgatggcgttaggggtcagctgatgaagaaagattcataattatccaaaacttctccgatcatctcattcaacggaaaccgtaatcctgctctgaaaaagcttttgaaaactaccacttcatcatctttcggtgtcggagtggtttcttcctcgacaaaatgaataagcttcttctcagcttctccgaagtagcccagttttatcatcatgggcacgtcggcttcaaacacggtagatttctcaaaatccaggtggctgggttttgatgggatcaaaatgctaaaatcttctccttcttcatcagtattttcttcttcaataccagcctgctcagcctcggcacgagaagtaccttcgtcaatggctccctccgtcacaactaatctcgattgtctcatgactttggagattggagctgtctcagtggcttcagtctcctctccttcatgggtcaccctcgcagtcgagcgtactctggccatctgatgatgaatcttttgcagtttttacgaagctgatgtttttacagttttttgacgaagctccctgttttgacgaagctaattcaagatgatggtttgctcgagaatacagtgaaaaagcttcggctatggttaaatttttcaatagcacaacagtgcaatgacaatgaatgctgtggtaacttcacacctaccag

SEQ ID NO: 83077 - DNA, 476 bp, Zea Mays
ttagattatcaaataagctcaaaaataggagaatccaataaatatgctactttagcaatgaaagcaacaatccttgataagagcgacattattttaacaagttggattgtcatgtagtagcatacatcatgagaaacttattctcgtgcaagagactatataagattactaggataaagcaatagtctcaacataatcaagatatagacataggctccccctagagatatgcatcaaagaattttaatgagatgaatagatgcattcattttagagatgtgtagggagaagcattatacatcttgatcaaggcttataagatttgcaataaacaatttatgcctggtattctcacaatgaaaaagatttagaatgctcacaaccacaccatgaatgttttgaagatctcattatccaagtaggtgttgttgctcttgatgtctttctctttcatgtgagtgtcctccctttgtagt

SEQ ID NO: 83078 - DNA, 453 bp, Zea Mays
tgtcaaagagttagggcatgatctagccgttgagcttattcctcaagagaccgagcgacttgagtcggctaagccacatgagggagacggggatctggctagagagctagttcctggagagcctaagtgagttcagggtgagggtgtggggatagatatccccgagtcatcatggcattgttatgcttcatgggttgcctacaaggctcccaatggtccgctcataaggcgcctagtgggcattagccgggtgcaaccgaaggagatgcacgcgtgggcgcaaaggttctagagatcatacccgcgcatgccccacaaagaccaactgatcaccggaagacgtggcatgcttctggcggaattagatagataggagtcatgctctgagattgtacagagtgatccctcctaagtcagatataaggatgggatggaactcctacaaaaatgacg

SEQ ID NO: 83079 - DNA, 426 bp, Zea Mays
caagatatatctgaataggaagatcatgaacaccataagaagggtggttcatgttccttctgctccactcagaaacccacctatcatctctcttcctcctaaagtggaaagcagccaaatgcccatccctttcacaatactcacaatggaacctcacctctcttttaggtagaatctgtttgtgggagtgggacttgttgggtggctgaggagctcttggaggggggacactagagatgtcagaaagggtgtcaagttagttcctgagagggttaggttttggacaatacacttgtttctaaggagggttatagtagggatggacgttttaggtggagtgagcttaacaagtttgtgggtggctaaaggtttctctaagggcaccggccttaccaaaacaagtgacactcccatcctagcagcaaa

SEQ ID NO: 83080 - DNA, 572 bp, Zea Mays
agtacgccacccttgctagatgagtgcgatgagttgagatctaggtctagcttgttgggtgtgtgtcagacttgtcctagcttgcagattgagctagtggagaagaatgctaggataacctcgcttgagaaggctaactcagtgagtgcacttatacctacgcagtgtgtactgcgtgagggtttgtagtccgcgcttaagtcatgcagacacgacaagactaggattggggaggaaaacacatacctttgttcagtcttgagctgggtgtctagcagtaagccctagttgggcatgatgatcagtcggatcaagagggggactagcgaaccggggttaggctttgctactaaggctaggagtgacgcttgttttgggaaggttggtgagtgcaatggcttgacatccttggagaaacatccagccgccccaagctcatcaaaatgactccacccaaatctaccacccctattgtgagagatcgagcgcttgtcgagcatgtgagagcccctcctcaaagacaagtgtggtgtccaaaaccaaaccatctcaagaacacacttacactctac

SEQ ID NO: 83081 - DNA, 534 bp, Zea Mays
atctcaataagcgcaaaagggaatctggacatcatcctgtgccaggacgctgacgcaccccgtaagcagcctttggcccataccccggcgctgttacaacaactacgacatgggcagcctctccctcgggcgtacggacaacccctcggtctctgcctcgtctctctacgggaaatttgcaggcgcgagtcaacagcacagttcgtcgtcacatcagcttgcagacgccatggcatttctcttttggacacaacacccggcttcactgaggatgctccccttcatgtataaatagggcagtggtccctccagggacaaggacgcgcaaacaaacgctcactactccactttgtcttagatattggcacttgcctcaatcatctctagggacttggggacttcccctctcccgccgtgcttgtaaacccctactacatgcaccacggtgcgagtaatataagcatcatccccctcggctggaagtagggccttgtgttgcccgaaccaggataactgcttgtgtcttctcgcaca

SEQ ID NO: 83082 - DNA, 801 bp, Zea Mays
atgaaaatgtgtggagcggagttttcatgagagaagaacgcataacaaaaggtggcatggttgcgtaggaaaaattgggggcggggggcagtcgagttgtgcttgtctggtgtggtgaagagaattaaaaatgtctgtctcatttatgcgaagggtgagtcggtggatgattatgtgtgccgggatgcgttgtagtagtgattgcgttgaattgaatggaagtgtctcaagtacacgccacgacatggttgtatgcgagacaaggtaatataaagtgtgctcgacatgaatgttcgatcgatacaagtagaaattgttttggcttaattagcgaggtggtgacatgccaaagtagtcatcgctttctctatagttataagtcaagtcgtgtcaatgcgcattatgcgttcgttaaattatgcttcgcatatagtgtatggttgtgctcacgatttcgagtagacacttcaagtaaatcaagtaggatcgtgatacaagttgtgtaatgaagttagttgctttagaataattattgaaatgttctgttcatttgataaacatgtatgtgttcacggtttgggaagtaaatgcattgtgattgcgatttggatattagtggtttacgatccgtatgagttggtcggtgtgcgaaaatacgtgtgaatatgagtgtttataaaaatgttgtagcaaataaattgtaaatcgactcgtggtcctcattcaattgtcttaactctaacaaatggtaaagtgttagaataattcaagtctctagaacgcgacaactcttgaattgtg

SEQ ID NO: 83083 - DNA, 564 bp, Zea Mays
cagatctctagacttagagaaagatccattcagaccaagggatgatgaagagaagatattgggacccgatttcccatatcttagtttcgttggtgcattaatgtaccttgctaacaatacctggcctcatattgcttttgcagcaaatttgttagcaagatacaactctgctcctaccaaacgctattgggttggagttaagaatattttttgatatctaaatggcacaaaggatcttggactctttacaaaaggaatgataatcatagtttaattgggtatactgatgttggtaatttatctgatcctcacaatggcaaatcacaaacatgattcatctttttacaaggtggaactgctatttcgtgtaagtcttctaaactgactttggtgaccacatccactaaccattctgaaataattgcattatttgaagcatcgcgtgagtgtgtatggcttcgtagaatggtaaaccatatactcataatatgtggtattgcttcaattgaatcaccgactattatctatgaggataattcagcttgtgttgttcacatggaaaca

SEQ ID NO: 83084 - DNA, 449 bp, Zea Mays
attgggcctgcggattgcagcttttgtgggatggatgaatattcaaatcatctctttcttgagtgctcgctgctcggtggcgaagtatatttagagaattgttcatattgtctttaatttacctaacactccggataacatcagccagtcgtttgacgactggatttttttcgtttaagaaagatatcggaaacttggttttagtagggtatggtgttgtcatatgggcgatatgaaaaacaagaaataaagcttgttttgataggaaaatgtgtttagacccctccgatatgacttacccgtgttgcttttgtttggattactaggcaacgttgcaggtagagaaagcaagaaatatgctgttggaatgaagcctgctaattcgaaggacagcaaatgaagtcttcaattggatgtggggctgggctccggtgaccagaagttttttg

SEQ ID NO: 83085 - DNA, 1087 bp, Zea Mays
cgcccccgcacgagggcggccttttctccctccgtttttctcttcttctcctttggtactccgattctgttgctcgtcttggtcctgcatctcttcttgatgtggttggattgagctctggagtcttagggctgctgtcgtctgatgcctggaactcgtaggttcttcgaagtttcgcggctgcacacgcgtatttgctcattttcctccatatgagcctatgcggtgtcctgttagaagttgtttgagctctttatgcagtcgtgttgcttgattggattggaacagtagtggtatttctgtacttctgttggaaactgatcgaatgcactgtgggcgtttggctgctcagttttcttagttcacttcacctcgtcaactgatttttttccagcagttcctttcgccagattttttctgtgctcggtttaagcacttattagcttatactttatacttggtgtttttgttgctcttgttgtccgttgtttaatgatctgccatgctgaatcgggtacgggaagggcctataaaagacaagggaggagagaccggttcggctttgcttgttggaagacagagcaagaacagaggtactgttgcaccgaagtcttcatccaggccacgcaaacaaccttttcattcgcatataagtcaccaggaatcctgaatggccacctaatgcgctgtcacggcatgctgctatcaacttgttttggggagtaacattgtgcccaatccatatatgatttttatagcgcagaacaccgtccaccaaagagaagctaggaaccgatgaaggggcgagcaacaaatgagccttgagacgagcagcgaaatcatcctgatcatagccagactccacctctagcaaccagtgtggtgttgctgaagaaattgtagcacaagacgcatcatgagaaggttcgcggaagagtgcgtcggccacccgattgtccgttccacgcttgtacacaatacgataattgaggcccaacaacatggaaaacacccgctgctgccaagcagtatgaaggcgctgttccgacaattgtaccaaactgcgttggtcggtatggatgatgaa

SEQ ID NO: 83086 - DNA, 459 bp, Zea Mays
acgaccaccatcactcccctctccacatcgaacaacaggagcggcggtgccatcacgccgcgttagtggtcacgtcgaagatccaaaatctggcgctctaatgccctatacccgagccttactggtgatacatgatgtggggacagttgcgaactctagaaggcgacttaccgaaagcgtgaagtggtgacgagagttgaccacgacgcatggcgatcccacggctatggacaaacaacggtaagagattccggtgctcccgaagcttcccacgtgtagcttcttcgctggacacgaaccacgagtacatgagataccccatggcccctccccctcaaagccccgattgtacgtacccgcgcgagacatgcacgacgacggcgagctctaggccctcggcttatagttgtttcggctttcattggataggaggcccaaccccatgcttatagcacaacg

SEQ ID NO: 83087 - DNA, 316 bp, Zea Mays
cgttaccaaaggtttgaccaaaccaaaccaaacctttaggaacattcaagctggcatgctagtttgaatattgatcggtagatgaggccaataatacggcagtctagctagagctagccagctccaacagcagtgggatggatccaataattcggcaaacacacagagccccgggattcctgcggcatcactgctgcttctggtggtatctctatctctgatccagccttggcccctagtatcgcgtactaccaacaagacagcaggaggaatcttctctgtgctgcaaccgcaactcattgccaatgataagagg

SEQ ID NO: 83088 - DNA, 555 bp, Zea Mays
cgagagatggcctaggcgattgtgccatttagacacggttggtttgtcaacagcatttgcctgcttgagtgaagaatcggtaggaaggggatacaatccacgacgacatggccccctaagaatcgttctcctcgtatcctgatccttgatgagaaaaaaaatcaggatgaaactcaataaatgcagagttatctttggtaagacgatgaacggagactagatttttagcagttttaggaacatgaaggacattgtttagatgtaagctacgagattgagttggaacagtagtatgaccaacgtgtttaatttccatacctgaaccagaggcggtgtggatctgatcattcccatgatacttctccctcatcgtcagtttgtttagttcactttgtgacatgatctgttgctcctgtgttggtgtaccagttggtgtcgacattgtaggcgttcatggctatggcaacattgatgtggcgctcttctgggacgtagttttcatcgaaccgatgccagcaccgggacaccctgtggcctgtcttgaagcagatctga

SEQ ID NO: 83089 - DNA, 512 bp, Zea Mays
gtcaagaatgcattctagcaattttttgtcaacaccaccaaaaaggatggcactgggcttataaccacctataatggcaaaatcccttagctcagacaagtcctcagcgcataactcactaccagccaggtgtcataaattgaagcccctctcctcgcttcaagaagcctcagtcttgcccacctttgaagccaaagcttttgccacaactttcttctactttgtaacattagttaccacagtcgcctcctcaaccacctttttaggctctgactttgcaattatccttttgatagcagccatggtagttccatcgacacatccactatcttcagcttcttgacccgcttcaatagtcacactcactccaacgttctcctcaatagttaaagctttttttcattacctcagccagtggagttttgcagataggcttcattattgtcttgatttagcgcttcttctgcaaagcactttcgacatgcgttgttgggcactgacacacgtggatg

SEQ ID NO: 83090 - DNA, 275 bp, Zea Mays
cttttgttgggtaggatttgactggaaacatacctactgccacgtcctgagcatcctggattgcttcggcctccaggtggttcacctttccacggttgtaggcctgaccacagactcccggtgcttactgtggtgttccttgtcttgctgtgacattgactgctggcggctgctgagctgctttcttggggcagttcttcgcccagtgattttgctctccacagtagaagcatgcacgacctcctacttgtgctggggctacttggccattctgg

SEQ ID NO: 83091 - DNA, 1797 bp, Zea Mays
gcggtataccattggcggtctgtgtcaggacccctccgacctcgctcggtgtattcagtgcccaagtgaagtcagggaataggtttcgggcgaggagcggttttcgtgttggagccgagcgtcctgctcggcttgttcctgctcgcgttcttgtgtgtggcggcgatcatggcgacaggaattgcggcgctctcagtgtgttctttcgtcgggggtctcccccacctcaaaagctttgttcggagaaacaggttgggttgtatcacgctctccagcttcatggtgacgccatatgttacgtcacatgttccgacgttgccatgcatcgcgttggaggggctcctcccctagcacagtgggctcatcgttagagatgggcactgtctccactctctcttggatgaagaggacatccaagaagacggaggttggagaggtggtgtctcctctccccttgagagcgaagtggtcgggacgatcatcggtggtgctccctgggtcttgtctggagcattcgtctccctctatcgagtgatctgtgtccacaccttagtgggagaggtggatatcggagttcatcatgctggagaagttgtggttgatcgagctatagtcatcagggcgcttccgggtttggccttgtgcgggaccacaccctttgtttcaccggtgggattctcgctggtgtagttcgcgatttcccccgtccacctttggcgaccccgaggaagatttcttcctaggtggaaccgctatgcggtgcagagttccctcctggtctgcaatgcaggagacggctccaaagcagaagactgctcctagactgaaggtgatcatgctcttgaaggtgactgccatggagtcggcgcttgtcaacgtctcacccctacctagcgcactagtagtcggtatttgttacccgactgcgcaccacggggtttcccacatgatgctttgggcaggacgacgtcgttaatcacgatgcgatagttcgtatggtgacatgacagaaagtcacacggatttatacaggttcgggccacgagagctgtgtaataccctacttcctgtggtgattcttgtattgggggagagattacaagttgggaactatgagtgttgtgggtcaaggtgagatgaaaatggtagggatgcttcctagccttatatacacgaccgaggagagctatcccgcacaagtgattaacgtaatccattcgcctatctccctgtttgtagcgaaccgtcttcctacttctctagaatcctcttcattcatccgcccgagttaccgccgggggcttagcctatctggtgattgcaactgtccgcccgatatgctcgtgctcctgtagcgcttaactcgggtattggcctttatcggttccaagtgggcttgcctcgcctcgttgccttcagctggcccatccgcaggatgacccaggaggaaacctatcgggtgacccaggacacgttttagtgtacgtgaggacccgggggatatacatcccccacaataggatagtcaggatagaagaatctgatggcatcaaaaacacgatttaggtggtgcctcttttgggccccgaaggcctgctgaagagcttcgacttctgacttgctgaaattaccaagaatttcattgtattttgcttcaacataatctagccagccatcgctgggctctctgaactcatccttgaatctttacttatatcaaagcctaattagcccaggctcagcatccgatcgtttcttaaatccaaaatttgcggcaatagcagattaaatgattcc

SEQ ID NO: 83092 - DNA, 539 bp, Zea Mays
ggaaaggtgaaccacttggaggccgaagcaattcaggatgcaccagatgtggtagtaggtatgttctcagtcgaatctcatcccgcagaagtgctatttgatactggtgcaactcattcatttgtcactgcaacctgggtagaattgcataacatctcagtagaggcaatgatgccgcccatgaggattaattcggttggtggcaaggtgcaaacagataaaatatgctcaaatgtaagggtggaaataagggggatagggttccccagtgatctaatagtaatagacacccttggggtagatatcatcctagggatgaattggttaatgaagtatgaagcgaatgttagctgtgacaagaggaccgtaacattgaggtccccgtcaggagaggaggtagtggccaagctaaggatgcctaaatcagcggagggagtctgtcaccagatttcagttgatagtaaggagcccaacccgctcgaggctatcaaggtcgtgtcggactttccggacgtgtttcccgaggagctaacgggcat

SEQ ID NO: 83093 - DNA, 366 bp, Zea Mays
agacgggttacatgaaaattttggctattacaacttcgcgtatcgcaaggatatgaaggctccagtgctcagctctcgtaccaagtgcccaaccggctggaaaagtgagtggttctatgtcaaggccgatgagaagaagagagagaagttgaagacgatggtcatgagcccactgagtttgagcttcggactgactaggcccttgtgccacatgttgttggggtcaccatgccaacaagttgtggcagaattcagggtggtggctgaatagatcagcactagagttctagtgcaagaatacctagccaacaaggtatctccaacattgagtgaatggagtatgccgaagctgaagggaacaaggaa

SEQ ID NO: 83094 - DNA, 437 bp, Zea Mays
atagcatatttctttagctcttctttttcagcatctgttaactcttgtccaagtatatcttgaaaattaaaattttcttcttccaaagtgtcttcaatctactttttccctttttcaattgtcgtgttcaccgcaaccacagcagcttcttctccagccattctcaaaagtatattgtcaatatcatcaagcgtggtttccaggttaggatcttcggtggtcccggtttcggctccgatggcttcagcttcagtggttgctccggtagcctcggctccagtgccttcggctccggcggtttcggctccggtggtttcggctccggtggtttcgactccgatggctgtggtttcggcagtgacaatttttgacgccgatatcggtggcggtgtctgatgaatgacatcagccacttggataattcttcgttttttcgg

SEQ ID NO: 83095 - DNA, 1035 bp, Zea Mays
cgggctcgagatgcgggtgtcccggtggtgtgtacttcatcctggggcctcttctcccagcgtttatctgattgctagtttgcatcccttcgtggtgctggtggtacgggcttcgcgtctccgatgaggtcttgagcccgttcatccgcggtgatgtagacgtccgcttccttgaatagttgttcagaggtggtaggtgccttttgaaatatggctcgaacgaaaactggatcgttggatccccagtaaaagtcttcgatcacagctgcctcagcaacctcagggatacagttcctcattgtttggaatcttctgaggaataaacgaagagtttcatcattctgccgcctgatggatttgaggtcccaggctgcgctggtttatcggagagggactggaagttcgtgataaactagcgactaaaatctccccaatcatcgatgtagtgtcagagcagatgccggagccattgtagcgcatcctgtcccagaatgatgggcaagtacaccgtcatgatgtcctctgttgccctagcagcccaggcggcgatagtgtagatggccatccaacccctgggtcctgcttgggttcatatttgtcgacgttggagactttgaaattgggaggcattggatggctcggagacgaggggtgagcgcggagaccccacacgtatccgactgtcgatgatcatgtcgtcggtcctagggtggggagcgagtattaggtcacctcgaccgtcctcggaccggagtgttagtagaggctgctgctgactcgatcttggttgtgcggctgtgtgccggtacaccatgatcttggtcgtattcctcctggcgtcttatttcattttcatgtcgacaatcgtgcgaagcactgatgttgctccgtgcgtctcatcgtctattgatggagtgatgcaaatcgttcggtgggtgggcgagaggtagaagatgattggtcgcctgattgagcacccgccgatagccctccgcgtttgtggttcgcaggaggccattggtgtaacacccctgg

SEQ ID NO: 83096 - DNA, 433 bp, Zea Mays
ataaaaagaatgtaggcttctcaatcttcaacccaacttaagattgattgtttcaagtaccttaaaattcttttcacagctccccaatgaactattgtgggacgatggagaaattgacatacttaacatgaaatgctagatcaagtcttgtaagggttaaatattgtaaggcaccaagtatacttttgtattgagttgcatcatttggtcctagaggagtcccctctaacatagatttttttcatttatagaaagaggtgtagtaacgaccttgcaatctggcatacctaccctttttagcaaatcagaagcatgttttcctgagtcggtattatgcctccttttatctgcctgacttctattcctaaaaaatagctagcaaaatctcggccaagtcggcgcaacaaaccttgagtggcgttgtgtgttgaac

SEQ ID NO: 83097 - DNA, 462 bp, Zea Mays
ggtagcgccttaaagtctgctggtatcgtgctgattggattactgcatttagtcgttcttcctcaagtacatcaatatcctccagtctggtggcctcggcttctgctatgctctcgaagatcaatcttggcgccccaaacttgagatcagcaggtagcactgcctccgacccatagaccatgaagaaaggagtgtttccatgcagggctcggctgggttgagttctcaagctccaaacaacataaggcagttctcttatccattttcctgcgaatttttcgttcttatcgaagacctttttcctgagtgcctctaatatcattccgttggctcgctcgacctgcccgttggctcttggatgtgctacggatgcgtacttgatctggatgctcttttgctcgcagaagtcaaagaattccgaactggtgaagttagatcccaagtccgtgatgatactgtttg

SEQ ID NO: 83098 - DNA, 377 bp, Zea Mays
ggcgtggtcactgggtccggggggcatgttagagtgaactgccggaagacgaactaactgatcgcgatcggtgtcaggcttcgacgtttcgtactgtcagctgtcacgatggagtgatcagtacgtgtctggtctgcgcagagttactgctccttctatgatggcgtagtctgcttcgaacggttgtagtactaccttttacaggaataaaaacgaaggataagaccggtcttggatcccatcattccttgtttttgtgtcctgaatttgatctggttgatctgaatcagatcaacgtgcgcattgcgagttcagaattttcagaaaaacactcggtcacccattcctcaagcaagagccatgagcaaggacaccac

SEQ ID NO: 83099 - DNA, 606 bp, Zea Mays
tcgaatgagacgaagacttctcccgagaccgaggtcgggtctgcgcatgggtacacaatcatgctgggtgtggtcggattagtagttggggtggtctcctatgggattcgcgggagagttggtggcatttaatgtgccactgtcagggcagttggccgagactgagctcgggcgaggcggagtttcctcccgaggccgacctcgagcgagactgatttacaataatgcccaccagggctttcatatgctatttacagatgatataaggatattatcgtattttcctgccttcgtctttgcgggtctcaaccttcgttgttcattggcttccctttttgacttgcgtccgaagcgatcgccttcgctttttgtttctgccgcttgcatgtagacgaaacacctttgcttaccgcttcagccaaaggttagcttcgtctataaaaagagttcctaaaacacatttgcttatgggcgaagttatatgttaggtagttgattgttccttcgtcaacaagtggccttcgacatagcttttttgtagtcttttaaggcaatagtgtaatacaactaatcaaaggaccttcggtagtgtaggcccccaacagt

SEQ ID NO: 83100 - DNA, 499 bp, Zea Mays
atcctatgaattgtttttatatttaaaactcattttctaattcattttcttgattttataattctctggacggggcctcaaatactgaaaacagcaggggctacggtgtaaaatatcctagacacagcgcgctgtacagggtggacggcgggttgttttcaagtaaaccgaggggcttatgtgtcaaatgggtgatcaaagggttatcggagagatctaaccgtccggtcgacattgatcggcccagattagatctcaggtgaagtgaaccggtatgcagcgtgagacgtcgaatcggcgatcgacggacaaggatccctctaccctaactcggttgtgagccgtccgattaaaatccacggtcacaattggtctgattgaatcggtacgcacagttcaaatccccatcgcccattcgcagatcgacggccaccacactgtctacacgcaggcgacacagatgctaatcctattcgtccatcaggacatcgacggccct

SEQ ID NO: 83101 - DNA, 571 bp, Zea Mays
gtgacgacaagggcgacagcaagggcggcgacgacgacgacaagggtggtggcggcgacggcaacgccggtggcataatgctgccagcttaaatattagtatagcgtagtagtagtagtttagtagtataataatgtagtttaactagtagtgtaatgtagtctaagtagtaatgtaatgtaatataggatcgaggggcgggaggccgaatcataatgagtcggtcttcattttgtaatgatccccccactgatgaatgaaaattgttctcacgccaatctgctattgcgtattatgttcttttgcctgacagtccgttagcttttagaggtaatgaccgagtgatgttactttgcttcgaccaaaactctcccgagctatcggcctgtccctttgcgcccgacttagtgtgccaacccgtacttttgttgacgccctcttggcctctgaaccctagttcctgttttttcctccactgctctccagatttctaagttcccaaatcttttcgcattttgtccctgaaccgcgtcgtttgaaaaatcgtgatggcacccaagaaaagaaaaca

SEQ ID NO: 83102 - DNA, 403 bp, Zea Mays
gtctgttaattcttgtccgagcaaatcttgaaagttaaaatcttcttcttctgaaatttcatcaatctgctctttccccttctcagttgccgtattcactgcagccacagtagcttcttcttcagccattttcaggagtatattgtcaataacctcaagtgtggtttccaggttcgactcttcggtggccccggcttcggccccggtagctttggcttcgccggtttcagcttcaatagttttcattccagtaggttcggcttcggcagtttcagcaaaagcaatttttgacaccgttgccggtggcggcgtctgatggatcacatctgttacttgaataattctccgctttttcggtttcgcaggactttctactgccgaagctaccttgtccttctgaaaa

SEQ ID NO: 83103 - DNA, 671 bp, Zea Mays
ctggaaaacaacaagctataggagttgatggtgtatctgatatggaggattttaaccaattcaacgacatgtctcttttcatagaccatccaaccaagataaggaacgttgagcaaagcatcccacgtaaattgtcgcccttgatacgccacgatggacagacagaataatagctccctagattataaacttgtcttgtaattgattattgttaggaccatgtctactatatgttcgagatcaatatatatatttcttcattgtcttaattcacttttcgtggccaaggaaagatgtttaattccattagcgagggagaggggggggggtgtaacacccctggtgtttacctcctgttaaactgtgcttatgaactcaagcacggaatatcggcaataataacagtctctatgttctaatattcaactatcaaaaattctgatatcttttccgtcgttgtctatccggcctgttctaactgctttgcgaagtcaaaacatatttgttccggaaaaccggcgagtctggtgattatttaaaattcatcgttcgcgcaaagacgaatttgaaaatttagtccagtcctccgatttcatccgaaacagattaaatagaactcgacgactaaagttttcggtgcaaaataattcagtctccactcgtcaactgag

SEQ ID NO: 83104 - DNA, 1181 bp, Zea Mays
agtagtgtcactgcttgagaaggttggttgtgagcatgctaaagctgtgatccagccaaatttttgcggtttcagctaccgatattaaagatccttcaacagaagctgttgccctaaggggaagattttgttctgagatttgcattggcttgctggcggtaaagaaatggcggatgaagctatccgagatagtgaaggagagttttttttgatgttagaatcttgtcctttgatttttatgtaatatttcttaacaaattgctctttaattttataggctcaccaagccaccgaagaaactaaaaagacataagtagctttgtgtctaaagaggcttatgggtacactaattttttttccagtggattctagcttcgtaacaactgatgacatgagtattttcttgcacatcggctctttccccaccaccagaactgtatgatgctgaaaatgatccagaattgaaagacatccttgctgaatttaaggtggtgcacaaggcaataaacgaagttgttgacaaagttatgaacgaagctactgaaaaagatttgaacgaagactaaatagtttctgtaacaaattttttaagtatgtctttgttgtgtgtaaaaacaattgtgtgaaatgtattctctatataagtaaagtttgcacaatatttctttatgtagcgtgaaataagagtacgtaccgttttgagtcaaaggcgaaaaaacactttcccttcttttcatgcttcatagagaaatgttcttccgaccaaaggtcttataatgccataaaaatgtctgattgttgaagaagaactatttccctttcttcgcccttctgtctgtattatataatctttacaatggtataaaacatcatatacgaagccaaaagggggcatcaaatttgaacgtggtttcatcctttagatttaactttgcatttcgtagggaaatgctacggagtcatttttccacctgcacctggggagagcaattctccttcttttccgcttgtgtttatgaataataatatgtatgatgtgatgatgaaatgatggtatgatgcatgatgcttggtgctcaagatgatgataagaaaggaaagaataccggtgtatctttgtaagcttttgtatcatgactctacattcccttaggaacgactttagagtccttggcaccttt

SEQ ID NO: 83105 - DNA, 1127 bp, Zea Mays
gtatgaagtttgaaacctttgccgacttgctcaacgagcgatctccacaatgtctaccctatcggtgagggagatgacttcttcaacagcttttctttcgtataccattgtcagtaagatgtctatgctcatcctagtttcctaaatccgtaacctctattttcatacacatatcctcctcctttgtatccctactgaccatatgtggatgctacacctaccagtgaaaatcctaccaccaatgctcatcctccttccactaaagctcttacgataaatgctccttctactccaacctttcacttatccataccctcctctatatggatcatgtggtgctcctccttatatggtgttcattcgctcgctcccccattgatgctcctccctcatatgatgttcgtccttcattttgtccacctacatgtgcgatagtgcccttgaccagcgatagtgatgccgcttcaaaccattccggtactttggtgctccttaattccaataacgaaaggattggacgaaaatgaaggataaaagggtagtaagcacacatattcttttatgaattccacatggtttttgggtcgataaaacttttttgagttcataaatttataggttcacgcttggctattatactccatggacccaattgatggtaacctcaagaagggatcgatcttctagggccaaatagtcagcaccaacaactccatcatggaagatgctcaccacgacacactaagaaaatgaaggatcagtggtcgacaagcaaccataagaccaccctcttcaatggcatctataaccgcttatacgcgacctaaatgagtggaactgacgatgctatgctacttgaagcgactaaggagacttccataacaagtccaataaaatcgacttcaaaccggagtacatgtggtgcactctttgcgatcaacccaagcggtgctcaaggcacggtgacgatcactgcagtgatgggagcaaaagacctcgtttaaatttggacaacgattatatctctgcatcactagaaagtgtggacacaccatgatctattggacgcaatagtgcaagcgatcactagaagagtaaggggcaacgacaaaaggtagcgagtcctt

SEQ ID NO: 83106 - DNA, 368 bp, Zea Mays
aaattattgcaactgaaacggatttaaaaggagttaaaatggaatttctatgaattaaataagttctagaattgtttttatacttaaaatcgatttctaaatctcttttcctgttttctttaatttctggactgcgcgctaaatattggaaagcgcagggacccctgcgcaaacattctcaagactcagactataccggagttggatggcgggttgattgtttaagaaactgaggactcttaagcaaaaagacgcggtcgaaggggtatcggtgatcgtgagccgttggattacaaagcaagcgctcggattagactatcatcacatcgaatcggtacacatccactcccatcggatctgaatccaag

SEQ ID NO: 83107 - DNA, 706 bp, Zea Mays
ggcctatgtcatcggagtcagacgatgagcaactggaattccactccttgccaatatgtacctcacccttctatttcttatagaacttcttcttctcgaccttcttcccttcttctcctcttcctggtcatcattatagttttcatcatctacattaggtatatgtattccattttcaacaatatcccaaatgcaaggtggagcaaaaaaagatggcaacgcattttgtggctccaccacaaataatcctccccatcaaagtgaggaggcttggctagaggaatcgaaagcaattgttgcattggaggaacgagaaaaacatgaataatttagaagagtgcagttgaaagtatttttgaccgtcttttgcttggaagaagaagaatagtcctttcgcaaagtcggcgaagatgcagatgtgttgctctcgtagttgacggtcttcttgatgtgctttttcttctttccctccttgttcctctttgatcccgagttgacaggcttttcgcatttgggcttgtcgtcaatagggatcctttccttctcgtcgtgtccatcggccaccttcccattccctttaggatctattcctgccatctcttcgggttgtagacccaaaatcaagagaccgactttaataccaattgagagtcacttataggtgatgcctggaaaacgcaacttcaaacacaaacttgttccaaat

SEQ ID NO: 83108 - DNA, 482 bp, Zea Mays
gtgagtcttcatgggccaccgttaagaatttcatgggcagccgggccatcatggggctaaggcccaccatatggggtcatgaccaggccaggctcgcctcctgggctgggtcgtcgtctctatcaagctccataaagggaggaatcaacaatttcatctataggtttgggatcctgcaaataggatccagacctgcttgtgacccaatggatccccagacaaaggggtccagagggaacataaagctctggaggagaaggcgctctctgggtacaacaccaagccttcagaacagctctaggcatggaagacaccattcggacttcaggctaggtgaggtctggagtcgccacgtgtctaggcaagggtggcaggagcctagaccccctcaggtgcggtcgggcctatggtcaggaaagactagggaaagcagtgtcaccacttattcccaggcctgccctcatccaggcaggggtccggtg

SEQ ID NO: 83109 - DNA, 695 bp, Zea Mays
acgaggttgatcttctcttcttgaatcttggtgatatcatccaagttaaggacattcagttctggcgtttcctttttggggtttaggtatatagatggttgtgaaatgtgatatagaacaaacatggtttatttttgtttttttaggttggactagataggttagaatcttgttttgaaatagattgagggcgagaaaggttatggtaaggagagattccaacccggatggtggatcccgactttttgaagattttttctggcttccgaccttccttgccttgatgaggtcgatcgtcttcgatctccggtcttgacatcatcatccgagctaggtacatatagttaagatagcttgtagataagaacatatagttaataggtagatggcatatgacgagtgtgctatggtcaaaccttgtctggttgctttgttaggtcggctaggtacagatcttttaggaacaagtagattaggtgggtaggatggatttcatgaggttggtaagaatctttgttttgtggttaggttgaaatagaggggttatgcaaccatctgatgagttagatagttgtgtatggtcgagttagtctagggcaccaaattagggcatggtgaattaggttagaaggaatatctatgagtagattccaatttacctaattgaatctggtggggtaagatactcatttttt

SEQ ID NO: 83110 - DNA, 971 bp, Zea Mays
ccctcccaaggcgaacccataatcaatagaaagaaatccaagcaacaccgtggctaaaccctgctacccacgatctaacacttcctattacctcagagacgtgagggacgccgaaaattagggatggctgccttagcgcaaggtaggacagaagcttgtaaaaccgcttctcggggtcgatgaggcatgccaaatctgcttggtgcgtgatcggagagtaagagaggccccaaaataagtatgccaaaagtcatttcctatgctaagtaccaagaaaaacggggaggtaaccattttcacttattccatagggaacattacaaaagcattaaggccgacacgcccgggccgtcccacgactaaagccacctacaaacgcttcctaactagggagatccattgactacattcgttagcgggatgatgttgacatgcccaggccgtccgcccgtcccatggctaaagctagtgccaagctcgtagcccgaccggaacttcagaaagctagggctctagcagcaccacgatgaaccaccaattgcacccgattaatgatgtctaggaggcgctctccttgatcggcgccctaggcccgaacaaagtcaaccacctcgtacacaccctcacgaaggtcagcaagctccagctctaactctaaaagtggcacaagacaatcagagagagagaggagtgagacaaatagaaatggagtcctccctgataccacctacccacgatgcgacagtctgcctcctctaggcgagcacggagactatccacctcaccatgagcatccttgagcacagtgttggtggcgaccaatctctcctgaaggtccaaggaggtctgtaacgaaagagttggcatcccgcccaggctgaaggacatccaaagtctttcccctgtcccgtcgagatcacttggctgagaaaggaagaaaacgggacaagcaccatcacaagaatctaggg

SEQ ID NO: 83111 - DNA, 920 bp, Zea Mays
gtgacttttcagtaagccgaacttgtaaacttgatatatatgtatatataataataaaggaatgcaaatgagccggtgaaaaaaaaaatcgatccggatttctacgtctgacgtgaattgcgaaacatgcgttgtgcggtactctgtatggcaagtgaggagtcttggcagcgatcgtcacttgttctcttgtgtggttcgcggagcctcgaccgtatctttcgacgtgacatgcctccaactacccgcaggctccgtccgtggacgcatccgcgaatggaggaggggaacagtccacgatttcggtgaatctttctgagctaggcgcgccgaacggttctccttgatactaccgccgatatgtctacttcaaaggacaaaaaacaccaccagaagcacacatctctgcaggctgcagccggctattagtgacaacacgaacctctctaggtacagcgcgctgccgtccagctactccaataccaaactaagccgggctagtgacaacacgaacctctctacgtcgcttccgtctagccactccaataccttcttgcataaaacaaccgccaaagacaaacgggagaatctccgagtttaaaaaaagaagaagaagaagtagtagtagtagtgtatagtacaggacggacaattcaaagcggtttgcttcacggaacctcagcatctaatcacttccctgatagcccccagccccccactccttaaatttttagtttttcgttcctcagcgttttaggtgagagctttcgtacggcgtcatccccgggccagctggccagattgttgtttgtccgtgtcgatcgacaggtaaccaacgcaaccttccattccattttgatcctaccagtagcggggccggccgcgtgtgtcccattggtttctcagtgcgtgcgtgcgat

SEQ ID NO: 83112 - DNA, 477 bp, Zea Mays
tccgaatcatccataacctagtgcaaggtgaagaaaagatgacccaatcttagggtcaatcaggccaacaacaagcaagctctcagaaggagccttctcatggcatgtttcgtccgctggcccgagagaaggacagggaggccgaagcttcggtggcaggtccaatgcacctccaagaaagtcgttctgcttattttatggtgaagataaggcccacactacaagaacttgccaccacaccatcaacatctcaaccttcttaactgaaggaggtatttagtacatcttcgtactgctcaccgtacattccatagtatgtacatcctcaatcacaagagtcaaggttgtttcaaccttcgacctcaaatactttgagtaaccctgttatgagcatgtggacgtcattttctaccttcatccagggactaccccctcacgatcaagtccctgctggtcaacccaaattcccagtgtaag

SEQ ID NO: 83113 - DNA, 858 bp, Zea Mays
ggggagtggcgcctaggctacaaatataatttttgtttaatggtaaacactaaagtatgtgtggtctggtggttagccccaaatttttagagaagaggggtgtgagttcgagtgctcgttctgcactattttttgtgggcactaggcgtggggagggtgaagccttagtagcaccaggtgcccacattaggttcttaatagatagtagagatagagattcaccagactgtgaacagtaccggtccggtgtgtataagaccacttctccaacgaccgtcttcggcgccaacgactatctgacgtcatcggacggtacaatagagcaacgagcctggtctggtgccacctagttaagaaaactattcaattaggatccctaatgggggcacgtggtcccggtacggtggcacaccggaccggttcgatgccacccgcatgcagcaacattttggtaattttccacaaggaaggagaaacaactcttggctctcttgaggctctaaaaggaggtcctaggcacctccattcagcacacaagaattctaatagactcccaacactctgatactctgccacaactcattcgagcgattcaagcgagatccaggtgacgacatagtgttgttcttcatttttttgtgttgtgtgcacctatgtttctctctttgtgttgagttgctggtttttgatctcgtgtgcttgtactctctcccatccttactctgttgtgggactctgatcttttgtaaggccacaagagactctaaaattgtggggattccttgcaaccgggattgatattgatagtgagaactatggtactcaagtttgatctctgtgatcacttgagaggggttg

SEQ ID NO: 83114 - DNA, 804 bp, Zea Mays
gtggtcgtcagtattattggtcgaacttgagatcggatttgagctaaatccagtgggaattcgactagaactactataacaaagatgaagatgatctataagtctacaactttggtgcagaaggatgatgatgttgccatggaaaatttggagaaaacctgccctaaacctcggctgtcaggctaactgaaaaagcttccaatggtacagtaccaaaatatcaacagaagcagatccccctcgccaccggtgacctcgcgcgtagattcgcgccgatgaggtgattcgtgcccacttaagcctggataacgccgcggggtaaaaagatcgtcactactgttgggctatgtgtactaattcggctagccgccgtgctcctttctgctttgtgacccgtccggataagtcaccggagttggctgcccgtcgaccgaacgccacgtgcctcaacaattaccacgtcgcaatcaccagtgttatgcacgtccgatgatcgctagggaggccgccaaggtgaaggccacgaatcaccatgcccgtgacttatttcttctctgaccgccaccacgctcaatccaagttcactagccaccgcttagcaatcctataaattgatggccgagtctgttgtgtgatgttatcacgaagccaaagcacccagtcccaccttcaattagtcactatagccgtagaatttctttcttcccccaattctgtcgactacaccgccgtgaaccgcctcctcgtggttagctgctcccaggtccgccctcgctcttgttgctcgtgttttagcgccctcac

SEQ ID NO: 83115 - DNA, 548 bp, Zea Mays
tgctatgcaccgcctctatgcgctactcgctgatggctagctagtcgctgagcccctcccagtggcctataaaaagagcgctctgagcccctctccattcgcacctctcacaacttttcctcccctcccccgagctcaatcaaagccggcaccatcgccccgttaactctgatgatctccccttcttcccttctcgggtgactagagccaaattggtatagctcttgagctttactacaatctcacaggcacaaagcacctcatcccaccccagataccccccaacaccccaccgcgacctcgtcgtcgcggtgacccgctaccccactatggacaaccctctctagacctccactggccaaattgagcccaccgttgtgttttcctgaccctacctgtgctgacatacctccccaatctcagggaaatagaccactagcagagaaccaccgtcgaacccgccggcgatcggttctccctcgtcccagaccggtccatttccccctaacgccatcaccctccctctctctctggtttatggcccaccc

SEQ ID NO: 83116 - DNA, 627 bp, Zea Mays
attgcccaaacaatgtgacaagcaacgcttgattaattatacaagtagattgttccctgtattttcagagacaacattatttgcaaagaaagatagtgtggttcattgtccaccattttatttgaccaatccaaacatattcagcattattgtcaccacaagacattcattaagtctagaactgcaaattgataggcgtggacagtaccagggcgatatatgagcaggcaccggccaatgctctcacccaatgcaagcagaagggtcatgggaaaaacaatgcaccggcatggccagttgcacaggatatacgttgcactttaaggactagtttgggaacactatttttccaagagattttaattttaccaagagaaaatgaaggtttccaaactagccctaaaaaatagaaaccgcgtccaaaaatgagcggtcagtttaagatgcatggattatttaccccagctaaaaggccacagatctaaccaaggtggttctatagattgcaggttaaattttcacacaatgatcccacatccagcaccacattaaacccttcagacatctgtagggcccatgagatgtgccaaggtcgcagttagggttgtggcctggccgccgtatcag

SEQ ID NO: 83117 - DNA, 1201 bp, Zea Mays
acaacaacaacaacaacagcagccgccgccgcggcacgcaccgcggcgcgaacggcgccgagcccggctggtacaactacgacgcgtccgacattgccagggccttcgagatcctcaacaacaacgagcagctgctcagcggcggcgacggcaacagctcggaccagccgtctcccctcgcgcttgtggccacgccgtccccggcgctgtgggcgagcttcggccgcacgcccgcgcacgccaggcagctgaggatcaccgactcgccgttcccgctcggggacgacgacggggactgtggccaggtggacctggacgccgaggatttcatcaagaagttctacgaccagctgcgcacgcagcaggcccttgccaccgccacgccggactactgcggcgggtatgcgcgaccggtctctggcatcgcctagaattcaacccacgcatccacacgcgtatgcatatgtaatatatatgtacgtgtccatagagtatttgtttgaacatgcatgatgcatgcatggataaagcatgttcgtttgagagctagctactggtggtagagctagtctagagcttggtctttgtgatatgagggagagattttgtacaacatcatcatatcatgtttgcaagctagatccatgcatgtatagtactcctatatatgtgtacgctgtatgtgtatattttgttgtagtgacatgtatcaattttactgcaagtaaggtacatgttgcaaagacattagcatataagaacactggtgtattacatagtataagaattgcgctcgtgtgtgtggttcctgatgtcctgcatgctggccctctgtccatgccagggacttgtacatagtgttgttctagaaaccactgctacatgtaattttcagacaatctatggtcggtatgctgacaaagatcgatggagctgtctggaatagtggaatcttctactcatgaatatattctagcatctgatgaaatttcattttctttcatacttttattgttcttgtggatcttatttacataacagtttgcttattaacactactacaattattcttgatctgagtacaactatgaagctaccgtgtgggctatgattagcaggaacggaggccggaccagccttgataagctgatcatcgcttcaaggatatcactatctgaattaattgtggcttgaccattca

SEQ ID NO: 83118 - DNA, 1005 bp, Zea Mays
cggatgttctgttaccggagggttagcaggtacagataacacatgatcatttccaataaaattaccaccattgcccaaatgcaacatacgtaaaacatgcgatggagaggatagatttggctgtgattgttgggtcaatttttttgagaaaggaaaaacaccctcatcaaatataacatctctagaaatatagacgcgccctgaatcaatatctaagcacttgtatcctttatgtaaagcactatagccgataaatacgcattccttagagcgaaaagaaagtttatgcttattatatggacgcaagtttggccagcatgcacatccgaaaatacgcaacatagaataatttggagtggtaccaaaaagacgttcgataggagttttgttgtcaatgaccctagtaggcattcgattgatgaggtaggttgcggcaagaaaagcttcatcccagaatttgaggggcacatgagcgtgagcaagaagagctagaccggtttcaactatgtgacggtgtttgcgttctgcgaatccattttgttgatgagtgtgaggacatgacacacgatgagcaatgccaagagagcgaaaaaaggtattgtgtattttctgatattcaccaccccaatcagattgaatgcatttaatcttagtgcccaaaaggcgttccacatgagtttggaattgtaagaacacactagtagcttcagaacgatcatgcataagatagacccaggaaaatttactgaaatcatcaatgaagctaatatagtatttataatcaccaacagatgttggagcgggaccccaaacatctgagaaagaagttccaaaggacaagtagagcgatgaatagaagaattataaggtaattgatgactcttggcaagttgacacgcattacaaattacggactctagctgtttggtacaagtaattttattaagatgtaaaatagagtggacaacttgactagatgggtgccccaaccgtgcatgccagtca

SEQ ID NO: 83119 - DNA, 360 bp, Zea Mays
ttgaaatttagttcagcctatcatcatcagaccgatggatagactgaaaggactaatcaagtattggatcagactgaaggaagacagttctttggatctgaacttattcaagaggcagaagaacaagtctgtataatcaaggagaacttgagggtagctcagaccagacaaaagagctatgctgataatagaaggaggccactagaatttgaggaaggagattatgtgtacctcaaggtgtcaccacttcgtggagtgaggagattcaagattaagggcaaactgtcccctcgctatattggaccactctgagtttttaggcaagttggagagatgacctattaactcgagttacctgat

SEQ ID NO: 83120 - DNA, 334 bp, Zea Mays
ctgaattcataaattttgttgatgcaatgcatgatagccgagtgccgcaacattgcatagttgattttatatcagaaatgcatgatgggccagagaatgtaccagtaactgctcaagatctgaaaaatatgtaagcaatatttttatgtttcatgtgtatacatttagtgtcataaatattactatagcaaatgtttgtataatcattttttgtgcaaacaaatgtaggagggcagcaaggagacgagaaaactgcgcaaatgatgtagccaaacttttggctttctttacagaatgcaagaaacagaatccacaatttttttgtgattttcag

SEQ ID NO: 83121 - DNA, 1025 bp, Zea Mays
attgtggttttttcatatgggttatgcattttaattttttctactaataataataaacgaatgggtaatgtttgtccactgcgcactggagcactgtttttatgtgtgtaggttcaaatttgaatttgaattttgaaattgggtttttatttagatttaaatttgaaactgaaaatggtaaaagggaaaagcttccagcttcgtgggcctagttctcccctcgacccaacttcgtccctccgggccttagccacgttcacccaaaaacgttgaaggcatatgtgctgaagccgccttcgcttcgggctcgcgcccgcttgtgatcagtcactgatgggtgggccctcgctgtgagttttgatgtcttcatcgattctggcttagtcacgctgatagatcttgatttgaacttcgtctaagtgattctcacacactaggactcgtcccacctcatacctatataacccggtcgaggtccccccttaattcataagaatcatagcgtctcggttattgacattgtgagtcgccaccactaaaccattaccaccgaacgcagccacaaccaagccaaacttctgtcgtcacgttgtcgttgataggtcacgctagagtgtatcctgagtgagagaaacctacccaaagtttcgttgtgagcaaacatggtctcatctgtggtacattgctcaccgagagcttctcggcaacccatgtcgtcgtgagccatggagaattgttaccattgctctagactaaggtgagaacctctctgatcactccaccttttccctagcagcatttagagacgagttaggcttcatgtcaaggtctttagcacgagaattggtttgctccatcgaggcgccgtcgagcaccaccgtgccagcactacttccgccgccacgagcctcggacctcatctctcaagtgttgaatccggaatggatggatatgattagatctagcataccatttcgtttaattaaatccatgcgaacgatttaagatccaacggtccaaatccc

SEQ ID NO: 83122 - DNA, 738 bp, Zea Mays
aagaaaactgagtcttatgcaccctcgagacaacttggaaggattgtacaaagatacagttgttgacctgactacgctccgaaatagccacaacttgacaatgatagatcttgacaagaaaagaagtgaattggctctcttataggggttggttgatgggctccacgatcactgtcctccaaggattctacattcaaggaggacctacgagctttgtcgaggactcaatcgaagaagttggaggttctggagcataacgttggggtctttgagaatgattacaagttattgaaagcttctcctaacaaagccatggataacaggataaggtgatatgcgccggtcggttactcatgaagaaacctgacatcgtcgttcccaaggacattgttactgcgtgttatctgcgtctgggaacgatgtgagagttccaccaagtgattttggatcagcacccatcgccaaggacggcgctgcttgatcttgtaactgactgtgtggtgaacatatatcatactactctatggtttagcgtgtggtgagctagtatatgagttcttctcacattatttcagtaggagcatatgctgccaacatagatcaatgtgtgatcagcgccagctactccattggtgggggttagaaaatcaccctcggcgtgaatgcatgagcatgtaacaccggcttaaatcgatctctaatttaagtcgattgctccatttatagggtttataaaac

SEQ ID NO: 83123 - DNA, 785 bp, Zea Mays
atagtgaactcatacaactcatacttggtattgaatgccgtcttcggaatgtctggaggtcgaatcctgagctgatggtaacctgacctcagatctatcgttgagaacacgctggctcctctcaactggtcgaacagatcttctattctgggcaaggggtacttgttcttgattgtgacctcattcagagctcgataatcgatgcacatcctcctagtgccatctttcttctccacgaataggacaggggtggcccaaggcgaggtgcttggccagatgtaacctttctctgatagctcatcgatctgcttcttaagctcaaccaactctggtccagatactccgtaagctctcttaaagatgggggcggttccaggaagaagctctatggcaaactcaacttttcgttcaggtggcatacctggtaggtcctttgggaacacatctgggaactcggacacaaccttgataatctccagtggatctgcttcactgctatcaatagccatctgataacaacttcctttctttggctcaggagggactaactcggtcaccacttcctctcctagtggggacatcaacttgattgtcctcttatcacaactgataactgcctgatacttatctagccaattcatccctaggatgacatctattcctgagtacccattactatgagattagcgggaaacgctatccccttatttccacacttacattcaagcaaatgctattggttcaaattctaccatcggctgagtcaatttgaatgggtgttgaca

SEQ ID NO: 83124 - DNA, 535 bp, Zea Mays
ctaaggcattgaatggttgtttcctgaagcgataccatcaaagtgtatggttagatgcttagaaaaccaatgtttacacatcaggttgctaatgccttgtactaggtgcttttggttcgctcagctttcccaaaaggcatgggggcatgtgttgaggaccatatgtgccacctagtgagactagacaatctgggctacggacggtctacacatgacgtggacggtatgcgattagaccataccatgcggtttaatccctttttgtacgtgtttatccatctaaaaccacggattctattggggaacgcctagtaacgggttcaaagcttcccctatatatgaaggggtacggtcgattgcacgcaccaaaaattgaaccaaatcaatctatctttcatccctttactttttgacctaggagtagcaataacgtagccttctccatctccatcttcacctctcttcgactctatgtcgtctggaggcgtcttgagtggcctgcacaccccagacaaccctagaatctctcctccct

SEQ ID NO: 83125 - DNA, 489 bp, Zea Mays
tagaactcagaaacaaaaattttgacgaggctcatctctccaaattttccatgcatcttggaagcaacaaaatgtatcatgacctcagatccttgtattggtggaccaggatgaagagagaaattgctaagtacatatctaagtgcgacacttgccaaagaatcaaagcaagtcatttgaagatagcaggtaccttacagccactccctataccatcttggaaattggaggacattagcatggactttattgtgggattgcccaacacttcccgacaccacgattccatatgggtcattgtggataggctcaccaaggccgctcatttcttgccagtgcataccacccacaaggcagaaaggtacgcaaagatctatattgaccaaatagtgtgcttgcatggaataccaaggaccatcatctcagatagaggaacgccattcgtagcatgtttttgggaacagctacagaagtcgcttggaacaaccg

SEQ ID NO: 83126 - DNA, 574 bp, Zea Mays
gccaaatcgttagttttgtgattctcaaccctagagatgtgccgaatgctgaatttgtcaaaagaatgaattatgcccaacattttttcaatgtaactatttagaataccattaaaacattgatactcttccaatacccattggacaaccagccgagaatcaccaaatgccttcacatgttttactcccatacaacttaaaagctccaagccgaacaaaagggcctcatatttggcttgattgttagtgcaataagtttctaatcggctagcgaagtcaaagtaggcgttacttggtgaaacaagcacgatgccaatccctagtcctccattacaaaccgatccatcaaagtatagggtccagggagtaacaatgaggtatgacatatctatcttataagtatcctcaatccgatgttctacaataaaatccgctatgacctggccttttatagatttcaatggttcataggccaaatcatattctataagtgcataagcccatttaccaattctaccactcataatctggttttgcaacatgtatttgatcacattggtttgaccagaaacgg

SEQ ID NO: 83127 - DNA, 764 bp, Zea Mays
gcaggacaggagacggcacacgggcagtcaaggtcactgaaatgacagaagaggtgagcacgtattagtcacatagtcataagtatatgaaatgtgaataaatacatacacagagaaatatggcacaaaaatgagagataaggcgatcgagaggtcaaacgacgtgaaaacggcgtttgaatgataaaaagtgccataggaggtttggaattcgaaatgaggcacgaaatgatgtggaattgagccgatacttcacgaataggtttatatgggtgaatatgagtgaagtgagtacttggtttgaatttaggcgaagaaagagagatttgggcactcggctcggaaacgatcgctcgaaacggggaatttggtgaaattaaagcctggaatatcggatgggcgtgaaattttgcgaatatgttactggaggtgttgtgaaggtgcttgaaaaatttgggttcaatcgaagcatctttggctggtttgggcatttcaccgagcatgtggtaggcgaaggtttaggttttcggtgaaatagctatttaaggctgtgaaaccctccctaaggagctgagaacctacaaggatattcaagagacacatgggaacacattccaccacttggattcactagaattgacaggaaattgatttgggcacaaaaggggtggaggtgagctcactgggctgaacagagagaagagagaggagtgaagacattgctgctcaccagagggagaagggatgagcgcaggaggttgccg

SEQ ID NO: 83128 - DNA, 3062 bp, Zea Mays
atacaacacttcaaaaggggatcgacccagagaagaatggaaggttgtgttgtaccaatactctgcaactgacagccaagcagaccacttggatggacaagcgtgaacaaaactgcgaaggtatgtttccaaacactgattaacgtgttccgtttgtccgtccgtttgggggtggtacgatgtgctcatcttcaaggtagtaccagacaacctgaagagttcctgccaaagtcggctggtaaatatcctatctctgtctgacacaatcgatagaggtagtccatgtagcttgtagacgaaatccataaagagctgagctactttgagtgctgaaaaaggatgcagcaatggaaggaaatgactgtactttgaaaatgtatccacaaccaccaggattgtattggcattgttagaacgcggaaggccttccacaaaatccatgctgatcacttcccatgcctgggtcggtaccggtaacggttgaagaagacctggatatcggctgcgatcaggcttggcctgttggcaaactgtgcaagaagtgacatactgcttaatcagagctttcatagatggccaggaaaaaagctgcttaatccatcggtatgtcacaggaaagccagaatgtcctccgacaggactatcatgtagggcttccataatttgctgctgaagaagtgtgttatttctgacccaaactcgccctttgtatcgtatgatgccagaatttagagtatattgtcctgaagtatggggactgatcaacatcgctactaacagtccttgagcttggtcatcttctttgtacccttccatgacctgaagcatccattgtggagtagctgaagagagactgaataattcagagtaaggacgacgagatagtgcatctgctgctccattgtccacacccttcttgtaaactactttgtattgcagccctatcaacttggagaacacacgttgttgccatggagtagacaaacgttgttcggtaaggtgagataagcttctgtgatctgaatagattaggaattcagcatgctgaagatattgtcgccacttatccactgccatcaaaatagcaagatattccttttcataagtggacaatccctgattttttactcccaatgccttgctaacatatgctaagggatgatgatcttgtaataacacagctccaatccccttactagatgcatccgtctcaattgcaaatggtcgagtgaaatttggaagggccagaacaggagctgataccagtgattgtttcaaggcttgaaaagctgtgtcatgaacctgtgtccacaaaaacactaccccctttttcagcaaatctgtaagaggtcgtgcaataacaccaaagtttttcacgaacttcctgtagtaacctgcaaggcctaagaatcctcttaattccttgcaattagctggtgttggccaagatgaaacagcctcaacttttgctgggtcagtagccactccattggggctgataacatgacctaggtaagcaatttgttgtttggcaaacgcacacttagagagtttgatataccactgctccctgtgtaggatttggaggacctgtgtcaaatggtgcaaatgctcgtcccatgtagagttgtacaccaaaatgttgtcaaaaaataccaacacactcttcctgagtagtggagcaagtgttgaattcattgcactctgaaatgtggcaggagcccctgaaagtccaaagggcattactctaaattcataatgaccatggtgtgtttgaaaggcagtcttgtgttggtctgttggattcattcttatctgatgaaaccccgctcgaaggtccaaggtagaaaaccacaccgccccatgtaattcatctaagaactcatcaataataggcactgggtacttggttttgactgtcagagcatttaaatgcccatagtcaacacaaaatcgataggtttggtccttcttcttaaccaatatcacagaagaggcaaactcactgtgactatgctgaattatactagactgtagcatttcagacacttggttttcaatctcattttttaaagcaggggcatatcggtatggtctcatttgtaccggtctagctccagtaaccaaaggtatttgatggtcacactccctggttggaggcattcctctgggtatttcaaacactgaagggtactgaaacagcacaacttgaatatctgcaggtaggtcagacaaaatggcttgttctttgtcagataactcctgtatgctgcaaacttggatgaccgctgtctgcattactgaagacttcaccccatacagggtaactgtggattctctgagaggaatactcagccacttttgagaccaatggatcaacatgggactatgtttttccagccagtccatccctacaataagatcataggtagatagtggaaggaccttgagtgtggatgagaacgaaaccccactgatggaccaagaagcattcacaatttggtgattgcaagatagttgtgacccattagcaacctgtacccgtaaaggttggagtactgaagttacccctgtcatattatcagctacaacactgctaataaaagagtgtgagctgcctgaatccaacaaggctaaaatgtccattcctgctatatgaccaacaaacttcattgtgcgaggagtgtccgacccttccactgctgcctgagataacatcaacacatttagctcatgctcgtcctcctccatcggtgaggcatatccaatttcagtttcaggcacttgggccatctgccacaattcctcaaccaaatgtaattggactgtctctgaacacttatggtcacgagaatactggagcccacatttgtaacataaacctttggctttccagtaagcatataatgaagtgatccgatcatcagtagaagatggagagaacttgtgcccataagttctttcatcagactttcctggaattggttgtgtaacatctttggttgacatttgttggactgccagctgtcgagctgacgtttttgccgaagaagacacttcag

SEQ ID NO: 83129 - DNA, 379 bp, Zea Mays
gtcggtcctctaggatgagtgactggactcggacgaccacatgtcatgttgagtgggagtcctacttgaatggcacccatagtgactttctccagggtcacgtcatggagggaaccatgcctcatatcgtttctcatggttctactacttgagttaccatcactgttgtcaagtcatgacactacaaacattgtgccttgcagcttttgtctagaaaggcagggtgagtcggtgagcttggtacaacttatattctgttgcaggcagtggaagcttgaagttgtaaccagtgtatgtcatgacaagttcaatatttggggttgccctcaaaaagtgacgtaggataaagtgttgcttagtgaccaaatatgtcagatca

SEQ ID NO: 83130 - DNA, 641 bp, Zea Mays
acattgatctccttactatctggtagacagtagaggaagtcatcttcgctgtctcctccatataccaaggaccctgggggtatttctactccttagcataatgttgtgtttcggcacgttgctctgctgatagctgttttcccaaagcatgtcgaacaatatagttcaaatcaccctgggaggtgctttgggaataggtggcatgggtttttctgggagactctctcccaccatctttactgacgcagctcccgaaggtcccgctttaacatgaatataagaagcgcttgcagtgaccacttctcttgcatcttcaattttctcgccagaagcttcggcagaagcagaagttggcgttttcacggattccaaaacaacatctaaaacgctagccattctcctcttccttggagtcattgttgtagtcgttgatagcttcagcaaccctgccacagttgggggactcagcagttttggctattcttctattgtttcctttggccctggctcttttaccgggtcggcactagcttcgactggcatggcaggaactgtttccgtagctaaggggacaacttcgacactttcaataaacttcacctaaaccttttctagcagatgtagcttcgacctacgggtca

SEQ ID NO: 83131 - DNA, 479 bp, Zea Mays
ccatctctatgctagagggtcgtggtggtgaggggctcacaggcgaggcatggtggcgcacagcctaatgccggtagcgcaacgcttgtgccattaggctcgaacatgtgtgaatgaggaagaaagaatggggattgaaaaaactagtgtttgttctaagatagcggtgattttgaggaaccattttttttaaaaaaaagagatatgttggagctagagttttggctgaaatctcttttgtggcttgttatagggaaatggaatgactttagtcaagctagtggagttactcttagtttgtagctagcattagtctctatcaagaacaatatctacatcctgatgagatcaattgatctaagctacatccgaattacttccctttcctggtttggttttttacttaggaactaatattgtgtctattggtctggacaggtgggacccaaaaaagggaacaataagggcacaacactaag

SEQ ID NO: 83132 - DNA, 1130 bp, Zea Mays
aaactaatgttgtcattgtatagataatgttattacaaagctaacgaaacttgaacggatcgaatcagagttaagatgagctaaatatgaattagataagtttcaagatttgtttttatactaacatcccatctttccctatttaatttggaattttctatggatcccggactgctgacgctattattagagaatccagggtccaatacgtaaagaaaaggactaaactgcaattacttttatactgttgtggagcgcgggtcgatttagtaaaatcgtaggggttctttagctaaacggcaacggcgaagaggtaccgaggacctagagccgtccgatcgcccatcaaccgacgggattagatcccccctaaagtgaacaggaatcacccacaacccttggatgcggcatccacggttccagacgatctcaaaccccatccactcgatcaggcgccaaaggcttggattcaatacgcgaaggggtaaatgttacttttaatcccagccatccatctcaatcctacggccagggacctgtcttcccccgactggactcgagccgaggcagcgcggaagtgcccagggcggcggcgccatggccgcacaccttgatctggcgtcacgaggctctgctactgttaatccggggtgcaacacaaaggaaaaggcaaagtaaacctcgtgaaggtaatctcaccgcagatcatcatctgtaggttcaagtcatggtggcgcagcttcatggtgattttcgaatttcagcgatcgattctggtggcttcgatcaaatcccgtgcccaatcagaggtgtttgttcctccctgaaccccgtaaccacctccaacacagtctgtggagcaaggcgaatcaagatgtagacctcatcccagtctctctctttcccgcctgctcgatggcgctctgctccttccgatggctttgatgctcaatatatagatcacagggctaggggcgagtccgagcttggccgacctggtcccgaggtccgcgcccgtcggcttgaatcttgcggcatttggttggggaatcgccaggattccgcgcaggtcgttggggaggaagacaacactgaccacgcgggcccatctgtcatcgcctcagcacgaa

SEQ ID NO: 83133 - DNA, 308 bp, Zea Mays
gccactgatccgcccgagtgaaggtgatcgggtgctccgaccatcggtatggggcgggaggaccggtagttgccaccagtatctggcgatcgttgagcttttgttgtctcttgttctccggcgatccgtgtccaccgaaaatgacattaacctctctgtcgacacgcgggaaggctccacctcctccctcctcctgcggctggggttgtcgcggttctcctgatcctcctcgcggcgggggaggaggtagaggttggaagggtcggccatgcccgatggagtgcttgaagtctctgtagttccaaacg

SEQ ID NO: 83134 - DNA, 793 bp, Zea Mays
gtcctaaataacaaataacagaacaacaaataataggacactgtgagtatgttggacaggaagtcataaaacgctatctgaaggcacagacattgtgtgcgacagacataggatgtttatgtgtacaggattgaggaatagaggtatagtgtcactcatgcatatagacctacgaagttgtgctgcgtttgtgttgttttctgcgttgtgctgcgttcgtgttgtcacccatgccccatgccaagaagtacaaatgtaattatttatggtgagaagaagtacaaatgacactcgaatggatcactcgctcggcatgtgactggcccaaaataagtgaccgaccacactaactacacttagacgtccacgtggcccatgggtccgtgtggcttcacaccatggtaaaatgctcggttgtaccatcgcccagtgattcctttttgaggaagcaaccgacggccgaccccctccttggcctatataaggagaaggtcggtcctcgtgcataggagggagagagaagagggaagcacagagatacgaggagatgcacatacgggcaccaagacacaaatacgacggacccagaggccagagtcctgacgcgaagccaagacttagctaggacaccactctgtagcccttagctccacatcgtccactgtgaatcatctagacccctaagtggtgttttggtaattaatgtcaactgaatgtggactaacaattcttagagaaataagaatgcaggactggaccacaggacatagtaaagtcttccggactcataacc

SEQ ID NO: 83135 - DNA, 299 bp, Zea Mays
cccctagctgaccagaggagactaaacccctcgtgccgaatccgaaccacccgatcttgatctgacggcccgaagtcgtggataacggttcgcgtggtttgtggaaccagagccatcgatctacaattcagtggccaacgctcctcgtgtcctcttcatactgctgacccatgggccccgtgtgtcagtgcctcaacccacccgagcccacctgtcaagagcctgcgccctcgctcgctattctaatttggacctttggtcggagatcggacgggtagcgcaaccccgtaccccttcgc

SEQ ID NO: 83136 - DNA, 335 bp, Zea Mays
cctcttcgggttatggtggctaacagggagcgcgtgtcgtgctagggcgtggtacggaacatggacatcacgatcgacactgaagaatttcgcatcaactgctacggcatcaacctcgacgagtttgatctcatcctcggcgtggagttcctcggtaccactaagaatccctcctcctagccggctttagtggactctgatttgaggtgtaaaagactaaaagactctagagctggcttcaagcatggaacctgttctaaaagaaattgtctgatgtgccagcataagtttgatggtccgcccactctgtcgtctaaggtgatccgaagcctagg

SEQ ID NO: 83137 - DNA, 404 bp, Zea Mays
gatggtggctaaaaaaatctaagaaaccctaatcgtgacctgctctgttaataggtcactaaccttgattaggcgagataataaccccttcgggtactgtagcatatatataggcgacaagaatatatgggctttatgggccttaacacatataactcactaaacacaacaatcacgttcttccagtttaaccagatctaactcaaacatcaagaaataataaactatgtgtaagtcctatatcttctttaggtagtgcccaacatcagaagactagcaaaacctagactcatcattcttagacacctaaattcagaatgagaatagaagcaatctaactagcactctaaaccaccttttggtgaaagagtaattgtgggaatgacttgattctattccacgac

SEQ ID NO: 83138 - DNA, 1355 bp, Zea Mays
gttcataagaatcaaattaaagtattcaaagcaactataagctcaaatcaaggcttggaagggcatattttggataaggtgaactatgagtagttcataagtttcgatgagctctaaatgcccttagaaacatatttgagcaccttagaaggattaacagattaggttttggaaaaggtgcatttggagctaagtttgtgccaaaactggtcggggaaatgatccctcgtccctggggcccaccggtcagagagcgctctaagggaaagcccctggtcgctgcggcctgttggtcagctggaagaggtggataactctgccctaaaagaacccgccccctatcgaaccctgcggcaccgagtctagcctttataggagtcacccctcaccggagataggctccaataacacccacacctatgacacctttctctcgaaggaagagcacccccgccaaatggtttcagactcaagctttctcctgaggcgtaacatcacgactccaattggagggagcctcgaacggagcgctctggtcgacaccgaggagctacgacctcggaaagggcccttgaacaacatcttgtaagtaaaaccatcgcatgtaccaacccttattagatagggagaggggaatcaacatgtactcgcgcaacatcctactacaaaggcacatactagcacacctgaccgaccacacttccattatcctctgctcctccttcttccgtaatatctcaacatagaagaagtactaccataaggtgaggttgggctcgacgcccaggtacgtcttgcataggatcagaaccaccccccttcatccagtagaccacgcccgacaagtctctaaatgttctcctggcttgtcaaggatcagaaccagtccaccatagggggcacgacggaagacctaagaaagagaacgatatgctgagcgaggaagaccagggtctagggaaccgaaagcaatgtggacaagatagggagagtggcgtgattaaataaaagtcgtcctgcaaaaccctaccgcttggtgccagcggagaaggcccgccagacgaagaaacaagcctgacccaccagcgtgctaggccacacgtcacgccaccgcctctcggagaaaggtacgagttaatatttccccatgtacagtaaaaaggagtaacattagaataaaaaatgcattagggaaaggtctcccctggattacatcactctttacacaaagggccccaggtctcccgcaaaccacaaccctagactcaagggttgggcgcggaaccaagcataaaaaaggtgaactccagaagaggaccctaggtagccaatcgtatcagatcatccatagacac

SEQ ID NO: 83139 - DNA, 311 bp, Zea Mays
aatcatcttctccagactccaagccaataaccatatcctgatttcccatctatgggaggaaggctaatgcttgcggacatagctagatctgataacatagaagcaacatggaaaacaggatttgaagctaaactacaggtgtgttatgcaaccaattcactggagctaaaaatatagaagcaggcacacgcacacaaaacagatccaaatcatacgaggcccctggcggtagactatcagcaatcaattagggccctcccctctagaatcggaggcacacctattctcctctcctctttcgccgtagagag

SEQ ID NO: 83140 - DNA, 409 bp, Zea Mays
gtcgataactttttcatcttttggtacattgtatccttctcttgcacaataataatacttgcctactatctctgaatccttcttcttatgctgcccaacacgaactgagaaaccaacatcatgcgcatagtccttgtaaaacttctccacatcagcaagattatcaaatatcattcccaccgttggcttcaaattttccttaacattggaagatgattttatcggagtttctgcaacgttgcaatgaagaaaagctccatcagatgggccactgagatccacaccatttgcaaccaacacacccacgacggcgccatcccccttcacgacagttgctgacgcttgggcgaccacgaattggctagcctcttccaccattttacccacttataaaacaattaaacctgac

SEQ ID NO: 83141 - DNA, 284 bp, Zea Mays
gagcttagcaaatgtacctgatagacacataattgccctcacagtcacagtttcatataacttctctgaatcgtgcacacaaaaggcctgtgcattagactttaatgtacgtttatgtagacaagctaagtactgatatactaaaatcgcaaccttgtatgttggagtgcacttgtcagaataatagatccaagttataagcacattactactacaatactacacagtagttactagtgatctaccgatggcaatcggcaaaagcacaacttgtgcattaccat

SEQ ID NO: 83142 - DNA, 863 bp, Zea Mays
tgcttgagctcctgctttatttatacaatagagtaccgtagtttccttgctgcttaccgcagtttccttgttgctcacttgctagattccttaccagcaatcctatttctagtgaatcctattcatttgctctacaatggggaggaagagggtagctggtagaaaagctttttgtagtagtaggacagatgattccaacaatcctatttctagtgaattctcccctaccattgaagtccctgggtctcgacctgtttgtagtccctccttacgagtactaacagattgtggtggcactgagcctgtatctggttttagttccttttcattactagtactagtagatggtagtagaggggctgagtctggttctagttccttaccagcagatggggatattggtgttgatgtgccagtaaagggtgctaaaccatctgtttcttgggcagaatgctggaagcatatggataagcgggagattatcgaggatggtataaaaagttatattgctatatgtcactattgtaaaaatgagttgagtgcagattctgctggtggcactgggcatttgaatcgacacttcaaagcttgtttaaaaaaggcagggcaaacttttggtgcaggtatgcaaactcaactaaactttgctgcggacggcattgtaagtacttgggtttacaatccacaattagctcgtgaagaaattattgctcagtatcagaaacaacttgttgttcttaaagaaaattttaaaaaagttcagttttcgtttgctttaacttcagatatttggacttcatcacatcaaaagactagttacatttctgttgttgcacactatttggataattcatattgtcttc

SEQ ID NO: 83143 - DNA, 323 bp, Zea Mays
gcaaggtggagtcctagctaagtctaagcttggcagggctccggcctcctggtcctcgtcggcgctcctcctcctgtttgtccttgtgggttcgtctttgtctaaaggcatccggttgtctctctattcgatcccccttgccccgaggtgagcctatcgcttttataggctgggagaggagtcaaccagcggtggcttctctaggaagaagtcgtaaggcaggggtgaagccagcattttaccccggggaggccacacgcactcgtgtggctcaaggttgcctggctgtcgtgtatttatcatggtggatgacgtggggtgac

SEQ ID NO: 83144 - DNA, 365 bp, Zea Mays
cgaggccgggatggcttttatagccgcgggcgcgggcgcgagcacgggcacgaggttggcacggcgcggggctgcgcgcgtgggcggagcgccgagggcgtgctctggcgcgctagaacacgtcgaacacgtgtgcgtttgtttctacccttgttcaaacacctgctgggatcacaaacgtgcgaatctcgccaagggtcttgtgcaagatttcttcctggcacctagggctagctagtttgtgtgagttccaagggaagatctaccctagatcacaagatatgtgggcgccaagtcaggtctgtcggcactgttcatcccgagacaaaactgatgtcaacccttgtcaaatggttgtggtaact

SEQ ID NO: 83145 - DNA, 406 bp, Zea Mays
ccacccctctctctgtgcataccctttagcaaccaaccttgctttgtgcttaatgatgttaccatcaggatatttcttcaccttgaaaacccatttaagccctatagctttgtggcctgcaggtagcactaacagcacccaagtcttgtttgactgaatagagttcatttcagtcatcatggcttccctccagcactgttctgacaaagctacctccacacttcttggctcctctgctgcatggaagcacacaccactatactcgaaatcatgaatttcttcagttgtatcatataaattagatatatttctgtaacctgttggaaccccttcagagttacttgaccattctaactgtggtgtttctaaaaattctccatgtgcaggtctccctactggcgtgtgt

SEQ ID NO: 83146 - DNA, 1724 bp, Zea Mays
catttgcacatttgcgaggtgaactgggtgattacttccctttttgattgaggtctaccttttttgtttttccttcttttctgcttcttttcatgtaggttttagttcttccttcttgcttttgtattatatctgcatctcatgtagctttttgagcatcactttgtataactgctagattgtaaccatgctcctagtagtatgttctatgtgtacatgatgatgttatggtagacttaggctctttttgctcatattgatacaattttgttgagctaagcttgtttttataattgtgaacttgactattacttgatgaatccaaaacatgttcaccatttcatattggcatctaggatgtgtttgaaatcatttgtgctatcactagtatgaaaggtgtatatgtctcatgttccgagtcattcactgtcttgaatcataaattctgtgcctaaacacaaaatcaagataagtgaaaaaattcagaaagataaccactttccttgtatctccaattttcttgccagaaacttcggcagtggcaggagttggcattttcatcgattccaaaacagcatccaaaacactagccatcctcctcttcctcggggtcgttgtcgtagtagttgacagcatttgaggctctgtcactactgaagggctcaacacctttggttgttcttctgctttttctctatttccggctcttttaccgcatcagcactagcttcggctggcatggcagggacagttttggcactctcaataaactccacttcctttatcataggcaccacagctgtctgctctgaagattgtagcttcagcctacgggtcaggaccttggatctcttaggcttcggcgcaccaaaagaagtcgaagtggaaattttttcctccttactttcgagcaggaaaacaataatcaggataaacaaacccaattacatcaaaactctatttagtcttcttttttctcgagcaccgaaggcaacggtcattgcttcgtcctttgccttcgtgtaggctcccaccagctcatcattggttgcctcaatagcatctagccaatcgtcatttggctcgtcaaactggcttctataccgaaaggtgtatctaagataaaccaaaccaccttggctggagacagcagcagtttccttcggcatctcccactcattcacaagaggccataccttgaaagcaatgtgttcttgtaccaaatccctggtaccgatgtaagtacacacggtgttgaaagccattaggcactcttgcacttcattcccaattgcaattgacggccttctaatatcgaagcgtgaccatatgagacgctgaacaatgcccctcacatcctccctcttgcttagatcattcttcacatagaaccattgcttcatccaagaacccgaccatttcttccaaaatgttagcacgggataacttgcctcaaagcggggcacgaagttgtagcacccgaagttgttatggtattgctccttctcggttgcctttgtctggtaagataattcatgtatattacagaagcatctagcatctggctctagcctttggctcctcatagcccaaataaaaacccccactttaatcaaagcttcaggagtaagttgatgaaggtatatttcgaacgtcttcagtacttcaaccaacatcttgtgcagtagaaaacgaagcccagccttcatgaagcttttaaaaac

SEQ ID NO: 83147 - DNA, 374 bp, Zea Mays
gcttcgtattacatggatcccaagttattcttgtagctgctcccaaaagcgtgccacaaacagtgctcctctgtcagatacaatggtctttggaataccatgcaaacgcactatttgatcaacatagatttctgcataatttttctgtcttatgggtggtatgcactggtaagaaatgagcggtcttggtcaatctgtccacaatgacccaaatggaatcatggtgccgagaggtattgggcaatcccacgataaagtccatgcaaatgtcctcccatttccaagatggtatgggaaggggttgcaaagggcctactgccttcaaatgactagctttgattctctggcaggtgacacactcggatatgtacttg

SEQ ID NO: 83148 - DNA, 651 bp, Zea Mays
gtttgcacaactcaaatcaatgagccttcaactcccttgatgagtttgttcacctctaatcgatgagcttgttcaactcaaatcacatgagtgatcaactccattcgatgagtttgtttaactcaaattcatatgagtttgttcaactcaaatcacatgagtatgaacatactacaatatcaataaatatgaaatcaataataatgggattatatcaaatcttatgcatcatttgaatagtactcaaaagcaaatcatctaatagagtggtcttctcacagaaggagaagtggtgttacgtgattcagtattaaccacgatttaaacaaccaaccaccggtatcatgtcagaatgaagattgaagtacacttcatatcttagctttcatgagtagtttgcacctattagggatttaatatacaagattagatgcttcgtcatacaacactacatcatgtatagtgtaacgacaaacgagtttgtcatactcattacccttctctttcaaatatacgtgtatatttgcttctcgttgtatttgaattgatcagtcgggttcatagattgatgatagtgtaaatccaacgaacatcatgttattctcaacattattctaaacactatgaatctcacaagagaggcgccacaaa

SEQ ID NO: 83149 - DNA, 753 bp, Zea Mays
gccgttataaaggcactaggatgtggaaatggaagggacatacatttagaatgccaccataagcattagcttccactctcattccatgaaggcttttcaatcgattgacaaattgtgtggccttttcagtcactcggtttggaaggcgtcatgaattattaccggcaacgatacaatatgattacagtgtcgtactgctattgaggatttacatgcatactgtcaagaagctgcaggaagaaatgatgtattagaactagtgcagtagatgacaaactatccactacaccggccttacaccaaaagtaattcgatgtgtttgacctcttgcagttagccctaattttgtgtttttaccatcctttatttctcttattcagtttatgcatgtacatccccgacacgagaacaatgagcaacactcctatatgagcatgaatatttgacactgcatttagctacacacattcatcaggatgactgaagaaattaaccaaacacctgttagcgtgagagatcaagagccgaactagcaactactacaggatttggggaaaatgatggggaagaattctataggaagaagatagttgttcacttcattttgttcataatccggcaacggatataggaatcatatatatgtgtattgctattggatccccatttacatggcccactgtagcccaacaactctcgcatttggttttctcgcgcgctctggtcaaacttgtttcgcgtcttccttctatg

SEQ ID NO: 83150 - DNA, 492 bp, Zea Mays
taactgtgaaccggtacgcaactcaagccgttggatcaaagatctatgttctggattttattagggtgcgatcagatctagttcatctgatatctaatcaacggctcggatttaacctaacgaaaggcattcaacacttaatcagggtcgttcattctgatcggatggccaggattctacagcgctgaagggggagactctgattaaatcagagccacacattctccgatcaaaggttagcaaactctcttccctcccgagctctggtcatggcggcgctgcccaccgcggcgtacgctacatcgccgattggtgattccgcccaacgatgggactgccccgagtttgacaagctctacacgaagctcagcatatggtggactcaattcaaaaccctgaacaacctgatgggataagccctggcccctttctatggcgtggcacggcgccactgctctaatggcacgctggtggcaattccaggtccacaga

SEQ ID NO: 83151 - DNA, 930 bp, Zea Mays
ttgagatttggacttatttgcaaaaagccccacttaaactatattgagttaagtctgaatttcagtgaattggctcaactttgaagccctatatcttccaaattatgaaggttttgccataggtcaacacatcaagtttttagagctataaaaggaggacaacgttgctattgggattatgccttggtgccatgaaatattttgagataattaggcccaaagatgggctatcagactgtcttaggtctgaattcaggccaaaagtgtgattgggcaatctttggacttaaattcgaccataatccagtcagtgtttggctatggttgctattgtaagtttgtagctggatcattaggctacaactttgctgcagaatgttggtctagttgccatgtgaaatcaggagaaattcgccccaaacttggtctgtcaggccgattgaatgaacttcgcgatggtacagtgaccggattggatcgccagctcagagacctcgccaccggtgatcttgcgcccagatccacaccggcgtcgcgattcacgcccgaccaaactcagataagcgctcctcggtaagaaatatcgcgctagagataaactccggccactgttctcaccgccgtcgtgtcccgccatggtcagtcgcattggcatcaccggcgttcaccgttatccggccgggctacgtgcctcaacgttttaccacgtcgtagtgagtcactgtaagtcactggtttgtcgccggtgaggccgccatggtgaaggccacaaatcaccacaccagtgactcattccttctccgaccaccacagtgcccaatccaaattcactggccaccgctcaagcctgctataaattcctgaccccgcctgcttcgttatgtaattgtgcacccagcagagcaaccagtgcctcgaatcatccactag

SEQ ID NO: 83152 - DNA, 299 bp, Zea Mays
caggataatacatgcggttgcgttgtatttattagcatttctttgcgttgggaatttgtgattaagtaatgtgtagccagtgacggatgaattctgtacatagcgcgcttaatcctggacacgacgcatggttccatggcattgagttatcggttctactttgtcatctgatttggggattcaactttagattgtttgttcgtgtgcagaagtggtgttggacacatttatcgtcagacttgtggcctttttctctttttcagatggggataatgtggatatgattgggaaagcttttg

SEQ ID NO: 83153 - DNA, 369 bp, Zea Mays
gtgaacctacaatgtgcagtcctgattactcgcacagtgaattatttagcatatatatccacaagtgcaccagataggatattgtggtctgaaacagagtaaaccatgcacattatatggataggagagcaagcaagttagtgttttaagcattaagggtccatcaacacattataaaaagcattagtggccagaggtgaagagcacatagcaatcggaatgacacgcagcataagactagcgcatgctttgatggatggagggaatgttagtaggaatggtggcacttctgaatttgataatggaaacacagcatcttgtttggtaaagactttgagtaaaaacaagacattgagttcttgatctttt

SEQ ID NO: 83154 - DNA, 682 bp, Zea Mays
gaagataaattcgagggtttagaatgtcaccacatggaaagggatcgcaatgcagcagcagatgcattgtcaaaattagggtccagtcgggcctaggttccacctgggattttcgtccaagaagtacaacaaccaagtgtcaccgcatagcatgctgaagaatgcaatgccatggaccaagcagaaatagatcccaatgactggagggagccaattatctggtacataaaaaacaaggaagaaccagatgataaggccacgacagaacgcatcgcaaggcagtcggcccactataccatcatagggggttcgctatatagaagaggcacagtaggagtcctcatgaaatgtatttattcggctactggaagcagctactagatgaaatccatacatggcaatgtggcatacatgcaacatcaaaaacattggaagggaaagccttcaggtccgggttctgttgaccaatagcaaagaatgatgcggcagatttggttcagaaatgcgaagcatgcaagttcctatcgaagcaacaacacttgcccgcccatcatttgcaaactattcctgtaacttggccctttgcgtgctgggggctggatatgatcggaccattcaaaaaagctcaaggagggtaatactcacatactcatcgctattgacaagttcataaaatggatag

SEQ ID NO: 83155 - DNA, 521 bp, Zea Mays
cagggatttctgcttctccattggcaccaagcttgccttcgcctcagtgtaccacccacaatccaacggcgtcgtggagcgcgccaacggcaagatttccacggtgatcaagaaaatgctcctcgacaacaagaagggcaaatgggccgacctgctacttgaagcagtctgggcactgaacacgaccgagtgtcgggcgaccggattcactccatttcgcctgctatacggatcggaggccatgaccccgcaggaaatcaaacataggtccccgtggacaagtgcttcagtagtactcgacgtcgatgagccaacttccaaagacctcattgacggagaccgtgtcttcgccctgcaggccctcgacaaatatcaaacccaaacgaaggcctggcgcgaccacgcagtcgtcccaagagaattcaacgaagggaacctcatacttgtccacacaacctggacagagtcacggggtaagctggaaccgaagtgggaaggaccatttatcgtcaagacgaagt

SEQ ID NO: 83156 - DNA, 725 bp, Zea Mays
attccgcggtcgtccccgtcctccgccagctccagcttctacggcggcgggggcgggggcagcactcggtccaccacgcctggccgccgcagctcatctgtagcgcctgcgccgacgccggcgcccgcgcttgcgccagtgccgttctcgagctcggacgagctcgtcatcgaggacacctcccgatccggcgacagcatctccgtcaccatccgcttccgaccgctcaggtggggatctcggaaggaatacgcggatcttcttgcgaggggttgtgagtaggcttgtgggagtgcttgaactggttttgaggtggatttgatgtggctgcagcgagcgcgagttccagcgcggggacgagatctcgtggtatccagatggggatcggcttgtgcggtgcgagtacaacccggcaacggcttatgcttatggtgagtagccttcattcagttccaccttcattcaattaggcaatgcagatagcgggattgaggatttggataatttaggtattggaatttcatcccgagcgttttttatttgaggtttcctaaattaattattatggattcgaacaattaatgcacatctggaactagcacacatggcctttgattgggctgcatgatgaaaccaaatttaggtcctggtctgcaattttggaaaccgcctgtttctgtggaagtctgtagttaataaacagcgcctgtttctgtggaagtctg

SEQ ID NO: 83157 - DNA, 365 bp, Zea Mays
tttctattgcaactggcttatttgcacctgtgccaatttggtttacttttttcattatatgaattcaacctaaaatatccatgtgttttttacctaatgttaaaaacatgcagatgctttatgtcgacaacctgcagcatggatttgacacgagtcccttttcgatccctcgatgtgctttcttggactcgaagatgattgatgcgatagcaaataaggatctcaggggagatgttcctactggcactaccgagtttggacacctcagggtaagttgcaactatattgtgtttaactattgcaaatgatactccacagtagttgcaatttgttattcatttatcattttatcattgtttttttac

SEQ ID NO: 83158 - DNA, 434 bp, Zea Mays
ttgttatccaaggcttggaaaagaggattgataaacttgaaacttcattgaaggaaaaagacaaactattgcattcggccgaaggctctcttgtcgaagttcgatctcaaaatgaaaagttgagcaaagagctagaagaagctcgaacacttttggaaaggaactcagatcgcttcaattgtgagtctgaagcgttaaacgcgacaatcaaggccgaagttgagaagaatcttaaactgaatgaaataatcaaaacttttcggactaaatgcttcagctttgctactcaatgcatcgctcggctaaagggtatcttcaattctgttggagccgtatccgaagaggttaatctttctgctaaagatattcctggggcgcttggatgcgttgagaaagaggttgacgttctcgacgaagttataactggccatgga

SEQ ID NO: 83159 - DNA, 592 bp, Zea Mays
aaagaacatgatgggtggccaacctggaccaacgccgcgtcgaagccataggtcgacgcgttgcactcgataacgaaaggcttggcgaagtccggcagtgccagcactggggtcgatgtcaccgcccctttgagggcactgaaagccgttgttgcgtcgtcgttctagggtttagggttgtgagaggagcagcgatggtgccgtagttgtggacgaacttcctgtagtaccccgccaggcggaggaagccgcgcactgcccgtgccgagcgtggttgaggacagtagtggatggtgtggaccttggccggatccatggccacccctcgcggatatggtgtgcccaaggtaggcgacaacatccacgccgaaggagcacttggagcgcttgacgaagaggcgatgctggcgaaggaccgcgaggacaacacagaggtgacgcagatggtttgcccaggaggcgctgatggtagacggatcggaggtcgagcttggtgaagaattgggtgccatggagttcatctaggatcttgtcagcgactggaatggggaaggtgtccttgatggttatggcgttcagcgcacggtagtcg

SEQ ID NO: 83160 - DNA, 631 bp, Zea Mays
ctgtcagtggacagaacacaacaaccagtttgtaaaattcataactcttaaaccatcaggcctgtggttatgaaattttaacacaagcaagatcagaaaagcatctacaactttcttataacgaccatgaacagattgcaacattaaattgagcaaacaatacagtttctgaaatctgtacaaaatttggacagattcagtctctgaatttgtgaacagcataactcctaaactgtcagacctatggctgtcaatttttaacaccagcaagataatagagttttctacaattcttctatatgacttttctacagaaaacatgatttagttcatcaaacaaacaacacaactaaaacagtgcgtgcagtccaaaacagcaactataaattttagctcctatttacttcaagaattgtcatgttctagagactgaaatttctctaacactttactatttattagagttgaaacaaacaaaataggaccaacaagtcacttacaaattttatccgagtcatttcgtccgctagagttattaccacacaattaacaaacacatgcaccaaaataaagtatttcggcacacatgtccgacatcacacaaaattgtgatgaaatactaatatttaac

SEQ ID NO: 83161 - DNA, 864 bp, Zea Mays
cccagagaaagcccataatccctgttctggcctagcaagtctacaaggcgggacgaacgaccaagtccacgctgagcaagtctgcgaggcgggacagatgaccaagtccccgtcgatcaagtttgcgaggtgggacggacgaccaagtccccgtccagatgagccaaattctagaaccgcgagtatacgtcgaccataacaggacacgtcaccaggagcccacgtgatagtcgtcagcacgattgtatgtctgtttcttataatatgagcacaacatgttgtttgatggggcgaagcggcctcggtcaggggtgacctcagcaccggagtctccatagtagtccgtgtgtcagaagcgacaggatagggcgccatatcgaataggagaatccgtgcgcacagagggacaacgtaggacccactatgacaggaaaaggccctccatataagtcaagctccgaggctaaatcgtgggacccgccgcatgtcatcgcaggaatgtcagccataaacccgccgtaggaagaggtgtgacgggcggcgccataccagaagcacaactttacacgaccagaggtggagggcccaccacgacaatcaaaggactttccttctctctctctctctcagagaaacattggtgtaaggcatgtcccttgagatataaaagggacggtccctcttcctctcacacaagcatactcattgtaacacactcaaagcaatactacgatcagtactacactatagtagggtgcaaacccgaaccagtataaaacatgtgtctcagatttctcgtagagtcctcgtgattcaccatttagagtgagtccgcgctaacatccataccgaacgtaaatctca

SEQ ID NO: 83162 - DNA, 1318 bp, Zea Mays
ctttactttcacaaggcgatccgcgcggagctcgaggcgctgcacggcgccgccgtgctcctggccaccgagcgcaccggcgatgtagagatgctcgccaagcgctgccgcttcttcttcaacatttacaaacaccactgcgacgccgaggatgcggtacgggtgctggctaccccgtgcggagctccgtttttgtgtttttgtccatcttcccctgtcgcttcctgttggatggggtacttgacccgtggtggatttgggcttggatgtgtgcgttggcgtgggcgaattccggtggtatctgggtttagggttgcggaattgtcgccttcggtttgggtgtacctggtgggatagggattggaccgggcaaacgttgttaggatctgaaactgggtatgagttcatacggcggtgtagaagctttcgacgaattggcgttggatggtatgggggacagttttagctgtgttattggttgattagctatgctactacgacaattatttgcactttgtccttccaatggtgacaaaaggagatataatctgaggaaaacatgagggagaaaacttctgtttacttgatgctacagtggaaactttgattcataccttcgtatgttgtcttgtttgcgtaacttctatggtaacactaccatccttttcctctcatttgaacatggaaactatggtaacttctatgatgtttgcattagtcatgtatctcttagttttcacttttcgtgaagcagcttataggggttgcaacctttagccttcttgtagattttaaaatatgaaaatgaacttctatcatcactttttgttacaaggagtctagctgacaagcaaatgatttcagcttttcctaaaatgccgccaaaagtagaaacaccgtttttcgttctgtaactgcccggccgtttcttcatgagcctgtcgtatatggcctattcacggcatcaacattgtttctgtttattatgtaacccattacatatttacccttatttttggaaataatgccaacactttacaaattgttcttatattagtcatctttccttgaaatgcgtctataggtttcatttcttttgaattgcaggtcatttttccagcactcgatatccgagtaaagaatgttgcagggacctattccttagagcataaaggagaaagcgatctttttagccagttatttgatctcctgcaattggacatacataatgatgatggtcttcgtagggagcttgcgtcatgcacaggcgcgatacagacatgtctcagccaacatatgtccaaggaggaagaacagg

SEQ ID NO: 83163 - DNA, 342 bp, Zea Mays
gtgatctggcttctagccgaaggtttgtgtcacgcgcccacgggccacatagtggcaccagacctctacccgagtggagagcagggaccaagagtgcatgctggctcgaagacttgggcctcccaatgttggggtttggatggcatacttggaggtccacgacccacttgcgagggtccgactagcacacatggaggtccggaatccacctgtggaggtttggacccatgatagtagtccctgaacatcttcacccctggaacacgtggcgccaccggtttcgtcctcgagcgaggagtgggtctagaggtcaatggccccgttagacgggtccagaccttt

SEQ ID NO: 83164 - DNA, 681 bp, Zea Mays
tgaggttgtgacttcctacttatactcatggacgagcccggcagagggtattcggttgcgagaatttcggtaggaaaagtccgagcaaggcgtcatccatagctatctagttttctggtcaaggtttgttacaggtggagaaagaaaaaaaacgattgacaaagcggccacgcacaccggcgttccacacgcggaggtccccacccgtcgtagacacaccacagacgtgcgtgcacagtttagttggattaaatatgttggatgacgtcatcatggctggaaataataaaaaaaacaagaacaaatgtgggctatacgctagggagatgggccagccattgtttttttaggagtcggtccagatttctttttttccctttttttatttctattatactttgaatttcctttcctgttttgaatccccatatttagatttcaatttcacactaattttgtttctaaatgcacaacaaataaatcaccaacatgcacgttatgatttttatgttgcttatttatttaccaccttacttatttatgcagatgctttcaacatatataattcaacattattaatctatgtaaagtgtgtcaccatatttatttatttaaaatcacagccaaaattttaatatttacttagtttcaaatacataaactttagaaatgctctttaat

SEQ ID NO: 83165 - DNA, 304 bp, Zea Mays
ggcgtagcaccaattagattgtcaatttggccataggtgcaccttatccatgttcgtcagcgaagctccaccgtggaggccggcggcgccatcacacttcaggctggggtcgagcacaggcggacggatcgttcgatccttttcgaatggccaggattagagagggaatacccgttcgcttactttaaatctataccatagatcgagtaatgggcggatctgggatgggtgaggcgtggccatccctcatccatcgatatcagatctagcgactagggtagattacgggtttacataacacctg

SEQ ID NO: 83166 - DNA, 280 bp, Zea Mays
ctaaaactcaggtgtgacatgaggtcacaatgttcttccttttcaggtgtctaacatgcaaatggaaaagcttagagtttgcatctccatccttgagccacaaaattctcgatctcagtcttgccatagtccttctcaaggaggaaagtagaagggtatgcttttttagcttattctttagccagatttcattcatggaaaggatcctgtcatcctgtgcaatctctagcctatgaagaatttccttagccatggccaaatggaacctgatgtgtcccac

SEQ ID NO: 83167 - DNA, 736 bp, Zea Mays
tagagctaggatagggtggctaggtccatgggttaagtttcaacataaagaaaatacttatgtgattgttcagatggtccgcggggttgaacatgaagatggtgtttttggtttggtcattgagtgttgttgtaggacattctatggcatgtcagaagatttgttagtatgttggagcatttcttagaatggtttgagcatgtaaaacttagtcatttttgtgttgggtgttctcatgaattattcaaggatatatcgtagagtctgtgggtgcaagattttgagagcatgctcttgaattctctaaaataaatattttagtcggttcaaggttctcaagggcggtttagagcgaggaacttcaaacatgggaaataggctatgttagtgaagtgagtgttgttagtgcatctagccccttagtgggttttggtgaattgagtaacaacacatttaaaggtctaacaagtttgctaagtgttgaatagaaaattcagtgtgttgaacatacttgaatagtacataatgatcaatgaacaaagcttcaacacaaggttaaataacattgagacaatgcaaatggatataatgtgatctctatgttggtttgaatatatgcacaagacttgagaaatcactacgcataaatattatcagaatagagattgaagtgattaaaaggattggtgaagccaaaatgaattagatatgatgaaccacgaattggctttaccat

SEQ ID NO: 83168 - DNA, 404 bp, Zea Mays
gtgctgttatgcgttcagtggagggggcttgattgcacggctgcacgctgtctctctggtcttaaactagtccttgccctgcctgatttgtttattagctagtcacgggcagatgagatcgaagcaaagatcgggatttgcacggacgacagaggtacggtactcatctctgatttggcctaaaaaatgttatttgtatatatccctccgtacgcccacaaataaatcggttttcgatttctatgatccatataaattaattaaactgtcctaagctctactgatttttcttaggaaaaaataataacatcatctaaaacacaaaataagtacatcataaaaatatattctctgatacatctctaatgatactgatttgatgtcataaatcttgatgagttttc

SEQ ID NO: 83169 - DNA, 412 bp, Zea Mays
caaccaggccagtgcgagatgctggagatctacgtacgccggcatgcaggccgagccaatgcagtagctgcatgtagcggcacataaacagaaaattgttttttagattattttccattatatcttacaaataaaagatttaatcaccgaaacaattttctattcttgtctctgagatttttaggaataaaactagacgacaaatgttgtataacatttagagatttatttatacacttttctctagtacacgtctaaggcaaacaaccaaacacgagcggtatctatcctgaatgcatcaatacaagcaaccaaacacaagcatacgcacggatttagcctgtacaccggagacctggctcctcatatacaggtcaggctaccaccatacaacaaccaaacagacggttaa

SEQ ID NO: 83170 - DNA, 304 bp, Zea Mays
gggccatcggatctcgggcgaatgatcagaattagatatgatttatttaaaatggaacccttcgatcatagatggacgacagggatcggatggttcgtctcggttggttttccctgactgccagggatggcgccgcccgtgttcgtggcgacgagttcactggagatgaggggtgcgagcgctccagggttcctagggcgatggggatagcttgggaaggttagggggagtgtggggaacacgaaggcatggattacattggggcaggggcaccagaaggtggcagcccatggctcgacgacgg

SEQ ID NO: 83171 - DNA, 875 bp, Zea Mays
atgaattttctaaagattaaataagattctagaattgtttttatataaagtaattcattttataaatcattttctctaattttccattcccctagactgcgcgcaatattattaggaaacttggggttcggtctgtaaaaatacagggcctggtcgtaattattgaacacggtgcgcggacggcgggttaatttgtaagtaccacggggtctctttagcaatccagccaaggcgaaggggtatggaccaaagatatccgttggatcgcccacggacggcatagattagattgttatttaatcgaataactctttagcacgacccatccgatcaaatatctacggtggagattttacgagggctaatccagtatcgcccgtccaatctaaacggacggtgatgaactcccagatcaaagcgtcaagaaccgacccaatcttggtcgttcgttggccaatcaacgatccgaactctatctcctacctttggcagactgggcacgacagcgcccacacccaccgcggccatgacccgccgaagaaacgccacctaacgcgcccgcaaatgaaacccggctttgaccagagctacgcatagaggacggtaaggtgaacttagcaggggctcacataccgagagtcgagttgcgtagcacctaggctaccgaacacagcacgagtctgtggtggcaagcttcacttccgccacccgccacatcacccactgcccccgtccgtagaggatgaagacaccaaccatgcattctggcgtgccacgagactttctctaacgcctcgctgaagatatggacgcaccacgatccctcatcctggttcgcactgttccccggcgaccatggcttctctcaatccagt

SEQ ID NO: 83172 - DNA, 739 bp, Zea Mays
gtatcaaagcccatgaattcttggcccattggccactgtcgtttcccatagggagtttcaagtgcacgaatatatagcctgtgtgtgtgcagcagctctgcctctgctcagctggacgactgcatctgtgcttgaggccttgagacattgtagctttgtttcctgtgtgactctgtagtgtgcatgtgcctcatggagctagggaccctaataagtaaagctgttggcctggatgctggactactgttaacctcgcattggccgtgggcgcactatgtagtgcgctgtttttttttccagcgcttgtgtgctgtcactactgtgtgcatgtagttgttccgactactgtccggctaccgtctgttttcggtgaatattcatttgtattcgttcgttttcgtatacccatatattccgtaaccgttttcgcaaccgccttttccgctcccgctcccgttttcggtaaaaaaatggtaacgaaaatgggagaggtagtttcctgcccgttcccgttcgttttcatccctatgtgctggtctggtgcaccaccgaaccttctaacagctactgtagtaggtgacccttctgatggcaacagtcatgtcagggagcaccgtaccctggcatgtcagatttgatcattaaaagttgaagccaaccgttgctattggaaggtccgatgcatcagaccatggggggtccagtgtgctagctgggcaaagtccatttacaccctctc

SEQ ID NO: 83173 - DNA, 649 bp, Zea Mays
attcttattgtaagatgatcttgagggagccagaaatctcaagttcatgttatgtctttttgagcatttgtctggcctcaaaattaactttcacaaaagtgaaattttctgcttgggtggcgtggctgagaggaaagaggattatgtggatatttttacttgtccgatcaataatttgcctatgaaatatctgggggcctaggggtcccgattgatattaagaaacttagtaaatccctgtgggcgcccatggtggagaaactggagaaaaaacttggttcttgacaggggaggttccttagcttgggtggccgtttggcactgattaacagtagtttgaaaaatgttcccatgtttccacatacaaatctccaaaagctatgattagaaacatagacatttatagaaaaagattattgtggcaaggtggccatagttcaaaaaaaatcatttagccgattgggatttagtctgtacgccttagaaccatggtggtctaggcgtgctggacctgaaaatgaagagtgatgctctcttagccaaatggatttggaatcttgagagctcgaatggcttgaggcaaagcattattagaggaaaatatgttaaggggatacctattatttcggtgaaaaggaggcaaaatggt

SEQ ID NO: 83174 - DNA, 848 bp, Zea Mays
gtcccattctttccactcgtgctctaggtagagacatatttttgctaagtttatatttctttgttattgtgtaggacacttggctgaagggacttgaaattgcacttctcttgaggcaccgcaagaagaagaaccgaatgagcaacatttagctgttgcgactgttgaacatgcaagtcctgatcaggtttcttaaatttgaatcaatgaaacattgcccattgcgggactgcagttgtgcaacaaaagtctcatctgctgtgcatatgcacagtactgaaatttaataaggatagatccatccattagctagtatagtatgtgtccatctgcagtgtatgtatgcgcaagcgcatgtttatattggaaacaaagcatggtaggtatcagtcatgtcctaaatcctagccgaaacgaacaacattcagtgaaccaccgtgttttattttagagccagatccaaccctaatcaagtttgagtgaaccagccggatccattgaacttggcctaggaacagaaccgtgtgtgtttttaattccagataatcgaacggggcctaagggatatataggtacttattcccgccggaattcatacatttcctgcgacaagtatataaaacaatattgctatgggatagaaagaaatgcgacagaaagctttagctattttctgtacttgacatgtccttagagaagcaaaggctggatttagatgttgagtgcccccatatttcattttcctctcttttttcttttaaagattgatcgtgacgaactgaactgatgcatttcattggggacgacactatatatagtttgaaaaaagtaataaaaacttttcatac

SEQ ID NO: 83175 - DNA, 1527 bp, Zea Mays
agtcgtggaaggttaattgatggctcgatgaaggatcaccaaccggaacaacctacaatgcatcagtagggactaggtcggtatcatcagcagagggcaaaactctgtcatcaggagcgctggcctctaaggcgacttcctgacccgaagcttgagctgctgccatgcaaccagaatgcggaggagaagaccctacgtgaacgtccatggaagtgtgagagggagaaccgactcggacaccctcgggggctgggtcatagctcgcgctacccatccgagccgggtcatccccggcaacaccctcgggggctgggcaaacgctagtgccatccttgagggccgagctctctgtaacagtcacctctaaggctgaaggaccttcacccacttccatgggagcagaacaatccagaccagcctcctgacccttaagacggcgctctaaggtcgatgaggcacgggacgccgctcgagataactctagcccagcatcaggcacatcaacacaaatatccatcattccaccatctgccggctccgacaacagatcttctgggaccatgtcttcaagagtctgattaaagtttgctagagacaattcttgcagaccaatgagagcagacaaggctagagaaggaacaccactactttccccgctgactatgtagcgtcggctgttcttccgaactagagggatttcatcctcctcttcttcatcttcatcaacaatgcggacgacacacccattggggtcagcttcagcttggtcacacccattgggttcagcgtcatctaggtcacacccattgggttcagcatcagtcgggtcacacccattggggtcagcttcaacaaaaactggcacgggcactccctcagcagcaggagcagaaggaccagcatcctgatccaagcttgacattcagcgaagatgtctctttttctttttcttcccctcagcaggagaagttggttgattggctcggcgaggacgcttcgggtgaacactatcagacctctgaatatccaaagttttgccagcctctgggatgggcgctgcatccagtgtttcagcaggggctgcgtcagagaaatcttcagccaacatatccaacatgtcacttatctcaacatcacttggattcaaaggtacctcgaaatgaacctgcctctcgtcatcagggatttcaccaagtgaggcaaccaaagcactaacctcttcgggagagggtcgcactctaaggcccaaaccgctatcaccagctggaggattcgacacaaaattggtaaaaaccttagaaggaggcagattccaggccgagtatgcaacaagagcaccgatgttcgacaccttgcctctgagtatcatctcgagccagctgaccaaatccactgcaggaattcttctgttggtaacccgggtcgaatcagcgaggcctcgatacaaataagccgggtaggctctgtcctttaatggctgaatgttcttgaaaacgaaatcggcgaccacagcttctgcagtcagac

SEQ ID NO: 83176 - DNA, 1167 bp, Zea Mays
tgcaaatcagggaaataactgagttatgttgattggacgtgatgtgtaaatttaaaaatagtaggtttgtgtgtagggtgtattattaaacatgtatgtcgatgtattaaaatagtgattgcgttaaagtcgtttgaagtattttgaatgcatgacgaagatggttgcattcgacataggaaaagaaacaggttgtgcgataaaaaggctagattgattttataggtcttatgaaaaacgttctattaagtgtatacgtcgagtatgttaaatggatcctacgtatgtagagtgtagtgtattggttaggcgaagaatttttgaatagacgagtatgaggcgtgcagttaaatcgagattgaagtgcaaatcctacgcaatgtgatgggattcgtggtaatataggagttataattgttgatgtgacgagtagtttagcgaatgctcgtttgcgtggaggatgtatcgttaagacatgagtgtcggagttcatttatattagtggtcgcgccacattgattgaagtgtcccgagtacacgccataatatggttgtatgcgagacagagttatgcgcatgacgagtttagtaaaaatccatcggtgtcacatgtgttaagttgaagtttatttgtgcgtggaaagtaataatgtgataatacttagaactcttagtccatggtagaaattatctcggcttaaatagaggggtggtgacatgccaaggtagtcatcattttctctatgtttataagtcgagttgagtcgatgcacattatgtgttcgttaaattatgcttcgcatatagtgtatggttgtgctcgcggattctagtagtcacatcaggtggtcaagtaggatcgtaatacaagttgtgtactggagttagttgttttgggatgattattaaagtgctctgttcacatgataaatatgtatgtttataaaaacgatgtagtgtaggttgtgtctcagtctgcgatcataataggcaagccgacgtgtatgttattagcgggctatgtcgttgctctagttagcagacttgttagatggttttggttaagctcatggtcacggcgatttgcttgttgtagtctaaatgcgtatggttatgatcgcgaatgaaaagtagtagtgctcatgtgatgtctaagttgaaatgcaa

SEQ ID NO: 83177 - DNA, 482 bp, Zea Mays
gtttgtggcccatgctctttttgactctggccctagctattcgtttgtttcagagaattttgtgtcgcgggctggtctttcggtgcagaggttgggtcacccaattttggttagttctgctagtggctccattagtagctgttcagtttgttaggggtgttccgtcattcttgctgatgaggtcttttaggccaatcttgttgtgatttccttgggggcattcgatgttatcttgggtatggattggttatctcagtatcgcgcagttatattatgtttttggaagacagtgttattgcaggcgccgtcgggtagggaggtgatattcttgggaagttctccaaagttcacgttatcctcgttgtcgcaattgcttctggatcttcggtcaaggaagtcgggaattctttactccatggtggtggagggtgaggctgccttgcgggtgcaggacatccgtgtggtgtgtgactttgtcgacg

SEQ ID NO: 83178 - DNA, 498 bp, Zea Mays
aaagtttcgtataggagacgcatggtgtatagcgagcacgaaaacacgtccatgaagaagcagaccaacaagaactttgcagtggcggggagggagagggagacgaacctattgtggcggcggcgagggaggagaacttcatgtggcggcgattggcggcggtgaacagaaaatctcaactctgtgatggacagacgtatcgatggatggactgcacgggcaatatgatcagctgaaataattaaaaaaattatagtactattaagaatgacaatatcacttctaaatactattagtgagaagatggagttgagagtactctaataattagagaagcttgtaaaaacaaatgttataatagcaacaaaaaaaaactcgaagaagacaactgttatagaaaatcgaatatgataatcctcgtgccataataacgttgccgttagggaagtgaataatattcatttaggttgttcaaagagggcaaatcattggctgaat

SEQ ID NO: 83179 - DNA, 425 bp, Zea Mays
gttctgcatcaggactagctgtgggaatagagcgggaatgacgagtgtaggtttgggagataagtgttttagaagagtatgaggaagacgatgtggaagtgaaaggtagtgtaatgggaataaggacattcagtgtggatgtaggagaagattgtggccatgaagtatcaggaatgggaggaagatacatgaagaaggtggattttatgggaaagtatgaggagtgggtggacgagttgtggaagaaatgttgattttcattaaaactcacttcttgtgaaatacacatgcgatgagaagatgaatcataacattgataggctttatgttcaagactgtagccaaggaagacacactcaacatattgagcagtcaatttagttcgttcgcggggagctaacaagacataacatgtgcatccaaag

SEQ ID NO: 83180 - DNA, 581 bp, Zea Mays
ggtccctgaaagggtttgggtaggcaagctttccgataagatgttgtttctagaagacgaaggcgctggacgaagctggatgaggatagagcacagaaaccccctacctatagggatcaactagcccctagaaggctaatgacgagtctcgcgaatcctaccctctgaacttggacgctctaaaggacgaggcgagcggcgcccgacctaggggagccaccaaggggagacattctcccctcggggcttgggggctattgtcggggaaatgatccctaggcctctaggcccactggtcaatagaaggccagggaaaggatcatcccagaagaacccgtcccccgttggtaccgaggcgccaagctcgggtcgggcgaggtggagtcgaaagaggggtcgggcagagtgagaggaagccactcgagtggattcgacgcctgacctaggactaacctgcgggttgcattaattgcgtctgacatcgagccatagaggaagagtcggtccaccttccactcatgagctccaggtccctaggcctatggaccactcatgacctatcgagcctaggcctaagagca

SEQ ID NO: 83181 - DNA, 731 bp, Zea Mays
catgactcgacccatggcacggggagcggtggagccgatgctccccatgctataagaggaagagcgagtggagtcggtgctggggcaacacgtgttgacgacgatgctccaggcgtgaggctaacgcttgtaggtcactcgcgagggagtctgtgtcgtcggctagcccgggagcgttaactaggcgtggggcactgcccgtgatgtggttgcggtaatcctgtctccgtctcctatggcgaggaggatgggggtgaaagtctggctgctcctgagcgtcaaccagatgtctaggtgggaggagcaccatatcgtactcgatgccaagcgatatgaactcaagtctcctgaaccagatcatcgtgccgtgtcataaagggtgctagagtttggccatctagagccttgatgggaacgtggtgtctgcacggagcgagcccctgcctagcgcgccaactgtcggtgttttgacccgatgatcccaccgactagtgaatgattgttgtgtgccctagcttaaatgggtgatgcaagaagacacaagtcttcatcctggttcgagcaagagaaggccctacttccagtagaggggggatgagacttatatttcttgcacctaagttcttgtagtatggagtacaagctggtcgggagagggaaggatcccaagtctttggggttgaatgaggcaagtgccaatatcatcgtggaggtaaaaaccatgaagtgtt

SEQ ID NO: 83182 - DNA, 339 bp, Zea Mays
ctcgcgggtaattattcctagactcagtgtacaataccccctggacggcgggcaccatttacagaattcccaggggctctttagcaagatggccacggcgaagggttacttacagatctcagccgttggatcgcaagcggacggccaagattagaaggctattaaagtgaaccggtagtcattaacagccacccgatgctagatctacggctctgatttttaaataactgggatccaccctgagccctccgatcgatatccaacggttcacggttcatccccaaatcgatatggcttgaccaaatcctagccgttgctaaacagatcaacggtccacgc

SEQ ID NO: 83183 - DNA, 858 bp, Zea Mays
ggtggccgacactctctctacgacggagctctcctgggcggcgtgaaaacctcagatcctggtggctgggttgaggagcggatgaggcggtcaagtaccaacgatttatacacccagatgcgctacgatcggggaaatcggttaaaacgacagcgcgatatcagagccaaggcggaatcggaaatccccaaccaaatcgcacgcgcacacggcttccgcggatcttgttgctagcagtgagtccgatttgaggaggaagacggctgacgatgtggacccaccggtcagtggctcgggtaggagacacgcacacgcgttgtgaagaatgagcggctgacgcgcggagaaaattggaagatgggccgcgcgggtgttaaagggatagtgggccgaattcgagatcagggccaactgggacggtttttgttttattcttttcttttctatttcttttcttttctttttgtttctttcctctttattttcaaattcaaaattcaaattccagttaaagttcaagtttcatgataatttgtttcacctcaaaatgttcaacttgaacatggtatggtgattatttatttatttctaaattttatttggttttgtatagtatttctctttctatattatttcaaattcttccaatttgcacttttgggttaaatcccaattctcaacctattattatatttttatcccttttactaggttatttaaatgcacaaacaaagatccaatatgatgcaatggtttatttccgggttgcaatgagtatgggcaaaaacacatagtgggatctactcttttcagattgtttacagattgggtattacaaattctaccccccttaaaaat

SEQ ID NO: 83184 - DNA, 653 bp, Zea Mays
ttagttccacttcctacgcagcagttttatgtgtctgagacatctcagttcatgctgatgcagggttttcctcagtatctggctgcgcctactcctgcaccgactactcctatgccgtctcagtttggagctccatgtctgcctcccccgtcgacacagtggggttcttctgttaatttcactccgggagcttcctcttctgtgggtatttccggagcttatgtgctacccgctgcagatggcagagagcaaggagacgtggtgacaggtaggatttcagttgattcgtttgtggcccatgctctttttgactctggcgctagctatttgtttgtttcggagaattttgtgtcgtgggctggtcttttggtgcagaggttgggtcacccaatttcggttagttctgataatggctccattagtagctgctcggtttgtcaggggtgttctgtcatccttgctgatgaggtcttttcggccaatgttgttgtgatttccttgggggctttcgatgttatcttgggtatggattggttatctcagtatcatgcagttatatcctgtttttggaagacagtgttattgcaggcgccgttgggtagggaggtggtattcttgggaagctccccaaagttcacgttatccttgttggc

SEQ ID NO: 83185 - DNA, 1145 bp, Zea Mays
gccacaggaacggaaggggggtcgggggacggggagccacgccacgccatgccatgcgggcgggctcattaattaagcaaagcgctacagctaatgatgatgataaggtcgattctgaaactgacccctagctgtaactacacgacgacgacgaccacgaccaccaccaccacaccaacagtcggtaccacgccatgtggaacgatgccgcgtaccctacgcatgatgcgtgcaagcacgtgcgcgacaataccgtatctgtatgtgaagagaagcaaatttgtaaaactttagctagccagttaaattgaacgatcggtcgtcgcacccgcacccgcggccgtccatccctctgcattgcatgcgttactctgcatgcatgggtaatgcatgcgagttagttttagtaagagtcaacgtactcctccgatatatatcctctgacaatttaaacaagccggaaggaacatggcatggtgcctgcctgctgaggagtatcctctgtgatcgcggagacacgaggcgcaattaatcaacacaaggcgtctgccacggccagcttatgttatgtgtggtaaagggaaaccactaaactaatcatccgccccgatcctctactgatcctggtcgacgacggaggagcctgccacctgcctgcctgttgcagttggagcagtggcacatgcagcacccgactatatattggtggaggtggtagtcgtacgtcatctctcgtcactaccaaaggctccaccgctgcgcaattggttggtaccctttttctctccggttttgcagcctgccagtggccactgcgagacccgaggcctgctcgccataataaataacaagactacaagaggaagcagcatacatgttcctgggccagcccagcccacaaccacttgcttcgctcccaagtccacagagaaagcattccgttcgcttttccactaggagattacgcagtacgcaccgtaatcttcagccgccactgggcatgtttgattgagattataatttatctagattatataatttaacagcttttacactgtatatatatcatgttttttccttctagattatataagttggactatgctagaaaggtagaaggtaaataccactttaggattataaat

SEQ ID NO: 83186 - DNA, 621 bp, Zea Mays
cttcacgggaggtcggtgatgctctggtgcaaggaattgggtggtgttgtattgggtggctatggccacgttcacaggcaggcaggtgaagtccggcgagtggtggcatgttgatggaggggagtagagggtgaatgggttggcctagaagcttcactgtgactcagggaagctaacggtggacctcacgtggttgaagggtggctacgtcggtcgaaccacagtggccggcgctcgggtaacaagggcgggtggtggcgcgctcagctgcagtgaactcccagcaaagtgggcttggcaacggtcggggaggaagagccgagggcagggcgacctttataggcgcgggtgtgcgcgcaacactgtgttgcccggccatggtgtagggcatgaactcaggcactggttggcgcacatggagcatccaatggcatgctctacggctcaggtctgtagccgaacagttggtttatggtgtttagtcattttcaaatgcccataggtcgtgaatccgggcgaatttgggtaaaatcctctcatacgatctcctctcctctcttcactcgatcacttggtgtagaaccccaagggttttgtgtcagagacaaagagttatctctg

SEQ ID NO: 83187 - DNA, 1395 bp, Zea Mays
caaagggttttctgaaatttattcatcacttataaacttgttgtgttaatgttttttaggttgtacccaaagctgaggtgctggttatgtctgagaaaatgccttctataggaactgaaggggcaaagattgaggatgctatcgatctgatagctcaaaaggtggttccctggaagccactttcagaaggtgaggaggaggaagagtggatagctctagtaatgagcccgttctttgatattgacgaaggggagtttgaggaaaagataccgctggtacgatccttgcagtggaggatgttacactgcctgctgtggttacgaccataccgagaggtctgaaggttgatccggcggctacagtcgtgacaccttcggcaattgtggtggccgaagataaaaattggttcttcaaagcctacgacagcagaggacatgggtaaagggcctacaaggaacgaagatgccaagaaggccattgaagatgacacaccccttggtgaagggcccttcgatcaagaatttggcggtcgaaagtacatggttcatcaagcggctgggaaaactatgggtgccaagcagctaaccgaggctattggctttgccgaacaactgggtaccctttgagggctacgatctttgggggagggccatatgatttacttgtattgctgcccgaatagcatggaaactgaaggatgccgctacatttcggacaatattggcttcccaaagttggaggccatgctttcaaccatgtccttcgaagatttttttggactcccttgcttacacccatctaaatgtaaatttctgttggtttttctttcaagcttcgagtaaggttgatacaaaacttagctatctttttttacttctcacagggcttgtttctgagcaatgctctaaaaaacaagagaaatgttgagggtgaagctgcctaaaggaaaatagttaagctgaggtctgatgtttctaagcttcagtttgattgcgaggagaaggagaaactcattaagcttttagagaaagattttgatgagagccgaatcgaagttcaggctttgttcgaagaaaaaagcaagttgaaagaaacaatggggaacaaaatatcatatcttgaagcttcagttactaaaaaatacaagtgcattgcatcccttgaagctggattgcaatgagcaaaaacgaaattcgaagccgaagtaaacaaggtaaggcaagcatttgccgaaacaactatcgacctcaacaccgctcaagtgagaatagatgatcttaaagatgaagtaaatcacgtgaggcaacttaatgaaaactatcgaatcctgacggcaaactgttacacccgcggcaataaatgctataatgagttagtgaagaccttgtcctctac

SEQ ID NO: 83188 - DNA, 455 bp, Zea Mays
agcaggtatgcagtgaggtacacgactgaggggttgtcctcaagcaactgctgaccttccaatgcacgcatccttgccatccaaactggacggtttctctgaaagggcggaaagaatctgagcggtgtgtcagccacttcttcttcatagatctgacatagggccctcaatgccttgcgagcgacgacttggcaggtgtctctgaatctgtgcccagcagcagtgacactccattccacatggtgtggactggatccaatgtatatagtcacaacacacttctgtgtgccatgctcgacgaattcacgaccatcatactctggctgtctcctgattccgaggcgaactgtgcatgctctcagcaacttggggaaaccatcttcattctggcagaagctggtttggcagcgaacctccatctgacttctgagagaaggaaaggggaaacatttttg

SEQ ID NO: 83189 - DNA, 677 bp, Zea Mays
catgtcttgtttctttcaagtcaaagatccctaaacctaagattttcaggtttgaaaatttctggctgcaatttgaagggtttatgtccgtctttcaaaatacttggtttggtcagccaaaccttattgataaagcgaagaacttaacagcaaaattcaagatcaccaggaaggctctcaaagagtggcagcgatctttgccaaagattgataaaatagtaaggcacattaagttattaattgagttcattgacataattgaggagcatcgggacctgtcaattgaagaatggaattttcaagagcttatgcaaaacaaaattgctgacctgcttcacattcagaaaatatattggaaacaatgggcttccatcaaatggatctctgatggagatatctgctcaagatttttttatgctcatgcaacggtaaagcataggcataactcaatcgcttcactctctgatgataatgggacaagtttctcggagcacgaccaaaaagcaaatcttctgtggaatgctttcaaaagtcgtttaggtacttcagacttctcggagaatgtttttgatttgtcaaatctgataaatatgcaagatggcttacaatggttggattcgccattcactaagcaaaaaattgatagcattattgcagcacccccttcagataaatcc

SEQ ID NO: 83190 - DNA, 853 bp, Zea Mays
cgccgcgcttgcttcaactgaagccgatttgaccgcacgcaaatggcggaggggttgtaacagccgttttcacctggggatatctatgtcgtgcgccacctattcctcccctgctcgcccataaacctgttgaccctgaggtatccaccgtctcggtcgaccaggaggatagccggggggagcgccataggttcacagccaccgagagaaaaaaaatacgacagggtagtgtagcttcggcgcagaaggtcatcgtggcattcagcttcgctcgcgtggtgccacacctccgcaaatcttcgtacggcacgaagtctcgtccacgggttcgcctagccggggaacaggggcaccgtcgttggcgttgtgagatctacggcgcgctgcaagtctccgtgatcggctacacctgtgcctcgaatgcggtaagaaatcatcctcgattcaccactcgtcgttaaatcctcagcacattggtgttatccacacttcgacccacaactgcaagtagctgttcatcgctcgccagggcttggcttcctggctctggcaatggccgccctttggaagctaggtagaagacgaaccccggcccctcgatttcgcagtgtgcggctacgattagatcgtgccgtaacggttcgtttggacgagggaaaaccatagatcgatgatcgtggggctgtgggtgattcgggtttcatagaatccggttcatcagatcttaatccaagggctgtcctcgcgtatcacttcactgggggcgcgatctaatctagaccgccaggcgtggatccaatggtccaaaccccaccgtacccctttgcgatgacgttttacaaaatagacctta

SEQ ID NO: 83191 - DNA, 841 bp, Zea Mays
cgttaacctggtggccagaccgtgcactagttgacacccgtgggtcactgacatgttgacccacctgctagactctccctcacggatgttgggtctcctagctggcgtaccccgcaacaacctcgccgggtttgtcgccgtcgcttctgctgggggcaatccaacctcctaggtataataccgagctggggtgcctggtttcgctcgcccatccgagcacttagtcgagcgaggtactaaccgaagcactcttcaccatagtagctagaacctaggggatgaaggtagttcggtcgccgttgtcaaccttggggattactatccccgaaccctccattcgtggggaggggtgattgtttctgtccgccgtgtgttccccgcacccattggagtgttgtggatgaccgtagtgcagcgaattgctcaccggagtcattgattccgcaaattactgtcgtgtgccatggacgggactcctgggagcttaatcctcggtaaggcttccaccattacgttcactacccttccctctctgttccgcgcgttatcatactaaggttgggcctctcggccccccatttgtggtttgtcagccatggcgtcgccgtcggtactctggcatcgctgtgtgcggtccctggttggagggcgaggatcgtcgggccatggatttccatagggacggctcagatcatgtcgggtgtaccggttcggtgtggccacatctcgatcgttggatcgtggatgtgagggcaagatctgaccgtacgctcattaaaccgtggcccttgatcacgaatctgatgaaccatgttgcataccggttcgccgaaggatgaat

SEQ ID NO: 83192 - DNA, 504 bp, Zea Mays
gggaaatcatatgggcacctgcttggaaaatcgctcattcccatcatttgctgtaattattcgccaaaaagggggcagagtggttacctcagggcttggagcaaccaatttaagaacctcagtctcattgaagacatccacacacaactcaattatggcaaagcatgttattatgctagcatcccgtttggttcgcaggaattggtccaaattgaatcagttttcatatctcggcccgtctggctgtccatagaattcaattcaccatttcagcctatttcatgtccctaaaattttagcctatgcacgttgcagaccctcacccgtcgtaaagggttagaaagttggctaggtttcaggcctctcgcactgctcatgcctcgctccgctattcgtgcttgtggtggtcgccgtcagcgcgacgcttcctggccgacaggtgatcgtcctggacaacctgcacaccacctgcgcacagacgcttcctatccggcaggtgacccc

SEQ ID NO: 83193 - DNA, 429 bp, Zea Mays
tttagagccctgagttctgtttaactattggaagctacgaccacaccactgaccacgtgtgcagaccgcaccgaacactttttgtctttttgtacctaacttcttacgtcaaattataatacgtgttatgctaatttgtgtatcagtttatacacttatggtatgcgcatgttccgggcatccgggcccacgagaagattgtgttcccgcaatctgggcagtcgtactagtccccacacaaatattggtattacgatgatttatgtttccgtttacgaaacagtaatggacgtgtcggtctatggacctttgcgtagatttcttcccgcagattacgtgtctcgggcccaggattccatccacttctcacggtagttattccgctcacctcacccgaaacgcacgaggcgatcgaaccctagcattatc

SEQ ID NO: 83194 - DNA, 461 bp, Zea Mays
ataattagttctaatccacacagagaaagtgctatgataaggaactaaaagtttaagcatcaggaatgttgaattccacctaacatccatatctactccaaatttacgtggtctaacaccaacactcatgcagtattgtttataagaagcaattctttgatgtgaagagtttaaaaatgttatagcagtcctaaagtcttcaagatatggttgcaaacatttcaaacaacttttaacaatcagattaataatatggcaagcgcaacgctaatgcaaaaagatattactcaaatcactctcattcctactaggtgcaggtatcaaatggccaatataaccagaaaagacaggtttcagaacatcaataacagttttgttagatgaggcattatcaagcacaatagcaaaaatcttatcagtaatgctatagtcatttgcaaccatttcaacacgctcagcaa

SEQ ID NO: 83195 - DNA, 1562 bp, Zea Mays
gtaaaacacgaattagatggcaacaaggaataccatacatctcaaagaacatacaagtgcagtgcccatcgtttgttgtaatattgaaacagacctctctcatcttttttctttcatcattaactgttgatattttgtagtctccctcccttacaattgtctctatgacacaattatcccgagcattaataatttgtttttgtagttcagagaaaacattgaaagtgaacacctcactcccatgcctttctaatgcccaactagtctgcaaaacaggtgatgtatgcagactggcattatcattttccaattcttgatgcctctgttcatccattgcattaacaaacctgatccaaaattcaaccaatgtatttttgtaaccaatgaagcggttgaaaaatgagttggtactttctgatcttgaggttgtgttaagaattccagctaaaaacacatgtctaaagaaaactgggacccatgatgcacggatttcataacggattctcaaccaatcatgaccttgtaaaccaaattcagaaataatagaagcccattgatgctcaaattcctctcgagtttcagatgcccatacacataagttgatgcgttgataaagtaacttgttttccctcatttgcggcggcaactttccaggaagcttttgcaaaatatgccacatgcataatctatgtgtgctgctaggaaacactatagatattgcattcctcatgctattggcttcatctgttatgatgagtcgtggtgcagcccctcccattgctctcaagaacgtacgaaacaaccatgtgtatgcctcagttgtctcgttgcttaacaatgcagcaccaaacaaaacacatgacttgtgatgattgatacctgtgaatggtgtgaatatcatgttgtagtggttggtgttgtatgttgaatcaaatgagagaagatcaccgaaatgtgagaaattctttctgcatgtgggatctgcccaaaaaacatgtacaagccttcccttttcatcaaccacatagtcataataaaatgtaggatttaattcattttttgaggcaaggttgtcaatgaacatttgagcatctgatgatgtgatacaacttctcaactgcttatgatagttttgcaaatccctcttgttgcaccccacattctcaaatccaccttcgctaatacgaagatatctgtatgccccacttgtaccgatgcctcccttgtggcatgccactaatgcacgcttagccttctcattaacttctctgttcgacctaatcaagtggaccttgtctggtgaaacaagactatgtgtatgtgattccacaaatatctccacccgaaacttattatcttcaatcagcttgacagctagaactgcttcacaaccacacctagaaatcttttgaatacgtttcggtttgctgtctacctttttcttagacctatatccctgtttagaacacaaccatctttgccatcttctaacaccattcaaatctgtatgtggaccaatacgaactccaaaacgagcctcttttgcatatcttctataaaat

SEQ ID NO: 83196 - DNA, 284 bp, Zea Mays
tttgcccaatcatctagtgtatagagcacacaaatattgtttagcatgttgtttacacttccagacattttggtgcttgccatgtcaccataacacttgcctgttgtaatccttggaccacctatttatctcatcgtatgacatggccaagaaataattttccatcaaatcatacttcttaagcaactactcataaagaagctcctaattcacttatgattaacttttaaccgatgaccctatggatttcatcaaacaatgtccatccttcttatagattgtcc

SEQ ID NO: 83197 - DNA, 327 bp, Zea Mays
gccgattccagtgagggtggtctggtccgattgaagtataccttcagatttagggagaagtttgatgagccagacgatgactggctgaagtgtattgaagctactagtgatgagctactcggggcatactccaaggccgaagataatgctttgtccgcagtttttgggggtcggggcaagaaaagattaaacagggtatttgatgtgattggcttcatataccctgattaccaatacccgctacgagggcaagggaaaaagagaaaggctgccgcttcaggcaccctggctgagccgaagagcaaaaaggtgaaggttctgacccac

SEQ ID NO: 83198 - DNA, 953 bp, Zea Mays
agcttgcggtagtccacacaaaaatgccacgtaacatccttcttttgaaccaacaaaactggagagacaaaaggactaacactatgatctatgaggcctgccttcaaaattttgcctttctatctcagttttgtgggctggagaatatttatagggcatgacattcgcaggaccctagaatcagaggaatgtggtgatcaaatggtcgagcagggggtaaagtcgtgagaatagcaaacatctctttgaattcatccaacagattctgcaactccacactaacagctggttcctaagacttaggggttacttctagcaaggccaaagcccacatatcatttccttttagccatttgtccacctgcatagtagacacctccaccactcttccacactgtccctcagtccccttcaattttacctcttctccattgactaaaaaactgatcaccttctcctcccaatcacagtgcattggactatgttgttttaaccaatcataacttaaactagcatcatacacacccaactccaagactctcatgttagtcctgaaagtgtgtccatctgcccaccattccagagattgcaccatctggtcacttctgagaatttcaccattagccaccttcacaatagctggagaacaactagatataaccagaccaagtttgtccaccatcagtctattaatgaaactagttgagcttgctgaatccatcaataccaacatcacctgattttggacaagggccctgacccccatacaatcgtcagacacagccccactgatagcatgtaaagagagccaaaattcctcctcctcaacttgctcctctttctcaatatggcttagagtttcatcggacagcatcatgcccaactcctcggtggtcagagcatttagttgcatctgaattttctttgggcatctacactggtggcctcgttca

SEQ ID NO: 83199 - DNA, 722 bp, Zea Mays
tctaatgcaaatatgcacaatcaaaatctccaacatgaatgcaaaatataatttattttattaattaatttattatcccgtttaaacaaatgttttttaaaatatgaaattcatacacacgaaaataaggaatataatctctggtttataaaataatttagagactacttataaatatatatttcaataaagggataactaaaatcatataggtgtactctattgaatcttaattagaaaccatatttgttttaggagatgtaactttaagaataagaggagtattgttaaacaatattttgtttcaaaacttttggagaacttttcctagatttcaaaataggattttgggtgctatacctttcttcaatagttcctctaaaagcggataaaaacattttaaactagaccagatcaacattaggtccatgttgatttgtttttaaggatgtattttcttcttccgtacctttgacgtctgcccagcgatcaaaccttcgccgctattaaggtcgatgtggtatgagggtaggcgcgactagcgagggaggagttctaatagcgaggccacaaaatgggaaataccggacaacgaggttgcacaggctatgtcgaactgtgaggttgcgtagtcatgacggcggacaccctgggcagttgttgcaaacgaggaagaattagagcagtaaatagacgcactaagcggtacaaaagaaagttgg

SEQ ID NO: 83200 - DNA, 651 bp, Zea Mays
tatataccagttttcaactcaatacaacttatttgttgagtacctagcatggcatccaagctctatagtatcaaaacccagccagtccatatttattacccggatgttggcaactatggctgactaccttcagctgaatccagcccgcaatcccttcaaccacctaacgatgcccctgaatatacattctctttcacctaacaaccgcaattatcaacagcacaaaatctccaaaagaaccaatgcaacctccagatgtgcaacttaacagtatgctaagcaagatatctctagtacctcaattgacacagtagttccttaaaacacctgggaccacatggtatcagtaatctaattcagtacttcacaccgtggcatctttttctttcttctcatagctaggtaaagtacaagtacattaaactctgcaattggccaatagcgacaaagtaattctaggattgaatatggagtataaacattttgttatagtttcaattagttgcattctaactgtgataacaaactaacctttttcatctaaaacaccaaaacttaattgaaacaacacaacaaagaaaatagaacatgaatacatataaaatagaaatagtatcaacaacaactatggctgctaacattgtggcctta

SEQ ID NO: 83201 - DNA, 1335 bp, Zea Mays
gccagcggcgctggggaggtggagcgggagcttgacaagagcttcggctacgaccgccacttcgccgccaagtacgagctggggaaggagttgggccgcggccatttcggccaacctgcctcgcgcgcccctgcaagggagacatgagaggccaggtcatggctgtcaatgtcatctccaaagccaaggtcttactattcgtgatctcacaatgctcttttactggacgcacgacacgatcttacctgtttcaatcggctcggttcctccatcggatcatgaacaaactacatgggatgacataattgccatcctgttgtgatcttttttaactctcatttagtagatcagtatctctgaagtgccactaccacaggtgttgcaatcataagttcatgatttgcttcttggctgacttgcagggtgatcaattttttttccgatggtattggcattggcattggcatttccccgcagggttagaagtacattgtagagatcttgtttcagcaatgccgcatttaataatgtgcccattttcatgatctaagtgttcaactgttcatccatctatcacctgtttcttgcttttttgttccttctgtaagctatcatgtcatagtagtttatgcagttgtagatcactagcttggcagcgacaaaagttccttgtgagacctcagagaacctgttcccgagtatctccatcatattgttgttccttccatgagtttaggtgtcccttggtccattctgcatcattttattatatgatcataagtagaagaaacatagggaaaagtgtaggaactaaagaaatgtctcttagattcttggtgccaaagctgaggacatgttgatattggggactgctttccactgacattgttctaattgttgaatgatttaattttgatctcagttttacttggcatctaaaatgtttgtgcagcaagttgtcgagaaaacctagtgtacgataggcgacacagaagaattctacgtgcatgggtgcattgatgtttccatgcatgtatattgtcgttttttgagcgatacaacattaattaattaatgactattttggcctgctataattttcgcttgtgctactgaaattatttgagcaggagatgtatttattgaatctattgtgtttcttccttctatatagttctttatttgaattgtgtgcaattttattccttgttacaacatacagacatacatggtatatactttttgaggctagaagctaacagatgctgaagggatcctttcaattaagattatggtttctcttagacaacccatcagttagcgctaaattcactt

SEQ ID NO: 83202 - DNA, 771 bp, Zea Mays
cgaacctggagtttgggtcaagagaccaagggctagtcgatgaaccgtggacgacttgcacttgtcgatgttaacgggcaagtttacatgagacgacatataccagttgacaacttcatggcaagggttgaccaagttaagtgagtgcatgagaacttggtgacggagtggttgaggatgtgcggtgtcacacattgagatcatggaggaagcatagcaaatttggatttaggtttggtggtatcagcctcaaaaccacagatgacaggtttaccaagtttgagcctcaaaactctgcaaaggatctcgggacgtcacatgtcatcattatagagcttgcatcgagacaaagcatcttcaggatgagatcatggccatctgatgttcataactcaactgaccattatgctattgggttaagtggtccagaaaaaatatctatcgagcatcttggaatgtgtaatagacctataaataagggtagtgactacgtaagacatcaacctctcccatctaggtcattagcacatgctagctaagttttcactatgtctaggattaatattagataggagtaacttcctctggcttttagtttggagatatgtaaggggggtgaagagtagaggctagaccacatctttgtaaacttgttttctttataatcaatcaagttgaccactggtcttgtgaatcatactctcccttttatgatcatgtctttggttttatgattttggtggtcgcttttagcttttcttgttttttctt

SEQ ID NO: 83203 - DNA, 635 bp, Zea Mays
gttttggtggttttgaccatataattaaaggtataatgtcttttaaaagtgtttgataacttatcttttatagtgtgtgcatgaagtaccattgaagacctcccaacttaaaaggaaggcttagaaaggctcagagaactagtttactttatttatattttgtacttgagttttggacaagccatactaccaaggagatactatggtatgttgggatgatccaagccatactatcatcaaacaatttgcataatatcatcgaacaattgccatctttggctgtgaaacgacacttttgtaatcttggccatacatttgcagttgttactttcattaagatgtgtaattttgagttctttcttgtgttattcattcacaggtaggaattatcctccttggtgaggtcaattggattagtgacatggttgataaccagaggagtcacgatgctaaggctgtagagtttgggtcttttaatctaaagctagaacagtgtatcgtgttccaccaaaactagagttatcatgaacctaatagaagatcgataaccccatcctcatcaagtggtatgccatctgattcatgtcttatgcttactttgattgtttcacctttgtcctatagtctaattcctt

SEQ ID NO: 83204 - DNA, 722 bp, Zea Mays
agaaattagcagaagacgaattgaactctaagtgaaataactgctaggagaccaacaaagtatatccaaattatttcctttctcggtgaacgtcacatccaacatgaaagtgatactattagttgctatattcctattataagaaatgaatgtagatgtgctgctaagtccgtatttgccatggcatatgggaaatggacatttgatagccatgaaaccaatctgaaaacaatgataaaaacagtattaggggggaaagggcgcgctagctacaatgaagtcgatcaagctagattgcttcaagatccataagccactccaactgcagcttgggtcaagtcgttgatttcgtcttttatttcttaagatggtgaaggtccaagcatgtagtaacatatatcatatctaaaacatcttattcccatctctgtaaaaccaaacggaacctagcacatactttgcattgtcttttctcttttctgaatgtctaaatgtgttataatgcttatcaaaattaaaatcctcttttttctgtaatactgtttattgcagtataatctaaagtacctacaagcaaacagaagacatgtggacctcaaaaaaatgataaatagagcctgcatgcgtgcaaaagtaagcatcatccattactttcaagttaactaacattatacatcagattttttgctgcaagtgaagagaaagcacttgtgatgatttcg

SEQ ID NO: 83205 - DNA, 806 bp, Zea Mays
atctacagcacacaagggtattgaaacaagagcaaggagggtgtgaacagaccagtagagagctggccacgacgagctcacacacggcggtattcttgactgatttgggggaaactctaaattagagctctgtggttgacaatctgaggcacgggctggtgcgttgggtgtgtgattacttagcgaagctcactggtgcggcaatttataggttccatcggtggtggcggctaattttgagatggcgcgctggtggccagagggaggggcgatcactagcgcaagagatgcgtggctttcgccttggcatcaccaccagcgatgagcggacttgctaaggcgattcactgcgacgtggtagagcaccaaggcacatggcacccaagcggaaggcggccaactctggcgaggttatctcgaccggccataaggcaggggggtacggcgcccagggcgaaacagtgtcccgagctcatccccagcaccagatttttcatccgaggatggttatctgcgtttaactgggcgcgaatctgggcgcgagagcaccggcggcgaggcggactgaacctgagatcttattcagtttactgtactatcagacctcatcagggcgtctgatagaccgatttattgggctcggatctcgtatttttatgtattaactacttaatccatctataacaaagttcttgccctataatccagctacaatcttgctatagcaaccatactcaaatactcactagattatactcaaaatagctcctaaacttggctctggttcactgtcagtctagtttcag

SEQ ID NO: 83206 - DNA, 279 bp, Zea Mays
actggtgccacgcattctattgtttctacatattgggtagaatcacataacatcccaatagaactaatgatcccgccttcaagagttaattcagttgggggaaagttcagtccgataggatttgtccgaatctaaggattgagataagggggatagacttccccgctagcctagtagtaatgggaactcaagggctagatgccatcctagggatgaattggctacacaaaaatcaagccattgtcagttgtgacaagagaacagttaagtcggtgtccc

SEQ ID NO: 83207 - DNA, 484 bp, Zea Mays
caacaaattcaaccatttgtcccagtatgccattgatcaggtcaacactgatctgaagaagagaaattgttttatgaggggccttaatgaccggttacagcggaagatggccacctgcctcgacctctcctacagcagggctgtcagcacggcgctggcaattgaagccaagtatgctggcccaggaaagtgaaagggctatggaggtgacaggtccaaccaagggcctgcgaagcgacaaaggttggtgatccgaacttttaatcaaaaccgttcttcaccacgtccaccctcctacccctttaaacaacctgtctttatctgccctgccactgcccccacctcaacaaatcaaccgagtgcccctggtactcgtttccctgcactcctgagttcatccactggttgcttcaattgtgggaagtctggacacttcatcaaagactgcccatatccgaagcgaaataactccaataatcagcag

SEQ ID NO: 83208 - DNA, 1145 bp, Zea Mays
gtgcgggcagcacgaggggggcgtggtcacgcagggcacgacagagggagcaagggagggagtaacatagtctgccttgaggagggcgtcgtactctaagatggaagcaacagaagaagagacggagaaagggaagtcaaactcgtcgaagacacgtgacgagagatgagaactcggtgagtggagaggtcgaggcaccggtacccccttgtgatcaggagagtacccaaggaaaacacaacgagtggaatggggcgcaagcttgtgaggggcagtggcagaaagattaggatagcaggcacacctgaacacacgaaggtgatcgtaagagggagagatgccaaagagagcaaagtaggggtggggtaaggcactgccttgttggggaggcggttgagcagcagcggccaacccctcagcccaatagtgggcgggaagggaggtctggaagagcaaggaagacatgacgttgttcgcgatgcggatcatgtgttctgcctgatcgttttgagaagaagtataggggcacgacatcctcagctgagtgccatggaagaggaagaaggaacgatacgtggagttgtcaaactccctctcgttgtcacattggacagcccagacgttgcgtccaaactgagtggaaacccaagcgaagaagtgagaaagggtggggaacatatcagacttcaagcacaagggaaaagtccataagtaatgtgactagtcatccagaatgagcagacaatatttattgccagaaacgctgagtacaggggatgtccggacatcactgtgaacaaggttaaaaatgcctgctgctctatgagaggagcaagaaaaaggaagtctaacatgtctacctaactgataggcatgacagaaatgatcaaaagacccccgactacaagagatgacagaattgctagacagcttcaacatcacatcatgctcgggatggccatggtggtggtgccaagtgatgaacaaggtagcagtggtcaaggcatgcggggtggaggtcgaggaaagggaggcagacaggcgaagggtgtagagcggcccagtgctgtcacatcgcgcgagaagggtcctaatagtgagatccttcacagacaagccaaaggggtcaaactccatagaacaag

SEQ ID NO: 83209 - DNA, 571 bp, Zea Mays
tgcgtgagcatgtcgcactgacttaaggcatttctgacttaagtcgattgctcttttagtagggtatagtgatcaccctgagtcgtgtaagcgtgagcatgtcgcattgacttaaggcgtttttgacttaagtcgattgctccgttagtagggcatagtgatcaccctgagtcgtgccgcgtgagcatgtcgcaccgacttaaggcatttctgacttaagctgattgctctattagtagggtatagtgaccaccctgagtcgtgctgcgctgatttcaagttgagctcaaactaaatcagttgttgatcaagagcttgaatgccttggaaaatggaagctttattgatgatgaaatcttattcttacaaagtacaactcgtcctcaagagatttgaggcattgctaggggtagaatttcctgaggtgctcaatattccatgaattccccacttcggtgccgtccatctgagtgagctggtaggatctcggtcgtgtaacctctacaacgatgaacgatccttcccacggtggcgacagtttgtgccatccctcccccattagaattcggcg

SEQ ID NO: 83210 - DNA, 402 bp, Zea Mays
tggggatgctcgatggggttcacatcataagaccttatgtcatattcttcacatgtgggatgcagttctagaggtgttagagattgtatccgatgatgcctctagtggggaaaagaaatacacagcagttggattgttaaaacaaatggagagttttgagtttgttcttgtactgcaccttatgatcagactattgggcaaaactaatgatttgtcagtgtttgcaaaggaaggatcaaaatattgttcgtgctataggtttgattgggacaacactgtagaaaatgaatgacatacggggagaatggttaggacgagttatttgcagaggtagaaaacttttgtcttctacatcacatcattgtgccaaagatggatgatacattaactgttcgaggttgc

SEQ ID NO: 83211 - DNA, 721 bp, Zea Mays
ggggtattatttggggtggcgggggagttgtagtctttcttggtggggtagttgtgggtggtagtttggggaaaaataaggctagggttgttggatattttgatagttgggagcatagtggttgttatgtgtgttattgccttcgctagttggtttggaactaaccttgtcatactttccttagccttttttgtgattgggaaatccttggttcagtgcctaacatcctctccatggaagacacaatatgtgtccttcgctcctgactggatcccctaatgcagttgtggcctctaccagcatttcctcccttgctaggtgctagatatgatcttgggttcgagggggctttttgttgtggtgtcactgattggttatgctattgacatcgggttgccagcggtcatgttgatggcttttggtctatagccggttgctagtatgtggagtgtcatttggcttccattgtgtttcgagctttttgattgtgcaattttttgaagatttgatagagctcttggagcttgttgcgagggtccctggtgtaatgattgtagaggtgtcctactcaatgactattgatagcgtcatgaattgcaatacattcttcaactaatggtagttaggacttgagcagtaggaacttgttgtagtaatcgcaaagcctttccttctcttgcaaagggatatatctacaagggcatcgatgtctcgtctgtag

SEQ ID NO: 83212 - DNA, 509 bp, Zea Mays
gcggattccacccagaccactcgcattgcgggtgatctggacgagaaataggaactcgcgcttgtcgccttcctccaggcaaatgccaacgtgttcgcatgggaaccgtcgcagatgcctgggattcccagggaggtgatcgagcaccacctgaagatcaaccccgacgctaggccagtgagtcagaagcctcacagacagtctattgagcggcaggacttcatctgaaaggaggtccgaaagctgctagacgctggcttcatcgaagaggttcatcacccaatatggctggccaacccagtcatcgtcccccaggagaatgggaagcttcagatgtgtattgactacactagcctgaataaggcctgtcccaaggacccgtatccactaccacgtatagaccaaatcatggattctacctccgggtgcgacctattgtcattcttagacacttactctggtttccatcaaatccagatgtctagggaagataagaagaataccgcttt

SEQ ID NO: 83213 - DNA, 322 bp, Zea Mays
ttatttatacattaaaatcaatttttatatttaattattgaatttcctgggtctgtagattggacgtcaattacagaaaacaacaggggggtccggtgaaaaatctctaagactcagcgcgccactgctatggacggcgggttaatttataacaagcccggggtttattttgtaattttggacggccgaaggggtatcgtgcactgtgggccacacgatcaggattcactggcctggattgaatctagtctttactgaaccggtacgcgccgaggatccttgatcacgaaatcgacggtcacgatctaatgcgcgaaggagg

SEQ ID NO: 83214 - DNA, 909 bp, Zea Mays
cagtggttagcttcggcaactcagttgtggttgggggactcatcaatcttgaatgctcttctgcttttgagctctttttatgagactgctttactagattggcactagcttcaaccgtcgcagcaggaatcatctccgaagccaaagggatagctttggtctgttcagcaatctctatcctctttgtatcggatattgcagctgacctttttatagaatgtggcctcggcctgtgagttaaaaatttaagtttgttctatttaggcgtggtggaagaggaggaggctgccattttccttttcaacccttgttttcgggcaggaaagcagtaatcaggataaaaaaatccaataacatcaaaaactctattcaacctcctctttccgcgagcgccgaaggcagtggtcatagcttcatcctctgccttcgaataagctcgcaacagctcgtcactggtggcctcaacagcctaaagccaatcgccactcggttcatcaaattgacttctatagcgataggtgtatcttaagtaaaccagaccaccttcgctggagccggcaacggtctccttctgcatcttccagtcgctcacaagtggccacaccttgtaagaaatatgctcatgtaccaaatttatggtaccaatgtaagtgcacacagtattgaaatccatcaaacacgattgcacttcatttccacttgcaattaacggcatattaatgccaaagcatgatcgtatgggacgttggataataccctttacatcttccctttcactcagatcattcttgacatagaaccattgtttcatccaagaacccggccacttctttcggaatgtcggcacgggatacctcgcttcagagcggtgcacaaagttgtagcacctgaagttgttgtgatattgtt

SEQ ID NO: 83215 - DNA, 430 bp, Zea Mays
aagattttgactgaaccagaagtggaattggaaccagatttgacataccaagagcaccccattaaagtgttagatcataagagcagatccacacgcaatttagaccgttaagatgtataaagtccagtggagcaaccacaccaaagaagaagctacctgtgaaactgaggattttctaaacagaaaataccccagatttctatcaaaaagtgttggtacgtaaccacccccatccccacccttgccttttgctcttaaattctatcgtacctgcctacataatgaaagataaaacctctttcaagttaggtttagacttagataaaacctccctacagaaaagcaagatcttggtgcaaggaagagatcctacacagaaccctcgctgagataggcactctagggcagttaaactgacgcttgaacttag

SEQ ID NO: 83216 - DNA, 587 bp, Zea Mays
ccacgtttgaaaagctagatagggttttaatgaatccggaatgggaacttaaagtctccacgagcctaggaaattactctgagtttaaatttaagttagcatggtttattagagagggcttccatgatatggttacgtcgatttggcaaaaagaaaataaaggtgaaaccgctatacagatatgacagaacaagattagggcccttcggcaatatctaaggggttggacaaagaactcagcagggtcaataaaaaaagagaagcaacatctttcagagctgattgatgacctcgataaaaaagcagaatttacttacttatcgcctaacgagttgaatactaaagcttttgctaatgatagacttgccagtattttgagagaggaagaaattcgtcacttccagagggctaaagtcaaacacctccttgaaggggatgataacacaaaatattttcatttagtggctaacggcaagcaccagagacaaaggatttattctttggagaatgatgacggcgcttgtatagctgatgaggaagagcttaaaaatcacataacgaattactacaaaaacctctttggaaag

SEQ ID NO: 83217 - DNA, 713 bp, Zea Mays
tggattgcgagtagtctacttcattagtgaggtcttccatgataccaaaactaggtattgaaagatgcaaatattgctctatgtgatccttgtcgcattccaaaagctccaacaattttcaggcgcatacaatctcaatggttactttccatatcgcaaaggatttagtcattctagctaggttctacacttgtacactagccaataactttgctaggaagataaagcacacaatcaaggtaacacaatataaatgtggaagctaaaagtacgatagaaatagaaactccacttagcatgccgatatttttaccgatctatgaagaagcccacaagtttccccctaatccttgttggtgttctaagggaatgtccatgcgagggccaagcgcctgatcatgtaacttcgcggatagctccaagcattcttcatgtgaaagtggtactcctttgatgtgcattacaaataaatacctaggtagggatgaaaacgaccagaaacggtcagtaaacactaaaaccattgccattttcatatttttttatcagaaacaaagtcgaaaacggtaactctagaaacgatatcggtatttcggaaacatcgaaaacgaaaattcagtacggaaatgtcgggtaccaggaacagggtatccaaggcaaggcccataaacctctctctgtcccatttaccaaccaagtccccgccgaacaag

SEQ ID NO: 83218 - DNA, 509 bp, Zea Mays
caaaaggcgaatggcaaaggaggctctaagatgcccattgaacaggtcctccaaggacacaacaccagcaatcccactcgtggcctcgtcgtaaccctgaatcaggatctcgaaggcagcaaacgaggcgccctggggaagtgccattggagcatggaggtcaaccccagtacaaaactgggcacagcgaaggcaaaggcggctccgtagtggacattgagttccactacgtgtcgggcaaggcttaggatgtcgagcaagcattttaggcgggtcgccccacgagcatagatgctcctggtgacttcatcaatctctcgacgaagctccaccagctcggcctcctgccctgcttagaagcaaaaaggggatggaggcctgagcaccccctagaaaatggagaaggatgaagagaagagcgagaagcttactagacacgcgcacctccaagacggcaagccacgcttaaagaccctcgatgcgcacatcagatgtcctcacggctgagc

SEQ ID NO: 83219 - DNA, 514 bp, Zea Mays
cgattctgataggtctacacgtaatagctactggaatatttattagccatgtattccagttcaagttagatgacatccttttgaacttctaagtagtcgtgtacaggaagcaactgttaggttgtgtgcttgccaacgacaatatcagttgtcatctatgtctaagtctaagtgcttcctagtgaccataagctacaatgatgtaaggaattctctagtatgtctactatgatgactaagatgtgttcatgtggtgttgttcctagtgaaacagttcatcacaaccttttattattattgtgctgatataaatgcttcgtctgttgttatgtttaccttattatgtcgattgcatttagtttacaccatttaactaaatttctgccatgtgcacaactaatagaatggacctagcaaacaatgccacatcttcgcaaccgatgtcaaataactcaactggccagcaatttccccctccacccctgttatggcctacgccattcatgcaccagac

SEQ ID NO: 83220 - DNA, 576 bp, Zea Mays
ctcaaatgtgcacgagtgatgtatatgctcctgagtgacttggtattctgcaaaggtcgaaaatggaggtcccttttctcaacctttctccatattttcagttcttgctcaaactaagtctcgaaacatacttttcttcagaaattgagttagcgaccaaaccaaagtgctagaaacattataataggattacacaacatatctaaaggttcaaatatcacagttttaccctttttcacaaatttgcactttctagcctcttttgagctcgtttggacttagaatcctccaatttgcatcctagtgaacctatactcatagacttagcaagcaagttactccacgatgttgtgttggatattcaatcaccaaagcatgtagaaatgtctatcttgcccatttccctttcaggttactaatgaacacacttgatttgtcgagactacttcaaatgtaggctcttcattagcaccacttcctgtgtcagttacagtaatagcactagcatcttgtctagcctcttcctatagtgtagcttgagtagttgccactagttccttggcttcttttgaactg

SEQ ID NO: 83221 - DNA, 465 bp, Zea Mays
acggcgaacagcatgggtacggtcacgaggtgctgcgtgggcgacgaagctccggcggggaactcggatggtgagcacgaactccggcgaggctccacggactctgacgacgacgtgcggatgcggacggtgaggcaacgagcttcacgacggcgattacgtgggtgacgagtggcaacggcacaacaatacgttgtcgcgagttgatcaaggacgtggctttgtgcagtgggcgagcaaggagcacgagagagaaagggagtttgggaggaagagagctcgtgcgtcggtttttatagggagggagagggagagggagagctggggagggggagaaacggcgaccaaagtcttcaaggcaccattgatggcgtgcatcaatggaggggagagtggggatggagtaacggccgagttgacgctccattaactcaaggagacaaacggacgggagctcggtgcggg

SEQ ID NO: 83222 - DNA, 338 bp, Zea Mays
aagggatcagacttcaggcaatcgatcatatcaataaataccaagccgaaacagcaaagtggtaggacaggaaagtgagattaaagaatattaagccagggcatttggtgcttcgaagaatagccaaccgagaaatagtggggaagctacaactcaagtgggagggccccttcttggtggtatcttcgtcaagaccaggattgtacaggttaagagaaatggatgggaatgatatcccaagatcctagaatgcagacgagcttcagagatactatgtgtaacattcatgtaattttctttttcctactgcacccttttccattcaagacggaagaaag

SEQ ID NO: 83223 - DNA, 1032 bp, Zea Mays
ctggtgcaccatatctgttgcacacctgatatgctagtgcttcactcaaacacaacagggcacactcatgtctagtgacccatatcaggtgcccatcaaactcgaccaatgctactacaacattgttaagtcacatgttttaatcacttttcgaattaggttttgtttcgaacttcacatgagatctcatgggtttacctagcactagtattcacaagtgtgcatcatcatacttaactagacttgtttaggtaaagctacgcttttcatgtccgtttatagtactaccaaagaaaaaggtcaaatcactactctaagtgtccaacaactccatttacagttgatccttaaccttttcgattatcctatgaaaaccaaccattgattttcatcaataagggcatgggtaccacataataatcctgatcatatctattattgtgatctaactttccttgtttctataaaacacttgttagtcacaataatatatattatcattaatcactgaaactaaactaggggcctatacactttcagtaaccttccttcgtttccaagttcatctttggtttggtcatcagccctaaaaatcattaacatctacatcaatagcgctcaaagatgcatttagaaaatcctaagccttcatgctagttgtcagacactgctcaaataactttaccataatcctctaccttgatgtcggctaccacactccatggaccgtgcccttggaagaaggcaccttcgcaattggttcgcttttttctccctctatttttcttccttcaacgtcaccaaaaatctgatgtggcattccttgtagcctgcatatgtcactttagtatacttgctctaacctttttctaacctaactcatgaacatcgtaagttgtagggacaagggcgcgctatgacccctatctataatacgatttcacatgaaaagaacctttgtgcatttgtaattatacactctatcataggattaatgttttttagggtaatatcataggattaatgtatcag

SEQ ID NO: 83224 - DNA, 308 bp, Zea Mays
gtcaagggtataagataagcgagggggaagaagagagaaaaaagaggcccttactagcttatgttgtatccgtcattggtcactagaaaatcagcctttctttagcctatttctgaatccaacactgagcacgagagagaggagtcgcatgctcaagtggtcggctaacctttttacatacacaacgactactgatagctatctcctctttcgcacgttactgtagatataagttaggtatagcaaaacgctaattgaacactcagtcatgtagaaaggtaatttgtcatttgttcggctagcttttt

SEQ ID NO: 83225 - DNA, 1342 bp, Zea Mays
atttctggattttaacggacataagtatcttcattcgtatgtccctcatatttattatcatcttgtgtcacatttaacgataatggcatattaaacacttgcatttcatcttcatcttctttgggcttgattgctccaaccaacatattctttatagccttcttcaatggtttatcacctacatctttaagattctcatgtgttgctcgacaaccgttaatctaatcaaacttcacatcatatatttcttctaccaaacaaatgcatggttgaataatcgatatgcttagaactttaatgaataatcaagtaaaacaccaatatcacatcttctttaaaacttccttatgttttgatgtttttttgtatatgtagcatttccattcaaacacccaaaaaataagttattcgacttcttcctatcgagcaactcatagggtgtcttctcaagtaaccaatgtggaaataacttatttgaagcataacatacggagttgattactggcataaaacctttttgatgtgttatactcatttatcattgttcttgcaaaagttatcaaagttatattattactctcaactacatcattctattgagggtgtatgttgcagatacttcattttttattccaatctcatcacaacactcttggatatttgtgttgacaatttttttgttattgtcacttctaatttttctgattttgcaatcaatctcattttatgctttcttggcaaatctctttaatatggatgcaaatttagacgtcccttgaaggaagaacatccaagtgtatctaggatagtcataacaattacgaggcaataaatgttgccacccacactagcatactatgttgaaccaaacaatttcatgggaagtaactctaatggccttaatgttgacatgaaaacttttgtaggatatatattagcaacttggtgttcgacttgacatgcactacaaattttatccttttaaaaaataacatcctttaatcctctaattgtttctttcttcaacaatttcttaagtacctccattccaacacaagctagcctcctatgacataactaaccaggtgaagtttttgtaaaaaggcaagtccttgcgttagcatttcccaaagtgaaatctattgagcatagattgatgtatctaaattccttgattatgacttggtgatcatctattttaggcacaacaacctcattctccataaacaaacattgatagcgacgatcacatagttgatcaacggataacaaaataaaccttagtgatgcaatcaagaggatattggaaattgagtgaacattagatattgctacattgccc

SEQ ID NO: 83226 - DNA, 655 bp, Zea Mays
cccgagttaagtatgcgtgagcatgtcacaccgccttaagtcgtttccgacttaagccgattgctccgttagcagggcatagtggtcaccccgagttaagtaagcgtgtcgattgacagtgaacaatctgagtgcctttgaaacctttttattgatgatattttcctcaatttacagaatacatcgtcgttccgagagccttcgtgatgtacccaatttctgttctgtccatctgagtgaggcgatatgatcccgaccgagtgacttccgctactatgaatggtccttcccatagaggtgacaatttatgtcgtccctcccccgttagaattcggcggaggatgagatctcccactgcaaaggatcgacgccgtatggccttatcatgatagcgccttagagtttgctggtatcacgctgattgaatcaccgtattcagtcgctcttcttcgagtacgtcaacgtcttccaacctagtagcttcagcttctgctatgtcatcaaagattaaccttggtgccccgaacttgagattggcaggtagcactgccttcgaaccataaaccataaagaagggggtatttccatgcagagctcggctgggttgagttctcaggctccagactacatatggcagttctctgatccactttcc

SEQ ID NO: 83227 - DNA, 1476 bp, Zea Mays
ctctaaggtgggacttggacacttaagttggaataattcgggcaagttccgccacaagcccgctccaacaccctcgggggctgggttttctgtagcaaccacctctagggctgaaggccccttagccacatccataggagctggatgattcggatcgacgcttttgcatggaagactaccttctaaggtcgatgatgcatgggataccacccgggttacctcttgcccagtagaatcatgcagcgaaagaccaccatccgggacctctgaatagatggtcggaatgtcagccttaggaggctctgataaaatatcttcgggaacgacctcttccagtgcttgatcaaagtctcatattgaaagcccttgaaggctgacgagtgcccgacaaggcttggggagggaatatcgctgcccccgtcgctgcctctatagtgacggctgttcttgcggatcagcggaatttcttcttcttcctcttcatcgtcgtcaaacacaccaccagcagcctgagcatcatcacaaccttcagcattgacctcgggaatggcgtccaccaggccatcaccaaggaataatgcagaagggccagcatcttgatctaggcacgacagtcgccggagtcacttcttcttctcctcgataggtgcagccaggcggttcactcggcgtgaacgcttctagcgggcaccttcaggtttctggatttccacatcctcgccaaactcttgtccagtcgcaatggccatcggctcggtacgggtagagtcagacgattcccggccagcaggctaagtacgacatccatctcagcatcatcggtgctagatgacatctcgaaatgagtttgcctctcagccttgggaagatttcgaaggggagcaatcaaggcttcaatatcctcaggggagggtcacactctatggcccgggctaccatcttgagcaggaggattggagacaaatttagagaagggcctattcggaggcaggttccacgcagagtaagctaagggagcaccagcattcgagactgtacccctcagtatcatatccagtcggctcaacaagtcctcattgggaatctgtttgtttgtgacccgggtggaatcattaatgcaggtatacaggtaagcagggtaaactctgttcttcaaaggttgaatattcttgaagacaaagtcggcgaccacggcctcagcaatcagacccctatccttcaatgagcagatttcaacaagcagcactttggcttcggctacctctgaaaaagtgggagactccacccagctaggcgtacgaacgtctggttgcctttctaaccaaggggggagggatttgtcgtgattctccatggtgaaccactcgaggcaccatcccttaatgctttccttgagggggatatcgaggtattccactttcctcccccggcgaagttctaaacttgcgccgccgatgagctgatgctgccctccag

SEQ ID NO: 83228 - DNA, 839 bp, Zea Mays
caatttcactagcagaactctaaatcgtccagtccacggagacagcactgacaatagatgaacaaatgtgttcccggtgatctagggcagtctagttcaattaaatgggtcgagtagtattagaagaacctaaggacactaaaatggaagagcagagagtatgaacagacctagaacaagctagccatggcaagggttctttcacggtggcggaaaccggtttgggggaaaagagcaatttgtgggctctggtgagtaattgagggcacaagcggttggattggatgctggattacctaacggagccgagggggtgctcaatttatagcgttcttgagcggtggctagtcaatttgatggagacgcgtggcggccggagaggaggaggggcactggcgcaaacgattagtggctttcaccgtggcggactcaccggcgacgagccagtgatatagagcggtttacggcgacgtggtgaagcttcagggcacgtggcatctgatcgacgggcggccaactccggtgaacttatctgagccggccgcaaagcaacaggggtacggcggccagcctccggtgttatcctgtggcgaagatcttttacccagaagtgttatccggtcaccgatgagcacgaatcacaacggcggcgtgaatccgggcgcacggttcaccggcggtgaggctctctgcgctggcgttttgatccagtcattgtaccatcgcgaggtcatttagttggtctgacagaggatcttcagaggcatttttcttgaatttttgcatgacaacttgctaatcggtttgtagcaaacttgtagccctatatacaaactaca

SEQ ID NO: 83229 - DNA, 679 bp, Zea Mays
cagagatcttcctataatcatggttatcgaggtatatacgtataataatatgaaaaacaaacgcagcaagagaaataacacctcgattaaccattacaagttcacaagagttcgaactaatagaacattaattagtcaaacgtagttcgaaatcacatagttcaataacatagcaatataaaacataataagacatagacataataaatatgcaatgtaaatgttcgaaagtccacatgcgagctccccctgatttccatcttcccatcttcatttctctccccctttggcatcaatttccacaaaggggcgtcactgcgcaccaggtggggggggggacgtggatacatactatagtagtgggagctgaagctgtcaaagatgaaggtgaattgactgaagtcattatgaagctgctgctgcctctcatctagtgaatgaatgatgtcatcggtagatagagtctcaaattgactagacagagcacccatattgtcttgaaatctttgttgcatgttgttcattctgctcataatgcgatcatgcacattatcttgattatgagtgcgaagatcgacaaactgtgtatgtaccccatctagctaggtgtcaacaacagagaatctatcgtgcagagcagagtattgaccatcaaagtgggattgcatatcatcaaaac

SEQ ID NO: 83230 - DNA, 659 bp, Zea Mays
cggggggttgctggacgtagacttcttcttggagctccccattcaaaaaagccgacttcacgtccatgtgatggacgccccagccgtagtgcgctgcgatggcgaggagcagacgcacggactccagtcatgcgatcggcgcgaagacctcatcgaagtcgacgcctggctgctgcacatagcccttggcgacgaggcgggccttgtacttgacgatgttgcctttctcgtcatgcttgactttatacactcatttgaggcctatggcgcggtgaccacgcggaagctcggccagtgaccatgtcttgttgtcatggatcgacgccagctcctcctccatcgcggcaacccaatttgggtcaccatcggcctccttcaaggtcctgggctcctccacgctcacagcatgcagttcagcatcctcgtcatcatggtggaccagcccgggcgctgcacccacgctgtgaatattgtccagcgtccggtatcgaagctcccccacatcatcggcgttgaagctagggtcggtggagagcggcgtcgcgaacttgatctgagtccgcggtgcctgcggtgtcgagggcgaggatgctgttgccgacgtgctgggtgccgttggagacactgtgcgcggcgccggtgtcgatggggtcgacgca

SEQ ID NO: 83231 - DNA, 461 bp, Zea Mays
ggacatatgggccagttatagaattgcaaggatgccctaaaagcacccttctaatcggtgaggagacgttctttcagcatgcatgcattataaaacatgaaaggattagaaattaaaggaaaaatgcatctaagtatgaatgtagcaaatagagataataataaataacctaaggagtaaaatctaatctaacccacctccttttaacaacccgggcacattttgtttttcctttccactaccgtaacatttgcttctaatcctcttccacagatgacttcagccacacccgccaacggaggagacactcgtttcagttccgatttcctttcccacaagggtttcccttccatcttgtgggaggtgctcagctccgtttgttaccctacacccctttgtacatggtgcagctgtacgaggagcatcgggtgccacgttgccgagtctggctgactttggag

SEQ ID NO: 83232 - DNA, 369 bp, Zea Mays
cagccttagaggtggctactgcagaaggtgttgctggtagtgatccagctcttgtgggtagtgcaagctacaacccagcccccgagggtgttcaggtgtgctctctttcccatgcctccatggatgtccacgtcgggtcgtccccacctcgattcgatggagtgacggcagtacatgcttccactgttttaactggacaagttgccttagaggtcggcgagctagatgcaaggaacctattgtctgctggtggggctgaggtcaccccggatagtgctcttttcagatcgttcctgctgaccttccctcgtcgagccatgcctcagttcctcctgccctgggtctaccaatgttcctctccaatcttca

SEQ ID NO: 83233 - DNA, 964 bp, Zea Mays
ttgctttgagttctttgcgagtcaactttgcttgaccaaccgggaatgagggatgattgggggtctgtatctcatatagctaagtctggcttgactcttctgtttgggtatccatgtgtttcggggcttttgcttgtggttgaggtggactactcatgtatccaaacattattctattccttttgttgttcttcacgatgttgatggaagtttttgtgcattttggttcatatcccatgtctagagactgagatagcttaatctcggaggtgttcggtagttaactcttctcatgacagttacgaaggtaatgatcttcacgtccacatagataacaagcttttcttgaagttatttcttgactttttccatgcttccatttttgtttcttggacctgatgcgacgacggggctgaaactgtgtgcaggtgataatccatccatcaatgtaacactcatgttcttctttttggagctgggcatccttgtgatgtttcctttttggaatacttcgcaatttatcaactgacagtgcattaggtatgagagaatctgttattagttgttcttgaggagacatctgtctgtttatgccagaaaataaaatctggttcttctattttgtagttttcactttcgtttgtactgatctggcgataaggaattccatagtacttacaaaaacaacatgttccaaggtcacttgtctgttgctttggttgttcatccttttgggtcttgaatgtctgttcatcagctgttttatttatagtgttgttttgacttgccgacacaccagattctttgcatttagtgacatcacttgtagttgacattccaaggtctgacatctgtatgggtatggaagaatggaagggacgaaagggttgagtaaagacagattatagagagcagagaaaacccatttatctaaggtttttcctagctaattgatgccattgtg

SEQ ID NO: 83234 - DNA, 371 bp, Zea Mays
ctggaatttctccatgattttatcccaattactcctgatatcatcattcagccatcttcgaaaatcaagttggccatccctcaccctaacatgctaaacgagaagatatttatcattacacatgtcatatagatctggttcagacatagctaggggaatttcgttgatccaagggtcctcccaaaatctggttttatcaccctaccgagtgataacctttctcccaatagcataatactttctgatgttcaacaagtcatgccaaacatgagaatcaaaagacttgtgactaacattcagaatactgtcaccatgaatatatttcctgttcataatctcttgccaggttcctttttcatattcaagtttcc

SEQ ID NO: 83235 - DNA, 722 bp, Zea Mays
ttaatcctttagtaatttatttttcttctatttatatggacaccagttagtggatgtgacgagctgtaaaatagattctttgcatccctaatgtaaggaattttttttcgctccttttggtccaaccccggcatctgtggatgacccaaacgcctccacgtcacccgtggaaagattccgtaacgtccaagagctggctgtctgatcatgtggctgcaaaagttatctcaaagtcagcaaatccatgcctgcattccatggcctgcgtggccaaccaacgagctggatgataaagcatcagttcgtatagtagcataggggagaacaacaaaaaagtcaaatccctttttccaaggaaattggagatggtgagatccttatatccccccttagttccattggtgtttacacgcttttacctgtcatcacagaatcggtatctcgccaatttgaaacgctttcaccatcaacgcctgcctcacaacacaacataagttgcatacacatttggaaaatcaaattagattgggacaacatgacgtgttttggactaattgcatcatcacacctccataaacacaaaaacaactcaacctacgaggccttgtaaatcaggtcgagaaaatttttgaactcctacctcagcgtacatattggtatcggaccaaacctaaaatcttaaagtgtgctacctatcctatgaatacatagttgtacattac

SEQ ID NO: 83236 - DNA, 610 bp, Zea Mays
gaagttatgaagcaatctggattggttgtgacagaggggactattgacaaagatgcacatactactgaggctgaagaagctgatattgaggaagaaaatgctgatgaagaggaagactataacactctagtcccaacaaagcccagccacttagattttgaaaaatctattgtctctgaggccgatgtgccgatgatgatgaagctcggttacttcggggagacagagaagaagcttcttcgttttgccagcgaagaaaccaccccagagccaaaaaaatgacgaagtagtagttttcaaaagctttttcaaagctggattgcgatttccgcttcatgagatgattggggaagttttgaataattatgaaatttatcttcatcagctgactcctaacgctatcgttaggatcagtatcgtcatttgggcccttcaaagccagggaatggatccaaatgttgaagccttctgccgagtacatgagctacattatcagacgaaggctagagaagatgggcttcatgagaattttggctgttacaacttcgcttaccgcaaggatatgaaggccccagtgctaagctaccgcaccaagtggccaaccggctgg

SEQ ID NO: 83237 - DNA, 402 bp, Zea Mays
aattcatctgcggaagggaatcaaagataaagattatggtggaaggaaaaagaaaaagagagcctggatgtttttttaagaaagggggttagctcaaaattttaattcctctttatgttttataatgcatgcatgctggaagaaacgttgcctctcgaaaagaaagaaaatagggtgcttttaagggcatccttaaaatataagtattggcccacggggcctaattagttagccacctatttctccctctatgcctaaggcctttcgtcctaggtctagcggtctagtcctgacgatctgtagtagtttctaggcaagttttagattttgaaaagtggtgttcatggtttattgtccttctctgtggtggaatttgctccgataccagctgtggcagaaccg

SEQ ID NO: 83238 - DNA, 326 bp, Zea Mays
gtcgatcgacatgaacaatgtccacagcggtgttcctgagcgacaacatggtgttccctaagctacggtgtggtagcgtttaattggccaagaccagaagcttcactagcagtaaggaatgctaaaacatgaacctgggaggcatgaaataacctgagagtggctggccacggtgcgatgcatcacgacggcgacgacgaccaatttgcgggaaatcctgaattcttggggtacggtggatggattaaggtgaagagtggtgcattgggcgcgtaacaagagggaggaacagggagagcactcaatttatagaggccaactacggt

SEQ ID NO: 83239 - DNA, 693 bp, Zea Mays
tgttggcctctgcctccctgctaatgaatttgatttccaaccatttctcgaagaaagcgagtattatcagtagtggcattaatcaaagcagcaatggcctctaccagtatgggaggtacaggcgatgggatcggagtttcctccccaccatgagaagttctagccccatcatgaccacgagttttggatgacatctgaagaagaaaacatacttgattatcacacatcacaattacacagcctctgttacattattccaagcttgttctaattatacatactcaacttatacaactcacctttccttatttagattacatcaggaaataacctactactacactaatgtagtcctctacatccttgtctgctccctctccactgctagcttcgggagggcgatcatccgcgatgttcatggaaggagaggctccaaagagatccaactccccataaggtcctctaccagctgctcttgctgcaccaactcccatcaccgcaacctctggtggcacgttcggatgtagctagtcgtatagcatgtgcacttcctcgtgtagagcattattatacacttgcaaattttccagggctacgcttagctcttccacccggcctcgggtactcgcctcacaatcctaggctatagatcatgaatttacagcccagtcaatagctctgtcccgctccaca

SEQ ID NO: 83240 - DNA, 633 bp, Zea Mays
caaggctatcagcaagatcatccttcgacaagattgaaaggccttcttcaagcttaggaaatcccatactcttagctatctcccggcaaacggataattctttgttgtccgggagacagtataggaaatcatcttcgtcagtgccgttaaacactagagctcccttcggatattttaatttttgggcatagtgtctggcttcaaggatttcttcttcagataatttcttcggctggggcttcaagggcaggggattttgctttttctgccatgctggtatccgaagtttgttgatcagctttgtcttcaggcgcgacagcctttgcctcaatgggcgctgaaggcccagcttcggcctcgtcttggactttgacagcttcagcatttttcttagtaggtccagggctcaaggccttcatggtctccaagacagcgtccagcacgctggccattctccttctcatgggagttgcggcaggagctttttgcaccttcgtcaattttgcctcagctggtgggctcagaatttcaggcattttctctattttttccacctgtggctcttcggctttatcattcttagcttcggctggcccgactgtagataccttcagcattacagtcgactcttca

SEQ ID NO: 83241 - DNA, 503 bp, Zea Mays
gagccgagttgcatgttgcataatggcctcatcatctcgaagctcaatcttagaggactcataaccatagtcatgagtttttccctcttcttctcatcagccttcacgtagaaccattcacttgttcacccggttggccacttagtgagatagcggatcaccggaaccttggtgtctttccggtatgcaaaattataacatctaaagtttttgtgaagaccatcggctctggccttcgtctgatagtgcaactcatgcactcgatagaaaccttcggcattggcacttttgccctggcttcggagagcccatatgtagacactgagcttaacaatcgcattcggtgtcagctgatgaagatatattttaaatcttttcaaaacttctcctattatatcatacaaagggaaccgcggacctgccctgaagaagcttctaaacacaacaacttcatcttccctcggttttggaatcacttcttcgccagcaaagcgaataagttt

SEQ ID NO: 83242 - DNA, 476 bp, Zea Mays
gtcgtggtcgcggtatgggagctcgattggctcatggcattgcagctttcttttctatgtccaggaacatctcttctgatgttcatgagttggcgaggcgacagcgggagactgacgacaacctccgtcgccaggcctcttccatgggtatgccttttgctcctcgctcgcctgatgtgcccctccatcctcctccgctagagattaatgaatggcaccagcaagcctatggggttccattcatgtcagcagaagatgaagaaggagaagaggaagaatttttttgatgacagagagcagtatgtcccgcctccccaccaaggggatccgggtccatcttcttcatatcctcctccccaggatccatctggcagctatccccctccagctcagcccggggaagaaaactttgcggccaatttggtgtcacagttctttgatccatctcctccttggtaatttgtggttgatatttc

SEQ ID NO: 83243 - DNA, 408 bp, Zea Mays
aatgagcatccgaaggagcatcatagggagttggatgatgtacataagtagagggttctgctgggttagttgtaggaggtagaagaggagcatgggacaattattaatcatgtagggctagtttggcagcccagttcctcgtggggaacctgatcttttccttgtgtcggtggcccacacaggaagccatcacagtgcaccactctggcctgtttggacggtggttccacaggggtacctacccaagcgtagcttccacgtgaaaacatgctcgaaattcagacatcaggcgactatcctcgacccgtctcttctcaacttgcgtccctcctctcgtctcgtgtggttgatggtgctaccatcgcacctggtgcaatctcattatcaccacgcttccgctgatgattt

SEQ ID NO: 83244 - DNA, 805 bp, Zea Mays
gggagagtgggtcgtcgtgagtgcggcttcggaagtgttccgtggcggcgaggtgatgttcttgatgccctatcacggtagtgttcaatcgattgagccgatgagctacgttaacattcaaggatgctacaacatggcacacaggggtatgaacggacctgggaacgacttatcacggcagggtgtcttacggcggtgcgagtgaccagtttgggaaaaattcaattcctcaggctacagtggagggattgaggggaggagtggtccactaggcacgtaacaagaagccggagcaggggaagccttcaatttatagtgaccactcaagcgctttgcaaatttgggatgaaatgatctcgtggtcgaaaggaaggtgagtcatcggagtgcaaatgtcgtggagctcggtgaggtaaggaccctggcggtaaatgggatgtccactgtgacctattgcgacatggtaacgcccccaagcatgtggcatcctcgcggtgagcggtggacgccgacgatgtcattccagccagtcgtgaagcaagtgggtacggtggccagctcacaatctcatctgtggtcatgatcttttcacttgcccaataatatctgcgtcgagtcatgcatgaatcttcacggcgagctcgaatcaccgctcccgatcactggtggcgaggtgcactgcaccaaggatcttcttagttcactataccatggcgatgcttattcagtgcacctgacagaaaaagttgaggagcttcgttttcaaaattttatgtgacaacctggttatctgactacatcaaag

SEQ ID NO: 83245 - DNA, 1037 bp, Zea Mays
ccagccatggcccctacgcccgcggaactgccccaccccagccgtgcctacgcgaaccccaccccaacctcaaacgcccgcggagaaacccctgtgcgccgtgccctcgctaaccccatctcagccgcaaacgccacaaacaaccgtacgcacacgtgtgattcgcccccaatctcaatacccctcgtggccccgaacaagccacagacatccgcacccatcaagccccgcgccacttcattgccccgacattgtgccgctggagaggaaggacgaaggtgaagtagcttgccccgtcgacggataggaactgctattgctcaaccgcgcgggcctcgaccaaggtatgatcgactcatcattcggctatggttcatactaagttagctaggagccattttttaaattgtataccatgtactgttttgattaattctgagcatttacggcttatgtggattgcatttttcagattaagtagcattaaagatgattggcaccaattgctccctaaaattgattgtggctagctaagtaggtgctgtgtgagtaggaattggacggcaattttagtggcgttagaggtttttttttcgtttttagtctgtgttgtaccggagcagcggagacaccactttgggagcacattattagttacttggcttttgctgttagcacttagaatttgtagtgttgtgcaattcaggtatggagcactttggaacctagaattcttttcaccctttaggtctctactgcccaaaacctgtattattattctattgtgactgctaaaccaagtatcccagtatgttcagtgggagcagattggattatttgtttttgggtgcatactattaattatttaagttggttgcaaggacacaatggctgtaagtatggtgggcaatcaaaattactctattcttccttggttttatttttttagcatttaccttgatattattggaagattatatcactgtattattagttattggtcttcctgtaatctgagaacatatttgtgctgtccg

SEQ ID NO: 83246 - DNA, 652 bp, Zea Mays
atcatctctgaactgagcctcaatatctgataacagcaggggcgcttgtgaaaaagagtccaagactcaggctgacacaggactggaccgcgggatctatttgtcacttagtaagggctcttttgcattttaaccatggcgaaggggtatccgttattgtgggccgccagatcaaacatggacggcccggatcagatcaacattataatgaagcagtaagcgatcgtggcccttggattccgatctagcgctccaggtgggataccccgaatcggtacacttaatctaatcgacaccgtctgtgaaagatccaacggtcgcgatccaatcgggagaaaggggaaactggatttaatcgtggtcgtccatcacacgttcaacgaccaacaccgtgtcttcttctctggttctcgtaaaacacggcggcgccctggaccacggtggtccattgccggatcacacccaaaactctactctggccgccgtgaatcgatccgaggggcgtaaactactacatataggtagtgaggtcgatggagggcatcataccagagtaattcgtgaaggtcgagcgggtccacggcaggggatgaacaagggtcggcgccgaatccgccgcgacgcacgactgaggtgagggcacccggccgcg

SEQ ID NO: 83247 - DNA, 504 bp, Zea Mays
gtccaaacagaagacaattgaagctgggcaattgaagccgacattcactgctgttttcagtccatttggacagcatttggacagaacctaggcacttcagtttccagctttgacaacagaaaacaacatatcagttggacaacttcaatggtccagaaaatagcatttcagcttcatttggacagaaaacagcatgtcagcttcattcagtctgtccaactcatgctgcccagaaactcctgctgtccaaaaacggaaatgaagctgcccagaaacagaaatgaagctatccaactcatgttgtttggacagaaaacagcatttcagctttatttggaaagaaaagcatgtcggcttcatttcagttggacagaaaacagttaactgcttcaaacagaagacagttaacacacatacattatgaagttgttaacttctggacaatacacatacacactgctggttcactgaaaacagaagacagtttcacactgaatacacata

SEQ ID NO: 83248 - DNA, 469 bp, Zea Mays
gcgcgagcttggagatgcgtcgcagaaggaagactgactacctcgacatcccactcaaggacagcatcaagggatggcgcttggaatggttcatcgtggagaatcatgggaattccctccccccacggtcagggagacagtcggatgttcgcactccgagctggaccgaatcccccacagaccaggaggtggctgaggcaagggttctgttagcagaagttggattgttgaaagaaaggggtttgactgcagaagctatggtcgttgactttgttttcaagaacattcagccattgaaagacagagcatatccagcctatttgtaccgaggcttggctgattcaacccgggtgaccaacagaagaattcctactgtggacttggtgaaccggctcgagatgatgctcagaggcaaggtgtcgaacatcgacgctcctgttgcatattcggcctggaatttgcctccctc

SEQ ID NO: 83249 - DNA, 425 bp, Zea Mays
aaacaagtcgacacggatttgagacttaaaatattttgaatattttatatcttgcagatttaatagaatgtggcgtaatctgattggtcaaaagatggccacacagaggaccatatgagcatggacgccgaggatccatgggatttggagcggacgctacagcgtgaaatagctatatggaccaaccgtagggcgtcatgtggcctggagactaatttttcccactactcacgtgatgcatgccggcatgcatgggagtcgtgcgtgcatgggtgggttccattagaaaacaatttcttttctttttcctaaacacactcgcaacgacagtttcttcttcctcacgctcacgtagcaagccaggcacacaagcagagcagagctgtccattgctgccacatgagctcgtgcaggggcacgctgac

SEQ ID NO: 83250 - DNA, 391 bp, Zea Mays
gggcggttgtgatgatgtcgggccagttgcatccttggcgcatgaccttttttgtgagggctttgggacctgtgtgacaaccacataaccctttgtgcacttcgagtaggagttgtgtgccttcagtgtcatgacacacttgagcaaggttgattgtcgttgtccatgaggaccttgtggagttcccatccggctatattgcacttgatgaccatcgcatcggtgtgtgaagcacttcggagctctacgtcacgggaatcgaaaggtagggggatgtgggaccacttcatctggaccacgggtttggtgactgtgagatgattcaccaggtggttgtagtccctcttttgccattttgagttgaagtcttgattagaccctccgaagatca

SEQ ID NO: 83251 - DNA, 817 bp, Zea Mays
ttgtactctatccatttagtgaatttatcaatggcaaacaacacgtgagtgtaacctccttgagctttcttgaatggtccaatcatgtccagtccgcagcacgcaaatggccatgttacgggtatggtctgcagttgctatgctggtaagtgctgctgctttgataaatattggcaagcttcacacccctggactagctcggttgcattattctttgttgttggccaatagaaactagacctgaagaccttcccaactagagtcctggatgctgtgtgtattctgcattgcctggcgtggatctcatctagtagttgcttcctggtagccgacagaatgcacttcatgaggattcctgtcgtgccccttctgtatggtgtttccccaatgagagtgtagtgggctgactgccttgcgatgcgttctgccgtagttttgtcatccggctcttcttcattctttatatatctaatgattggcttcctctagtcatctgaatctgactctggctggctcagaacattgcactcttctgcctgctctaaggaaatactcgggcatggcacttcttggacgaaaaccctaggtgggacctgggtccgactggatcctagttttgacaacgcatctgctgccacgttgcgatctctctctacatgatgaaattccagtccttcgaatttgtcctccaactttcgaacgaccatgcagtacttgcccatagagtcattcgagcaatcccattctttatttatctgacttatgaccaccattaaatttctgtataccatcagtctcttaatgcccagtgatatgg

SEQ ID NO: 83252 - DNA, 568 bp, Zea Mays
tgtctgcaaggatatttgtgaagattaacgatattattgtaaggatctgatctcgcctagaggggatgaataggctacctataaaaactgagctccaaaaatgatcagaactacaagcggcagtgccgctttgacacccgggactgccagacaattgcagggcactagcgcacatgctaacttggtcatattgacttgaaacttactaagtaacaactataacaggtaagcaatagtgagtaataactataataggtaagcactcgtttctttgaatatgatgctcattctaaaactttaacaaaaatagtaacaataatctaggataacaaattatgtatatgataccaaaccctaaatggtatgaactgaaatgagtaaagtacactaaatagtagggacacagcggaatatgtatgtttaagtgaaactcaaacatgttgtcgggaacgtgcccggcactaccgcttggtgggtggcactgccgcgcgaagttgaatgctcaaaaccagttgtgcctgcaagcaacacttaagtatggacttggtattgtctagtgtcaagtcca

SEQ ID NO: 83253 - DNA, 480 bp, Zea Mays
ccaaattctccaaatgtgatttctggctaagggagatcaaattcttgggtcatacaatttctcaggacggtatagcaattgatccgaagaaagtgcaagaggtgatggattggaagccccctaccaccgttcgatagatttggagttttctaggactggcaggatactatcgacgattcattcccgacttctccagaattgctaagccaatgactgagttgttgaagaagggagtgaagtttgattggggtcagaaatgtgaagatccctttcacaccttgaggcagcatctgacaatagcacccatgctagcgcagcctgacaacaccaaatcatttgatgtgtattgtgatgcttcaggcactagactaggttgtattttgatgcaagacaaccgagttattgcctacgcatcaagagcactccgacctcatgagcaaaattatcccacacatgatctggagttagcagcggtagttc

SEQ ID NO: 83254 - DNA, 601 bp, Zea Mays
attttttaaaaactctaaaattatttataaaacgcaaatagctcaattagagggtaacgggggagctaaataggagaaatggtttgagagatggagaaataaatggaagaatagttaggggaggtacgaatagagagatttatgaggggaatggttggaaatagtctcttagtttttttgtttttttttctctctctcatgtgtgatcctagagcagtccacgtacgtactggacagcgtggccttagctatctaggttcagttaacaagtcatcaaactgaagtttatgcttcgagtcagcaagcaaccctcaaccaggcacgaacagtaaacccaagcttgctcaaggctggtgccttttttccgtttccagcactcttttttgtttgtatccatagctagggtctagccgtctacagtagaacaggtgactaggactgtagaagtatcggtatgacagtatcttctccagcaagataactggctttgcaatgcaagcatctttcttcggactcaagccaaccaactccatcatccgacatctgaggatgcaaacgccaaaccccgccggccgcctcggtcaaacgtgttccactcacc

SEQ ID NO: 83255 - DNA, 924 bp, Zea Mays
ggtgctttactgatggggttgaatgtacttgtgatgtattagaataactgcgtgtcgtacgagtatccgaaaatggtgaaagttggtgtatgttggtaattagaaaatagtcacgacgttagccaatagccaagcttatgccgaaatgtaaaatatgggcaatttgagttgaaattatgcttatataggcgtgtggattaataataataattggaagaacagtcgttcaaattggtcagtccaattaagaatgattttgcgtgtgaggtgaggtggtgacatgccaaagtagtcaccgcttccctatgtttataagtcgagtcaatacccattaggcgttcattaaatttcacgtcgcacatagtgtttggttgtattcgtgacaaggaggtgtaggttttaatcaattagaagtttggttgatgtggctaggaaatttgtttcggcttgggtaatgaagtggtgacgtgaccaagtagtcccctggttatgagttaggtctagatgtgttatgccttcgccgtgatacccatcgcatatgctaatttgatatatatgaaaaatgaaatagacgcatcatatgatttagtggtgctggtattgtgatctaagtacattatatatgtgtgataaatgttgggcttgaggattgtctttcggacgagaaaggtgtaatagacttatatgtgtagaatgattaagctagtaatacaaaatgacatggataaaaattagtgagtctacttgttagtcctcatttgattattttaactctaacaaacggtaaagtgttagaataattcaagtctctagagcaaggcaattcttgaattatataaaagctgaaatttattgattgctgttttggactgcacgcactgttttagttgtgctgtatgtttgatgaactaaattgtattttct

SEQ ID NO: 83256 - DNA, 743 bp, Zea Mays
actctccgtgccgtcaatggggattcatccgggacatccgtgcggtggtacgggcgaccgtggggagaaggcgcgagctcgggtctgcacggcttgaagtttcaccatggtgagttttccttccctacctgttggtcatggtcacgtatggttcgagcgggatcgtccgggcggaagttagggctcggatggcgagcacggaactgctcgctggtgcggctatggtgttcggccgtgggggactagctgggaaagaaaagagagaagagagaggggaccagtgaggttgaagacgatctttggggcgtggatttcaggattaacggcttagattgaaggtacctgccggttggatcctaacccttggatcgtgatcgcatggctcagattggtttgggtatcataaaatcgagagcgttcaaataacatccgatggtcggcgttgcataccgtttcgttataagatacgatctaatccccatcgtccgctgtcgatccgacgtctcagattggcagataccctttcgctcagacacaattgcataaggacccccgagagaaacagaaatcaacccgccgtccttgcgccagtagtctgagtctcggtaatctttatagtttagtccctgcacttcccagaaaatgatgcctagtccagataattaatgaaaccaggaaaatcagttagaaagtagtttttaatacatatttaaatgcagaaacttgtttaaattgtagaaaat

SEQ ID NO: 83257 - DNA, 374 bp, Zea Mays
cttgcttaacaaatgacttcccaaaaacaacttggcttggcctccatggtcggtctttgacttctttatttccactttctatgtcaaaactttcactatcgctggaattttcagatagcccgaccagcatctcattggtgattttctccatatttgtcttctccatagcttcataaaacctggccagtgcagggtcagtgatcttcttctcctcggcatttagacaatggttgcgcaaatgccgaagctcaaaagctaatcgaacttgacaaagcaaagaaggttaagatggcatgcatagtacaagcaactagatagcacgaaaaatacttacaacacaggtctccaaatatatacacttagagccccacagt

SEQ ID NO: 83258 - DNA, 554 bp, Zea Mays
gccgcgtatcggttccgtctgtattttgtccattggctaggagtgtacacaggtgactcggtcggttcgctccagcgcgcttcattgttcacttatccgtttgcacatgcgacggtgatgcaacgaagctactacatgagattagccaattaatcaaggcaacgagtgtctggttcctgtcacaacgatccgtccatatcatgtactagtgccgtgcgttgcacgtaacagcgggattgagtcggcgcgatggcgatcacggaaaccggatgaagaactcgtccactccagggaggggtggggccgggggaccatcacgggcggacgatggccaatcctactactgtagaccaaaacgtctcgtgtcacggacgctacgacgccggccggatcgcgcgcagtttgagacaaaaagcagcgatcgatccaagtgcaccaatgctatgcgcgacacatgtgccacctagtagtagctactacaaatatagagagcgtacacatgtgatacgcagcacagagctatactcgccctgcgctccagtgctcctcccgtg

SEQ ID NO: 83259 - DNA, 622 bp, Zea Mays
gttaggatactaagaataatatagtgttgcggcatttgcccataaaaagtgtttggaaaaacaccacccatcctcggtctagaagggaagcgatcaccacaagaaggaaattgtggtccactgggatagtaaaaactaaagccactaccacagggtccttagccatatggcacatgaccagcacctcgccaggcacgaccaccatgtagtctcactatctgaggcctagcagtaagaggtaaagcacctctaggcctcgaaggacgtctctgaacaggatgatcatgaacaccatgagaagggttgttcatgttccctctgcttgactcagaaacccgttgctcatctctcttcctcctatagaaaaaatcaaccaaatgcccatccctctcataatactcacaatggaatgtcacctctctcttaggtggaatttgtttgtgggaggggctcatcttttggacggctaaaggtctctaggaaggggatcactagagatgttgggaagggtgttaagtgtgttcctgagaaggttaggttttggaacccacaattgtttctaaggaggggctctcataggctcctcaatcacaccatctctcataggggtgattttgatgag

SEQ ID NO: 83260 - DNA, 390 bp, Zea Mays
cgggtgtcctagatccatagcctctgctcggtctagtacccttgttcctcgtgcccctgatggcaagccaaagggcaacgatgatcaatgctggaacaaaggaagggcaaatgtgaattttgatttcctagctccccttaccttttggttctagtggtatttctagcctatcggtcctactccacctttatgtttgcccttagatgttgagtgtggtgaatctctaattgggagtgaaataatcccttatgagccaaccctttgtgtagagtgatttcaatccctggattgaaactgccaaacattaactctaatttggagttaaagaatcccttatgagccaacactctgtgtagagtaatttcaaccctagatcgaacctgccaaacg

SEQ ID NO: 83261 - DNA, 370 bp, Zea Mays
ctagggtttcttttgggtatacttaagggttttatactttcacctttgagattttgaatgaagttacactttttaattatatgtttatgttccatgaggtacttgaaaggttttggttgtacattatcttattatcccaacattttccttttactttccattgtgcttctaaataagcattttgaactatcatggtcagattacatttttcaaaaatgtcataaaaattacagtgggtaaacatttactattgtgggttattctaggagtttgaagctgaaatcaattcagacactacttgtgtaaaattatcaaaagtaaggggaaaaagggcactttatactatagctctaacttaggtgaagtctct

SEQ ID NO: 83262 - DNA, 826 bp, Zea Mays
cggagcttcgggagcaggagcttcggtcttttctggtataatctgccctgctgttttgtcctcaggcgcaacaggctttgtctcggtgggcactgaatgatcagcttcggcttcggcctgaactttcataccttcgacaattttcttaggggcagggctcaaggccttcgtagtctctataacaacttctagtacgctggccatcctcctcttcttgggagttgcggcaggaattttttgcatctttgacaaatttgcctctgctagtgggcttatgatttctgacacttttattactttttccacctgtggctcctcagccttatcatctttagttttggctggcccgactgtaggcaccttcggcactatagtcgtctcttcagcactctgcacaatcggagcagcttgctttgcttcggcagctgaagaggtccccgtgccaaatttaggcaccacggccggttcaatgtaacacgatcggtgggtcagaaccttcatctttttgcccttcggctcagctgcaatggccgaagcggcagtctttctctttttctcttgacctcgtagcgggtaatggtaatcagggtatacaaagctaataacatcaaataccctgttcaatcttttcttgccccgacccccgaaagctgcagacaaggcattatcttcggccttggagtatgccccaagtagctcatcgctggtagcttcaatacacttcagctagtcatcgtctggctcatcaaacttctccctaaatctgaaggtatacttcagtcggaccaaaccaccctcactagaatcggcggtggtctccttcggc

SEQ ID NO: 83263 - DNA, 405 bp, Zea Mays
ttcgtctcgactgaccctccccttttatagtccaaggtggggtcgattaccggtagcttctcaaggaagtagctactgtgttgtggtaaaacaagatggtctacctcggtaaagccatgcttgtcagcatgagtcttagtcgtctatgcttctctggttgtgctctttaagactggcggcatgggcggcagagagctctgacaccatcattaccatctctatgccacgccgacccctggcctccatagcctaggtctcagcatggttcgtcgcgttgcgggtcctgtagatggccagtgcactcagacctaggttccataggtcatgagtggaaggaccgactctcccactgtggctcgatgcgaggcgcggttaatgcggtcaatcacataccgtgggtcagtc

SEQ ID NO: 83264 - DNA, 731 bp, Zea Mays
tctcgtccctgttgtccttttcttctcccaacgaacgccaaagggattgacagttgacacgatcggtcaatatagggggctccgcgtaggcgtaggtgatgcctgacgagcgtggcgtcggggtgttttttttcttcttttttttcccttacttttttttctatgtgtgttcgatgcaagttcaccaaacaggaccagaattcattcagggaacaaaaacgaaggtctctcagctgccccccgggccactgcagctgcttcactgcggaaagccgacacgcaaggcttcggcctttgtttggttcgggggagagggagagggcttttggcaggcccactagcaatttcacttggaggcctctgacgtcatcttcaggcccaatccaatcttaaggtggccttggctgtggaacatccagatctggtccagtagtacgttgccaaaaccgagggttttggttttccggcgtgaacagttttgtgctcacctttgccatcgttcaaataaataactcgtcatacttcagttcactttcgaaaattcgttttttacaaactagggcattggatggttctacagagtcctaaagcataagctttttttagacaagcgaatcacatggattcaaagtattcttggttgaggatcatatctttagtactactcaatggcatcccacacaaaaatctttaacaattgtagaagaggagtgagacaaggggaccccccc

SEQ ID NO: 83265 - DNA, 659 bp, Zea Mays
cgagttctctggacagggcctcaattatcagaaaacgcaggggttagtctacaattattctctagactcagggaaacaggcccgaggaccgcgggtttatttctaatagaaccagggtttcttaagcaaaaagtccctgcgaaggcggtatccgtagatgtgggccgcacgattagaatctgagggctcaaattagatcgctcaaccccgaaccggtatgcattaccagccgccggatcggaatccgatggcccagagtttatgaaaccagatctaaccaccaccgttagattcgagatcaacggtacccgagccaactacgcccgcttctaatcctgaccgtacacgcccgatccaacggtccagtggccatcacctacctccgtttcccagggtggcggcgtgcgcacaccgcgcggcgttcgcggctaggccatggccgaggcgacccaattcgcccacacgatgagtcgattgttaaatcagttggtgcaaaatgaaattaggaagatggcgaacacagaggtgggaactttaccgaggattaggtcaccgggaggcccgcccacggcgcacggcggaggtctgcgggttaacgtcgacagtgagcaattcaggccgcttccccgaccgactccacttggctcacccgcggaaag

SEQ ID NO: 83266 - DNA, 615 bp, Zea Mays
ggatttttggttttatgtggcgatgaaggatgacgagggggttccaaggctgcctctaatgatcttgtgctagcactgctacgtcaccttcccccagtttaaagtaaagaagggggatgcgaacaaaggtgcccttcgttgtgtgtagaaaacaatcagtggtcgtgatctggtggtagaggtcattgattgtggagtgtggtcgtttgtgcacagttgggaataagggtgaaaatggccagtaacggtcagaaaaacctctcaccgttttcacccacataaatttttgttcagtccgaatcggtaaacgggaaagtcagaaatggataacggccgataaattccagtatatcgaaaacggataaatccgagcaaaatagctcgaaattgatcggtaaacggtaactataatcggaaaagctcacaataaacaaatcctaaccacacagatgttcattcacatccacatacaagtctcattcacaaaagtacacaaaacacaatcttgtccacatataattagtcatacactcatacatgtccactcttaaattttaacacacaacacataagtcttaaaacacgattattcattcacattcacatacaagtctc

SEQ ID NO: 83267 - DNA, 416 bp, Zea Mays
caaggattgcagccatcaaagctcaactcgaagggaggaatccactcgaagcacaagtccacgacatagttgtgcccctgccccgtaagaggattcgttatggagccccaggatctattactaggttactttagagttttatgggtcataatttaataagttctattttgcgttagatgatgaaactccttataatactatgattataataacaaccatgtgatggtgatgtttgcataatgtttgatttggatttttgcttgagtgcaatgatcttatggaatgatggccataagaacatttaaaattaacaaataatcttaaatttagttaaaagctatttcccctagaatctttctctactcttcacttatctaaaggatgcactttctaactaactagatggtgaatagtcg

SEQ ID NO: 83268 - DNA, 502 bp, Zea Mays
caaatatcctcccatttctaggatggtatgggaaggggttgtaaggtgcctgctaccttcaaatgactggccttgactctctggcaagtgtcgcattcagatatatacttcgcaatttccctcttcattctggtccactagtacaaggatctgaggtcatgatacatcttgttactgcctggatgcatggagaatttgaaaaggtgagcttcatccaatattttctttctgagctcggggttcttgggaacaaccaatcggtctccaaaccatagaatccctttgctgtcctgacggaagcatttgtatttatccaccttctgtttgatcatttccttaatgacttggacacccttgtcaccaatctgtgccatgactatttgctcatgtaaggtgggctccactgaaatataactcaaagcactagaggaaacgacttctaggttcagcttgcacaactcatcacatagggtggtgatttttgcatccataatcatacagt

SEQ ID NO: 83269 - DNA, 390 bp, Zea Mays
aaatactaggacaacttacaatccccttatgacatccatatatagtaactctccctctttgatctatccttatcactccaccttctcacctcattttacatcttgcacttgcataattagtggtgcaccacactagacctacacatggccacttctatatttgtttcccctcacctatgaagagtgtagtggatgaaggctctagctgcaagggcaggtcaacatggtgatgcttagtcgagcattctcatacatactttattggaccttggctcaactagacgttaatgctagtagccaagggctcaccttttacctatgtgcttattaagctaggtgaagtccatcctaagggtgatcaaggtgacatccacgatgtagatgtgctag

SEQ ID NO: 83270 - DNA, 286 bp, Zea Mays
ttgttttgaataatgcttcaggtaattgcacatcgatttgcctagatatacagaagcaaattattcaatgttgtgccatagaaactaaaaataaaattattaaagaacttggtgatgacaattatgcaattctagctgatgagtgaagtgaactatcacacaaaaaaccattagttgtttgcttgtgttatgttgataaactgggaaggccttgtgaacattttcttagtggtgtgcatgtacatgatactaattctttaacatttaagtaatcaattcaagattt

SEQ ID NO: 83271 - DNA, 366 bp, Zea Mays
ggcaatagcccttgccttcgtctggtaatgaagctcatgtacccgtcagaaaccttcggcgttagcgctctttccttggcttcaaagaacccagatgtaaacgctgagcctgacaatagcgttcgagttagctgatggagatagatctcaaacttcattaaaacttcacatatcatttcgtaaagggggaaccgaagccctgccttgaagaatctcttgaataccacaacttcatcttccttcggctctagaattatttcctctctagcaaagcgaaccagttcatcatcattttccccaaaattttctagtttcttcatcacaatcagatcttcagccttaattgtagacctcccaaattcaaca

SEQ ID NO: 83272 - DNA, 1313 bp, Zea Mays
agcgcgagcatattgcaccgtcttaagtcattgccaacttaagccgattgctccgttagcagggcatagtggtcaccccgagtttggtaagaatgtaggtcgatcatgaacaaactgagtattcttgaagccttttttattgatgacatatttccccttttacagagtacattgtcgtcctgatagcttttgaaatacagctagggataaaacttcctgaggtgttctatattccatgagttcccaatttccgtgccgtccatctgagtgagatgatatgatcccggccgagtgacttttgctactatgaatggtccttcccataggggtgacaacttgtgtcgtccctcccccgttagaatttggcggaggacgagatctcccactgcaaaggatcaacgtcgcatggccttatcgtggtaacgcctcagagtttgctggtaccgtgctgattgaattaccgtgttcagccgctcttcttcgagtacatcaacatcctctagcctagtagcctcggcttctgctatgctttcaaagatcaaccttggcgccccaaacttgaggtcagcaggtagtactgcctctgacccgtagaccatgaagaaaggagtatttccgtgcaaagctcgactaggttgagttcttaggctccaaacaacgtagggcaactcccttatccactttcctacaaactttttgtttttatcgaagactttcttcctgagtgcctccaatatcatcccgttagctcgttcaacctgcccgttggctcttgggtgtgccatcgaagcatacttgatctggatgctcttttgctcacagaaatcgaagaactctgagcttgtgaagttggatcctaggtcagtgatgatactgtttggtattccgaatctgaatattatgtcttgtatgaattccacggccttagctgaggttaaagaagcaatgggtttgaactctatccatttagtgaatttgtcgattgctaccagtacatgagtgtatcctccatgagctttcttgaaagatccaatcatatccagtccccagcatgcgaacggccaagttactggtatggtctgcagttgcagtgctggtaaatgttgttgcttcgacaagtactggcaagcttcgcacctctgaactaactcggctgcatcacttttcgctgttggccaatagaatcccgacctgaagaccttcccgactagtgtcttggatgctgcgtgtattccacattgcccagcatggacctcatctagaagttgcttcccagtagatgagagaatgcatttcatgagtacgcacgatgc

SEQ ID NO: 83273 - DNA, 947 bp, Zea Mays
gcatggtggcgaacccgcaggtggggccatacctgcggtttgctccatgttggtcctgcacaggaactccgcgcctacagcctccatgccaaatggtttgcttcgggacgcttcaccaccgctgtaaagacaaaaaccagaagcgagcttttcttttcttgggtttgcatatttgaaatgtgggatgcatgctagtagactgggtttatggggtcggaccccactagactgtactttgcataagtgcttcttgttgtagagaccgacttcctcctcttttctcctctactaatcccctggaacatcggtagcttcgattgtctaaggctaccatcgaactagaggccgatcttgaatgtggtccaagattgatgtaaacccttaaaagatggtttaaattattggctagttcttggtggaataaaactagagtttattttaagtctatgtttaatttgcaagacatgttccctataaaaaagagagataaaagttgaaattatgcatcatgccgaaggttttgactgtgcatttaacttgtattagaaatactctttaaaatatatttgaattcaggtggtttgtgatgaaagactatatgttactttctttccaaaccaagtaagtagtgaatgctaatatataataaactatatgattaaactacatccctaaaataatgatttgcacctatgatggttttgaattagaaccttgtttgaattcgaatccaaattgaacttgggaaatggaaaatgaatgaaaaaggaaaagaagaactcactagtgctgggctaaattccttgttgccaacccattactactcctatcgcctggtccttgggcagttctggcccagcccaatgggctcggattcggtccactctcgtttaccatcgacctgcccactcgtgtggcgcctctgtcgggcgggacctgcatgtcag

SEQ ID NO: 83274 - DNA, 603 bp, Zea Mays
gaaggtttcaggccctgacggaactagctcgccttctccatctcattataagccacatgagggacaaagcggaccatcttgttgaagcccacttcatactctgtgacagacttcttctcctgcttgtaggactgcaaatcaatcttcattttctccaggaaggtgaccgggtagaatctcctttcaaactgcctgatgaagacatcccaagataagactcctggtgaggaggagtgcgctgcctgcacgcctctccaccaaatttgagcctctcccttcagcagctgtgtgccaaagcgaacccgatctccatacacaatctcgaagacattcatcttatcctccacgtaagttagccaatctgctgcctcgaccggagtaccactgccatcaaaagaatccaacttcatgcccatccactgcatcagagaaagaccactgactggaagaggcacctcggccccaccacctggagcagcacccgcagggtcagcgcccccgggcactcctccaccaccagcaccctgagcagcacccacaggggcaacaggaatagcttgcctcagaatggccaactcctgctgcatggcctgcatcgcggct

SEQ ID NO: 83275 - DNA, 693 bp, Zea Mays
caagggtctcgctggaaagcgacttgtaatattttttggtcttgtaaggtacttttgggaagtattaacataacagtgacagaacttatctgtatgctatttgcctttgctgtgtgtgtttgttaccaacttctccttggtacctggcccccctagtatgtaggctcgacatgtcgaggctggatgccagtatacttaagaaaaattcgtgacctgacccccaggaggtaatctcgactgggacccagacctacacacagccttggctaggaagctttagtagtgcgcccataagacccccactaactagtatcttttatcctttgatacacgcaataggacctgcaggatttagaccaggaagccaatccgtgtgtccggaccccctagatcacagctccaaatactaggacacacgtcgcctagtggtggagcgcgtaggcttagggtatgggaccaggctaagcgaccacacagctctggaccaccccaggggacgggtgtccgttctctagaaccggaccctcggttgacggacccacaggactatagttccgaatactagggtacccgtcataggatggtggagtgtgcaggcttagggtatgtaaccaagctaagcggctacacggctccggaccaccctagaagtcaagtacccgttctccaggactggcccccaggctgccggac

SEQ ID NO: 83276 - DNA, 400 bp, Zea Mays
gtgcttaccacgtgagtcgtgcaagagatgtataacagcagatcttcggccggttgactcggtgtggctcggcgcggcggctttagcactggtggtgttgttaggaatttcttcagtgcgtctagagctttctgagcctctaaagtccactggaacttgtccaccttcttgagtaacttgtagaacagtaggcctttttctcccagccttgatatgaacctgcttagggctaccatgcaatccagtaagcctttgtactttcttctgtgatcgtggtgcctccattctcatgatagcgtcgatcttttctggattagcctcaattccccggtggctgacaataagcccaagcaattttcccgctggtactccaaagacacgcttttcaggattaagcttc

SEQ ID NO: 83277 - DNA, 627 bp, Zea Mays
tcactctttggatcatcttcatcatatcggtaccaacagtccaacgcggtgtgattcgatctgccacagatctggcagattgttttgttgttgctggagttgctttgtcctaaccttccaaaactaccacgacgaccattgccttggttctgtccacgtccaggatttcgacctccacgggaaccacttctgtcgtggccacacccgcgcatagcgacattggctgacgaaaagccatcttcatctctacgcaacatatcctggcgatgttcatatccatgtgcttgggaatataggtcatttacagagattgcatccatcctcgatatgacagatgacaccaatggagtatatgtcgagtctagtgcattgagaatataggacacaatctcttcatcttcaagtacttttccagccgaggcaagttcatcagcaaacttcttcatcttgctgaagtactgtgacattgtcatcgaacctttctttgtgtttctcagcgcatatctcaagtttgcaactttggccttggattgcgcagcaaacgactcgctgagagccttccatgcttcagtcgaggtctctacggtagcaacatgtccgagagttcccttcgtaagcgagttcaga

SEQ ID NO: 83278 - DNA, 985 bp, Zea Mays
ttaagccacactcaatatcaacgggaacgccctaaccgccgtcagatcaggatcctacggttccgcgcactactacagtaggaccccaatccgcaccacacgtcacagatccgaccgcacgtattcaatgcaacgaaggggtatacggctctgaatccagtccactcaaccttgatctgatggtcgcaaactcatcttccacctaagacactaataccccgccgccggcgcgcgagtgagtcgcgacgacgccattaccgaccatcgcaagctcgcctagcgacattaaccccatgacgctgacataggtatccacggaattcacatttcataacagagagacgcaacattctgtgcagagacaaagacgaggcaggcgcgcataatctgaaagtctgccccgcgatgggagctctgggaatctctgacgccgagacaccaagatgctctcgtcaccacactagaaggtcacgccacgcctagactccccatcggccacccgaaccgagtgcggtttggtggatacggagatttgcgcactcgatctctctccctatttctcagctcatcggcgtctgcacgcatactactgtcacggggcacatcgacatgacgcgcaggagcatccccatccgacaacgcggcaagcttattggcccgccaacaaggccaaaacacgtggcaatggcaccctctctctcctctcccttgaccatggtggcacttggtgactgcacttcgcgacatggctatatgggaatagatgcaagaggggatagcgacgcctgatacttaaacctgcgagagcaccacaacggcccgagaagaggggaaatccggtcagtggagcgcgcgatgcgcatggcatctgttataggtaaccaatgaagaagaaggagttgatcgaggggcccacggttcagtgacacgtccgagcatgcgagagcacgtaggctacggctgacgcggggaacgtgggctgacc

SEQ ID NO: 83279 - DNA, 639 bp, Zea Mays
aagcttcggcataccccattcctttagcgttgggaatattctgttggctaagtattcttgaactaaatccctagtcccaatatgtttagaaacaactctaaactcggccacagcatctgagcatagtgcccccggcgtcatgttgcactgaggcctagtcagcccaaaggttagctccaacgggctctaaactagcttctcctttttctcatcaatcttaacataaaaccattcagatttccaaccggtcggccacttagtgcggtaactgaccaccggcatcttcatgtctttgcggtatgcaaaattataatagccaaaattctcgtgcaagccatcttctctagccttcgtctgataatgaagttcgtgtattcggcagaaggcttcggcgagcgactccaccccttggcttcggagagcccagatatacacggtgagcctaacgatgtcattaggggtcagctgatgaagataaatctcaaaattttccaaaacatctgcaatcatcccgtgcaaaggaaatctcaaccctgccttgaagaagctcttaaaaactaccacttcatcactttctggtttcgtgatagtatcttccccgccaaagcgaatcaaccccttctcagctcctctgaagta

SEQ ID NO: 83280 - DNA, 339 bp, Zea Mays
agaaagaaatagctcagtatgtggctcgatgtgacatctgccaacggacgaaggccgaacaccaaaaacctgctggcctattacaacccctcccgatacctgaatggaagtgggaagaaacaggcatggacttcataaccggactgccccggacgcagaaagggaatgactccatctgggtaataatagaccgcctcaccaaggtagcccatttcattccagtaaaaactacctttggaggagccacccttgcctggatttacctcaaggagatagtaagactccacggcatcccaaggaagatagtgtcagacaggggaacccagttcacatccaaat

SEQ ID NO: 83281 - DNA, 1039 bp, Zea Mays
ttgtgctacccctttttctaagagattaatgtttgatgtattggtttgtgtgtgtgtattgctagacatggccgaggtcgatgatccaagaaccctagttccagaagaagagcaggagcccaacctctcggaagtagacccttcaagccacaagaattttgacgaaggcaagttcattttacccatgatgcataaatcaccaatgtttttcaccaaagcctaggtcaggcaaaagggaaagggatctatgcatatgtgagaagagttttggcatgcatcaagtatagactatgttttcaataaaagatggggaacaagggattgtttttggaagtaaaatgttttgtaaaacctgagtatgatgaagggttatcaccctcatcaacttgagcgagatgatcatgactccgtggttttgggagggccttgaacagttggcttagccgggttaggcgtgagcatgaaggattgtcctgtctcgtataaggcccgctttgtcatttttcactgcctatactctcatcaagtacacccactcgagactatgtgggcagtcactcgatccgatcttgcatgggctacatcctagagttatcgatggttggggagcaccgaaaggaaaagaaaggggaacattgtcgtcctggtttgggtgagatggtggccttgttcctttcagtataaccattaaggtaaagccatgcatgggagaaaaaaagttttggtactcggatcccacgatagtgagatcacaaaaaccatactagtgggtaaagtgtacacctctacgtagagtagggatggcaaaggggaattctccgttaaggaatagctccccatccccgtccccacgacgaaaagatttccccataacgatccccacgaacgcttgtgggggcgtttcttccccatccccgttccctgcaggtacaaatccccgatgaggatccccgtgcccacttaaattataattaggatgtacatcctttgttattcatgaaaaacattatcacttatacacattgtcaattatgtacat

SEQ ID NO: 83282 - DNA, 455 bp, Zea Mays
ctgctacctgtgcaaagctagctgacagctgccgctggcagttacaatcaactcaaataattacaagcaagctcgatcgatggccttttcatcgatctaggtagatgcgatgcatgcaacaatagcatagagagtagtgttgtttgggagtgcagaaagcaagcaagctaaggccgtcgttgcattgcatcagaaataaataaagctagaggcagcttgccttgcatgcccaagaagtatacagtggttttgtgtaatggaaggtgactggattttatcattggatgatatggaaagacacgtacgtacggtggttttgttcacattttggttggcatgcgtgcgtgggctcgcccgccgcgccttttcttttcctctgcctcttgtccctactctcttgcaatcactgtcgatctccctccctctcgatctcctctctccaaagcaaattaaaa

SEQ ID NO: 83283 - DNA, 351 bp, Zea Mays
cagtcatcatgtcgtcatcaaggttctgatttcaagtgagtttatgcagacagactccctaggttgttatatatctttgttcatcattgggtaagaagaacttgtttcatgtttgttgatgcgagaggtattatgggactgctacatataactgccaatgctttaagaaatgcaagtgagtggttgtctcacagagcaatcgatgtaactggaaaataacatgaagagaagcactaaagggtgtttgcctttgtgttgaatggtatattcggaaaagaacatgaagagaagcaaacgacaaagagaattgtgaacggatgcaagtgcaccgaactcaaagtatactaccag

SEQ ID NO: 83284 - DNA, 756 bp, Zea Mays
cgaaaagtacaagatgttgcacatcctaataagtaataactaatataaagatgatggttgttatcagttaccacagtagctcacaacaaaagtaactttgtaaactacagagagcctagcaatcaagaaatgtggtagagaagttagtgattactaaaacagtaaagtggcatgagaatcaaattaacatcaattaacaaggactatctcccttcaccactccatatgtatcatggagtaaatcaatgttgtgatggcacatgacacatttcaggttggatggcctaataaataagcaacactatgagtaaacaaacaccttgactgcagtaatgacatccaccaatacaggactgttgtgcatatgtgttatatttgcagcaaacacaatatgacgaaaaaacaatcaacagttggatacccgtgtctgcttctaggtatacttcagaggttgaggtgtcctaaaaccatttccatagaaactgaaagaagtgtttcctcctaaagtttagaaactgaaaaaggtgtttcctcatttgcagaattgtttccaactcaaattttcacagaactgaatagtaatagagatattgagacaagataaattagccacttccagttcaacacagctttgacaaagtcaaaaagccaacaataaaaccaacctaagaatgcctcataaaacaagtagcccaaatctttagctatgctaacaataaaaaagatcataagagtgctcataatacaagctaagta

SEQ ID NO: 83285 - DNA, 681 bp, Zea Mays
ggcaccgcgacggcatcgggtcgaaggcgagaaattcacgccgctccgaccaccaatggcgcccagagaggcgacgaacatccccgcacaaactcacatagctcgccgccacatctggaacccaaaccgaggctccattgccggagagtgtgaaggctgacgatggaggcacgcacccacccgccatgacctgcgtccaggatttaccccccaacaccccgcccaatggccaagcttttgggtaagatgatccgaggagcttgggaggggtccaaatttatacaccgaaccagccatcaatgggcgatttgttgcaattagtcggcggtgatctcggggatgaaacgagctccacggtgagtctgttacgcgagcgagcgaagacctgccagcacggccccactagtcagctacctagtcaaggcacggatcgctgtcgcacaaacgctgggtcgagattgggccatggcaggagggtagttgggccgcgccgaagggagatggtggcccaggttgacttcttactttttttctttttctttttcctttaaattttcttgttttcttttcttttcatttttgcttctcaaatctaaattcaaactcaagtgtgagattcatactttgagttaaatgctcacattcaattatcagtaggaatagattatttttaattatatg

SEQ ID NO: 83286 - DNA, 662 bp, Zea Mays
agaaggtctacccaatgagacgagcctacaccaatgggacaagacgggtcatcaccaaactacatatgggccttaggtacggcgtccgaaggtctctaacgaaagtcagacgacacctcgccacataccgtctcaggcgaaccaccaccagtagataggactagtcaatcccagttgaagggatctcagcatcagaatgtctacagtacccagaatatttgaaaagatgtaacggatacaccatactgggtgtatgcctacgcacgttggcaagtaaggcaggcccatgatgacaggaaagctacgctacttgctatcgtgccatgggattgacccacgggacccactgcatactactacgaagatgttagtagcagactcgctacagggacccatatgatgaatgagcgagacgatgtgccttaccagggctacgactacgcacgaccctacagatagcacaacacgaggtgcccaacgtcaagctagggcaatggaccaacctcataccaagtagagagcaagtcacccctataaggtcctacccttgaactataaaagggtgggccttctttcttataggcacacaagcacacttgttgtaacacactcatcgcaatactacgatcagcactacaatggagtagggtgcgaacccgaac

SEQ ID NO: 83287 - DNA, 456 bp, Zea Mays
attaactcttgcatcgttggagctaggggcggtggtggggggacttgctcgttttgcccacgatggggtctagccgccatctgaaaaataggaattttgccgctgttacttcaacccaagatttcaagtagtgacttcatagcatgaggagaataattacacaaaattatattgaaccaaacgaagataatcattcattcatcttgcattgttcatataggtttttccgagttacaacatattaggagatccaccctacatcctagttcaatagttggtgccaaaagctaagctcatgtggtattcccatcatcctaacatgtttgattctaacccatctaaccctaagtagcagggcaacactggccgcaggtgtagggggcactccagagtaggatgtgtccaaactggaagctagctcaacctccttgggatcctcctcctcctcgctgttcc

SEQ ID NO: 83288 - DNA, 273 bp, Zea Mays
aaaaacatgggaatctgtaccattaggtgaaggcctttttgtgttcatttctctgacgacatttggggtgatcgagtgctgatatattcactggtaatataatctgccaaggagatattgaatgccctcctcgcttgctctcatccatatatcctattgtctacattatgtactctaatttgctttgttgctcacgtctattttgctttctaagtggtgaggatggcgttggcatgcgtggtgagggtaccgtctctgcggtgggcgccgtgg

SEQ ID NO: 83289 - DNA, 328 bp, Zea Mays
gtttctgcgaaagaaactgcttcagctgctcctagcgagccagcgccgaagagaaaaagggtgaaagttctcacacaccggccacgttacattgaactagccacagtgcctgaattcggcagtgaaacatcttcggcccccgaagctaaggaatcaactccgctgccaggagccaaagagctggccgaagtgccaacaacaaaagaattggaggaaccaaagactctgttaccaaaaaccaaagagccggccgaagcaccatcgacagaaaagatggaagaagcaaaagcatcaactgagggagcgaaaatatcagaaattttaagtc

SEQ ID NO: 83290 - DNA, 726 bp, Zea Mays
cacgaatcactgtgccagtaacatctcccctctccggccgccaccgcgccatccccgattcacaagccaccgctcccggagcctataaattgagtgtgtcgtcggctctgcaaggtagtcaagcaaccaatacaccaactcgtgcctcgaattatccaccagagaaattcaatttgggatttcccccaaatcaaccaagaacaccgtgtagtgtgagctcaccgtggctagctcgttgcaggtccgttcatggcttccctgttctcgtttttacatctctatgtgttgtagatgcctagcagcctggccgattgaattagattaggctagatcaccgggaacaccacagggttgtcctcggcttgcgccgtcgccgtggacagagcgatttaggggtagaactctgaaattgatggaggggaaatgctgaataggagtcaaatttggtgtcagccgctcgggggcactgatagttgagttatccggccgatatgagctcaccggagtgcctgctccgccgtccacggtcgtggaccgagctctgtaaagaaatagaactagggggttgtttttgtagatgtcagcgactctaggaatagtgtcgagaccccgtttcaagttattcaaatcagcaggggcctttttgcaaggtcagcagcgcgggcgcgcgcgcgggcacattctgccttggctgggccggcatgggccagtttcggtccagaactg

SEQ ID NO: 83291 - DNA, 275 bp, Zea Mays
ttcagaggtcccagaattttcttccggaggtccatatttttgggaactaccagtcggtcttcgaaccataatattcccttactgtcctggcggaaacacttatgcttctcacttttctggttaagattttccttgatgatttgcactcccttatcgctgagttgggccataataatttggtctaacaaggttggttcgacggagatgtagttcaaggtaccagaaggaattacttcaattctcatcttgctcaactcgtcacatagggtgttgat

SEQ ID NO: 83292 - DNA, 1560 bp, Zea Mays
tgcatagttcgttcacatagctaactaattggttcattacaaagaaacattagaacaagcataatgatgacttggacataatgaaataaaatacataggttgagggaaccaaacataatggaacacagaacaaatagaggacaacatcatagaaaacgacataacttcacatgggttttacgccaattgctccacgccaagtccataagtgctcgatgagatcatgttgaagttggttgtatcatttgagactagtgatgttgtggtgggagcatagccactctgtacgaacttcagggattgtgatgagagatccacgtgcactccaattgcggcaaactcaacattacttgcacgtgggaccttgtcctcgacaaatatgttgtgtgttatgatacaagctgtcattctttctccaagatgattctgagcccaaccaaaagcaggatcccgaagaacaacacaacgtgcatgtaaaaccccaaaagctcgctccacatctttcctgcaactctcttgcatttaagtgaaatagactttcttctcttcccatgggtgcctaattgccttaacgaatattagccaatctggatagataccatcaacaagatcataacccatgttataagaggtgtcgtttaaggtgtactccaccagtggcataatgcccctccataaaggattgaagaccgaggatatttggagaatgttaatatcgttgttggtaccatacatcttaaagaaagcatgtcggatccacagatcgtaaaaggctatagcctctaggatcatactaggactcaagttcctacaacaaaactgcccccgccaaactatcaggcaattcctccattcccagtgcatgcaattaattgatcctagcatgcctaggaatccacgtgcctcactttgatgaagtatacgagcaatatcgttagcatttgagatcctaaggtaccatgcactaaaggctattatgagtgcacgataaatcgaatgaggcattctctagcagtgaacctgcctatctggatgtactcgtccactacatatgatggtagaccataagcaaggattcacaatgtggcacatttttttggaaaggaccgagattggctaaaccagtagcatcaactcgctaggtgaagtagtcatctaccagttgaattgattgcataatctgcaagaacatgtgacaacgtatcctaaacctacgtacaaataaaatgtattaggatcaatactaaaagggtgtgtgtgaatataaatatttagttcaaattattaccttcgtcggaaaatgttggatggatagacaaggttgggcctgaagaagtgcctaaggattagccgctctccagcaccgtgatcccttgcaatgagggtgctagggatgtagttggaacgccgtcgagaagaggcatggtcgccctcaagtcgtttagtatctaccataaatttgtatgtgtacatatcagcgcatgtgttttacaattaggttataataatgttagttattatgtttagctttaaccgtaggcttcatttatctgttttcta

SEQ ID NO: 83293 - DNA, 443 bp, Zea Mays
ctgcccgctgcatcttgtattgcatcatcacttctctcccttgaaagcatgcgaaggcttctcaattgctcctctgaactctaattattgcgggacacaaagacgcactgtctttacaatatcttgtccttgatcagtgtcttggatggacaatcgtgctcgttgcagtcgcccaaaagtttatattcaccgcttcttgtagctcttggggatagttgcaacttgcatggatgattctcgacatcacgtttgagaaaatatactccagataccggcaaagagatcgtactgtagcacgcatcaaactaattcctattatgaacgttaaacaatcgcatacaacacaaaacagaaaataataataataaaggttaaaggtgtgtacattgggcattgacgactggccaggttgtgggcgataagccaaccccctgacactggca

SEQ ID NO: 83294 - DNA, 509 bp, Zea Mays
gtgtagtcattttatctggtaggctctttgatttttccttcgacactgtggcctttgaaggtccagccttatctgaatgagcaaaagtactcagagtaatggtcgtcggttcaccagctttatccttagaaacttttggtggtgcaggtggcgccatcttcgaaggtcttaaaacagcctcaagcacattagccattctcctacctttttaggcgttccaactagagcagttgtaatttgtggttgtgctggcgccttcggcaactcttgaaccttcggctaatctggcagttctgaatgaataggattagaggcattcactgtagttgccgggaggaccccttcaatttttttggcagtctctatttctgaagtccctatggcaggcagttgagtagccctttccaagaagtacgacttcggtcggtgggttaaaaccttcaccctcttttgctttggtgcagcagaacaagccccagcgcacttgaaagggaaataggcttacacct

SEQ ID NO: 83295 - DNA, 283 bp, Zea Mays
gacaatatggcaggaaagaaatgcaagaaaatttgattgcagattctcgagctaccagcagaccgtctcaaaaattaaacgtgaggtggcggcttggaagttggcagggactagacacttcacatctcccttatcttcttagttgctttcataattgtggtttgtttttatttttctttgtggccatggggctcatggcctatttgactggggtcttgttcttgttgttgatttaaaccatgttgccttgtcattttctttcttatcaatatattaggcaaat

SEQ ID NO: 83296 - DNA, 300 bp, Zea Mays
cggagcccaacagttcattaagcacacccaactcagggaaaggcccaatcgccccaaaagactagcccaatgggggaagggtggctctcccttttaaagtggcttcctactcccaagttaagcgaggtgggataattctgaggctcacacggtcaccctccgactacaattgggccaactaggccaattgcgtctttgccaacgggtaatagtggaggatgtcctcatcactcggggcggacaacggttcccccagacatcttctccagagacatacatcaaccctccgtcaagatcgac

SEQ ID NO: 83297 - DNA, 1171 bp, Zea Mays
gcaggaggagcaatggttgtagtggtgctagaagtgttgtgggggcggtctgaggggacacctagagttgtcgatggatgggctaggccacatggagatgcgaccgacctacatgaagatgtggctgatccattggttgtagagggacgaccaaggtgcatctgcttcccctccaccaccacatctctgctggtgacgacgaccaccatctaacccgcagccagtggcaccacttggattggagctgatacactggtggactaggcggtcgcgaggacgaacctcctaaagttttgctcagaggtgggggtagtgcgaaagaattcccactagatccaaagatgtacatggtcgtggcagtgttcaagtagatctaagccccctggtgagctcctcgagaagaccgttgccaaccttttggaacgagggaaatgggatagatcgtgtgatctaagatcgcaggtaatctttgtgctcgatgaggcccaatagaaggttgaggatgagcgtgcgatccgagatagactccccgatatcacgaagagggtccacaatgcccttcatttggcggtaatacttggttagggagagacccccctccatagacgaagattcgaaagctccacgattgataaggaactgctcctcaaaagcaacccaagataggcgcgtggcgccgccaagctcgcaaatgacgtcctacaactcgatggtgatagtggggcatgtggtgtcgatgaggacatggttgtcgagggcgtaacactgtatgttgataaggacgacgtaacactagcggatgtaaggcgaggaagccgaaccgagaactatagaaaccaaggactagatgttctgaactctgacctcctgagcttggtggttggtggtgatagtggccttgtacgctagggaggggcttgacttcctcgtagtcaggggaatggtcgatagggtagtcgataggtcctataagagggtagccctttgttaaaagtgtcaacgatgaatcactcatgctccaagagggtagccgcacgttcacgctctagggcagtagcacaacggtttggcgtctacaagagccatagagagcatggaggaagacacaacgatgtcgtggaaggtgaacatagcaatgttggctccgaggatgtggtggggcactatggac

SEQ ID NO: 83298 - DNA, 747 bp, Zea Mays
tcaagaacacaaacgtgaaattggttttataattagatatattgattaagagatatagttatacaaagtgcatataaacaatatacattttttttacagtggacaactaagcagtttgaaccaaacgactttcagttttttttttcacatcagacaactcacataagcttttccacagcagacaactcacaacatcttttccacggctcagctaaaccaaacgcaccttgaagacgacggtagatagcaaaggtgaaggtcatatgggtctatgatgatggatcaggagcggtgaaagacgagcatcgaggcttgactaaagaactagagaagttgggtgattagctatggtagatggcacctagggacaccgacagatgtgaagacatgttggaacgaatcattctatggtgatgtcggggattggtgggatacatgtccagggtgtggaggacgcatatagagtgtgctacctgtggtggtttagtgattaagccttagaaccaactagcgatgatttcacaggtttggccttaaaaccacccaacgacggtttacaaatttggcctcaaaactcagggtgtggttctagagggaaccagagatgacatttgcatcgaggtgaagcaaatatgtgatgggagtttgtctgtgagatcatcagattgggtgttggaccattatacaattggctaagtggtttagctctaaatatctagtgggggtgttgggaagataaaaaacctt

SEQ ID NO: 83299 - DNA, 474 bp, Zea Mays
agaggcgaagccctgccctccgacgtgttctaccacgtcattggcacaccagccgtccgcaacccagagggcctgcaaataaccaccaatgccgggggccttcgcattgtcaatctcatcatggctgaagactggagggaccctataaccctgttcttgcaaggatattaccatccaggtgatgtcaacgaggccaagcacctcaaacaccgaagttgggacttcacacttattgagggccagctttacaagaaagggatcagtcaacccatgctcaaatgtgtcaccgagactgaaggcctccagatcctacgcgaagtccacagcggcacttgcggctctcactcggggcctagggccctcactgccaaggtgatccgtcaaggtttctactgggccgctattatctacgccgcaaatcgagtcacgaggtcgtgcgaagcctgccagaagttctctccccgctcgggcaac

SEQ ID NO: 83300 - DNA, 785 bp, Zea Mays
gcagccggggatctcggagttccgttgcaacagactccgagtccacctccctctcctctgctaatgcgttactcccatcggtataagtcccctggcgctcctcctctcacccgggtgcgtaggccaaaacaacacatgccaccatgatccaagtcgccatggtggagagagaaatgatgccgccaccatcgatctcttccgtgggtaactccctgacctcagatggtgttcttggcgcgtcgtgggatgcctccgtgcgtgcgtgtgacctcggcaggcgaggatcgcagccgtgaggtaggtaatttcccgccggtgtagcaacgccacagcgatgtggatgtgtgccgtgacaaacctccgccacaccgccagctcaggtaataatcatgcctcagtatttgcctagctctccagttcacatcgccctggtcaaccgtgtgttgggagtcttggaccaccaggcgggacatcaccggggtaggctgcgccgctcggctctattacgctgctgctctggtggacgaaaggaagaagatcgcggtggactgttggatcaataatgggcggcccaaattaaaactgtgtacctcttcgtttcatttaatacggccgttggatctggatcatatggttttagggctggcgcagattgggcggatcggcttccgatccgaaccatcgacccctgatcctgcggttgatattacataccgattcgcttagggaacgatctaatctgggccactgatcttgaatcgggtggctcacatgtcatggtaccc

SEQ ID NO: 83301 - DNA, 1065 bp, Zea Mays
catttttctataattttctatggatttcctaagtctggtagaaaaagaaaaagagaaagcataaacagtaatgggctgaaactagcccaagttggcccacgtacaggtgaaagctcgctcgcgcacgcgcccacggtgttcattttgcacagaggtccctggtcatttgaaaaaaaccgtaaagaatcctctccactatttccctgtctcactgacatctgcactaaggcccctccctttctatttcttcgcaaggtgaggtccccgaccgtggatggcggagcagtggctccggcgagcccgtactggctggaacacacaacgattagcgctcaggtgtggctaacacctaattccacccctaacgaccataacccctcaaccaattaaggagttcgaactctaaatcgctttgtccacggtgatgacacaaattaagaacacaccgacgtgttctgggtcatgcagggcgatctagttcaattcaaagggtctatgagtactagagaacttgagggaggcttgaacatcaattaatgatgcatgagctaacctgttgaaggctggccacgacgcggtggttcacggtgtgcggaaaaccgattttgggagagaaagaaattggagctctctggtggcaaattggaggcaggatcgggtattttggcttcgtgatgacccaatggagctgatggcatgattaatttatagggcccgagggtggtggctcttgaatttggaatggcgcgctggcggccggagagagaggagagcactggcgcaagagatgcgtggctttcaccgtggccagaccaccagcgatgaccggacatgctaaggcaagtcactgcgacgtggtattgcgcttaggcacgtggcacccgatcggtaggcggccaactccggcgtggttatctggaccggtcgtaaggcacgggggtatggcggctagggcgaaacagtgtctcgagcacatcctcaacgcgatatttcttaccccgagcagttatctgcatttcaccgagcacgaatcgcaacgacgacgacgatcacggcgcgggatca

SEQ ID NO: 83302 - DNA, 548 bp, Zea Mays
gttgttatagaggacgatatatagctgtaaaaaattaaaaactgaactctgaatgagtaatagtgtggcgtacagcagcaagtactactgtcccgtaccagctaaactacaaaggccatggaacgatcttgcattgggaaagaaaaaggaagacggcgatcgagaggtccattccagataatatatcacggctattatattagctagaaagggccgggatgccctacccagatgacagttcactggaaattcttgcattggtatcatatcgatcgatctcctagtgggtcggagactcggagtcgtccaataagtagtggtggggttagtcaactgcctccgtcgtagccctctagctagacatgatgcatgattatgcagatgccaattaattaacaatcatccgttattattagcctatcatgcatatacgaatacgacacacgctgcttgcatcagcatctctgtcgccacagcctgctgcgccgtgtatatatataactcctcctacagcagggcagggccatgaaatatctcaccgcccgcgc

SEQ ID NO: 83303 - DNA, 406 bp, Zea Mays
gcaggtcagtcatatggagcagtcgtgcgtcgtgtggtctttgcacgtcatcacgagcctgcgtcactcatcagtgtgcgtaggtgtacacctggtattgtatatatattgcgcactacatgatattcgagtgactatagaaactctaacgctgaggtcctccatgaaaagggttttcccctttgaggcagcgggagtgcgtatggggccatacttgaggaggtgcggtcatgtcgatagtgtccactcgacgcgccctcgacctaccatttgcatgtctggtcacggcctagggtgacatgcattgtcctagtcgatgtggacattgcgctattggacttgggtttcctcctcacggatttgcttggtggggacctggtcaaccaatctgcctggtggacttgct

SEQ ID NO: 83304 - DNA, 766 bp, Zea Mays
gctggcatagacatggagtggctggggtgagctggccatggtggtcgaggctcgggtggcttggcgggcggtggtgcgtcgtgctcagggcaaagtccagagaactcggacttgggcgggactatgagtgtgcgggggagtatggccgaggccttggggctgctttataggcgcggagtgggcaagggcatgcggaggacttgaccgtgcattggggcgagtgcgcgcacgggttgggcgaacgccagcgtgccaacctaggttgaatacgtgtgcgcgtttcttctgcccgagttcaagcgcgtgtagtcgctcatccaagcctactcttgccttggtcagtgcacaaaacctcttctcctcactacaatctttcgattatgtgtgggggtcaaaggatttggcctactggttccaaagatatggagctcccaagtcgggtctgtctcccagcccgagctcgaggaaaatcttcggttttgtcatctctagggtctgaataccaatgccatcttcagctatgtggtagaggtattagtttagcacattttttaatgggaacttagggttctgagttagggattaaggtgaacgcgctcgggtttgggctggaggctgaaattcagaaatctgaatttcatatttctctagaaagcctccaattgaatggcctatttggggttattaaaaaattattttggccaaactcccttgctaacttttgtagcttaattagtgtgtttcaacttttataattggcccaagc

SEQ ID NO: 83305 - DNA, 333 bp, Zea Mays
cacgttcacgaccgccccgatagcctagagctccgcactccgcttgaactcgcgcgacaacgacactatctcgagcgcgtgagagcttctgggcctcatcctccgacacgatcttcacctcttctactgccttactgttatcttgggcctaagagaacatcttttggagctcttgctagaagggaactcaaacgacccaaagtgctagataaacaaagcgtaaaggtagaagaaaagccaacctctggccatgtcatgctcccttgaaagctttgaatttgccttctccagacgagcggagacctccctgacgatcgacccagcctcctcgac

SEQ ID NO: 83306 - DNA, 399 bp, Zea Mays
tgtcagctctgtcgagggctaggggagaaccatcagtgttcaaccccatacctttttagccaagcttcgacaccagctctctcaccaacttgtatgctggtcttcccttcccctcaggatgccttgactctgaggaggaagatggttcgagccctggcgtagacttctcccggcttcatgaccccgagtccatgttgtagttcctgttcgcatgcgacaaactgctctccgatggctcggacaactgcaacaccgatgaggagggtgatgacccaactcgatagtgcttccatgcaggtcatgaggagcacgacaaagggaaccagcttggcatgcctcaggagaatgacgtgtcacccccacactagggaagtaggagagcctggtgacgcccagact

SEQ ID NO: 83307 - DNA, 553 bp, Zea Mays
gttggatcgggttttggagccgagattctccgtgtaagacatcaccatcaatggcactcgttgtagccgtagcgcgggcgtcgttctcggttttggggagaagatgagcgaagggggaagacgggttttggacggttgatgggtagatcaacggtcctgagcgtgccactgcgtagatgaaacctgggccactcggtctagaatggacgctagagattacacgaagggtagcagttcgaccgcgtcgcagtgcgctatcggatcctgatccgaggggtagcatggtccaacgagttatgatctattgcgggccgttgatggtcgatccagtggccgcgatcacgtaatagttcgtttaagtgaagaccgatccttacgcttgattttagatcggacggttagcggagcataccagttcgtggcaggctagatctaatatgggcgctttgtcgccgatccgacagcccattgtggtcgacacctcttcgctgcgccagtttgcataagagaccctggaaaacctaggaatcaacccaccgtccatatgtggggc

SEQ ID NO: 83308 - DNA, 674 bp, Zea Mays
ctgctctggtactttttctgttactagctctctggtcaggtctgcaataattccaataggcacaacaagagtagcctctatacctgggggggttgttttcaccctttcactcagcttcggcacatcggccgtctcaatacgcctgggtcggcgtgtcaaaactttgatcttttttgacctcgtcacaccagtagatgccgaggtagcagctttccttttcctcccttgcttccgcgtgagatagcagtagtctgggtaaacaaacccgataagatcaaataccctgttcaacctctttctgcctcgagcatcgaaggcgactgtcatagcttcatcttcagccttcgagtaggctccgagcagctcatcactagttgcctctatagcatctagccagtcatcgtttggttcatcaaattggcttctgtatcgaaaggtatacttgagatagacaaagcctatttggttggagccagcggcagcctccttcggcatttcccatccacttgcaaggggccatactctgtaagcaatacgctcttggaccaagtctcttgtgccaatataggtgcacactatgttgaaagctgtctggcatgcttgcatgtcattcccaagtgcaatgagtggcctcctaatgccaaagcgagaccatatagggcattgaatgatcc

SEQ ID NO: 83309 - DNA, 506 bp, Zea Mays
aaataattatatcccaaattcagggtgttacagtaccaaagcctaaagttagaagtatgaactagatatatcaagattctttttcatagcctgtgggtggcattctttaggtttggcttggaatcttgcacatatgcatacagaagtcatacttaagcacacatgcatacgttgtcatggatagtccgcactagatcctcaaacggtatgtgatacactgttttgatggttgatctttcttgaagtattttttgagtgtatgaaatcataacttagcaaactagttagctcaattggttgtgatggtcgccaattactaaaacaaatgtggaaatggtttttaggcctatttcctttcgacttctatgtcgacccctgcctagattgatatatcacatgtaacaagaggtcacaaccatagaatagggtcaccccttcaatcaaagcgattatttaggatagactcaaactcggtcatcttgaccgagtgtcacatccgattttag

SEQ ID NO: 83310 - DNA, 721 bp, Zea Mays
ttcctcccctctgctaccctctcgcgcgagtccttgcacccgaaaccaaaaccgccaccgccagggccatgtccagggaaagagtgagagcgccgctgccgtcgaccgatcacaacaccatcgccgtgttcttggattactacctgggggattcaccttatcgtgtcgctcatgtgtgaccacttcgggaggacggaacccagtcgtacatcgctcaattcatcgccgaagttgcgtccccgccgcgtttccatcgtgcgccgtgattggcctcgtccatcgtccgtctcttgtgagtatgccctgcgttgcactcacttttgccctataatagcgtagcaccgtgttcacctcactccggtgacgcctccgccatgcttagcgctcgtgccgccacgccgagccagtgatggggaggatgctaggtcagccatagattcgatagtggacggttgagatcaggtgaccgcgtacctttttgcacggtcagatctgcgccattgccatgggatcagacgaatctgatcggacggatcggtgcagctacagggtagatgagatctgtgccatcgatttctgatccggtggtcatcgtcgtgtaccgattcacatgatgctaagtttaataggggtcgttgggtttggatcaaacggcctcgattctgtgataccccttcggtctgggattcttacaaaagaacccctgcccttctgggatatc

SEQ ID NO: 83311 - DNA, 450 bp, Zea Mays
gtcgccgccgcgtggtggctcttggccctcggcagcgctagggtttcatttttggggagagagcgagagaccgagagggtgagggtgaccatgagggtctgagggagagtagccgtgtgactgtgtgagttgtgggctgctcgatatggggttgggccggtcaactgtgcatgggtcgtgggattggggatgaatgtacaactcgtttggcttgcgagttactcacgagccagctcgagtttggctcgttaagaaccgagttaaattgttagctcagctcgtgactcattttcaatgagctaagtcaagtcgagcgagttaccgaatatcgagttttttgtcgagctctacttatggtatttgtgccactcctccatcgattggaaaaagcctttgccacgtaccatcggagtgtggtgcgtactgtagtggtgtttattatgcctccag

SEQ ID NO: 83312 - DNA, 386 bp, Zea Mays
tgtactcacacagtatccattgtgacgcattgggccatgctttggagttagcacattttcaaaaggggttaaaaatggagctagaagagaccttgggcaccatgtgttccatcgaattgtatggtatatattggtttggttgagttagggttaggtatatgattaacaagatgttgggcatcagattagcttgatgacactaaaccctcattgggttatctcttatggcatcaaatttgagtagcctttgctccaatggttgcctcagatgcaccatttgcgtattaggtttcactattcacaaaagggggttctagaggtcccacttaattgtgaggagcattggagtaatccgataaaggataactcgttgttgaatcttcttg

SEQ ID NO: 83313 - DNA, 603 bp, Zea Mays
ctgccccatatgttctttctttctttttttgcttttgctgctcgataacacagaaaagttggtagtatggaattcagtttgtttggatgaattgggatgagtgactgtgtgtcacgggctagctcatttgttgacaaaataaaatatctttcatgagccatgcgtgtttggatttagcgttgtagtggaccacattaatgtatccaccagaatttggtcccctttgtggggtttagataagaaacgagtgcctggtgagcaaaggtggtttggaagactatatatgttttcagaaacatgaataatgtaattaccgggattgcaagttgctaagtaagattgttagattgtctctataatagatcatgtatatgatagtgtactgttttacactatagacaatactatttacaggataatgttcaaaatatagagggtgagatagagagctgctagagccaaacttagacaatgacgctcagtttataacttgttggaattgtgcttgtgtctttatagtggcaacactagtaggtagggtcagatttaggtagagggtcaccaggatggtctccctaggcccctaaattagatggacccctc

SEQ ID NO: 83314 - DNA, 657 bp, Zea Mays
ggtctaagtcatgaattacctttattttatgaactcaaatttatccttttcttcaaccttttactttaaatgccacttggaacctaaactctaaattagatcaactctgccacatctttgagctccattgtgttccaaaggtcaacaataacttttctaaactctgaagttcccccacaaactaattcttccttggattctcagttcggctctttaatctaagtatgcacacttgaaagcccttcaaggttatgactttggtactttcaccttgatcttgtgaccctatccatttcttgagcttgtatcgatggtttcaagtctcgtcttcttatgttgcggtcttcaatatcacacaactcttcacagcttgatcagctttgatccttgcaagaagtctcttcttcactttagcttttggtacctcaatctttttgaccttctcccttgcttagtccctcaaatttctttcttgccttagtccttggtatgccaaactgactcgaagtcatgttcattgattaccaacttaatcaatgtccacccctcatcttcataaccttcttcaacaaagatcaacttccttagcatgacctatcttgagcttgactggctcttctacttaatgcaagtacttactttttcaccttagctttg

SEQ ID NO: 83315 - DNA, 318 bp, Zea Mays
ggtcattgaggcctctcataaaatagttcctctttttcaggtcagtattgacctggtcaattgcgtactgggacaaatgattgaatttattgagatactccttgcttgagtttcatgaattcttcttgcttcatatggagcactccttctggaatgtagtgctaacgaaatgccaatttaaattcgtcccaggtgacttgatgtccggcaggctgaatggccacataatttccccaccaggtactggcagggcctcttaactgctgagccgcaaataatggcttctgggtctccgtgcatcggatgagtccgaacttc

SEQ ID NO: 83316 - DNA, 537 bp, Zea Mays
gcggtggggacgcggtaggagattctaggacaacatggtcgtggggagggagagaggaagggatgaggggttatccaagtaatattatccattagatttgagtgagaaagggagaggagattatccaatgatctggatcattgattttgatggtgtgttaagtcttggtgcaatttgtttagtggatttagcagaggttcagtgtggaagtaatttggttgggtgcgttttgcacaatttaaactagtggattatatacagtggcgtagtgctcggtatggcgatatgtggcgctcgtcgtacctgaattcgacacctcagcacaacccgcctagttcgttttggcatctctgactctggtcagagtgtctcgagcggcaacatgtatggtgttgttcgccatggcactacacgtcgacgccatcccatgcgtgctgttggtccacagacgattaggcgattagcataggacaaatacagggtgcaagtcatggagggcaagttgggaggtggtggcggcgttgacgcttgccgcag

SEQ ID NO: 83317 - DNA, 828 bp, Zea Mays
gttgtggtagcttgcactccaatgggagaccgtggtgagcagcgagtggaggcgaactatcagctaggcgatgggctagcgccgacggggggtggatgattggacgttagagtagcgacggtgggtggacgacctagtgacaggctagcggtggacgcaacgctaggacgagcgcagagcagggtttgggcgttgtggttctgttgttggtgacttcctctattgtttttactcgacgtggggagtggtctgggatggtgggctagaccgtgtgggttagtggatggtatgacgtggtggaccggatgtttatctaatttggcctcatatacctgataattttttcgttttatagtatatacaaaaatagatataaagagttcaaaaaattgaggtggggccatggcctactattcccacattgtggatctgcccctggtgtcgacccacatgtacaccccacgacacaaattacgtcagtgacatgattggaaactcaagtcctctctaggatcagaggggattaagggaaaaaataaactaattttcctttcattcccatccaatctcgaaggagatttgagtttccaaactagcccttaattttgtttcatacgtgtgagtttccgagggcaacttattcacaacatttggattgaattccttcaaattggaattatattagcagactagggattactacatcattcgttctaaactataagatgatttagattttctatatatacaatatttttctatgtacttagatatacattaatgcaaatacatgtatcatatttagttaggggtaattgaacgaagaga

SEQ ID NO: 83318 - DNA, 403 bp, Zea Mays
gaagatttaggattcaaggttacttacattagcaaacgcattgccgagttgttgcagcaggcccaccagggagcgcctaacgttgtgtggcttcactgacaagtagaaaccctttaatgaagtgataacgtgtagaagcttcccgttgcaaaccttcaactgggcacataatggaaaactcctttattacatgtatgcccatacccacacacatcaaattgaatagctactacaccaatgcgaacgaactccaattttgctagcgcatccaaatgtgtggttgaatttcacttagcaagctgtgaaccagacaactacatggtacccccaattttatcgtctgtattcactgtgtgcattaaacacatatttcctgcaccatgttaaatccacagaatgcaaa

SEQ ID NO: 83319 - DNA, 356 bp, Zea Mays
ccttatgctaagtcattgattcagatgcacaacatcgacgccatgcatcaagagagtaactttttctaagccctcatatatacatgcatggatttctcggataaaacgaaagacaatgacaaggcacgcatggacttagccgtgatatgtgattgtccaacccatgtgcttagagaaaacataggcaaaccaaaagctgactattgtctgaaacctaagcaatgggaagaagtgatgaagtggatgaaggatctaaaattccttgatggttgtggtgctggttttagaagatctatgaatttgaagacaatgaagatgaagggactgaagagccctgacttccacataattatgga

SEQ ID NO: 83320 - DNA, 662 bp, Zea Mays
agacgacaccggctagtgcgtgcggggctgctgagatagagacccggccggccagtccgtccggccgagggccgatgccgatcgatctggggctgtcagctttgcggggcctagctagctagagctttatccgcagcagcaggccggcttaaaaggaacgggttgacaattccctggctgtgatcatgccgccgcctgactggctggctggcttctgcccgatctcgaagcgttgctttgctgtgctggactgctagctggtgctggaagatggaggatggggactggagatggagagagaggcgtgtcaatgaagtccacccagtctatagctagctaggcccggccggaagatggcctgactgctgtcgtgtcgacctttttttttgccccaagcgatcatcggagagggtacggtggaggaggagtgtacgtagcagcttctgttcgttgccaaacctgggggcgtagaccagatcagcggctaaacggtgggctctgtgtaccagagatgagaacgagagatggtcgtcgtcctgaagcccttttccagggaaggagtcggagaggtctaatttaagcgtcctattcgctcgctcgtacctagtcctagctagcttggaactccatcgtgtgtgcatgtacgaccgtgtcacactgcg

SEQ ID NO: 83321 - DNA, 302 bp, Zea Mays
ggccgatggagtgccaggatgccagggcatcccaaattctcctcgagtagcagcaaccaacaataatgtgatgagatgtctcaaggtgccgcctgcagagtggacaagaaggactatgcaccatccacgtgttgtgaacctatcagaggtccaaacctagttgcggatgataagccaagcgaagagttttcatttagatgacccccatggcttccaaataagggcattgagattgaaacaagtgtgacccttgaattgaatccgataagcagtggccgcaccagaggcgttgtagatccagt

SEQ ID NO: 83322 - DNA, 456 bp, Zea Mays
gtgcagtcagggccatccgattgtcaaccgagggtcccgattagatcgagcccacgcccgaatcggtatgtgatgcagtgcgttggattgggaatcaacggctagggttttataacgcccagatctagtccctaccctcagatctctaatcaacggtctctgacgaacgcgcccgaatcagtagctggtttccaatctgagccgcacatccaacaggtaacggcggctacagcgtcttctaccccagactatggccgacgggacgaccagggcccccccacggcggtgcgccatcgccgggaaccacgtccgagagccctgcacacccaagctctaatcgaattggctctacgcgaagagggaaggatggggaatgagctgccgtgctatgcaccccaaatctggtgccgaagagatcaggtcgcgtcgctcgacggacccgcagcgacggtatcc

SEQ ID NO: 83323 - DNA, 405 bp, Zea Mays
ggtaagaaagattatggcaatgagaagactttatccaaaatgtttaagtcctgattcatctcgagattcgttttggctgttatatccttccttgtcgatgttgatcttttcttctccggtcttggtctcattggtttgaggttagtgtatatcatcagggttggggagtgtggttaagatagatctggatgagatagactacataatgtaggtcaagttgttgggtatggccgagttgatctaagtcaccaatttaggctcgagtgaactaggagtatggccttatcttttgtacccgcattaagtaacttactcttgattagatcatcatagtttagataaaatctagattaggttgtgtggggggacagatatcccccgggtccactagaaggataaaagacc

SEQ ID NO: 83324 - DNA, 534 bp, Zea Mays
ctcatcatggcctacttgggggcatacacgctaattacattcaacactaaatcactaacgataagtttgactaagataacattatcttcttgccttctgacacccattacaccgttcttgagactcttgtcaattaaaactcctaatatatatttatttgtagctattcttctgtaccaaagtttaaagtcggtattattcgtctactttgtcttccgatccttctatttatctcttggatgtataggatatttacatgtcttatagtcattatctcaaccaatttccttaactattttttacccttcacacccatcgatgatacgaagatttttgtgcataatttttactacacttgggcgttgattagtatagtatcactaaggaagtagtgatgtgatccttactcacttgacgtcgtgccgagatcgcaacacaacacgtcatcaagggagtgttgatctggctcttcttcatttagcaccatacatgggttcccatggttatgcctcaatggattcttttccgggtttt

SEQ ID NO: 83325 - DNA, 620 bp, Zea Mays
ccaacatgttggatgttgtgctagagactacaaaggccttgagccctgctcctacaaataaaattgttgaagctgccaaagcgcaaaccgaagccgaatctgggcaagcagaagccgaagctacgaaaactcaggctgaggccgaagctgggccttcagcgcccgccgcggtgaagcctgccgcgcctaaggaaaaaacggtagggtagattgcacctgaaaagatcgagactcctgctcccgaagctctgatcgaaaatgttgactacatcattcgacacgcttcggggaagaaattgttcgaagaagaaattctggaagccagacactatgcgcaaaagttgaaatatccgaagggagctttagtgtttaatggcactaacgatgacaacttcttgtactatctcccggacaataaagaaatatatgtttgccgggagataggtaaaagcatgggattcccgaagctggaagatggcctttcaattttttcgaaggatgatcttgccaacagcctagcatacaacagtataaaggtatagaagttaactttgaatttgagaatgaagtattttatttgccatgctcaattctttcctcctctttgcagggcttaattc

SEQ ID NO: 83326 - DNA, 658 bp, Zea Mays
gtgtgttaactaaattaagttgagaaatggttaagaaaaacttattaatctgctcccacccatgtttggagttgcaatgtctaaaatggtttgctaagacttatactgtgattagccaactcatgttaagtaagagtcgattttgttaagtgaatgttatatatatgttgtgtctcggatttcgataataataggctagtcgacgagtatgttgtatagcggcctaggttgttgctctggttaatcaacttgttagatgggtttgggtaagctcgtagtcacgatgaattacttgttgtagtctgaatgcgtatggttatggtcgcggatgaaaagtattagtgctcatgtgatgtctaagttaaaatgcaaattattgggtgaaaagcgcttcgatattgattatcgtggagaatgcgttgttaattgagtatggtacttctagtgctcgaaatgacacagataaacattagtaagtctacttgttagtcctcatttgattaatttaactctaacaaatggtaaagtgttagaatagttcaagtctctaaaacgaggaaattcttgaagtaaatgggggctaaaaactattagttgctgttttggactacacgcagtgatttcctcgtgttgtatgtttgatgaactaaatcatgtt

SEQ ID NO: 83327 - DNA, 511 bp, Zea Mays
gtggtgaagagctcgctgtagctggagtcgtggctggagtgtggggtggcgaagagctcgttgtagccagagctggagagcatggcgctggagtcggtggagacttgggggctgggtagacctactcggagaagagttggctactcccccagctccctcaaagtggacgtactcgatggtgaagtcgtcgtacgtcggagtcgtgccgtcgtccaccgccttgtcccatgcccaccatcgccctttatcaaacactacatcgcgcgccgtgcgcacacgctgtgttcctaggtcaagaatgcggtaggccttcgagccttcctcgtagccaatgaacacccctgggtgctcctgtcgtcgagcttgccgatgtggccaagctccttggtgaacgcgaggcaaccgaaaacccataggtgagaaaccgtcggcttgcgcccatgccaagcctcatacggtgtcatcccgttgagtgccttggtgggcgagcggttgagaatgtagatcactg

SEQ ID NO: 83328 - DNA, 434 bp, Zea Mays
gtctcgtgtgatcgtgtcacaggtgtcgatcgaagccagcaagagtcaagcgagaaacttgttaattccctggacctgcagctgcaaccgaccttgaactccgtttggccacccatgccgtgtgatcagctcacatgcccacaaacacaggatcgcggaaacggagccagcggcgctgaaactatctcccgccttgtaaacgactagtatgtaaagaactgttttgcactgctgtttacaaattaaagtttgaaatagggagtagtataaggactttgatggagaaactctctcatttgatcacggatcgagagcagtcctcagcttgtgcaggtgcagccatccatcagtgtgtgtttgccggtcaagagcagcagagtcacggccactgcgatgtatttctcctgttggaccatctgatgtgtgtacaactg

SEQ ID NO: 83329 - DNA, 858 bp, Zea Mays
gcaattctgaaaactggattcagaaaagtatggaaccagtgaaatgcagtcaatttgagagcaccaaatctaagaatctataccaaattaatccatgaaccctatagtaaacttaaagcctgttgtttggggaacaaatttcattaatggaggttaccctgttcttagcaagaatcaagagaatgtgagggtggaaggggtcagtttagaagaacattgaagatccagtgcactgaaaatatctaaaacaaagatctgggcactgttgaatcggatgtgtttggatgaattggtggagggatcgatcgcgggggggataacttcagacgtggcactatcgcgcgtacttagccgggcgtggccggagatattccaccggtggtcgccgtggctcagtcatttccgcgacggtgtcacccatgcatcacttctccctcactatgcctcttctttacgtggtgatcatgcgtgaacgatgtaatccgcggccatagattgttagccggacccccgtgcctttaaatagctccaccacccatggcgaggcactcaccacctcaccagtgaactcggttgaagcccaaattcgcgaaatcctttccgcctcttcccaaattagcggtgcacgatgaatcagtagcactttgcgaccgtgtaaccccaacttcaccccccaatttcaccagagcccgtcgtggcatcattttcccccttctcagtccccggcaagtggaaatcctccgcgatccgtggccagccgatcccaggtctgcttctgctcttcttaatcatgttttagcacccatacatgctcgtgatactcgtcggctccaccctatatgctcgaccaagctcaac

SEQ ID NO: 83330 - DNA, 1567 bp, Zea Mays
aaaatgcacaacaaagtttacacagcacataaaaaacatttcatatttcagtgagacaacatctacagaaaacagaataaatttccatttataatgtcataagcagtttaaactagttttttttccaaatgaacagtgtaactcttttcaatggtcgatagttactaacttggcaacaatccaatcatactattgcagctgtataccaacccaggatagacagatggtaccatgattcgtatctacaaacacaactaaacatgctcactgctcacatgaatatatgtgtattaattgatcagtatataagtcacttgcgttgcaacatagactaagaaactctacttgataaccggtgtaacataggctaaggcctaaacagcaaacactgagttgaacctcctggaatggcaaagattttgagtcagattgcatttagctaaacaaagctcaaaatgtgaagatcctcaagtcaaagaatacatgcaattgatagatacagatctagtggaactagcagacagattggtatcacttgtttagagtaagcatagggatctgatacttacaatagcaccatttggggtcaagtaagcagtatcattcttggcatctgggacaagatcctcctcgtcatctgaatcttcaattctatcaaatgcactgatagtggggacagaggatttgggtgtagtcggtctaacaataggtccaactcttttagtcgaacctggagaaacaactggcctacctgaaagataaatgaaaaagacaaacattagcaggataactggttccatgttacagagccatgctaagtgctagaaaccatgctttcatgaaggatcttccaagtcctaaataatcctgttttttttgtgtgtgtgtgtggttgctgttgttgagaaatccctaagtagccactggtcagtgcttacattacatacatgatgaggataaactacatacacctagtaagtaggcgaggcgaccaacttgaatcgcaacttaacttggaccggcaattatttctccagaacaaagcaagcaacactgaacaaaatcaaactatcgtgcacattgtgtgatctcatttaccaataggaagttgatggtcaacttaagcagaacgcatcagcgcgccgatcacatgacacgtgactatgaggtggtgcagctaggagccaaaaaacatgacgaatcgaatcgaaacagtaaaaggagcgggaggcctacaaccctctcggccggtgtggagcggcgggaggcccggcgggatgggcagggtgcggcgatcatgatcccagtgcggcggagggtcctcttcgccgtcctccagttcgtcgccttcggggaggaggcggttgcggcggcgctgctggtcgcgggcgaaacggagaagctggtcgagggtcttgcggtgcatgtagtaggcggaggcggcggcgaaggaggcgccgacgagcgcggcgatggcgaggtggagagcgtagggggagtccatcgccgccggagcgccgccgccaacctgggttctctcctttgggctcgagctggctgcgggcct

SEQ ID NO: 83331 - DNA, 734 bp, Zea Mays
aaatatcaaataaattaaacttcttattttttataatttaatctaattcatgcgtaatacgaataatcgaacaagtcctcaccatctatgcttccggacgtattccatgccaaaaaaaaaatcgacctccagccaagacgtcggttactcttactcggtttcacaagccagaacgtcaacaaatgttcaggcctcctctattttacagaaaattcatgggagaaatggaggatttcctttcctataggattgaacttgaactgcaggaaatataacggaaacattcctacacggctgaaattcatcaggtattaatttttttggttttcctgacacaccatcgctttttctaaacactacgtggagttgacattgtgccgtgaagacgttgcttatatatgtttccatgatttgccatgcactcatgctcgatcgagtcaggtagaaggaaagcccatcatgcgtttatcgagtaccattacaggtgaggagtgccaattaacctttgacgacggcttatctacttggattgttacaaaaaaggcaactcgatctttacaccaaagcaaagcttataacttgtttcccggtcgtcatactatcgcgtggtacaataatctagtgctaactttggattctttaaagcaagccgtttgtgtcggtacactgcaccaaaagaactcgatggggaagcttgagctaaccataaaagaatacatcagcggtcttgtatt

SEQ ID NO: 83332 - DNA, 379 bp, Zea Mays
tcgggaagcatgtaaccattatgactttgtgatcgtcaaaatagtggcacaacattcgtgcggtgaggagcactgcatatagtaacttctggacctgagggtatctgatcttagagggctcgaggacttcactgatgaagtatacgagatactggacttgatacacatgcccttcttctgcccgtggtgcttaccacgtgagttgtgcatgagatgtatagcagtaggtcttcaaccagtcgatcgacaatagctcggttgggtggcttgagaactggtggtgtgataagaatttattgagtgcctctagtgcttcctgagcttcgggagtccactggaatctgtccaccttcttgagcaatttgtacaatgccatttc

SEQ ID NO: 83333 - DNA, 575 bp, Zea Mays
aacgaacccgcctcaacgtggctgctgccgtgcccatccttctcggcgtaattaagctctcctgtaggttcaccgtcgttcatctgccacagatcgactagtcggaggggtgaaattggggaaccgtgggtctgggccgtggaccagccatggcgcgccgccgtgtgaatcctgggtggtcctcgccgttggtgttgggtgggtagaagaagcctctgccgttagatctgaatgcacggttgagatctgaacccgcgtatcctttcgtcgtgatcgatctggtccgttgaaaccggattcgtcggctaggtttgggtaccggttcgatgtaatatagagctaatcttctccctcttcggcctgtcaatttagcaattaagccctgcagaaaatagaaaccaacccgccatccacctccactgcgctctgtgtcttagaattattaccctgagccccttgggtctctctggatttgaggcccagtccagagcctacttaaactgtataaatgaattagaaattgaatatttaatatgaaaataaatgctaggaattgtataattcatagaaaattc

SEQ ID NO: 83334 - DNA, 662 bp, Zea Mays
acacctctcatgtgactaagtctgaaaaccagtgaacagggctgactttggagctctgtagttctaaaaatattaggaatttgcctagggtcaacacatcaaacttgtagagctactataggagtacaaatttgactaagtgcttaagccttggtattgtacaagattaggagttaaatgggtctgaagtctggctgtcagataatgcagaggctgaatattgtataacagtgaagttgggcaacctttgagctgggattcgactgtgatccagtaattgtttggctatggttggtatagcaaggttatagctggatcatagggctacaactttgacacagagagcaggtcgagtcactacatgaaattaggagcaaatctccctgcaagttactctgtcaggctgactgaatgaggatccaatggtacagtgcactgaaaatatcccaatccactgaacctcgccgccgacgagctgtgcgcccggatttgcaccagccgcggtgattcgtgcccagcgcagatggataacgaagaagggtagaaatatcacatcgtggatgaactccggccactattctactccggtcgtcgtacctgcctgagtcacggccgcttcggatagactcaccggagttagccacctcgcgaccttgcgccac

SEQ ID NO: 83335 - DNA, 574 bp, Zea Mays
tgctcccttgttgcagcttcagttaacccaaccacttgaataggcttactatgtctacaaaactcaagctcagttgcagaatccttggcttcaagctcatcgtcaccaatgatctcggcactctcatactcatagttccacagttcaggttcgtgttgtggtaatccgaaccttgcgcttccgaaaagcgtgacaggtggctcgactctgacctcgaaatcaaccactgctgcttctgcaccctcctccggtgcttggctgatatcatcagagggagcacaagcgctgaacacttcctcgcgcttctcgacggcttctactgtcagcagcactgcctgggccgagctggtaacggtagacattccatcagatatcccgagcaacttccagatgggatcgtcaggtccgaaccgggacagggagcagtgcttcctcacatagctgaggtccaccgccatgcacggcggcgtggtggagacgacccatttgggcttgaggatccccagcgcctgctccaactcctcccgggaggagtgcatcgacaagcagacgtgccagaccccgaactcgtcgc

SEQ ID NO: 83336 - DNA, 484 bp, Zea Mays
gattaacctatgtgcaagcatgacatcttgtttagcccatgttcacataattacccaattttgatactgtgtgtataccaaatccatgttgtgccactaatgcaccttcttgagttatgaggtgcatgagcaaaaagagccctaaattggtgacaacaggtgctctcactctacactacctaaaagaatggatctcatggtattcaggtaaaaggcaaaggtatggagaatggaactatgcaatctcatatcttgaagttccattgattgtgatcacaactatgtccttgcctctgaattggtagtatcttggcttaggtgctccttactttaaaatgttatttcttttggtgtacctaaggaaccttcttaatcatggtgtacttagacattgcgctttatatgcatgatcttatcgttttcaattggtatatgtggtgcaatgattatcatgtatgaagcatgcctaggttgcttgtaaaat

SEQ ID NO: 83337 - DNA, 674 bp, Zea Mays
cggccagtggtcagccgcgggctaaaaatatgcctccacaattgccagtgggctccatgccaatataggcctcgcacagcctgatgaaacacactatgagcaggaacaagttggggtgaagattctagagctccaacttgtagaagaagagtagcccctgcacaaaggggtgcctcggtagcccaaacccacgctcgtagaaagacacgagcacgaacacctcgtcgtcctgtggccgcgacaccacaccctagtcttccaactgccatcctaaggtctccacagggggagaacccctttttctccaggtcgaggacacgactttgacgaagcgagcaaactaggaaggaggccatggatgtagggagaaggagagcaggcaggggatttgaacaggcaaaaagctcggaggcaggacaactttaggataagaattgaggtaaggacacaacaaaacagtaagtgtaaccgaccccaggaaccatttccctctatttatatgcacagtcatagggagacaaagcatcactagaaaaacaggcctagcatgaccacgacatgggggatccggcgctcccactgccaactgcctcaagctccgaatgggaacccaaccattcggtgcctaccacgcgggcctgtaacacctcaggtgttagcaaaaaagattaacc

SEQ ID NO: 83338 - DNA, 298 bp, Zea Mays
gagacaaacaagtagatagcaatcacaacttataatgggataactctctttggtcatgtatataaggccgagggagaccccctacaatatccatcacgtaccattccagcccatcctcacctgcaaccactgaggccttacaaagctcagtttgtaaccctcgtactccagaaatcaataccaaaccacaacaagaagtagggtattatgcaattctaagtggcccgaacatgtataactatgtgagtgattctgacgtacctttgcatgaactattgagtcgcgatcaacgacgtcg

SEQ ID NO: 83339 - DNA, 326 bp, Zea Mays
ccgctcaggcggagacccgatgctgccacgtggcatactgcgcgcggcataagccaacgggcggaacctgacatgacacctttgggctacgcggccttcgtattcattacggataagatgtgtgcctgtccattccactgataggcgacgtgctcagtccacgatacgtgggccatgcagttactcacacattaccatatcgagggcaatgacttaccattaatcatacggtaactacccattaatgcagcatggaatgcggacatcatgactcccgctgattactcatgcgttactctgtcagcattagttattcgcataatgta

SEQ ID NO: 83340 - DNA, 1127 bp, Zea Mays
aatatgctctgttagttaattagtgaactaaaactttgtaatttggttttctccaaaatttgtatttttctcccaaggttttctcccatgtaccctttatgcttaaatggttcacttagaattaattagggtttgagagttttcctccttaggattcatgacaagcttaaggagagttttaagaagactcaacataaatctttgtccttatttttttagtgtttattccttcattgagattgcatgtgataataggttggggttagcttaaggaagaaccctaagtgacactggggtgtcacagaaacaccccattcttcatggtgtatgggttggagacagtgttactagcatatctgatctttggagcacccaggttaacattcgaaagcatagccgaagcaacaaggctggaggacattgacatactagagaaagaacggctaaatgtggtcattcagtcggccagataccaacagagcctgaggcgctatcgcgacaaagcagtatgacatcgatccttcgcagtgggagatttagtcctccgccgagtgctgacgggggagggacggcacaaattgtcaccatcatgggaaggaccattcatcgttgcagaaattacacagccagggtcctaccgactcactcaaatggatggcactgaagtggggaattcatggaatattgagcacctcaggaaattctatccataacaatgcctcaaggttcttgaggacaagttgtactttgtaagcagaaggttttattatcaataaagcttccatgttctaaggcagacacttgaaattagcacgacactcttacacaacttagggtgatcactataccctactaatggagcaattggcttaagtcagaaacgccttaagtcggtgcgacatgctcacgcttacacgacttagtgtgatcactataccctactaatagagcaattggcttaagtcgaaaacgccttaagtcggtgcgacatgctcactcttacatgactcagggtgatcactatatcctactaacaaagcaatcgacttaagtcagaaatgccttaagtaggtgtgacatgctcacacttacacgactcagggtgatcactataccctactaacgga

SEQ ID NO: 83341 - DNA, 473 bp, Zea Mays
ctgggaaatgccaaaagaaaccatcactaaccctagcgaaggcggcctggttcgattgaaatacaccttcaggtttgggggcaagtttgtcgaaccagatgatgactggttgaagcgtattgaaaatactagcgatgagttacttggagcatattccaagtccgaagataatgcactatatgcagccttcgggagccgaaaaaagaaaagattaaatagggtttttgatgctattggatttgtgtaccctgattatggctaccctccacgggggcagaaaagaaagggtgcaacttctagaaaggttgctgctttggctgctccaagcgagcctgcgctgaagagtaaaaagttgaaggtccttacccaccggccgcgttatattgaacaggccgtggtacctgagcttggcgagaagatttcttcagctgctgaatcaaaggagcccattcctcctacgcagaaaactgaag

SEQ ID NO: 83342 - DNA, 739 bp, Zea Mays
gcgaggaaacgagcaccaggggcacttggctgattgttctgagcgtgggcatgagtgggacggatgaacacgggttgcctgaaggaatatgtgggtggacgaggagaagaatgatttgggttgaagggacgaattaccaaccatgtccgcttttcagaccccttagatgatccttcacccgcatatctcttgatttttccttggcccaaattcttggcttcaactgacagtgttgtgcttatagccctactataggtgagatctaggcacgtagccattttgagttggagtcagtcattcaaccccctcatgaagcaatttttcttttttaaatcagtgtccacttgatcgatggcatattgggagaggtgattaaacttgttgagatactgcattatagaatctccctcttgcttcagatgtatgaactcctctagcttcatctatagaaccccttctggaacataatgttccctaaatgactgtttgaactccgcccacgtgaccagatgtcctgctggctgaatggctaaaaaatttgcccaccaagtgctggcaggacctctcaactgttgggcggtgaataggtctttctatgtttcagtacattggatcagcctgaacttttgctccataactcgtacccattcatcttcttccagaggttcttcagccttaacaaagagcggtggccggatttaagagaactctaaatatatggtgtctcgtggtccttgag

SEQ ID NO: 83343 - DNA, 852 bp, Zea Mays
tgaaatacaccttcaggtacggagataaatttgatgaaccgaatgatgattggctaaaatgtatcgaagctacaagtgatgaactgcttgggccgtattccaaagcagaagataatgcattatctgcatcctttggtggccggggaaaaaagagattgaacagagttttcgatgccattggttttgtttaccccgactactggtacccgttgcgaggacggggaaaaaagaggaaaactgctgcttcggccaggactgttgcctcagccactccagatgagcctgcgctgaagagcaaaaagttgaaagtccttacccaccggccgcgttatattgaaccggccgtggtgcctgagtttggcggagagacttcttcagctgctaaaccaaaggagcccacttctcctacgcagaaggctaaagatccggctataatgccgaaggtaccctcagcggagctagctgagtcgaaggctgataaaggtaaagctgaagagccaaaaatcgaagaagcaaaaatgttagaaattttaagccctccggcagaagtaacagtgccgaaggcacaaaaaggtcttgtggcaactcccaaaagaagaagaatggcaaatgtactagatgtgttagaaacagtgaaggctttaagctctactccttcagggaaaattgccaaggcttcaaaaatgaaaaccgaagctgaaacaaaatcggccgaaattagagctgcagtaagccagtctagtgccgaagttgggccttctgagcccactgagaaaaaaccttcggaaattgaagagaagacagcagaggaagagtctatagaacagactttgcctgaaaaagttgccgctc

SEQ ID NO: 83344 - DNA, 507 bp, Zea Mays
atggggcttaattagggttaaaacgatataattaatatatgtggggagcctagtgctccccttatatatacaaggagattcctgctctatataggtacgaggagcggatacaaggaaccatttgagagctgtcgtatattcaattccgtgagatacacggacatcgattggagagagcctaagaattatctgaaaaaacaatactaatttttaactggccatgaaaatacaaggaaaatgtatttagttagtgaataagtctgaaaaattaatatgatgataaagtattgaccttgggaactcagatatggtacaatacaaagctataaaactagtggccacatttattacattcaaataggttttattgtagtagtttggacaagagtgagcaatgaatccgcatcacctatatcgcttaatagagtaaccataatggaccaaaagattgacaaacaacagaacttgcgacatttctagcaaaccccaagcccaagccacagtctg

SEQ ID NO: 83345 - DNA, 320 bp, Zea Mays
caactggaactacctagtcacctggcagttgtgcatgatatattccatgtatctcagttgaagaagtgtctcagagttccaaaagagcaactgccaatataagacacacagtgtgcaagatgatctgacatatacgagcatcctatcaagatcatcgataccatgacccgagttacaagaaacaaggtgatcaaaatgtgcaaggtacagtggagccatcacgtagaagatgaagccacctaggaacgagaagatgaattgcaagtagaattcccccatcttttccctaattcgtcataatctcgaggtcgagattcttt

SEQ ID NO: 83346 - DNA, 627 bp, Zea Mays
gggagttaatgtacgatggcaacggcgaggaggaggaagcgttcgtggtgattgcatggttggttgcatatgaaagagatgtgagacttatctggttttgttaggcgtgatatttgtacgtggaggagaaaaacatatctacgtacttcgcgcacgatgcacgacacacaaaactcacgctttaatggagtagagattctctcccctctctctcccccttattaaattgtatgccacgtcagcaaaatacttagatactagttagcaagataattattacacacattgcaacaatatgtctatatatgatggtttctgcaccgtgatgagtagcaaagccaccatgcatgaccgatatggcgattggcgaacctaaaaggaaagcgcgaacgcgaccactttggcttggcgtcttcctcgtctttccactcctacatgcaccccctattccatcgaggcatcatgcatgcatgctgtcctgctcgctaaaaagccatggatcatgcgatgcgcacgagagccggaggacaaagcaaaggccctagctagctagctagcaagcttttgtaaagccgccatttccgattggcctctacctcgaacagatctcatcgatctcgatctgcc

SEQ ID NO: 83347 - DNA, 825 bp, Zea Mays
gcgcgtccaggggtggcttttaaaggcgcaggcgcggtgcacgggcaggcatggactagagagggcgcgcgagcgcgcacggctcggcgcgggtgcgtgggctggcgtgcaccgggcatgtcagccgcggtcgagcacgtggcatggtttcttatgctcctattccaacgctgatagggcgcatatcttcacgaatttggccaaggtcgccgtgtaagatctgttcctgatgcaagctttgtcgtttatgtgtgggagccgaggggtttccggcagtgtacagggagtagtcgtgtcagcaagatggtagtgtcaacctactgcgtcccgaggcaaaaccatgtcaacccatgtccaatggtagagatttgcccccaaacctttctaggacgtgccaaaggtaatttggcgccaatttggtatttggactttgtggatttgagctttggaaaacagagaatgcaactgaactttgtaaaggggttaaaattcagattctgaattttctgaatttcccattgagttctcacttgaggggttattttgagaattttgcagaacccttgttataaatctttcttactatactttgtagcttatttagtatactatagctttgttatttggtcctcatcacgattttgtgtttttcatgatctttcacaattttccctttttgcacttaaatggcttatttagggtcattttaagttttgtgcatttttcttaccttgggggtgcatgatatggttaatgtatgattcttaagatgaaaagacttactcaaatctttgttcctcaagtgttggggtcttttgctcaatt

SEQ ID NO: 83348 - DNA, 471 bp, Zea Mays
gttagggcaagaatagcctagggtaagaaagtttagggttagaaagaactcattgttgggtggtaatgcctttgaacatcgaaattgacttctctccttccttgttcatgttgttcttttcttcttcgatcttggtttcattgattcgaggtcagtgtgtatcatcatagttgggagaatatggttaagatagatttggatgagataaactacatgatgtaggtcaaaggtttatttgatgttaggtggggatagacagattatataattcatcatgactctattggttgggatagctcttccactcacggtttgagttggcttaatacactaatttaggtttaagtgcatgaggggagaacaaggtttataggagtaggatctagtttatttcactagtgttgacttgttaattgcctcacattagattctactttcttctaccagtatcactaatttgtttaagtaggc

SEQ ID NO: 83349 - DNA, 568 bp, Zea Mays
tgctacactagttaccaactatattttacccgacatcatagactctagtgtccatagaagcgacataacatacctgccactatggtaggtataactgtaactaaagaatgatatctctcacactgtgtcataatcgaaggcattgccccatatatgatttcaagactaggataagatttgttaggtcttaactgatcgaacccatggtccaaccaatatgtgaacctctctcctcccttgctttataaaagtgagagtagagtaaagtttagaggattcattcgaaaacataggaacataattctcacacatgacatcaaagggcaaacatagggtgaaatagggatagatagactagaactcacaccagaaccaagtgcaaagggggtcgaggaattcatgatgctcagttggttcttgaaattgtaatcttcttgacctttatgttcatcaaatgatgagtggcaagcggatgtagggtattacacacattacaacatgaacatctctaaactatatatgtgctagttcatagccgtatctaggttcaacatacattacctacgcc

SEQ ID NO: 83350 - DNA, 572 bp, Zea Mays
agaaaatatacaaataaagcaacccttctattgactagactcatcactgtcgcgagaccctgagagctctatttgagtcccagttatcgtcgaaatcctagtcatcggctagaaccgagccggacccacaagccagtttaggtatatattctttacagtggcccctgagctcgaaataattgagtcatctggtaagttgagcctaaatatatctctacccattttgatggttgtatactcccaagttcaagtcctaggacttggtcgcttactattcttaactctgcctttgacggtatcagactgttttttttttttgaaaactgctgatacttccgcttcttagtgtgaccacgacttccctaaaggttataaataactgagccgccacactcttagggtaacacaatccttttccttctagccttaatgccgatggatcgatcacttgaggaccaaaactatattcttcagctccatatatatggtggtggtggcggggagctcaaaacatatctcctaattaatcttgtacctaacacctagaacctttggaaattcatagcttaaaa

SEQ ID NO: 83351 - DNA, 451 bp, Zea Mays
gaaaacacacgatcctagccgtaaagtactctagacttgtcctagccgtaaagtactctagacctgtttaggcacagaagataactgagaataggaaacaacataatataataggaccaagatctaatcgcccctgacatgagcatgtgtggagttgagagaaataataggccaaatatacagtaacgacacaaaaaaatatctaaagatgccaaacagctagggttgggagaatgaaagaatgaaagatccgggtatacagacaaggtatagttccatccgctgaatagttgagctgttatattattattattagtgtgttcactccattatccattatggtagtctcgatttgtacaacaacatacatagtcccactgatcttctcctgttgccatcatgtctattggaaaaacaatgcacctaattgattcgtagatctgcagtcaca

SEQ ID NO: 83352 - DNA, 609 bp, Zea Mays
cagcaaaggcagaattgccgaaagtgcaaaaggctcctgccgcaactcccaagagaaggaggatggccagcgtgctagacgctgtcatggagaccacaaaggccttgagccctgctcctactaagaaagttgtcgaagttgtcaaagtctaggtcggagccgaagctgggccttcagtgcccattaagacgaaggctgccgcgcctgaggataaagctgagcaacaaacttcagataccggcatggcggcggggcaagttatgatagaaaaagcaaaatctcctgcccccgaagctccaaccgaagatgttgattacattattcgacatgcttcgtggaaaaaattatccaaagaagaaatcttagaagccagacactacgcccagaaactaaaatatccaaaggggtccttagtgttcaatggcactgacgaagatgacttcctatactgtctcccggacaacaaagaaatatccgtttgccgagagatagccaaaagtatgggatttcggaagcttgaggaaggcctttcggccatgtcgaaggatgatcttgctgatagccttgcatacaacagtataaaggtacagaagttgttaactttaaatt

SEQ ID NO: 83353 - DNA, 1002 bp, Zea Mays
caagaagaagaagaaagcagcagcagctttcgatgtagccggattagggactcagctcgttgtctctccatcgttggcaacttggtccgcaatctcattggcaccacgagatcgactagcaattccattggctggcacgttctggcagttgtgttattagtctatactaactctatacacatcgcagccaatccggacatagaccataacaaaaatgattaagagattcatatacgtcgttagcataccggcccataaataaaaccgacaaaggcgtaggcttaaactagagcgcatgattagctcggggcatgcgcactcactggcaaaaccttagagggttgtatgcaaccagacaagcagaatgatccatggacccgatgccctcccacgcccgcagtaaagtaaccctggttctaaactatcttcgattcggtttgtctcgacgacgaccgcctcaccctatgagcggtgaccggcggcaccgatcgacgaaaggagaagccggccgggcgactctctgtaaagtaagtgtggtcgctttacaatgttggatcatgcgatggctaccaggggataaatttagggttcgttgcagtgcaggagtaagctaaggaccaatttagcaacctgcagtgcgctttatatctaactcgtgcccacagtcaggcacgagcacgacgcaagcaagttgccccggccaaaaactattccccggccgagagatgctaagctagctagtgagtagtgatgcaacttagcttgactagtgacgacgctgactgcttgtgcttgagcagtagcaatgctcatcccaggcccacatatgatgaacatacatacagagaagctatgaatatgatggaccagtatggcaaaacccgaccgagggatcaagtagaaggttcaagaaacattatgtttcaggaggaaaaaatatattataccttgaaaccgtccaagatatggaaacccgaaacacggccagcaaaaagtagctga

SEQ ID NO: 83354 - DNA, 465 bp, Zea Mays
ttacctctaaaacactgacgtcgccctcaaatcactcggcgttacctctaaaacgctgacgtcgtctccagtcgcccgacgttacctctaaaacgctgatgtcgccctcaagtcactcggcgctacctctaaaacgctgacgtcgccctcaagtcactcggcgttacctctaaaacgctgacgtcgtctccagtcgctcagcgttacctctaaaacgctgacgtcaccctcaagtcactcggcgctacctctaaaacgctgacgttgtcttcaagtcactcggcgttacctcaaaaactccgacatcgtgttcagtcactcggcagttatctctaaaactctgacatcatctacaagtcgctcggcagctatctctaaaagcatcgatatgatgcccgagttattcacttactattccaagggaatcaacttcacgaaaaaggtgggaagaggaatgattcaaga

SEQ ID NO: 83355 - DNA, 607 bp, Zea Mays
cataatgagcagtaggtattctattgtgggtgtctatagataaacagtgtgattctatgaacaaagttcttatctagctcttgataaaggctcaaaattcatatgtggtaggtattgtatggcacttatccaatttccaaggtcacccagatggctcaacaaagaaggatgatgacttccacgaaaatgggtcgattggtctgggctctttagtccaacaaagttagatagtggatacctacaacacatagtgaattagtgatactcttttctgtataaaattttgtatgtattggagataaccagtagttagaagacatttcctatagatccttccatagtaatatgctacttcatgctagctagttctaagaattgcattaacggttgtttgttagtgattcatcacatgaagatagcaaaaacaaaaacaaaaagtagcagggttcgtataagcttatgcattgctaaagaaatttgtagtaacaatctacactttgttttgggtttgcgctttgctgccttagatgcttattagtcattttgcctagagaatcataaactacctgattgcgagaggagttaagagattgactcacaaagaaac

SEQ ID NO: 83356 - DNA, 378 bp, Zea Mays
cggagttgtcgcacgcgagggtggctagcgctgagcctcgcggtgactttgtattggtcgaatgtcgaagaccgtcatcgcggtcttttttcgacgcatgtttttgcgggggatttttcgcttgtatattacatgactctgcctcgttaaaaacctcaccccccgggaggaaaagagtgagggccagaataacattgtttttgcgaattacaggggcgaatcggccctgatgagtcaaacaaaaaatttgcggagattttcgatgttccaggagtgctccaggtcttcgtcgtttggcgttgcgagcctgtaagcgatgggggaagccttcgtcttgacaatgaaagggctctcccacttgggctccagcttgcccct

SEQ ID NO: 83357 - DNA, 917 bp, Zea Mays
cttggtgatcttcccaatgatgagaggcaagttcactttgagatgcctatgagtccaggtgatgcagagataagtgctatgttggacatgttggctgggattcttctgactcggtctctgctgaaacagtggctgttgcaactatcctagagcctaaaaaaaccgtggatactcgaaggcctaagggtactcgcctgaaacgtctccgccaggtcagccatccaactgcacctgccgaagggaagaaaaagaaaaagagacggcttcggcgagtgtcgtgtttggaccaggatgttggcccttctgctcctgctgctaaaggagtaccagtggaactctttactggagctgaacccaatgggtgtgaccctgctgatgttgatcctaatgggtgtgaccctgctgatgctgatcccaatgggtgtgaccctgctagagctgatcccaatgggtgtgaccctgtgccgtttattgtccgtattgttgacgaggacgacgaagaagaagaggaagtcccattaattcggaagaacagtcggcgttacagagttagtggggggagtagcgatattccttctctagctctgtctgctcttgttggtctgcaaggattatccatagcaaattttgatcaggctctcgaggatgttgttcctgaagatctgatgcctgagccaactgatggtgatatgatggacgtctgctctgacattccagatgtgggattagaggtatcccgggcagcatctcgtgcatcgtcgaccttggaaggcggacttcggagccaagaggttggtcaaggtcgttcaattcccatggaggtgactgagaatccttcagccttagaggtggttgttgtggagaacccagtcctcaagggtggtgccagcggttgcccagcccccgagggtgttgcc

SEQ ID NO: 83358 - DNA, 830 bp, Zea Mays
cccttccgctttgcggcttgtgccgataagactcgccggtgaaccgtcgtcgcacggccttgtgccacgtatccgggcacccccgtcgcatcatcgtgactccctatcgctgtctcatcgtcgccggtgaagttgccacgacggtggacacgaattcgcgacgtcgatgttcttccttatctccggtcaccctcactgcccgactaaattacgcgccaccgcctaagcctcctataaattgatggcctgggcaactgcgctaggtcatcccgaagccatagcaaccgctcccacccttaatcgttcacccgagctctggaatttcaaacttcccccaaaactgttttccgccaccgcgaagagtgcctcaccgcggccagccccattctggtcagttcatcctcccctctccctcgtttaacctttctcatatgtctacgatgcttgctgaaccaccaatttggactagggaatcaccaatccacgggaacgtgctcatcagtccgccatgttcacggtcgccgtggctagaacaaaccgtgtgaccattagtgaaattatgttgggggaaatggtcggggtggatccaatttcgtgtccgccgctcggtagcaccggtcatggccccgttcggtcggtctgctagctcaccggagctcggccgcgttcaccgtcgtcgtggacttcaccctgcgaaggaatagaaaccggaggactcttctgcaaatcgtcagtgacacagtgaaacagtgaaagaacctgtctccagttagccaagaacccgaggcccttttcgcaaaactgccatcgcgcgcgcgggtgcgggcgcg

SEQ ID NO: 83359 - DNA, 820 bp, Zea Mays
gtcccatgggtgggaacccgggtggtgagtcctcgagggggaggtcatcagtgtatgtgtggatgctacccttaggtgtggaggcatcttcgtcacaagggtgcttgctgtttgctggcccagtcttgttagtctcagctacatttggcagggtgttgtctgcaagtactgctttgcctttcttttctgtcagggttgccttggaggcatcgtccagataggtggtggccctagtgatcacattcttagaagccatcgtgggagcagttcagagcatgaatagtgggcgccaaatgttggcacgaaaatctgtaaccaagcactcagaaacagtaaagcaagtagcacaatcaagcggcggactgcaggcgtgattgtattaccaagcgtgtccagaatgttacaagactggggtatttataggggtagtcaggggttggtaaactaagtatcgtaatgcccccgactaccaactatattctcgtcaagcacagtacaacaggttaattacatgaccgagtacggatttcccaattacacagtaattgatatcctcctgagtcgcttaaaggtgagcctgctaacggcgagctctgttacactgagaattcttagagcaaggtctactagtgtagacatcatggatcgcctttgctgctcttcaagtctgcaagccctcgcaaggagttagcccccttggctcattggcgtgcttagtagacttcgttgtggtcagggaaaggttgtctcgatgctgtaagtagcctctcggactgcctcgacagtttggagacatggtcgaggggaccgtcgcgtcttc

SEQ ID NO: 83360 - DNA, 684 bp, Zea Mays
actgtccagtcccgctgcctcatgctcactgtgccaatgattggtggggatgttgtgcaggtccgtcttcctccctgaccacagactcagcgcaacaaaccatgccaatccctaccggagtttgcgtacccgggcaaatctcaaccacctgtgacctgcctaacccaggggtacataaagggcgtgtcgtcgctactcatttcgaacacgccgagggagatcgtgtgcagggggctggggaattagctcgccggtgttgggccagggggaaactctaggggtttattcgcggaagaccaacacggctcgacgcgactgtggtaggtcaggggaggggttcctcgaagtcgcttcaatttctcatcggagaagccttccgccgccgaaccttggggcaccgtggccatcacatctacccacttatctactggtaaggaatccaccgacgtgttcgcctcctcctccctttttatttgaatgaagtcgcgttcgcaacggtgtagtagaatgcggggtcgacgttcgccgacaatggcgccaccgcaagtagggcgcacagctactcggcccggtcgggagggagaagagttgaggagaagagattttgtccattagatcgaaagggagtggtgtggatttgaacctcggataccccttcaacgtctcaaatccaggccattggtg

SEQ ID NO: 83361 - DNA, 429 bp, Zea Mays
cgtccctctcccattagaattcggtggaggatgagatctcctactacgaaggatcgatgccgtatggccttatcatgatagcgcctcagagtttgctgatatcgtgctgattgaatcaccgtattcagtcgctcttcttcgagtacatcaacatcctccagcctactagcttcagcttctgctatgttttcaaagattaacctcggtgccccgaacttgagatcagcaggtagcactgcctccgaaccatagaccatgaagaaaggtgtgtttccatgcagagctcgactaggttgagttctcaggctccaaacaacatacggcagctctctgatccactttcctgcgaacttctcattcttgtcgaagactttctttctgagtgcttctaatatcatcccgttggctctttctacttgcccattggct

SEQ ID NO: 83362 - DNA, 617 bp, Zea Mays
gaaataatgaccgagcagttattagcgacgtcggcgttttagaggtaacgaccgaatcctctggagccacgtcactgttttaggaataacagtcgagtgactgctggcgacgtcggcgttttagaagtaacagccgagtgataacgggccacgtcggtcgctttggaaatagtggccgagtgaagtctggtaacgtcagcgtttttagaaataacagctgagttaatttgggttgcgtcggccgttttggaaataacggccgagtgatgacatggcatgccagcgttttagaaataacagtcaggtgatgacatggcacgccgacgttttataaataacatccgggtgatgacaaggcacgccagcgttttagaagtaaatgtcaggtgatgactgggcacttttagaaatggcgtctggcctgggaaaaccccatatgtactacactgtcgcatgcctctgcgttctgtgccctagttttgcttttctgcatccatgcctcctccgctatcttgcaatactgccttcgctctgttcgccaacacgattgagatggcgcccaagcggaaatcccagagttcgtctgccgcagtcattccccccatcgatcccaacag

SEQ ID NO: 83363 - DNA, 714 bp, Zea Mays
acatgagcataattcatactaacttactcatgtgcacgctgatatccattagtaaatgcagtgtgggacgcaaatccataacagctatttccagcctcttgtattgagcatgtgctgaagtacagaactagtcattgagaaatatcaccaagtatgccgattgaaaggttatatagctccctattgatttaatcttcccttcatttcagtttttcccctttaatattttgttacacttttttgtttcgttcatgtgaggtctgcaacagaaaaaacacgtgtatttttttattattctgttacttcttttatgtgcttgacatgaatgttaaagcagcctccatcggtaacaagttgtggaagaagtattaagtcaacattaccttcaccagtctctttagttagcacatcttaatcatgttgcagatgttttgtgtggagaccgttagaaaagatgctagttaggggttttccagtagattcacatgcacttgtttcccaactgacactcttttcagcaactatagggctcattgcatgctcttcaatagagaaaaccataggcaaaacatctggagatttagcaagttaatgtggtgaagtgaaaatcatgcaacaagattagtaagcagggtctttagaaaaaacagttaacaaattatatggcaggttttgacttttgaccttccaataaaattggaatgcaagagccaa

SEQ ID NO: 83364 - DNA, 453 bp, Zea Mays
aagcaacttagattatcctccattaaaatgtatctatctcatagagatccctctaatcttaaaagactctctcatatattaatagattcatcgtatcttataagattctctcttatcttactagatccacctcatcttaaaagattattcttaccctaataaattcatcttatcctaataagcatacttatcctccctagtttaaatgatctaatgcaaattaattagatcttatctagtcaaactagtcacaccaatctaacctagatctgatctaatctaaagtgacttatcaaacatgttagataatactgatgaaatagattagactctactcctatagaacaggtcttaacttagttcaccctgcactaaattaagaatgacagatcgacttggccatatgcaactaccttaaccatccgatagttgcataacccctcaattttaacc

SEQ ID NO: 83365 - DNA, 684 bp, Zea Mays
ttggcaagttcttgcacaaaaatccaagatcttggcgttgcaattctgtctgtcaggcgctctcaatcaggttttcaatggtacagtgttcaaatcagatcgccgggttcagttcatctcgccgccggtgatcccgcgctgggatcctcgtcgccgatgcgattcgtgctctgtggggtgcagataactcttaagggtaagaaatatcgcatcgtggatgaactcaagccactgttccgctccggccgccgtacccgcctgagtcacggtcgcttcggataaactcaccagagttatccacctcgcgaccttgcgccacgtgctttggtgctttaacaacgtcgtagtgagtcaccttatcccactcgttcatcgccggtgagcttgccacggtgaacgccacgaattgcttgcgctagtaacctcttccctctccggccgccaccgtgccaactccaaatcacgagccaccatccccgaatcctataaatgagcacaccctcagctccgctatgtaattatgcacccaacacacccactcgtgcctccaattactcaccagagagccccaatttgaaactttccccaattatgtccaaagagccccaatttgaaaaattcctagaaaattgtagaaaaatgctaaaaatataagaccaattttgttagacttctaaattttta

SEQ ID NO: 83366 - DNA, 674 bp, Zea Mays
gaaaaaagagaataaacagagtttttgacgccatcggctttgtctacctcgactaccactacccgctgtggggacaggggaagaagagaaaagctgctgctttggccgccctagctgaacctgtgccgaaggctgcaggcaaaaagatgaaggtacttacccatcggccgcgttacattgaaccggctgtggtgcctgagtttggcggggaggcctctttagctactgagtaaagagaaattgttcctcccatgcagaggactgaagagccagctataatgccgaaggcaccttcggttgagctagttgaaacgaaggttgacaaagataaggctgaaaggtcaaaaatggaagaagtaacaaagatgccagggattttaagtccttcaacagaagcaacaacgctgaaggcacaaaagagttctgccacaactcctaagagaaggaggatggtaaatatattagatgtattggaaacaaccgactccataagtcttgctcccacagggaaggttgccaaagctgacaaaacgcaaccccaagctgatactaagcaaatagaagttgaagctacaataacccaggctgaaactgaggcaggtcccacagtgcctgctgagacgaagcttgccacaaccgagcaggggggcgaaggaataactccagatactaat

SEQ ID NO: 83367 - DNA, 665 bp, Zea Mays
agagtgccgttgtgggtgatactcgaccaacgcgcgaggaattgctcatcataccagattcatcatcggaaatccgccctcggcatggtttcagacctccatgcgggtcctatccctggtaagcccaccatctaactcgcgaccacctccacattgttttgcatcagcgcttgtcgtgaatcggtcgctgggggaaatcgattttacctctccggtgaggggcgccgccgtgcttgggttcacgggcgtggagtgcgctcgtagggggagaagctcgggtgccgtccgtcttgagataaacggtcacgattaggcgggcagctcggggagaaatgagtgggcgcgaccgtgggatctcagaattgtggctccgatcggatctggcgatggttgattagtggtcgttcatttgcggatgaacgtacgggattagaacaacttaccccttcgcctcattaattaatgaccgtagatcacgaatccgacgaccacgatcatgtactggttcagcgcatatgcacatttaatccgagccctccatctcagatctcacggtcaagatgccaccataccccttcagtcgtgactcatttgcagaagagcccccgtctttagtaaaaataaacccgccatcctacacggtgattactgagtcttgagaaatc

SEQ ID NO: 83368 - DNA, 318 bp, Zea Mays
gatttatcctaatctcggatgctcagtaagaatttctatctctttatcacatctatctcctcttatcaagttacttgtgaaggtttcaccgatctctgattttattcgatctcgagaatggccgaatttggagcctgctaaaacttttgtttcttgaagaaaatgcaaattcgaaagtcaatctcgtctcacaactcctgtccagactcatttattcgtactctcgatagttgtgatgttatcagatctatgtccgaatacgctttctcgatagtcggtctacgtccaaatacttaatctaaatctgcattctcccgc

SEQ ID NO: 83369 - DNA, 643 bp, Zea Mays
aataattcgggcggttctggcacaactggttattaccgtagatttatttcggacttctccaaaattgttaaacccatcaccgggttattgaagaatgatactaagtttgactggtcctctaaatgcaatgaggcctttgaacagttgaaagtattgttgaccactgcactggttttggcccaaccggacattgaaaagacttttgatgtgtattgtgaggtgtcaggcagtggacttggatgtgtccagatgcaagaaggacgagtaatagcctatgcttcaaggcagctgcatcggcatgaggaacattatcccacccatgatctggaattggctgcagtagttcatgcccttaagatttggtgtcattatctgctgggaaatatatgtcacttgtatacggatcacaagagtttgaagtatatcttcacccagtcaaaactaaatatgaggcaaagaaggtggctcgagctaatcaaagattatgacttggagattatcacccaggaaaggctaatgtggtggcagatgctttaaatcgcaaggcttcttgtcattgtctcatagtaaggacacctgacaccactttatgtcaagaaatggaaaagttgaatctggggatagtacaacaaggaactttgac

SEQ ID NO: 83370 - DNA, 553 bp, Zea Mays
ggaggatgtgtcaaagaaatttgtcatgccaagggaggaaacccataccctcaatgtgaagaaggtcgctttgaaatctatgagtaaggattgacttctcaagattgtttagttcctgtttgcatcatttttttgggatttatgatttattttcattttattcgtacaggccatgcatggaaggatttcaagtggaaactaaatataaattatgtcaagaaggacaaaactccatttgaggactatccagaactcaagaaagagtggtggccaaactttgtggagtgggttacctctgatgactatattgctcttggagaaaagggcaagaaaagccaaagcatgaatccgtcaaaaactaggtcgccaaagctatactgtacaaaagagaaaatgggcaaaggaagatgcacaagcattaactgagggtaaatctattccatttcaagacatgccagatggccatcataaggattgggcaagtgcgaggaatccttctggcgacgtgaagataacagagtcgcatccaatcataaagaaaattgtaatgttc

SEQ ID NO: 83371 - DNA, 773 bp, Zea Mays
aaggaaaagagacggctttggcgagtgtcgtgtttggaccaggatgctggcccttctgctcctactgctgaagaagtaccggtggaactctttactagtgctgatcccaatgggtgtgaccctactgatgctgaacccaatggatgtgaccctgctgatgctgaacccaatgggtgtgaccctgctgatgctgatcccaatgggtgtgaccctgctggagctgatcccaatgggtgtgaccctgtgccgtttattgtccgtattgttgacgaggacgaagaagaagaagaggaagtcccattaattcggaagaacagtcggcgttacagagtcagtggggggagtagcgatattccttctccagctctgtctgctcttgttggtctgcaagaattatccatagcaaattttgatcaggctctcgaggatgttgttcctgaagatctgctgtcagagccaactgatggtgatatgatggaggtctgctatgacacttcagatgtgggattagaggtatcctaggcagcgtctcgtgcatcgtcgaccttggaaggcagtcttcggagccaagaggttggtcaaggtcgctcaattcccatggaggtgactgagaatccttcagccttagaggtggctgttgcagagaacccagtcctcaagggtggtgttggtggttgcccagccccgagggtgttgccggtaatgatcaagctcgggtgggtagcgcaagctgcaacccagcccccgagggtgtccgagcgggctcccttctc

SEQ ID NO: 83372 - DNA, 2744 bp, Zea Mays
gtgagtggcaaaaatccaattatctcgcagtcctaggagttcggccgctttcctccgctttccgtttcgccgccaccgtcttccgccgccctacctcgccgtcgccgacgacatgcccgaaaccgtactccgctctatctctctcagactctcccgccccctcgcatcacttcttactgacctggtgttctactccctcgcaggcggcggaggccaacctccgtaggcaactggagcaaaccctcgccgctgaaccctccagcccgctccaccactacaaccttgtaggtttcgttgtccactgcattgagcccgtggtcgcgcccgcgcttctccgttgcgcctaatcacctgctggttggtcctgccgtcctgctcgtgcagggcgtcttcctatgggaccgcgccgaggcagagcaggagggtgatggggaagaggcgcggaagctccgcgcggaagcgtcggagcattttctcgcggcggccaagctgaatcccaacgatggcgtccccttccgcttccttggccaccactatgcgcgcggcggtgacaatcaacgagcggtcaagtgctatcaccgtgccgtgaccctcaaccctgacgactctgaggctggtgtatgtgtgggaatatgtatattcatatgcccaatgtattcgtcggtttgcttgtgctggattctaatgtgttttcccctttatttctgggatatggcgcaggacacactctgtggcttgctagatgttgaagggaaggagagcttggagcttgctgtctgcaaggaggcagctggcaagtcaccgcgtgcgttctgggcttttcggagacttggctatttacaggtaacttgtatagcaatttcttgaatggactatttgttgaagcaagaatgccaatagtatgtgtcattaacagaggtcctgattggatatgttatgttaatgaatcttacggcttcattttgtatcgggtcagaatccacaggtccaaacctgtccgagcctaaacccaatgctattggttaagggaaacattggtttgcagcaattagctagatttaacatggttatgcagaatgatgaaaatactttaaatttaacctaatctaaccccttcaatatttaattttttatagcaatctcatccatttgtcatcgatgtttcttgtactttatacagaggcagtgttcacttccattaattttggcattgatgtcatgaccccacaaaacatttatgttaagttgttaatgttagtgacttttaatgattcaattctgtggctatccttttaaattagctgacagatgaaattagaatgtgcaggataacatgactcagttggtcattcactattagtatagcattattaagttaaattctggattgtactggtcttggaaatatttgagagctttatgcgtggttctagcctgagcaacatctcttatgataacttctacttgagaagttgatcgcttattttctttaaaaattggtaagggttttctgttggaaggagatactgctgctaatattttaggtgtgcaattttcttttgtttgtgataaggcattacaaaatttgtatataatgtgtattgacatgagttggtgaaaggttaggttcatcagaggaaatggtcagagggtatacaaagccttcagcatggaatacgaggttacccaacatgtgcagatttatgggaggtgggtgctcccccccctccagtttgctcttgccaaggtttcttagtgtaacttatatgtgatgtgtcttcaagttatcaattattgaatttagacattccatatttatggctacaggcacttggtctggcataccaccgtttgggcatgttcaccgcagcagtaaaggtttgctgttttcagttgtgagcatccttaataactgttgcagtgcgctgtattgagccttctcaatgtgcttaattcagtttttgccggcagtcatatggacgagctattgaacttgatagttccagggtctttgcattgatagaaagtggaaacatccagttaatgcttggttactatagaaaggtaggaagttttctgcttgcttctttaactatctatcgttctgctggtatacatgatttaatcagtcaatgctaatctaacggtgaatccattcaaaaatctatgtagcactgatctctttcattgttaaaactatttaatttctctcgaaatacacaacgccagggagtggagcagtttcgttctgctttggaaatggctccatgtaatcattcagcatactttggccttgcttctgcattgcttgcatgggcaaggaattgtgtaactactggggcctttggttgggctgctagcctgttgaaggtactttgatctgatagtagctttttaaatatcattgaataaaccatagctgtatagctttaccatatagtttgttttctcataggaagcttcagaagcttccagaatttgtacttctttgactggaaacctttcatgcgtctggaaattgcatggagatgttcaggtatttgatatttcatcatttaagtctccttgtcatctacttataagtgaagagttgcaatattatattctactatataccttgcctgtttggtgtcagctcacacttgcgagatgctttccatgggtggatgggaaaatcaaaagggtcatggatgcacagatgttcaaaaattctgttcaagagtggagaaatacatgtttgttag

SEQ ID NO: 83373 - DNA, 800 bp, Zea Mays
gagcaggttcaaaaccggttcagccaggattcatactagttgaactgagttgcaccagtgaaacttgaaatttgactctgtctcgatgtttttggtgagaaattttaggtgtagcctattcaccccctctaggctactttcagccgcgacgacggggcacgaggaggtggttggagtgaggctgaaccatgacgtgggtggagcacgggttggaggcgtgcaggggccacaaggaaggtgggcttgcggggttgtggtgaggttggtggatttggagcatacagaggacgacatcttttgatggcgggaggggaggggagggaggaagaggaccgacaggcacaagtcaaagtctctagtattgggagttgccggcgtcaacgatgcggagcgcagagtaagaaactaatgccgacatgtggaagaagaccaacaaggtagacgtgatgagtgtttccacctttttaccattggctactttttttgcccagtcgtctacaatacaactagcaaacccgctttttcgtgtttgtaggaaatcaatctccatgacgaggctgatcatattcacattgatttggtgactaggaattttgagagattggagtggattgagtgggaattagtttatttcttctttcaatcctcttcaattttctggtcaccaaaccagcccatagtgtatttttgtccctccgtttagcattcacgtaggtcccggaggtaacagggttgaccatcacatcacaatcacaaatccacatataaaattataaaagaagctactttaggctatgtgt

SEQ ID NO: 83374 - DNA, 1232 bp, Zea Mays
gcctctcggaatcagatagttcttggccgcctttgttgtgatcgtggccacaaggccccaagggatgcaggtcgcgtcgattgaatgagaagtaggtgagggagatagagcatggttgaggatggcgccgatcatacttcaccgtgcgttgtccttctccatcccgttgcttcatcgccgtgatgtgtcgtcgcccttacaggtcttgatctgatcatcttctacaaccgatgaatccatggatatggagacctggattgtaatgcaaaggaatggatggattggccaattattgatctgaactaaatttttacaggcctcggatgtgtcgaacagacctgaaggcctggcattattgacgagaattgctgaggacactgactgctgcgattctggacctccattgccagaccactcgccgttggagaaaagcctcatcagcaagatcctccgtctgagaggtgttttggatctgccatgtcgaagttcatgcgacgcgttggatcaggttcatgccaaaacttgacaccatttcccgttttgacagacatcgtgatgggcgtatacaaattgttgttctccacgcttaatgcagttgcttctggataccctgggggttctgaaggttgcatatcccaaatgcttatcaggtgtatcaggaaaccatacatcttctgtacgggaggtctgtcgtctgaattgaacccctttatctgtaccctacttgcagaacatctcctggacacatgttcataaaaagaatgctatccctttttcaccatgctgtgttaaataagcctgatccaacatctacttctgaaaaacaaacagggacttgttcacctccatcaggtcctcgtgttggttcaggattgctactcgaaaatcaagcagctgcctaactctggctctgagaagcaaacaatcatggagagcgagagcttagaccatgtaggtatgcagtttgacttgcccatgttgatactttgctgtcaatacaatggtcagaaagcctatgtcatcgtactgaactttcgccatcgagttcattactcagctgctcaaaccggaattgtaggtaagcgtgtcattgagatgcttgatcaggtgactccagtggtgaaagaaatgttcagttccatggaaagctccagttctgcacaggcggcggcggcagcagcagcttggccggaggatctcccagaaagaagaaccctccctcctgttctctg

SEQ ID NO: 83375 - DNA, 313 bp, Zea Mays
acacaattttgtgcgttgttcaagagcacgtgttgcttgagatagaatgtggtcggtgatgggctgaaactaggttcaggaggaaaagaggttttaggagtaaattcaagaagggtctgaggttctattggctaggatatcatgcaggacatttgagcttaagaatggtgcaaatgaagatggacattgtattagagatgcggtgtgacgtatggtagcgttactacatgggtgtctaaaaatgtgagcgattgtagtgtgaagatggtgtcatgttggctcgtgtgcatttgtatatgtatgcttagggcat

SEQ ID NO: 83376 - DNA, 3066 bp, Zea Mays
gcgggtgccccgaggcggccaggggcgtggcaaggggaaggctgccaagaggaaggcggagaaagacaagggaaagctagtgctcgctgccagtgttaagaccaacaagaagaaaaaggtcccgactgggatcgatgccagaccaaaggtatagcgcattgcatcgaccatcgacttgctttccatttctgatatcacgattttgtcggcgcagtagaatgtttgtattctcaggcaggtacaggtctgccggagcttgtatgctacaaacaagtggatcttattgttcagctgaccaatgaccatacgcacagattgctaactccttgagagttcctaaatttgtgctcatccattattcgtattcctgcttttgggtaattgctaaccagccaaaaagctttaggtgtgctttgccttcatcattagatacaaggtgtatcagatggcataaatattgccagcgtataattcggatgcatagcaatcagttgtaactaaaacttacttattgactgcttccatattatttgttgtgaatgactaaggtgtgagaaaaaattcccaccaccttctagctgttgttaatgttttggttacttgtcacgttttcccttgagttttcatctgtggtgtctactggcctcatgtgtctaatgccccttattgttcttgatcttcatgttgtttgagttagatacttagattgttttattcaatgtcactttcttagtagtttctattactatgtgatattcatgcctgctcaattgttatagggacacttgcttttgcaaagtgctgaactgctggctaaaatatcatttttgttgtttgttttgttatggaggtatgccatagtttggttgactgagtgtgaatacttaccatgtacaaaatacttgcaacgttcccaagtaatgcggtatatagtatatactgtatagaatggtgaaagtaatagaagtctctcacctcccactttgttgataggttcaaataataccttcaaatacaacttgtagcagaaatacctcaagagatgtgatacatttgtgttttttttctcatttcaggagaaaaacagtggggtaaaggtgaactcagttagcatttctaagtcatttcagcatcctataaaaaatagggaacccaagagttcttgcaagaaaaagggaaaacaagaggtctcagtcttactggataagaaaagtaagaagggaaacagaaagtcagttttggaaatacacaaaaaggatatggcaaacagtgttcaaactcaaagcatttgtaaggatcagtcaaaagcaggttctagcacagcaccgaatacaacagatatgaggtgtaaattaaattcttgttgcaaatcaaagcatgttaccttttctgatggcgctgacatatttggaaggaccgcacatctacctgcagataatacaaagcaaccacaatctgtacagacattccagcaagccactcaggaaggtcgtgaccaccgtgatagagatgatcaacagttggtttatcaacaagctgaagctatatcccggactgttgagattaccaattctttgtctgaaaatgtagtactagctggtgtttgccgtacaatcccacttaccaaaccaaaagatatcactatactgggaaactcagtggatctgaatcactgcatagaaacttgtcatggcagtaactgtttgaactccacgagtttggcaagcttatctagtaagatgccatgtcaaaaattccaaggtgtgaactctcatctgaatggcaacaatgtttcaagtcttgatgttcagtatcttggagaacaaaaccatatgatatcacaagcatcatttaatcctgttagtttggcacccaagggagtatcaggtgatatgagcccattgtcagagccttccagttgttgtttatatgataggagcagtatcacgttccacgagaaggctgatgctaattaccacttgggaaaagttagttctgagattcttagatctggtaacgtggtgagaagcataagctcttcaacaggatcaaataaaccagcacaagccatcgattgtgtatctgctgcattcaggaacatgcacagccgccgtgacgattatgtcggccttcctatcaattcacgaggtgaattcgtcaaggttcatcctggtggcacccctaattctgttgacatttttacgaggcagtgtttgggggagaattcctcatgcccctcagattatccaaccatcttcagttctattacccgcatggatcatgtacccaactatcatgctcgacaattctatacaatagaccagtctgcttttcatgcagatcctcgttttcctccagcgggcccaatggcatatgggatggatgtgaggcagtggccaagttctgaaagagcaaaagttcattactacacaattccaaacaaaaagtatccatgcgccaaacagcaagagctttcaatggatcacaattcacagcagaagctacttgggctgcgaagccgctgtcccagccagaactctgggcagggtatgcagcacaacgccgaaacgacactgcgcctcatgggaaaaacggtcacacttgggaccagcagcagcatgcactgtagaggcctgaacaacggaaccccagcttgttccagtaaacaaagccaagctgaagaccggggaacgcgtacgaaagttttcccacagctgtttcacggaggactggctctggctgatcccgctgctgcgtgtaggatatcagatggagagaggcaaccgtctggacacccgtcacgtttctctttggctccagcagctgttcgggcttttctgcctggtaccagcagtttcagaacaggtggccacaaccagcaacctgaactagcaacagccagtaagaatccttatctttcaatacactgcagacatgcaccggagtcatctttcaatgcaaggaacagtttcagaaacttcacggaaaaggggccagcggcaccgtaccagtcgtccagttacctgacgcagcagctcagcagcaacatggcgcagagaaccgccg

SEQ ID NO: 83377 - DNA, 338 bp, Zea Mays
ctggagataacctaatgctaacatggtatcgtaggatggtgtgctctttttctccttgtcagtacaaatccttgcatgttttagtcgagtacatttaaaccactaattcttgattgtttaggttagtagaagcttgtctaacaggaaacttaattgttctatcatctatgtggttctgttacaagctttataatagttgggaaaaatatggactttccattgatagagatcgggcggtggaaaaagtaaaaagtcctaacggaaaggtacctggaacctcatatcatgcttggtgtttgatttaatccatgtagtgccttgctaagcttgtattattg

SEQ ID NO: 83378 - DNA, 628 bp, Zea Mays
gaatggatgattatgacgtgtggggccgatagatcagtgaaacggttgagcaagggggtatgcttgtgctgctgacgggctggactcaagtcaggaacagtttcaggtgatttggtgcgcgcgacatggcacacaactgagctgaaccgggcgtgaggagttgtcgcgcgaggatgaaaagagaggtggttcgcgatgataaggtgtgtgtatatatagaaagaagagggcgcgaaagtcagttgcacgatttcgccacggctcgtgatgggaggcaagacgaggagaggctgttgaggctttgtccaagtcagacgcgtgcacgcgaaatagacaacttttagagaagataaagctgacacttggggcctcagatgaccgcgagaagaacgagtgagggggaaggcggttgcgtgcacatcgcgtgagacgttgcacgacaaggtgagaaaaggtgaagtttacgagtatagacaaaggtagacacatggggagacaggggtagacggagggtagacagggatagcagatgtgagcgacatgttgttcgcgaggagaagcagttcggtgatctcgcgaaaaagcacacgagatctggaataggctcgacgagaggaagaaatatata

SEQ ID NO: 83379 - DNA, 365 bp, Zea Mays
gggagaacgggacctcgggtatcagacccccgagcaagtcctcaaggacatcgtcactggagactccgactctggtgatggcgacgaccgccgcaagaagctgtacgtaatgtatggcggaagctgggggctcacctcccgtaggaacgtgaagtccctacgccgcgaggtcctttcggcgaccccaggggtcccgaaggcagccccccatcagcggtgtcggagcaccactacctccttcgggacatccgactgccccgaaaacatggcaagggctggtattctaccactcatcaccgcccctgtcatcgccaacatgaagctgcatcatgtgctgattgatggtggagctgggctcaacatca

SEQ ID NO: 83380 - DNA, 359 bp, Zea Mays
gtcaaaccacctttttgatacctccaccctcaaaggaggacgggaagaagaacaccatcacgccggctcctttctaccccgacatcttcttcatccaggggagattggagtcagcgcccatttccgacgatgagcctaccatgcaaggagaggaacctccccagcgtgaagcacgatgacagaggaacagacaccggaacgtgcagtgacatcatgaagccggggaacgggatccggtgcagcccgtatctcgagacgaagcctcaaaggtgggagaaactcccgacgaatgagtgcacttagaaaggcacaactctcgccgccacgatcgccgacaatctcaagaccgggagcgagag

SEQ ID NO: 83381 - DNA, 793 bp, Zea Mays
tgcggggttctagtcgtgttgattggaagccggatcgtctgtgtgacatctccaccaaatcgatagttaccttcacctgatggaagatcgggcacccccgttcctatcaagtggtattcaaagactcaggttttaccgtcaggattaccctagtttagtttatgtttttcttcctataactccagaaaattgccatacaaaaaaaattccgctgtcctagaaccctgtttagccttacaatttcgtttcagaatgctttgttgagtttgtgtccgtgttcgagtcttgttgctggtttaggtcgtgtcgtcatcgtagttcaaccgctccgtcgctgttatttgtttccgccgctatcccatccacctttcccagattacaagtcgagacaccacattactcgatttgccctcgctagccgccttgtgtgaactctcgccacgctagccctagattaggttgcaagccgccttgcatcgtagcccctccttgtctcatcatctggcgcttacctattgcttataccagggaggtttgtgcccctgtgctccatagctgccgctacggttcctgccaatttgtgcctttgacaaccataacttgaggtaccttccataaaacgggcataacttttcgctcggtgctccgcttgagttcaattttttacagcagatttctgactccattctaggatgacccaaactggccttaggcctgtttggttcggtcaaaaaattcaaaaaaaaatcgggaagataattaaaaaaattgtttaagtgttttcatgaatttc

SEQ ID NO: 83382 - DNA, 556 bp, Zea Mays
cacgaatcgatacgcaatggtagccgcggaatcggagatcgacggtccgtatttaacgaaggccagtccattcctacccatccgatcccgatcggacggatcaccacaaccccggttgaaccgttaccctttatctaatcgtcaccgttcattagagaatcgatagccagaggctttcgccccccattcaacatcgacacacgacggcgccgccgcacccattgcacggcggagcacgccgacgaggaagtcccctggcttccacggtgccctatttcgcatgagactacacacagaataactggcttccacggtgccctattttgcatgagactacacacagaataagtaggggagtatggcaaactcgggtgggcaatccttaccgtgaatcgtcgagaggtgtcaatgatctgcggtaggaagcagatctatggcggcggcaaggttcggcaagaaatttcgaccgccccgaggcacgatcccctaaccgcgcctgcaagcagcttcaccaagtccctgcgacgctacacaatctggtttcgatgccctgacg

SEQ ID NO: 83383 - DNA, 409 bp, Zea Mays
ggtttctgaagttgttgtgatattgctcccttgcttcatcttgttgcatcatataacacaattcttttgctgtttcgtcaatctgtcgatgtaattggctgtccccaaacattttttctttccacttctccaccagttgccgaatgcctctagttttttaatttcttgatctaagtcatcttgtggtgggaggtatttggctttcctctttcccatccccaaattgtggaccctgagagaatgagtttctgtttctccaacctggttatgatctattagagcaagaacaaaactagcagctgcactttctttggagtcaagatgaaggattgccttgctgtcgtggattcaccagaggtaggcgccaatgttggtcacctatcaaggttcctgaagagaaccataatag

SEQ ID NO: 83384 - DNA, 1025 bp, Zea Mays
ccgagctgttcctaacgactaggcgtggtagcgttcaaattctaagcatggagagcatcaccatacctaaaggaagctagaacggatagtaattgggctggaactaccttaggcgaagctggccacggaagagttctcctcggtggcgatggcgaccgaattgggggaaatcgaaattctccggctacggtggctaattggaggcgaggagtgatgctctgggttcgtagctagttagcggagcagacggggacgacaatttatagtgaccaacagcggtggctccaaatttggggaagacaagctggcggccggagtaaaggtgagtcaccggagttcgctaacgtggcaatcactgggcaaagacttacggccgttactggttatcctccacaacccgcgacgacgtggtgaaacggcctaaggcgtgtcgtggcagaggtaaacggcggcaaccccggcgatggtcgcacaaccacgtcaccggtgcaagtgggtacggtgagactggcttgaccactccccctcagatctttttacctcccacggttatccacttcacacagggcacgaatcgcggcggccggcgtgaatcgtggcgcggagatcaccgacggcgagttcactgaacctggattcttattcggtccactataccatcgcgatacaattcagtcgttctgacagagcaacttgcaggggcctcattctcaaatttttgtgtgacaacccactaatctgtctgtaacaaagtttttcttctataaaccagctttaattttgttatagcaacctcgatcaaacatccactggatcctatgcaaaatcgatctcaaagttcatcccagttcactgacagtcgaatttcagtgttaagggtgactgatagcccaacttcaggtccatttttctcccatttccatgtaactccaaggcttagtcacttaatcaaacttgaactactaacatagctctaccattttgttgtaatgacttggggcaaagtctccatggattaagagata

SEQ ID NO: 83385 - DNA, 559 bp, Zea Mays
caaattagagaatgaagatctccaaatcgtgttgtcagaacttctgatgaagattaccatggtacaatgaccagaaaagatctccggtgtcgtgagctcaacgacggtgatctgccgccacaattcgtgcccgcctgggagattcgtgccgcgggaggagtagataacgtcggggcggggtgaaaatatccgatgaggggtgaatctagtcgctggccggaccagccgtcgtgtcccgccgcggtcagtcgcgctggcatcaccggagctcatcatttttttcggccgtgacacataataaccactccttcgcgtcgtaagggtcgtggcaagctgccagttatcgttcacagaccagttccctcttgtgcgccatggtgagcaagccactgtgaaatatcctagctggataaccgtgatctcaatcccaaaaatcttgtccagttcgatcgggacctataaattgaggatgccctctgctccgcttcatagttacgcatccaacccatccccagctagcccctatcatgcaccactgcgtcacaattttgcatttccc

SEQ ID NO: 83386 - DNA, 411 bp, Zea Mays
ctatcacaaattatcatcactagtagtctagtggtcaagacatatgtctcttctggctccgaggaccaaggacatattaacgtctaatttagcttcaagctctgtggtgagtgggatttcatagttatttgtctactcttctcacttctggtagatcgaaggtagataatggtaagcatgccaaagggtggaattcagtgtagttcggctacctaaaccccaggtatatgtccattcaggaccgacctttaccatttagcttacagtgtataccaaacttgtcaaaggactatcccgagtcaattcagtgactataagtatttacaattccgagagatgtatgcgacacaagcatagaggtcctagatagaacgagtaaagtggttcgacgggaacacactatggttttca

SEQ ID NO: 83387 - DNA, 920 bp, Zea Mays
taacctttaaacatgaaaacaaaactacaaacataagacagtttgacttgcatggattctaggaattgatttatttaaggatgaagggagtagtttttgctatgtacatagatgtacactatgcctagtatatatattttttcgcaaaaaacggaggagaactgtcaactgtgtcattaaattaagaagaaagggtttaaggtcctagtatatctatgaaagccaaaacaccttatagtttggaacagagggagtacatataagtatgcatgattaataaaaaaaacgccattgcaaatttcacccactaaattaaattatccactccatgtttatatctctactatgtatgcataataacattgcatcatttaattgctcaaacccattatttatgggccttcacaggcagtggaaatttcaaggatgatgtaattaatttatttagggtcaaataacctttgactggttactggttaggtattggttactatcaccaagaaggcaatgatactcaaggattattatggctcaaactttatcaatgaagttaagaaaagaagcacaatggagaaaaacagtacttcttttgctaatgcatattttgatatgaaaaggaaggaatggaaaatccatctacagaaaaaaaaaacaaaagataataccttcagagcagctgcatctttctcagattcatcaacatattctccctgcatttcaagttacggaccaaaaaactcgatgaaagaattttacataataaataacttacataatcataaaatatctttttaaaatggggaaaagagaggaaatggtagaatataaataaatttcacctgcagatgccatatcaagatatgagcaaatatattacttcttcgagtagctccaagcaagtacccttcaaccagtttctg

SEQ ID NO: 83388 - DNA, 493 bp, Zea Mays
gcagtacgtacgtacgtccctgcgcagggccatgagcttgttttgccgcgcgcggacgtcatgcgtgccagtttttgtccctctgcacctgcctctagcagtagcagtctcctccaggcacaccgaggaggtcacggcgcaccctgagcaagcatagccaggaccgatatacggacacgatccagctagctaaagctagccattcatcacagcaagcgtactgcaccacttgcgtggcatggcacacatccaggctgctccgatccggtggtgcccgtagtcatcctgaatatagggtctatgtcaagttcagacccgatgatcaccattgagggttttacgggcaactaactcaatgcagtgctcaggaccaccatatatatcgtggctaggccagtctcttctcctgggttgcgaagacgaagccaggatatgagattagaggaccaaattagattagagaggctgttataagcatttttttgcatcattt

SEQ ID NO: 83389 - DNA, 773 bp, Zea Mays
aatttccaatagaagtccaatcagtacacgcttcggcttgcaccaaacaccccgaaccccaccgggaacactgatgcgtgatttcaattcagtcgggtgggaatcagcccaatcagaatattggtgggcgcacaaccaggtttgagtgtaaaaacctaaatttaagcgtaaatactgctagatatatcgtaaatgtcggtgcaatagtcaacacgatgtcacgtaacaaacatgtgtgaattcaggtggttaccgaaaataccgagccaacacgagaaacattgatatctttgggatgtcgtatttatgattgtgagattcacaagtttgagcgtaaatagtgtcagatatagcgtaaatattattataacggccaacagacatgcactaatccatgtggttaacgtaaataccgagacaacataagggacatagatatctctggtacgtggtattcatgattgtaaaatctttaagtttaaacgtaaatagtggcatatatagcgtaaatgttgttacaatagtcagtatgatgtcaagccgggggcctcatccacgtcgaaaccggctaccacggctgcggttggtcacctcttcgctcgagccgtgagcgatggcgtatgttccgattatcgcgagacgcctcctcgctgaatctgcccgccacctcctcgtcgagccgcggggcgacaaggtgcccctgccgcgcatcggtgactcggctcagcgctcgccactaatgactgcacgtttgcctcgctgcgacaccaacg

SEQ ID NO: 83390 - DNA, 742 bp, Zea Mays
caacaagggacgtacccatcatcaccgattcaccctccggtgttgtagccacctaggtataatagacccgtccagttttcttgaaattcttggctgttgaagtgttggtcgtgttcccctttccttggtttgagttcccagagggatgctgaaagttcgatttattttgcttcggatatgggcagtccttgatgaaatgttcggactttccatagttgaagcacccactggaagaattgggaagggcacagaaacgagtatcaggggcacttggctgattgttaggagcgggggcagtagtgggacgaataaagacgggttgcttcaatggatatgaagctgggcgaggcgaggaatgattttgattagaaggtcggatcaccaacccggttctcttttcaagcccttgatttgacctttcacctccaaacccctttgattttccatgtcccacatttttggcttccactgccagtgttgtactgacagccttactgtaggtgaggtccaagcatgttgccattttccgctgaagcctgtcattgagccccctcataaaacaattctttttcttcaagtcagtatccacctggttaatggcatactgagagagatggttgaatttgttgagatactgcatcaccgtatctcctccttgctttaaccggataaactcttttagcttcatctggagtactccctctggaacataatgttctcggaatgccaacttgaattcttc

SEQ ID NO: 83391 - DNA, 410 bp, Zea Mays
cttgattggctaaccgctgcatatggtttagttatgctaaaattttgtatgttatggctaaagttaagtttatgtttgattaataatatggtgggtgaggaccatcgatgaaaattaatcttagttaggttaattaagcttatcgtaaaaatttataaatcacgtgttatgttttttagcatcaaatatggtgggtgaggaccgtcgatggatgtatgaaggttggcgtatgaatcatccctcgacggagtggataagaaatacaaagaattttattgatcgtgcttttgctttgtcaagaggcacggatgtgcgatgtccatgtagtatgtgtcgggtttgtagatgccaagacaagagaactctatcggggcacctttgcaaatatggctacatgcctaactatgaag

SEQ ID NO: 83392 - DNA, 925 bp, Zea Mays
agatgtctgtacttcgtgttgtgcagctgctgccggtaggtgtggctgagagaccacagtgtttgcctagcagcgtcgttgaccgaagcagtgtaggtggatagcggcgttagagactcatgcgttgacagagtcatgaaccctctatcacctgcatccatcaccctgacatgaatgcgagtgatgtagtagcaagccctaggaggctcgtacactcgccatgtctcgtacaggggtcggacgtaggtttccaatgcgtgcagcacgtcttacagcaggttagggaagtgctctgtctcgaacattgaggtgtaatgttcagtgataggccataaccccacgtagtggtcctgctgttcttcattggattcttcgttgacgttctcctcatcatcttcttcgtcgtcgtcatcttcatcatcgtccccagagtcgtccgggtcgtcgcctccgggagcaggagcttgaacaactggtgccggcggtgctgaggttgatgatctagctgcgaaggctagtgattctgccaatggggtgggcgtaggcagaagttcctccgagctgtcctccaagatgactccacgctccactcgaatgcaagggagatccacaggaatttccacaactacctctgggtagacaggaacttgccatggcggagggatgaagttggtgttgatccgagtggtttgaatggtacggaccatctataagagaaaatgtcaacttagttgatgtttaaagaggtaaccttaataaaataattttgtaaggacaaaaatagcatgttttaataaactaggttttccatttctaactaatctaacgacctagagtcaacattgctttgataccacttctgtcacacctggttctgggggcaaaaccgaatgcatagcatatgtggggccaggatccatttccc

SEQ ID NO: 83393 - DNA, 763 bp, Zea Mays
caaataacaaaataaataaatacagaaatatgcacctcatgatgaagctcttgcattttttatttgcattcaaattgttcgacaagttcaaattaggaaaatagaatttgaaaaatagaaaaagaaaaaataaatgggaaggggaggaaagaaaaataatattagtgcaaataatggatgttatatcctcattagggatgaactttatatttggaaattggaagttcaaaatgtgactttgaatttggtttggatattccaaatttgaaataggaaagaaaatagaagagaaaaaggaaaaattccctgtgcttgggccaacattcgtctgttttggtccatctctagtttctatttccgtgcggccgaaaactccctccacgctcgacccatccattcccgtatgggctctccgcgtcggtcactgccgtgtggacctgcccagcgcacgcacgtagcttcccttcctgtcactgccttggggacccgtagtgtcagcctccttaccatcgcgcttgcacatctgcgctctcctacatctatcatatgggcccgggtgtacagattctttgtctactcctctaccggtggcgtgtaatccttgcggctcaacgacttggctagagattgcacgacccgcttccacctcaaccacccccggtattctagctcggacttcgccatagggttataaatcacaagtgtcgcgacctcctcgtcctcccaaccctacgtcgagctcaactgggacccgcctcgtgga

SEQ ID NO: 83394 - DNA, 865 bp, Zea Mays
ggctagtgaaatctctgcacatttgccacttgccacttttcttcttcactgtgactacgttggcgagccatgtggggtagtcgattggttcaataaacttggcttcgagcagtttgtggacttcgaccttggatgcttcagttttctcgtctaacattttatgaagtttttgctttttcggccacaccaaagggtctatgcttagaccatgcccgatgattgaatgactaacactgatgaggtctagggcggacaaatgaagacgtccttgttgcgacttaggcaggataacagcttggcctctttatcttaggtgaggtcttcgctaattaacactgtctgatttggtattgaggtgtctagagggacttttttttggcttggtcggtgctttgaatttgagctttggttggtgctactttcttagggcgcggaatagcggggccttcgtcctcagagataagggagtggacgttgcactgtcctgggacgaagtctctttcgatgttgtgagtagtttgttggtccccgtaaattgttactgtgtcgagaggccctaggattttcatgcaaaggttaaggccatgaattgctgcttcaattttgttgatagaccctctccccatcatggcgttgtatggatagaccatgtcagctatgacgaaggtcacctgttctgatcttgcattagggtttgcaccgacggagaggggagctctatcttgccaagtggaaatgtcccctttcctccaaaaccgtagagtgtgttgtcggctggctgaagaaggctgtggttgatgcccatctagtcgaaggtgtaacacctctggtgttactgtcactaaaactggagcataacatcatg

SEQ ID NO: 83395 - DNA, 394 bp, Zea Mays
ctccaccaaatagcatagcccccgagctgtagcccatcactttggcttgttcttccagcttcaaagcattctctccactcaattcgtcgctagaaaggtgtctaatgaagaaatcaacttctccatccatctctttgccataaagcggatgtgcccaactgtgtctgcttctgcagcaatgctcggctctttggccccctttttagatcctagaggttttcaccttcggcatcttttgatttgccttcatcctcctctagtgacgaagccccaaagattgcctcaacaagtggctcaatttgtgagctctttcctcctgtcggggatccctttgcctccatgggtgtcgaagcatgaccacatttgtctgtcccctatgtagttaacaacaggc

SEQ ID NO: 83396 - DNA, 561 bp, Zea Mays
gttaatctgacaaccataaacgttttatgactttgctttgtcttgacacaagattcgtgataactccacatactgccacccactcctgatgtaactccaaacgggttttgagatctaaaccataaaatcatcatccggtgattttgacgttgaaaccaaaccactctggagtagcatatcctctacgctcactccataatcttgacacgtgtcacctctagttctcgatcgttcgatcaccaagtcgtccaacgctcccgcttgactttgtcaacatagtctactactccatatatacttgtatttgctgttgtcctgaagtgtcagacatgcacggttagtatcccgtccagcttggtcccccaatctatcgggacaagcctgctttgaccttcaccgtcgattgtgtttatgctatacatatctacgtatatcataagccaaaagacatgttatattacaccacattgacgttaatgttagtccacaaactcaacaaaaacccgattgtatcattaacaatcacctgaactctatagacacgtctcaactagtcaactg

SEQ ID NO: 83397 - DNA, 524 bp, Zea Mays
ccccggttgaactttccttgtaccccggttgaacctgtctagtccccggttgaacctgtctggaacccggttgaactcaccctggacccaagttgaacttgccctggaccccggttgaacttgtcatggaccccagttgaacctccctggacccgattgaacttgtcctgcaccccggttgaacctgcctggaccctagttgaagttaagttcaactcagctgaaaaagctaaattcagctgaagaagctcaactcagctaagaaagttcaactcagctaagaaagttcaactcggctaaagaagctcaactcagctgaagaagctcaactcagctgaaaaagctcaactcagctgaagaagctcaactcagttgaagaagctcaactcagctaaagaagctcaactcagctgaagaagctcaacttagctgaaaagctcaactcagctgaagaagctcaactcagctgaagaagttcaactcaactgataaagttcaactcaactgaagaagctcaactcaac

SEQ ID NO: 83398 - DNA, 312 bp, Zea Mays
ccgcaaacactcttgtaccggcccgcactcttttcctcccgggggtgaggtttttaacgaggcggagccatgtaatatatgtgagaaaaatcccccgcaaaaacatgtgtcgaaagaagaccgcgacaccggtcttcggcattcgaccaattcgaagtcaccgcgaggctaagcgctagccaccctcgcgtgcgacaaatccgcgcagaagtcgcctaagggtgcagccggacttagcacaacaagtgcgaaaaaattccgatgtctatcgcgaagactacccgcgcagaagtcgcctaagggtgcagccgg

SEQ ID NO: 83399 - DNA, 861 bp, Zea Mays
cgcgcatgatatcctgggaacacggggttcaacttgtaaattctaggacctttctacgataatcttaatactattgtggatggcggatttattgcaagaaagcacagggtctcattcataaaacgatgcggccaagggttatcgattactctcagccgctcgatctattccggacggccctgatcagatctcaccctcgcgtgaaccggtgtgttattacggtcgtaggataaaaatcgtgtgctcacaattaactcgaaacccgtatgaatcggtacgcaattacgactgttcgatccgagatctatggttgccaacgcgaccctctagatctaatccgagtcacacatagccgatcgaatggccagggggcttcttccctgcgcaacagccgagcatggtgacgcatcctggcacacggcggagcctcaccagatttgtttccccccgatgcacaggtgcactaccaccaacattggcaggcacaaatcgaagggatggataacgcgagacaattggcaaagaatttaccaccgattaggtagcacagaaccctgcccatagctaagtgtgggtccacggcgacccgcgacttcgtcgagaaattcccagtgtgacgcatgctaatcgagtccggcgaggccacgagcaccatcccggtgacgagttgaagctcctagacccgacaccgggaccccgtagatggtgtacacacgtgtccacagtggcggcttcccctctcaatccttctcccctctagctctgatgagttgcgcccaggatgggacatgctcctgctcttgtgagcgaggcacgcccgcgttccgcgaggaaatcccggccattcccaccagatgcaca

SEQ ID NO: 83400 - DNA, 589 bp, Zea Mays
attgacgagctaggagtggaattgctaccaatgggacaatccttgcattgatgtcccttctttcggcatatgtagcataggcgatcctcaagtcttgaagatttcttccttccttgtttcttgcttgctacatggttagtgaatattttcttttctaaccttatgcctttttgttttaaatggggacaagatctaaataagtgtcccttcttggagcatttaaaacaaactttatcatccttgtcaataatcaagtcatttttaatatagggacatgacctaatcaagtgtcccttttcaaagcattcactacacttcttacttttcttagtgtgaagtgagacttgattattaccttggatgttaccttttatggaggcgtggttgaggcttttggaagaggtattgattttcttcttttgttccttcctcttagcaatcctcaagtccttgacattttcttcaagggatttagtgcatgccacggttgttcccgtctcaagcttcttcaccatgtgatcacagttatcttgagaaggttgagcaatacacttccctttttgttgtgtcaagctcatttttagcctct

SEQ ID NO: 83401 - DNA, 863 bp, Zea Mays
gttcatacaggagcgaaaaggtgaaattatattacaaggtattcacaaataaggacaatattttgttcaaactgtcagttacaatcttttgccaaatgatgcaaagagatcctaagctttctacagatagttacaaaagttgtaagaatcttcagccctttggaacaagcttcggctttacggccttcggtgccaccattctgcagagagaagaaggtatgaagaaatcaggaaatatggtaaaggaaaaccaagttaaagaagacaggtaaaagtttgataccaagttatgtagttttcgtgcttcgtccccggccagttcgtgcccgccttttgcccagatttgagtgataaatctgttccctatgcttcgggcttcggctggaatgtcaactagatctgatgttgaaagattgaaatttggcttattaacaatttttgcgtgagtgcatccggccttcataaaagttgtggctgtaccgcacgaagccactaggacacagaaatccacgtgcccagtgagaacttcgtcaagggcttcaacttcatttttaatgtgattaaaggtcttggggatgtctttggccaaagggttaaattcttcagaagcagctccaaccgagttgaatatccccttcaactgtttaacgcaccgactggcgaagtcagcacacttgttccgaaggttctcaaaagctttatgtatcttcgtattccttttagtttcggctgtgacctttgcttcaagctcctttgttttatggtcaaagtgccgtgaactttcttccaaaactgttcgagcttcgtctagttcctcgctcaacttagtattttgagatcctgcttctgcgaggtaaccttta

SEQ ID NO: 83402 - DNA, 371 bp, Zea Mays
ctatctctttcagtgacaatatttatgctttggtaaactctctctctgatatattaatattgttgttacaatgtagattgtttctgaccccgtgacatggacttttgggtgcttatacatttattatttttctttacctcgaggattttccccggagctatgtttctccatttttcataattgtggtagaacagttctggttatctataggcaagtcctaaacactatctcttccagcgacgacatttacacttctgtaatctttctgcctgagctattagctggaacatctttttaccatgacaaatattgtcgcctagctcattcccatcaaagaaattcaaaatagcagtccacaacccgagttatgc

SEQ ID NO: 83403 - DNA, 386 bp, Zea Mays
ctcgtgttcttctatgggatgttctagcctccctcatgttccctgttgctcatagcaccatccaattgaattagaccgccttgaatcacccagaacacgttaagttatctccagtttccatcgccaccgtggacagaacgattttgagctagaatgttgcaattaatggaggggaaatggtccctaggggtggaattaggtgtcagccacaccgaagcatcgatagttgcgttagctggccagtataggctcgccggagccgctgctccgccgtccatgatcggggacctcatcttgcgaagaaatagaaagggaggggccttagtgcagatgtcagtgagacaaagaaacagtggagaggattctttatggggttttcaaacgac

SEQ ID NO: 83404 - DNA, 396 bp, Zea Mays
gtcttatagatccgtttagttaccatattcggccaaactagactaagattccatgcttgcatccaatacaagcctatcaaccgcctcactctctctactctttttgagtttccaccactgccaaatgagcaccaccctatttccttctccgctcatggaaatcctcgacaacattgaactcatgcattgcacttgtgcccttgtcatttggtcccttcttgtctgctcttgttttcttctcacattgctacgtaaaaatttgaaggatgatcaggtaaaagatatgggaggggttggatgacaagggtacaagcatgcatggtgcttgagctcaatgtcatcaagtgttgggtgatggtctaggagatgagaagttgcatcctgtttattgggtgg

SEQ ID NO: 83405 - DNA, 566 bp, Zea Mays
tccaagctccgggccatctctttcgaaatgttggtactaggtggcttgcgttggaacgagcgataaacccataacaaccaaagttgttgtggtactattctttacccatggccttcgtctcatatagcaattcatacatattgcagaagcactttgcgcttggttctaacccctagctccttactgcccacacaaaaatccccatccttattatggcttcgggggtgatctgatggagaaatatttggaacgtcttcagcacttcaactacaaacttactcaaaggaaaccgaagtttagccttgaagaagcttcggtagatcacaacttcattttcttcaggggcagggacgttgttgtctccgccagccctcacaatagacatatcttggaaatagctccctctcatgttctctagatgactgtgtttgatggttgatttttcgaagattgaatgacttggcctctagggccgatcctcagaatcttcgtccccactttctatatcatagctgtcgctgtcaccagtatcttcagacaggccctccagtatctccttagtaatg

SEQ ID NO: 83406 - DNA, 411 bp, Zea Mays
ttctgcacgacatgcttatcagctatcaggtatcctgtcgcctgctactgatcttgcatttagcgtggattgattgattgaatgactggtttctaaaattagcagaattttagttttgttcagtgcaagattgattgaatgactcggatattcttggtgggtggtgctggtggatgttgccgtgcagtgcaggctgcaggggcacccagctcccagctgagctgagcatgcccagcccagggaagtgagagagcagttggaccggaggccggccccgtggtggcctagccttcctcaatgcaaggtctttcatctttttatggggcaggcaatgcgtttggcattgggaagggaacagtgctgctgctgccctgccctgccactgccatggctggtgacctgtgaggtgag

SEQ ID NO: 83407 - DNA, 460 bp, Zea Mays
ggcaaggccaatgtggtggcagatgcattgagtcgtaagacttcctgccactgtcttatggcgaagacctctgagaacactttgtgtcaagaaatggaaaagctaaacctggggatcatccaacaagggactctaaatcagctaaggcttgagtcaatcattttgcaaaggataattgatgctcaaaaggataatctgggtatgaagcacatacgagagaagataagggctagagtagccaagtgtttcaaggaagacgaacaaggtgtgatatggtttaaaaaccgcatagttgtgccaaagaacgaagagctccgccagcaaattcttgatgaagcacatcttagtcgttattctattcatcccggaagcactaagatgtaccaagatttaaagcagcattactggtggacaaagatgaagattgaaattgcacgctatgtggctaaatgtgacactt

SEQ ID NO: 83408 - DNA, 1019 bp, Zea Mays
atttgacgtcatgaatattcttcagggtatgtaaatgcgttatgagcaggagatattatattaagtggatattctttagggttcggatgcttcctatatgttttgtgaatgacatgtgttataaagtcatgaatattctgtggcactcggctgacaagacaagggagcgatgcatgcatatggttagctgctcggaggctggaatatatccgatcgatcgacggccacgcattcctagatagattgcgggccgtgatccccagctcggaatcggaaccctagaggcatcgttatcagccgtcctcctcgtctatatatgcgactagttgagatcgaaaccccatcagctggcctcctgcttttgcttatcgaaacctcgctcctaaatatcccatcgtcgtcgcctgccatctgccgccggcccgccgccaccactgcaccgcacactagctagtagctactagctagacgaccggccggagatggatccggtgtggttagacttagagtggttccacatggacggggcggagctcgccaaccgcggccgtcgaccggatcatcttgatgatgaggacgatctctatgtagccttggccttggctccctacgttgatcgccaccggcctcgaacccgtccccgatccccatccccatccccatccccgccctcacacgaggaagccggggacgacgctgctactgctcgcaacaacaagcgtgcttgcatccccgcttacagcgaagccatcctggggctcaaggaggtggtgccaaccgctaagcacgacgacgacgactgtgccatctgcctcaacccattggccgatatcgctggtcctgatcacaagaaggacgacgcgtcagctacgtcgatgcttcgggccatgccctgctcccacatcttccaccagcactgcatcttccagtggctccatcgcaacaccgtctgtcctctctgtcgctaccagctgcccaccactttcgaggacgaggacactgaagtcgagaaggacgag

SEQ ID NO: 83409 - DNA, 1212 bp, Zea Mays
cgcgtgcagtgggaggaagagggaagcgagcgcggcatgagagaatgacccctaggcccgtgctgtcggcgatacatcagggatggcgcgcggacgtgtttggcgtgactgacagaaggggtccaccagtcggcgcatggtggaggagagaaggctgggtcgcgcggaaggaatcctcttgtgggccgaaaagcaaaatctaggcccaatcccgcgttttttcctttttcttttatattttcctttttccttttttgattttcttttccttttcttttgaacctctaatttgaatttgaatcttgttatgagtttcacctttgagtcaaatatacaaattcaaatcctagtgtaggaataatatatttttatttacttatttttttatccacataatattttctttcttctcttttctaaattctagaatttcttttagatcttaaataccattttggacattaatatatttctttttacattatttttatagtgtcacaaaatgaaaacctcagcatgatacataaattagtggtatgtcttttattaattatttgtttttaaatgtggtgttcacatgtgatggtaaatagagatggcacatatagtggaaatatgtctcctttaatatatttttacaaattgggtattacatgtcaagaccttgactctcttcaccttcggagcactagaagatgttgaagcagcaactttccttttccccccttgccttcggacaggaaagctgtaatcagggtaaacaaatccaataacatcgaaaaccctattcagtctctttttccctcgagcgctgaaggcaaccgtcatggcttcgtcttctgtcctcgagtaggcttcaagtagctcatcactcgttgcctctatagcgtctagccagtcatcatttggctcatcaaattgacttctgtaccagaaggtatacttgagataaaccaagtcactttggctggagccagtagtagcttccttcatcatttcccattcatttgcaagaggccatactttgtaagcaatgtgctctttaactaaatctctcgtgccaatgtaggttcatatggtgttaaaggcatttggcatgcttgcacttcattcccaagtgtgattgatggccttctaatgctgaagcatgaccatatatgacgttgaatgacacccctcacgtcttccctctaattcaggtcattcttcacg

SEQ ID NO: 83410 - DNA, 464 bp, Zea Mays
tagggatatgtggtaaagtttagcatttttatttaaacatccctcaagtggtaaaatttagcaaaactttagcatgtgctaaaatttagcagtatggaaatatacataccctaattcgaccatctttttcatcgacctttttactgtgtctcattgggcaccaaccaaacgcaagacgtaggtaacgaacatggtaagggtatgtacaaccttgagactccggttcaattttctaaatacaagagacgactaaaatactacatgatacaatcatgagaccctaaatcataaatacagataagagacaacatgtatagaaagtcgtgaagagacagactcttcgtgaagaaccgatctcttgtttttttacttagccctttagagacaacttaaaagattgtattaaataaggttatacatgttctaagggctaaggctctctccaaccatagatactaacgcgt

SEQ ID NO: 83411 - DNA, 475 bp, Zea Mays
cagtgtaaggagactctcgtactgtatgactcatgagtgagctaggatgtgatagactggtggcggatgtaccctggacattgatgggcttcatccgtgtgtgtgatggatcgggcaggtggagcagtagcggagtggaggaggatgtggagcacagcacagtgtgctgctcctgccctgcgctccgctcacatggttggcggcctctgcacgaaggaaagccgtgaaggctgtggagccggaggcgcaggagcattccataagtgatcacttcagtacgttgtcacgcttttgccgtctctccctctcaccactacaagaaaaaaggcaaacggtatcggccaaaaactcacactcttactgaaataagccgacacttttagtataagagtgtcggttgaccgacactcttagccgacactctaaattggacgctcttattcgtatagaagtgtggggaccgacactcttatat

SEQ ID NO: 83412 - DNA, 491 bp, Zea Mays
gcgtgagcatgtcgcaccgacttaaggcatttctaacttaagccgattgctcctttagtagggcatagtgatcaccctaagtcatgtaagcatgagcatgtcacaccgacttaaggcgtttccgacttaagccgattgctccgttagtagggcatagtgaccacctaagtcatgtcatgccaattttgagtcgagcccaatctaagtcagttgtcaatcaagagtttgaatgcctttggaagatgaaagctttattgatgatgaaaccttctggttacagagtacaactttccctcgagacttttgaggtatcactaagggtagaacttcttgaggtgctcgatattccatgcgttccccacctcggtgccatccatctgagtgagcttgtaggatctcggccgtgtgacctctgctatgatgaatggtccttcccatggtggtgacagcttgtgttgtccctctcccgttagtactcagcggaggaccaa

SEQ ID NO: 83413 - DNA, 447 bp, Zea Mays
ctggcgtatgcatcaatgtgatgcttcaacctctgattgaagagttaaagaagctatgggaaggagtggaagcctatgactgctttaagaagcagaaattcaatctacgggttgcatatttgttctcggttcatgattttatggcgtatggtattttctctggatggagcgtgcatggtagattggcatgtccttattatggtcaagatacacattgtttttgtcttagtgctggtggcaagatatgttactttgattgccatagatgttttctacccttgaatcaccccttcagaaggcagagaaaggagtttaggaagggcacaatcgttacaaagggaccgcccaagcgatgtagtgggatagaaattacagaagaccataggaaacttgtcctagatgagattgggaaacggtatcaaggttttggtgaggagcataactgga

SEQ ID NO: 83414 - DNA, 564 bp, Zea Mays
ctgatgtctttacggattcaaaaaaagcgtctagcacgctagtcattctcctttttcttggagtcactgtgggaacgcttgatggcttcagcaatcctattgtacctggtgggctccacaccttcaactgatctactgccttctctaatttcggctcttcgtccgggtttgtactagcctcgactagcacaacatgacctggttctgtggtagaaggggcaactcctgcacgtttaataagctctggcacatcagccatctcaatgcatcgtggtctacgtgtcaagaccttcactttcttcgccttcggcacactagaagatgctgaagcagcaattttccttttccccttttatttccgaacaagaaaacattagtcagggtagataaacccgataacatcgaaaaccctattcagtctctttttccctcgagcgccgaaggcgactgtcatagctttgtcttcatccctcgagtaggctccaagtagctcatcacttgttgcctctatagcatccaaccaatcatcatttggctcgtcaaaccgatctctgaaccaaaatg

SEQ ID NO: 83415 - DNA, 1085 bp, Zea Mays
tgaggattgaattagtgcacgtatgtgtgtgtgtcgtggtgtattatggtagtggtggcgtaagatatttgattaaggtgtgcgggtatatgccgtaatatgattatactcgcgacgaggaaagatgtacgtattaagtaacacgacgtttaggttgctattgtataatcgtgtgaaggatgtgcatgatggtcatgtgactaaagggtggtgtagtggcaaagcgagaagtaagtttaatttttttaaacgattagttgatagcatttgtcggtgtcgtcatgctttctgttgtatgacggatcgatgccttgctttatcaaatattgcattccattcacattgggtaaaataaatatcttgttgattgattagaggtcttatatgagcgttatcgcagcccaagaattattggaagcaagtagcattcataagtcggtcctggttaaaattgaagaacaatccgataacatatgcacctaagtgctttaggtccttcagtagcaaatgtaagtcttatggagttttatgctatgtgttaacgcctccatgttagaccccccaagactgtgccattttaattgacctgtgtattaacaactttaagttgagcaatgattaggaaaatctgattaatctgctccaacccatgtttcgagttacaatgtctaaaatggtttgctaagtcttatactgcgttagccaactcatgttaagtaggagtcgatttcgtaagtgattgtgatatataggttgtgtctcggattgcgataataataggcaagccgacgtgtatgttatttagcgggctatgtcgttgctctagttagccgaattgttagatggtttggttgagctcgtgctcacgaggaattgctggttgtagtctaaatacgtatggttatggtcgcggatgaaaaatattaatgctcatgtgatgtctaaattaaaatgcaaattattgggtgaaaagcgtttcgatattgattatcggggagaacgcgttgttaattgagtatggtacttctagtgctcgaaatgacacggataaaaattagtaagtctacttgttagttctcacttgg

SEQ ID NO: 83416 - DNA, 487 bp, Zea Mays
aagtgtcgaagtctgcactcgaccccctggtaatcatgtggatgaccccacagaaaggttgatcggtgaagttctcttgtttgggtgctggtggggtggtgggggattttggtgatgtggtggtgagggaagggcttggatctcttggtgttgctaatacatgtggttttgctggtgggggtggaatggttcattgtggaattgtcgctggtggtattgttggggatgataggtgtgtgcaaatactcgttggctggttgatttctggccattcggtctttggtggccttggtttcggggcagtccctggtgggatgtgcggagtcttcgccgtgaaaaaggcagtagaaccttcgcggttgtggggctcggccttttcctctacctctagggttggtgccgcggccctgttgtgtggggtactcttggcgacgagcggtgtctccagtctgctgctggttggcgatagtgttcacttgttgctggt

SEQ ID NO: 83417 - DNA, 928 bp, Zea Mays
tagaataggatttaggtcatttattatagcttttatcttaaaaattagctcctagggtgtatatgtaaggtcacagggacttctatgtaagaatccccaaccatcgagggacgaccggtttattataataaagccgaggggctcatatgcaaacgttcaggccgaaggggtatggatgaacgagagccattggatttaaaggctatggcccagattagatctggcacaagcccgaactggtaggagatgatgacagcacgatcggggatctttggttccaatttcattagcacaagattgcatcgagtccgtccacccgaggatccatggtcataatccatcagggtgaagcggtatccagccttcaatcctaccccttcgatcgagaatctacagctatttcttggttcgactgaaacactacgaccgctcgatcaccaccgtcgatccacggacacatgaccacaacacatctcccccaaccctagtggtccaaaacaacggcacacgcatgcccagcggcgccatcgctgggaaactcgaactgatgcatgggcacagtacttccctaacccaagctggctacacgacgctacggactccacgaatcttacaaaggacttaccagagcgggagatgacccatagacgagtgcccacgacggatagaagattcgcagcatgggtcgatgcccgacgaggaattttatccgctccaaccaattatgcccgccttaccttctctatcgcaagtagcagcgaccgaagaacccgacgacgaaggcactcatggcctggcccctagcgcaacggcgcggcacacactctcttccacccgacgccggagctcccaatgcaaaatttgctcggctcaatggaaggatggagaaggaggcggtcggggatttatatatcccagtaggcggctc

SEQ ID NO: 83418 - DNA, 1050 bp, Zea Mays
atcacatcggcttgaccagaaacagtgcaatgactagacagtaaataacatctaaacttggtgcatgcataaaacaagcataagcataacttctcaataaaagtgtaccttgtttcagcatccaccaacctccaacttagatatgtcaccacattctcctttacttcagtttcttgtgtcataacagccctaatgaccttatcttcagctgcaatgtataatcggaatggtactcctgctcgtggtgcttttaatacgggaagacaagtattttttaatgagatcaaatgcttcctgctgctctgcccccaagcgaattcgacatcattcttaagccaaaggataggggtgaaggcatcaatcttcctggctaggttagaaataaaccttcgttaataattcaccttgccgagaaacttctgcgcttcgaccttacaggtcgaaggtcccacattccgaatagacttgattcggtcagggtctatctctataccatattcatggatgacaaatcctaaaaacttaccagccgacactccaaaagcacatttacgtgggttcattttcaaaccataccgacgcatattattaaaggctttgcacaaatcagctaaatgaaaactaaactcagccgattttactacaatatcatcaatgtagacttccatagtgtttcccaacaactcatgaaagatcaaattcatagccctctgataagtagcaccgacatttttagaccaaatgtcatgacaactcactcaaataaaccaatgaagcttggacatataaaggtcattttagacgcatcctcttcggccatgaaaatctgattatatccggcattaccatcaaaaaagctaataatcctatttcctgatgcattattgattaatgtgtcggctatgggcatgggatactcatctttaggagtcgctctttttaaattgcgaaaatcaaaacatactctaagcttacctgactccttctccaccggcacaatattggagacccactctgcgtatctgcaaggtctaataaaattagcttcta

SEQ ID NO: 83419 - DNA, 1060 bp, Zea Mays
tccatatcgtaataaagcacgaccaccctaatctcccgggggcaggaaccctttctctttacgtgtcgtgtgacagcggagtccatagcagacacggacccaacggtcctactacctctatagtatacaggaatatactatgcggcgcggtgtcggtgactgagctttccattgccctcgcttttttatgagccccgcgcccccgcgctttgctccctgctggctggccaataggatcgcccctccgtgctcggctgtcagtaaagcagacccactattctactgtctgattggtgcctgcctgcctgaacacggtgaagggttggaaagctgactcttctcatcaatcctcaaaaccaacggaacggcactatcaccggctgcgtttctcgctgaccacttcgtcaggactgctaatcatgccggggcggggccgctgctggcgtgggattggtcgagtatctatcaagtcgttgatcctagctgtcatcgaatattttatgggtgcatgcacgtagtatattttttgcataaatgttcgggggaacgagcaaaatgcagtagtagtgttttacagaggtttttttttcctttctatttcatgctcaccgagatttccgtcctattgaatgcgccgccaccgcccatgtggccagtctgggaatcggggtgaatcaatggcagggaagcagcaaggacgacgaagcgaaggactccagggaacggaagataccccaaatcaaaatcgcgtgggtgtcttgtccttgcgatattcttccattaaacacgcaacagttgtccatcccgtgcattgccaattgccatagtacagaggtagtatattgctagacagggcagaagattattgtgttgccacagcaaccaaaccatagaacctatctcacttgtcctgaacaaaggctgcttgctgcctgtgatcggaagatatgcttgcaaaatctttggggttttggtaccagtctcgaacaagaaaacttgttcacctcgagaggcaagaatgggaaaaaaagaaagaaagaaagaaatatgcccaagaact

SEQ ID NO: 83420 - DNA, 556 bp, Zea Mays
tccaccctggcactgggttggacgatcgagtgggatgctgcctcaggaggagaggacctggaggagtgacttgacggggcttcaccatgttactcatttacctttgttagttatttttgttgcaacaaaaacaatggttattgcttttgaactctgattgttgtaataacttaagtactttttttaagtagtggtattgtgctttattgtatttctctatgtttaaccttcaagtggggaagtggtactcgatccttgttgagtggtttatcggaatgggtctgatgaactaacagtttattccaatttaagtgtgttattgcctctaatgcgagacttgggcagttaagctagaataatctgggtggttccgccacaacacccttctcaccatcgccaagtcgtcatcgtgaacctagcagtttggtacccagcgcttcctccctatatgtatggatacctcgaaggtgctgcatctggagcactaggacgaagcaagcaaggacgcatgcgactgcatgatactactcgacgcgtttgtctacatcgagatggc

SEQ ID NO: 83421 - DNA, 504 bp, Zea Mays
tgctatttaggaaagaatatgcggaggcaaagtactgtcccaagtgtaaatcgtctaggttcatggaggtagactctcgtgatagacagaagaggtagctcgacatccccttgacaatcctacggcaccttccgttcgtatcgaggatccagcgtctgtacatgacagaggaatccgcaaaacagatgacatggcacaaaaatggaaaacgatacaatcctgacaagatggtgcacgcatctgatggtgaagcatggaaacactttgatgccattcaccataagaaagccgaagaggctcgtaatgtacgtgttgcgttggccacagatgggttcaatccctatggaatgagcgctgccccgtacacatgttggcccgtgtttgttatcccaatcaatctcccccctggtgtgtgctttcaaaggcacaatatatttgtgtcattgataattcccggacacccgggaaataaaatgggcgtgtacatggagcctttgatcgatg

SEQ ID NO: 83422 - DNA, 477 bp, Zea Mays
tgtttcaattaaatcataagaaagccaaaatttgtggaacaataggcaaatgaatttttaccaaattattgatgaagtagaccaccagagaaaaatgcaaaacctattcaaaactacaaaataacacccattacccctaccccatgaaaaaggccatataatccaagaatttctaccaccctttcccttaagcaaaaagttgccaaattctaggatgattactcttgcacaaagaagaggacatgaaaatttagaaatccgttttttgatatttttcaagtatagtggtagtagaaagcaccccattggctagaaactttataaaatcacagtaaaatgaccaataagtattagtggctgaaatttggtgcaaagtcatgttattacacctaaatgccagcaaaaataagccttagagaataacctacagttaaagtagagttgtagttcaaagcaccccctctgccctaaaacttg

SEQ ID NO: 83423 - DNA, 425 bp, Zea Mays
gtccattacactaaaatctcccatactcccatgtttagttgtgccttcataatcttctcaggagtttgcaacaccttaccattcaatagtgctggtagagggactggtgatgctggagttggaccatcatatttcttgagtaaggaatcacgaaaatgcttcatcgttacttgagcctgaaggagaagttctctaatttcaactaagaattcatccctttccagtaattgtttatcaatggctgcaactttggcgatctatgggtgatatgaaagcaaggagtgtccctgccatagacaaccttgaaaggggagcactttaatgcagtttggaaggaggtgttgtagtaaaattctgcctaaggaagccattttaaccatgtcgtagatcgatcgcctgacgaacacctcaaatacatagtgatg

SEQ ID NO: 83424 - DNA, 442 bp, Zea Mays
cgcactagaaccaggagttcaattcctgcgctcaccttgctctgcatgcgtgctgcgatcccttcatccccagaggcggcgcattccatttcctggtattgctgctgctcttcctgcctgtgcttcagtagtacgtagttcactctcgaatcatggagcttcgacgactaggtttgacgtgtttatttcacttggcgagctttgaataatccaagtcatgccttcactgagaccttgtttgcactgcactgcaaagttaaattgaatcatgcgaaattcttatgtcgttcctacgaaaacctcactttccaaaagagttttgaatgtgcggtttttttcagtaaaatcgtctagatgtttatcacctctttgtaacagtaaaatcgtggagctttgattatcttacatgatactggagatttagccatttaggcattttatt

SEQ ID NO: 83425 - DNA, 721 bp, Zea Mays
gcaaagacataaagactcgtgatggagttcagtgcgcttgtggaccccgactcaatgaccctctatcacacaccgggcagagactcacacacgcctaaacccgtcgagcatgaaaatatggtgggcgctcatggcctacgctagccatgatgggacacattgccacctaacgtcatcccaactgacaccatggcatgccgagcgaacatcgaggagtcagcacagatgagacgggggcacccccatgtacgaccttcaacatatctgacactgcgatatgggacccaccaaaggccacgacagggagcatcgtcccctttgtatttgcagagtcccccaaatgggacgcgacagagcaacacaccataccgcacgtgccctcacgcacgtgtcagaagacgacgtcaccagaaggactcttgtagatggcgggccccactctcatccattttagccaacccatccctctgaaagccttctcccttgaactataaaaggggtcggctgaacaggaaccaagacagaggaaagggcaatagcattcagtagaagttttctccttcctcgttctctcactctcaattgtaccccttgtaacacatttcgccccaccagcaccttagagcaatataagatcaacactacactagacgtagggcacatgcctaaaccaatataaatcctcatgagtctcctgatcacaaattggagtacgtccacg

SEQ ID NO: 83426 - DNA, 1728 bp, Zea Mays
acagccatgacatgccccatgtgcaaccaaaacatcaaacaatgttttttttgaactttaaatacagcaggggagatccccacggtaaggattttattaacaaatgaaaagaacaccactgcacaaagagggagaggggaaaataggagccagggagctacaagtctacaactaagagaactgcacaagctgtacaagcagaaacaagaccaacaaagttaagctaggacagtaagaagggagaagaaactaggttttttagaggagccggtcagacaatgttgttgaccaaatttctaagacgtgctgcagatttcgacttacattaactccagagaagtgatatttccgacctccttaggtatggtcccgccaatcgaattccacataaaatcccttcaaaagaaataaatactcagcatctttgtgcatgtacgattaaataagtgggcagttcaaatgacaagctaaacttagctcagcaatcaatcaattgccagctgaaattaaatccactcacataattttcatttgagaaagctgaccaagctcaggagccaaaattccagatagattcaaacttaggagctgtctgcaatcaaatttgtgttatacacgtaaatgctttaatagctatggaattaactggcgggtggggtggggtgggcttttttgcggttgtaaattattctcttctttattgaaatgacatgttgctctcctatgcttttgagaggaaactggtggatggaagatgtggtcaagtgaaacaagtgcacagaatcacagtaattacatctgattgtaaaaatagctaacttcagtcataacagaatagtattaacacattatgttccaaacaaaatattgtctattttccaacaatgcaaatcaggaagagtataatgaatgctccaacatatttctgctttggagagagaatgtgtgatagcagttaataggtaatcaatttttatcttcccaaaaatgttggaaaaaagatccaggtgcaaacttttggcctactaaggcagtaaacaaatttataacaaaactaagttcaggtttagtcactcatcaccaaaagtaactcataaccaaatgttaaggtgtagtgtggaatataacaagcacttgattgacaaagagatcgcttatgctcatacaattcttttacatggaagtatccatcactgcctgttgcattgtaacagataacatgggaccaatttcccatgcatggatctcctcggttccagctgctaagatttccgtgtggatctatcaagctgcccctaatagccttgagggcatcaactgcagagcagatgaattagtttgagaataatgttgcaaagaaaaaattgaaggcatgaaaaacaattgtgataatataagtagtactgctgaattgtatacacctctccaccaaagtaaggggctaagggccatgtttacaaggtaaaagtgaaatgggcacaaatgacgattatgcagagatcaagtcgagtaatgggtatgcatgcaaagtgcagtgaataagaaggattttaccttcccatggtgcagtgatctgtgcagcggtcggttgcaaaagggtaaaaaataacgtgaggataatggagcacaggcagagcacttgtggctgtaacatattttgccccatttgtccagaatatatagatttcacacttgcaggatccctctgatagcagaatccattccctg

SEQ ID NO: 83427 - DNA, 911 bp, Zea Mays
aactgttatggtggatgttgtttgtctacaggagactaaaatgcagaatatctcctgccataccattctttccatgctgagttctaatttcagtgaatacattttcctcccttctgttggagtcagtgggggcattttggttgcatggagacacaatcttaaatctactaggcagagcagaattgataaccatagtgtgtcggttcagttttgtaaagagaatgggactgcatggtggctaacctgtgtgtatgggccgcaaggggatgatgagaagctgctatttatgcaagaattaagagatatcaggactgcttgtctagggccttgtatgttggctggggacttcaatctcatctacaggacctctgacaagaataccaatcatttcaacagagctatgatgaatagattcaaaagattaattgaagacctagccctgaaagaaattccctttcatgggagacaatatacttggtccgaccagcaagtgaatccagttcttgtcaagctagatagggtgttctgctcagtggactgggaaatactatttccaaatgtcctccttcaaagtactgcctcccaagattctgaccactgctatctcatcctgggacttacaaataacagaactggaagatggcgtttccattttgaggccttctggacgaaacttgatgattttcaggatattgttgtggatgtttggaactcagttcaggctactacttgccccttcaataccttggacagaaagctgaaagaaacgacaaaaaaattgcagacatggagtgatagaaaagttggacatgtgagatcccagcttgctttagccaaggaaattctgcataggttagggatggcccaggatggacgtattctcagcccaactgaattctggcttaagaaca

SEQ ID NO: 83428 - DNA, 635 bp, Zea Mays
aagaaagtgaaagtagcgccatagccgaaggcatcagttcctaaggaacagaaacatgacaagataccttcttccgaaccaaaggtagatgaagcggtggaaaaaaccttgagccctccgtcgccttctgttgtcgaagtgtcagaaattttgaaggtaatgactgaatccccaccattcaagctgctaagtcctgtggattggaactgacaaaccttttacaggaaaaggaaaacccttcggctaccgacagaagagacaggggacagaaaaatcaacgtatgatgaacattctccatgcaattgtgcaaactccgtctccagctttggcagacaaatgtgcgaaaactactgatgccgaagctgctgttgcaactgaaggcaaagatctcacggccaccatgtccgaaattgacaaaattatattagacgtggctgtggagaaggaggtggccgtcgaagcgtcagacaatggaaagaaagctaaagaaatttcttcggaagaagcagactatgtcctacggcacctgggtggccagcagctttccgaagggatacagctgagctgaaggacattgcttttaactgtggctactagccagggtccatgctgtttggtggggtggacgaagaag

SEQ ID NO: 83429 - DNA, 614 bp, Zea Mays
ccataacacgttttaaaaaaggacctccagtctgagaccgagccagaggtccccattcccctctctgctctctggctcttctcagtccctggcgttcaagcgccactctgctcatcgccggcgatctccgacgtggtgctcctgcccgtgctcaggctctgctcctcttcccttctctagtgagtagcctggctctcctttcctcccttggctctcctttcctccctcttcccttctctgtggtcagtgagcttgttttccaccccttttgatcctccaaccaaaactgagccaatttgtgaatccctgtgcatgtatgtgtaccattgttcctttatgcttccccatgcaggttcctagctccttagggagggtttctccacctaaaatggtgtttcaccgaaaacctagaatctcgcacgccgcgtgctcggtgaaatgcccaaaccagccaaaaatgctccaatcaatcccaaatttttcaggcaccttcacgatacctccagtaacatattcgcaaaatctcacgccaatctgatatcccaggcttcaattttacacaaattcccctttatagcgattgattccgagccgagtgcccaaattccattttc

SEQ ID NO: 83430 - DNA, 598 bp, Zea Mays
cgtcagcctcccactcatgtgcgcgtgcattgttgcctattgctgacgtgagggaccacctcatcagcaccttcttctcgtgctgggcaacagaacgtgtggacaccagcgctggaatcgcaaatcgcgggggaatcccggggttgttgcgaccactttgaccctcctcgctgtgtataaggtaccgacgccaatcctctccttctcacccctgttaaactagcgcctataaccaaacccccctaccgacataagcgaagggtttgagccaccgtcgtgcgtcttcaccgtccgtgtcaacaggtgaccgtgatcgggccaaagttacatgcaacaccttggggaacgtgcacatgtgggtaatcacgtgcggggttagctggatcataggaattgctcatcggagaaggggccacgtcgctgtccgccccatgccgtggacaagggctatcgcggcattaacactggtacgtctgctcctaccaagttcatcattttccgtacttcgtgtagcttcctccggattagtgttgggtcgccaggggccgaatgccagagtctccgacgagtgctctatcgcaagccggccggcaccacc

SEQ ID NO: 83431 - DNA, 1560 bp, Zea Mays
cccacacatgcaagccatatttggctatctaacatgcccccacagttgaagcatcggtagaacagacgtttagactggaccaaacttctctgaagactgacaaaggcatcatcttggtaaagatgtcggtgaactaagatatcatagggacatagagggcacgaacatcatcaagtgcaaggcgctccagaacaaagtgtagataaatctctatgtgcttggcgcggtggacatcatcaagtgtaacgcgctcccggacaaagtgtagatcaatctctacatggtgaagatgtcggtgaactgagatgtcatgtggacatggaggacacgaacagagcccacagattgtggcccgtgatgcgagcagaacggtggcccactgaccaagcgcaggtacggggtggggagtcgagacaactataatgtgactaagagatgcactagaggtggttaatctagggcgtcgggtgacgcacgtggctgtgtgatggtgccgtaagccgcacatggccttacggtagatgcatcaaacacaatgatggtgcaaaggggaccaacacaagattagtgaaatcctccaggaaatcaaaggacactcgtctaggagaaggatcctcagaaaagggaaaggactcttcaaagatcacacgacgagagatgtgagacgatctgcgtaaggatgaaggcaaaggtagcccttgtggtggggggagttgccaagaaagacacaagacagagaggggcaagttttgagcagcggtggcagtaaggttgtgataacacttgcaacaaaaaacacatagatgctcatacaatggctgagtccccaaaagggagagatgtgagtaagagtcgcaacccaaaacgtgggaggaacactagcttggaagaggagggagtgaacaacattatttgtacaatggataatgcgttcaacttgactgttctgaggagagttgtaggggtaggacatgcgccagtgtatgccgtgggagaggaagaacatgcgagcgctggggttatcaaactcgcgggttgtcacattgaacccccttgatggtgacaccgaaccaggtacaaacataggcaaaaaagttagaaagagtggagaaagtgtcatacttaagtcgtagcggaaacacctaaaggtaatgcgagcagtcatcaaggaccaaataatacttgtgatcatagacactagtaatgtgtgaggtccaaagatcacaatgtattaacttgaaaattatgagtggcatgtgatgatggcacatgaaagtgaagttgtgtatgatgaccgagccaacatgcatgacaaagagtgtcactagcacttttattacaaggaagacaaacattgtgctagcttggagaggactgcaggatcatggtgaccgagacgctgatgccaaacgaaggaggtggtggcaacatggaaggtggaggccgcaagttacaacgagtaaaggggactagagctgtcacacctgatgatctctctctgagagggaagaacgttcacataacaaccaaaagggttaaactctaaaaactcgacctgcg

SEQ ID NO: 83432 - DNA, 1037 bp, Zea Mays
cacaaagctacgatcgagagcccaccttttaatcaatcagtctgctgtagaaagaaaggggagttcagtgcatctcgtccgtttcttcttctccctttcagtgcgctgatgactgatggagatcgaacaatggctgctctagccaaatttacaacgaccaaacaactggtgggcggtggctaacaagctaggactaggagtactacatgttgtactcctccacacgcccgtaaatcaaatcctggagtaactaattggcaagttctgatgggactaataatgagccgcgccctagcttgatgtgatgaagctgcgctgtctagttttgtaatgccaagtggatgcatggagcgtggtagcttgcattggtgtgcagattaataaagctagctaggggacctttaagcaactgccaagctgataaaaaaagaaagaaaagaaaagggaattgatcgggcgcttgcatgcatgtgtcccggccgggcctctttcttctttgtcagatggatacgtgctaactgaactgttgtgcagccgtgtaggctccctttagctgtacagccataccatacctgacacctcccaatatatatatggctgtggccctagcttttagcccgtgtgcctgtgacgacatgtgtaccgtgaacgtgaagctgtcgacgacgagacctaactagctgtctatggcgtatcattgccaactcagatgtctatggcgtatcgtgcgcacgcatgtgtgagcgagcgcacaagtgattttcgtgcgcgttgccagagattagaattaagatgcatggtgtgtgggtggtgggccgtgtctcaaaagctgtgttgatctcggggctccgagtgggccaaaccatctttatatatgtgcacgcagatgagccgtggaccacaggcaccatcatggcgatcgtcgacggcgcataacgcaagctcgatcgacggcaacaagctagctaggtgaaggtgatgaggtctcgtcgtctccctccgatccctcgacgggtccccttttggtgtcgattccc

SEQ ID NO: 83433 - DNA, 333 bp, Zea Mays
ctacagtgtcgttgtgtatgggtggggtagaagttcgaggttttctcgatttgtgtgataatgtcttcttaatacaacactcatgaactgtcttacccctgcaagttgagtttttaaatttctctcttagtctatggcatctatttttatcctagtcaaaacctatgcaataaaacgaggctttctttgcatctaaggttttgactaagtgttgttatctcgatcgcaaaagagttatacaatctaagctccaaacctatctagttgtcaataactaagctaggaaggtaaagcacataaccaaggtaacaaaatataaatgctaaagcttaa

SEQ ID NO: 83434 - DNA, 335 bp, Zea Mays
caaaatagcaataatgagtcataccacttgtgcaacacgaactagctactctaatccgtagtctaatgttgtcggttatacacttctgtatgacacagcatgaaaaaatacaagcgccaaaatattgaccaatgcaaactccatcctactagtacattaatggatctaacattaaaattctctttatgcaaagtcagcaatgccacatgtcgaattatctaaatcacttctggtatgcagttacataacttctgtttcagacaatgtgattgagttcaagtcttgataaggatatattttgtatttaacatcaatcctcacaccggagttatttc

SEQ ID NO: 83435 - DNA, 610 bp, Zea Mays
tgaggaacattatccaactcatgatttagaattagctgttgtggttcatgccctgaaaatatggcgtcattatctgctgggaaatatctgtcatatatatacaaatcataaaagcttgaagtacatatttacctagttagaactaaatatgacagaggagatggtttgagctaattaaggactacgaattggaaattcactatcacctaggcaaggccaacgtggtggcagatgcactaagtcgcaaggcttcctgccattgtctcacaatgaaaacctctgacatcacattatgccaagaaatggagaagttaaacctgggaatgattcaacatggaacattgaatcaattgaagcttgagtcggttcttctgcaaagaataattgatgcacaaagaagtgatgagggtatgaaacacattcatgagaaaataaagcccgttaaagcaaactgtttcagaaaagatgatcaaggtattgtatggtttaaccaccgcatagttgtgcccaagaatgatgaagtccgccagcaaattttggatgaagctcatcttagtcgctattccattcatcccagaagcactaagatgtatcatgatctaaagcaaca

SEQ ID NO: 83436 - DNA, 603 bp, Zea Mays
gggaattccacgacggagtgcaaatctgggcgggatcatcacctccccgtggccggctcgctagcgcagacaatcaccggtatgtgcacctcgcccagacccgccttcatacccaatacgcatgtaccaatttaattgtggtgtcgtgcacgtaattcggagaatcgctccgccggcgtgagacctcaccgcggtggcgtctcggcgcggctccgtcgggaggtaggtgatgacctccagccgttggatccaaatcgtgcgccgcggattggttctggctgggcaattgggggattcgatctggtccgtcgatcggatttgaacggctagggttagatctaggataataaaatcgtcaccataaaagacgaatccaacggctctgggcgcgtacccgttcagtagagattaaatctatttgtggccctcggatcagatctgagtggtccagattagaacttaccccttcgtgggtatcttttgcaaaggagacctcctgtttccggggaatcaacccgccatcctcgggagctgttctctgtgtctgggacgacttactccgagacccctaatctatctggtaattgaggcccagtcccgagc

SEQ ID NO: 83437 - DNA, 1262 bp, Zea Mays
ttatagcaaagatatagatggatgatagcactacaactttgctgcagatcattgggtatgttgccatgaaaatttgtgagcaaatcgagcctaaactatggctgtcaggttgactgaatactgcagcccatggtacagtgaccgttgaggatcagatcgccagccccagaaaagatctcaccggcggtggctttccgccgtgattcacgtcgccggcgtcatgattcgcgccctgggtaagtggataacgtcgtaaggttaaaagatcgtcaccgccgtgacctggaagccactccggctagccgtagttcatctcccctggctcaccgcccgcgggtaatgtgctcaccgccgccgtgccctcaccgttggccaccgcgtgtcccaaccgcgtcatcgcattgccgtgacctcctctgaactccccgtagaccaccggagttactgccacggcgataaacacgtgttcaccgcaccgccgttcttcctcactttcgaccgccgcgcatccttctcaaaattcacggccaccgccttaccctcctataaattgagggcggggatagttgcgccatgtaatcatcaagctattgcacccactcccatctccactcgctcaccgtagctccgcaattcgggttttcccccaaattgatctccgccaccgtaaaacaccacctccccgtggactgtccgttctggtaaggcaccatccaattcgcgcattgttctagcaccctttcatgctggtgatgctccccgacccctttaatcgaaccaaaccgactgggaccgccgggaacacatcgatctagccgccatgctctcggccaccgtggccagagttccttagtcgatcattagccaaattaagttgggggaaaggtttagggcagatccaatttagtgtctgctgctcggagaacccagccatagctccaatcggccggtccagaacctcgccggagcctctccgcgcgtgaacgtcgtcgtgggcttgggtctgcgaagaaatagaacctgaggggtttatttgcaaagtgtcagtgacttgaacaaacagtaaaagaattcgttctcagttaaccaaaaacctaaggccctttctgcaaagctgccagggcgcgggcgcgcgcaagcgctttccccctccgagctgggctactgggctgaaatcagcccagtactattcatctgtttttctttttcttttatctccagagccaaaacaattatagaaaacagtagaaaaatgataaaat

SEQ ID NO: 83438 - DNA, 525 bp, Zea Mays
gctgggctcaacgtcatcagccacgctccgttcaagcagctgcagatcccaaggtcctgacttggaccctctctcccattctccggagtgggccctcagccggtggacccctcgggagcatcgcactcccggtaacattcgggaccgaggagaatttccacactgagaacgtccagttcgatgttgcagaggttaacctcccttttaatgccatcattggcaggacggccctgtaccggttcatgtccattgcccattacgggtatttggtcctcaagatgtcgtccccggctggggtcctcagcgtgcgaggcgaccgccctgctgcgctcgccgctgtcgagaagttgcatgccctagcgatagaagcttctcacccggatgacgtggggagggacccctcgacttcctgtaccaagacgcttgccaaggtgcctaaggtacagccatcaggagcagacggcgtccccaccaagaccatccaactcagcgcggattccccctagaccactcgcgtcgcgggtg

SEQ ID NO: 83439 - DNA, 313 bp, Zea Mays
atggtacactgttgggtaatcaaaactgaggttctgtggatttaatgtagtatcagatcatggtacagagaggcaacctgagtggattgtttgatcttgtgttatttacatgtaaatttcagaaataaaatgacaattactcaaagtgtgactgtccaattgcgtcatgatgttgtgtattagtacctcttcaagattcaagaacatgttcggacaccaaggttaaaagtattctagtgtcacactcacattacatgcaaatatgtaattccttttttgtgacatttgcggactagggtgctaggctcaaagt

SEQ ID NO: 83440 - DNA, 869 bp, Zea Mays
caattggttccatctcaatctgatggtccggatcccgcaagaacttcctcggcatagagacatgaaaaactgggtgtacccctgccatggaatccggcaattgtaagcgataagacaagctgcccacccgggccaagatagtgaacggtccaatacatctcgggctaagctttctggagacaccgaatcgaactcctttagtcggtgataccctgacaaggacttggtcacccactgcaaattccaaatcccgcatcctcacattagcataactcttctgacggctctgagcgaccaaaatattttgacgaatttcccgaaccttctctgaagtctgctaaacccaatcaggaccaaccagggatctctctcccaaggtctcccagcaaagaggggagatacaccgcctgccatataaagcctcaaatggtgccatcttgatgctagcctggtagttgttgttataagcaaactctgccaatgcaagatgatcttcctagctacccttccaagacagtacacaagcatgcaacatatcttccaaggtttggatcgtttgctccgacttaccatcagtttgaggatgaaaagcgacactaaaggaaagcttggtgcccaatgcactgtgaagactctcccagaatttggatacaaatttggagtctcaatcagaaacaatggacttaggtaccccatgaagcctgattacttccttcatatacaaagggaccaattctgaagctgaattggtggtcttcatgggaataaagtgtgcagacttagtcaagcgatcaactaccacccaaatagcatccctgccccgaggagaacgaggtaagcccaccacaaaatccatggtgatatgctcc

SEQ ID NO: 83441 - DNA, 275 bp, Zea Mays
aaatagtccaagcacagattggggataaaggtgttcaggttatcaaagacatgctcaagcagaaggcagaaaaatacaagtgctttcgctaggatagtaagggaattttgtggtttggagatcgactggttattcccaaggaccctgagctcagaaagaagatactggatgaagctcacctttcaaaattctccatgcaccctggtagcaacaagatgtatcatgatctcagatctttgtactggtggaccagaatgaagagggaaattgccaag

SEQ ID NO: 83442 - DNA, 440 bp, Zea Mays
caactatttgagcctagaatttgtagaaccagagcttcaaattcgcaacacgccccggccgtatgtagcccctagctgcaagtactctctgtgtcatccatcttaaacgtggtgcgcgcctttgcttttgtgtagcttagagttcacaggcaacgcaggcagaatcgcgtcttttacttggctggtcatccatcctagcttctgctcagtcttcacatgcatccacctgaccttcattgcaatgtagtcaggcatcacatgcacgaaaacaaaggtgttgctataaataccgcgcttagctttgaagcctgcagagccctgtctccatatttgctcattgccaacaaggagaggacagcgggtaaactacaccacaccaatggcttccagcctcgtgaatctgctcctcatggaggtggcggccatcgtcagcattgttc

SEQ ID NO: 83443 - DNA, 388 bp, Zea Mays
caagagaacacaactcggaaggaggtaactcttgagattttatttgatgattgttctaactatgattcatggtctactagtgtgctaaatgcttttagaaccgtagatcctcgattagaacaaattattgacaagagtatttttctctctagttttaatgaaaaaattaattccgaggaggatcaaagatgttatcgcttaaactacctagcttttgacatcttaagcaattctcttagcatagaagattatcgtgccttcatatcaaactatgacgaatccattcatgacgtgcatgatatttggactagaattagaagcaaatttgatgagttcaaacatgatagttcattttgtgcttctacttcctttagttcttgtgatacta

SEQ ID NO: 83444 - DNA, 814 bp, Zea Mays
aggagagctgcgcatctttgtattaatagaagaaaagaaagggggggagagaaccccaatacagcacacacaccactagagactaactacggatcaccgactaaaacatggaggaaacacgacccacaccgctgttttaagccagcaactcatcgacttggaggaaggacagggccttggcaccagtcgtggaccagagcaccgcctcttccctagccatcctaagggccgtaaccaagctgggattacaaccatcaaaaacacacctattcctatgcttccaaatggtccaagcacctaggatcactaaagaattgaaaccttttctcacaagatccgatgcccgggagctgctagacttccaccacgactcaaaggattcctcatgagctggatacagaccccgcagcgccactgaattaaggaaatcaaaccagaactgcctagcaaaaacacacttgaccatcaaatgatttatggtttcagcctcttggtcgcacaaggggcactgctctggtcggtctagccctctttttctgagcctgtcagcagtccagcacctattatgttccacaagccatataaagaacttgcacttcccaggagcccaagatttccacacacgctctgctggttcgaactgaactgaaccaaggaagagagcattataagcataactagatgtataatcacctgaagcgctgaatttccataaatgtcgatcccttattccaggctggagcacaactgcatcaagcacttcacaaagttccaggaattcagcaatgactctgactgagattgcccctttcgc

SEQ ID NO: 83445 - DNA, 652 bp, Zea Mays
gttgtaggggatgcccacagcttgatgacaatcattacaaagatccaacttcagtacatgtccatcataacaagcatccaacataagataagcaaacaaactctaactaagaccgactagactaagacactgaattaagcattattacagactccgactccatcgatctatggatctaaatctatgcgggtcctgcagtttaggttaccatagttgaagcaaccacggggcggtgaacggtaagggtgctaaatcccgacaggggcgggagaaccaccatccagatagtggtgtgctgcgcactcagcacgcaattccacaacctccgcccgaaccttgcccaactcaacgagggtgtggtccaactctgtgttgagcacgatggccaagttgaccatgttgttcagcctgggattgcccccaccaagtggcgagacaatcacacctccagcactgctggtcgaacgacgagggtagtacttcaggtcaaggccatcagctaccccgctgaacaacgatgaggaagtgcccgtcgtgctgtatcttgcatggctgcctcggccgtatccctctcagcaatagaatagtgctctgagaaggctttctgcaccctggagatcatcgtctggactgcgcaccaagcaagtagcct

SEQ ID NO: 83446 - DNA, 1201 bp, Zea Mays
tcatcaccacaggccgataagattggcaggtcataatcagctatgttggcaccactgttagcaaacgtgtctgctagtttcctcgaaagcaacgtaaggagttgttcatgtggagttgtgtagtgtgggttgccaagggcttctctaagtccacggtgtatgtcatcggtgaagtagatccaatatttgtcaaacaaagcacgaacattgcaaataggacaatgaacgacaatggtaacaaacatctgtcgaagcttaaacgccaaggcagagactattgcctcatcaaatagaaggtttcactcgttgtcaccttcgagcaaaccacgtgcttcacacgcctctctgaacgtttcgtacacagtattttggaaggtccttatatcaacgaagctcgttgcatcagaaacaaacatcaagagcatgcgtagatagtatagccccccagctgttgggtgcacgtaatacatgagaccaatcttggcagacgacaacctccttctacgccaacacctaatagaaacgtcccacgaccactcttttgggaaatcacaataagtcaggcgatgtgcatcactatatttcaagtttgtttcaaaccattcagttaacattgtcttcttcactgcacggctcaaaagcagcgcttgtaggtctgcccaagctcgtatcgtacaatgtttttttgcaggtaagtgcaccgccagacgttccacagaaggtactctaaagtgaatgtcgaattcgaagattcgccatagagcctcacatgttgataggtatctggcatctacacggatctcatttggcggggctatttgaggacctggagatgcattagttgtgtttgcagtcaactcaaaatatatcttggctcgatcacttcccttggtaacatatttaaacaagtacttgatcatgtgcgttttgttgcaccacttgacattaatatgtgcattgtattttttgagcaactgcatattgtatggcactacgctcctgttgtccaattttactccaccttttactacgaaccggcaattgtttcgtcttctataaagggtatagccaaaagcgtcgatgacagtatcgtcttggtacgtcttagggaatttcttagagcatctgtcatttttcatgcatggacaccgcctgttgtaatcaccgcatggaccatgtatcatgaattcatcaacgagag

SEQ ID NO: 83447 - DNA, 388 bp, Zea Mays
atctaatgaatgcaatgagtaagatatatgcatggtatgatatgaaattttagcaattagacttggatggtgaaggatcaatttaataaggtagggcttaatcttgttatttgaagatcccttgggggtatacttagtaatttagggccaagcttagttaaactaagtggtaagtctattttggtgttctattgaattctttttaatgtcttagtaaaaatgtatcaagacttctagttgaacttattggagcgagttttatctttcatttctttacttctatttctcttatgcttttaaggtgggtttgaactacaagtcatcttaataaatttccaagaattctgcaaaaattaaagtggcttcttactggtgtataattctctgt

SEQ ID NO: 83448 - DNA, 552 bp, Zea Mays
tgtttgttcccttgccaaaagaaatagatccataaaaatctaacttttaggatccctcttggtacttaaaagaaagacaccatatacattgcaatattactcaaaatagtgtatatcaaaactaaaaatgccataagacaaaaagttttccttttcaattgcttattttattttatttttgaaaatgagattctattttttggtccttattgttgagttctcgatgtgcattgggaagcttaaatatctaaatgattaacccatactagaacaaaagatttgtgggtattatccataaagcttttggcctcccataacaaaacagttcatttttgtggaaattgattttaatcctgagaattgttcggacacacataagagaattttcatagtttttgcttgttcatcaatgacatgctccataacaaatatcgtatggccaccatattatactatggaaaggccaccatctattagatgtggtatgatcccttggatttggccctcttccttggctccaacaatgaatatggataacataaccaccacaaa

SEQ ID NO: 83449 - DNA, 482 bp, Zea Mays
cgggtaccctgagacactttttcagttgggacacatggaagacatcatgtacatccgcaagatggtcaggtagctctagttgatgggcaacttctcccactcgcttcaggatcaagaagggtccaataaagcgatggggcaacttccctttgactttaaatctcctcatacccctgattggtgacacctttagatacacgtgaccatcctccttaaactccagaagtcttctccgggtatctgcatagcttttctgccttgactacacagttctcaagttctcccttatcaaccggacttgttctttcgcttcttgtataatttctggcctaaagaaccgcctttcaccagtttgatcccaatatagaggagtctggcattttctgccatatagagcctcaaacgaggacatcttcaaactggcctaatagttgttattgtaagagaacttcgcatagggcaaactcttatcccaactgcca

SEQ ID NO: 83450 - DNA, 409 bp, Zea Mays
cttaatgttgtccttaaggggaatgttgaggtactctgctttcctcccgcgacaaagttccagacttgcgccgccaacaagctggtgttgtcccccagccatcccgggccgacaatgataaaggtacttctagagaccaaaatgggggagaatcccgaggaaggcctcgcatagatgtacaaaaatggaaacttgcaagatggaattagggttcagatgagtcaagttcaattcgtagaaatcaaggaggccgcagaaaaagggagagacgggaagagcaatatcgcgaataagaaaaggaacataatcgaacgattcataggtatcctctgtcagaacggtgaccccgcggcaaattcgccaagagcagagctctttcagaagcaaaaccccaacgtcaacaagatga

SEQ ID NO: 83451 - DNA, 460 bp, Zea Mays
cttcgtcactatgatgactccattgtactttgcacattttgatcactttacttctcgtcttgaacactcaattcctccataggaagttgctcttcgggtaccctaagacacttcttcaacttggatacatggaagacatcatgtacatccacaagatggtcgggtagttccagttggtaggcaacttcccccactcacttaggatcatgaagggtccaatgacgcgagcggacaacttccctttaactttaaacctcctcataccccggattggtgacaccttcagatacacatgatcaccctccttaaactctaactgccttctctgggtatctgtatagcttttctgtcttgactgcgccattctcaagttttcctacattaaacgtacttgctcttgtgcctcttgaataattttaggccaaaagaactgcctttcgccagtttgatcccaatatag

SEQ ID NO: 83452 - DNA, 1389 bp, Zea Mays
ggtggcttttttagtaggaaccacaatttaacccgtgaatttagatctgtcgtatatccgactcgatagagccagatatgaatatttttttttaacctgtgggttagatccgtatccgacttgaagtcggatggtttgtgacctattaacggcatgagaggaatatcactgtaattcagtaattgcattaataagtatgtgaagttgtaattatcacacatttagacacctagtcatttaacatataatacctaataattatccaaactgttgaattctaagacctgcatctctgtcctaaaaataatacaactctagtatgtaaatgttgtctaacgccggatagttcatttttataaaataaaaaaacggagggagtatgtaattattagcaagtgaacgcatgcatatttcagaccttgaaaagatacttggacggcaaccattcatcttggactacgacacgctaagtccaaggtatgcgatttcactgcctctgataacaatcggtttgtaaccgtaatttgtattttttttccctactagtgattgggtaagcaaaactgctgtgcttcatgcgccgacaccaagcaagaaggtaccgggccagaagaaattgagtaggccaatcttggcacattcgaacaggtaccctaagcaagaaccggcccaactgacgtaggcccgttagatcccccagcaactcgggcggatccggccttttggttttccaaaaaaaaaagactaagcccgcgtgtagacggcagcacacaaccaaggccgctggtggtctgtccagcccactccgctgcttcttccttcatagcccatgtcggtctcctttaggaaacaaataaaaagagtaaagggcccaatactcgactgccgtcccaaaaaattctcttctgggcagcaactgcccaggggcagaggaaaagaagacgagacgagaggagaggagaaattcctacgtgatgacagccaggaccaggcagggttcggtctgggcgtgtggggcccttcattccaactttgcaagccctcgctctcgtcagtcggaatcacacacggccaattcctcgcgcgcatcatttcgctctgaaagttggaagacgacggacgtcagtgcatgaaggctttcagcatcgttcccctggctccgagtcccacttgctctcagcattcggggatcttggcgtgcatgtcgccgccggcagacgatcctgcacgactactggtagcagctagcctaggagggagtacagtacatatatattcttattcttaataataatgcatgcagcttagctttattatttgcttcgcttcgctttgccttgccttggttgggctagagtgagtgagtactagctagcagatagatgagca

SEQ ID NO: 83453 - DNA, 306 bp, Zea Mays
cacgaaggtgttgagaaccaaggcaacacaaattaggaatgatgcgtaatgaaataacacaatggtgcgtaatgatcttaacacttctttaaattgctaatacagagggcaaatgtcttcaggttgaaatataaaaagggatgatgcgtaatgaaataacacaatacaatggtgtatgagaactcatctcctttgccttagcattttcaatacatctccctttgtactagataaatttacaagcacatcttcggctccgtgacagaaggtgatgcgaaggttcttcgaaggctaagcaacacgaag

SEQ ID NO: 83454 - DNA, 637 bp, Zea Mays
ggtttcctctgcctgctgtaatatatgcctacaaatacaggaaggtggttactgtatcaagagagactaggaaaaggcaatagggtgaatgaaataaataaaaaggacaagctgttttgttgtagtatgagtgtgatccttggctcctaatgttgggaattgatttgatgttgcccttgagcactgatctcaattgttattccataagcgaagtgaatgcattgatgtcactaaacttccctgattgactattcttctggaaatatttaggtttgaattttatattttattgattgtttgaagcattctgcattgaacagatcaacaatcctggtcattagttgtctgattttttagtggtatctgaatagatagatgactactcatgtatatctttcttaccctgtccttataattagcattgtttttttcacagacccctgcacaactaaggtggagcctgacaaagctagagtggttgcttgcaaccggcctcacaggtattttgttattttgctcatcgaattcattggctgtctgatttctgcttacctgattcctacacagtcgaattcattagctgtctgatttttgcacaatccactttattttgctcattgagtacagtagggcataa

SEQ ID NO: 83455 - DNA, 597 bp, Zea Mays
gctgaaccatattctaagtgttgtgatggcagatgatgggtaaaatttcatgttaatgatggttttttgttccgagctaacaaactctgcattctagagtgttctgttcgaattttacttttgcaggaagctcatgcaggaggacttatgggtcattttggcaccaagaagacagagcaagtacttgccgatcatttcttttggcctaaaatgagaagggatgtggagcgacatgtccttcgatgcgaatcatgtcataaagctaagtctcgtttaaaccctcatggcttatacactccactacctattcctagtgtgctttgggaagacatatccatggattttgttcttggtttaccatgaacaaagcaaggaagggattccatttttgttgtggttgatcgatttagcaaaatggcacattttattccatgacacaagagtgatgacgcttcacatattgctgaattgtttttcaaagaagttgttcgtttacatgggattccatgaacaattgtttctgatcgtgacactaattttttgagttacttttggaaaactttgtggggaaaacttggaacacggcttctgttctct

SEQ ID NO: 83456 - DNA, 594 bp, Zea Mays
ccctgaagcaaaaatcttgttagctgagattgtaaacctaaaggacaggggcttgactactgaagctgttgtaatttattttgtgttcaagaatattcagcctttgaaggatcgagtgcatcccacttatctgttcaccggtgccagggatccttctctggcgactgaaagagtaattacagaataagatgttctgaatcgagttgagatgatactgagaggtgccattgtcaatgaaggtgctcctcaggcctattttggatggaatcttcctccactataaccttagttactttgtcttgaactatcacatgtcgaattgtcttgttgtttatactgacggtgttgctgctttgccacaaagttcatttcctgcatttgtgtcgatcccccttgacgtggacaaggtgtgcatttagagagtagggtgcaaccgtctgaggaagagattggagtgatgcgtgcgacctataaaggcctggccgatgagtttaaggcaacccacttgctcatcaggaagccttctaggagctctgaacttgaggcaatgtgggatgtgccagctagaaaatctgaaaccgaggatgccagtga

SEQ ID NO: 83457 - DNA, 315 bp, Zea Mays
aggaaagcccagtgcaattgtatgaatatggatgcaagagtcaccaccctatgtgatgagttgtgcaagttgaaaatagaagtcgtttcctccggtgccttgagttatatttcagtggagcccaccttacaagaacaaatagtcgtggcacagatgggtgacaagggtgttcaggttatcaaggaaatgatcaaacagaaagcagaaaaatacaactgcttccgtcaagacagcaaaggaattctatggtttggagaccgactggttgtccctaagaaccctgagctcagaaagaatatattggatgaagctcac

SEQ ID NO: 83458 - DNA, 295 bp, Zea Mays
gcaagtagtacaagtacaagaaggaatggagttaagtcaaggcttgcacacggtaaagaagaggatgttgtcaagggtgagataagtaaaacaccgctctcaaattggtataagagattggggattttagatagtagacatagtgtaatcaccagggtcagatcgagagatgaggaaggtaaaggcaacaacaaacggaagcacaaagaaggatggggttaaaaactcgcaagcgacaaagaagaggatacaactaagggaaaaataggtaaagttcaacgctcagattgagatg

SEQ ID NO: 83459 - DNA, 387 bp, Zea Mays
aattcgggctctactactagcagctagctaggtcgtgcgtgtattatacattattcgtcgtgcacaagcgacagcaacggaggcgtgagaccagttcatcagttcgcgctgtgtggatggacgatgtacacttgtccaggagcggcatatatgcagcaatgctgtgtggtgctatttggttacgctttaatttgtcttgccgaacaatgttatttaattggatgcagtaaaatctcagtaattggtgcattacttttaactaccacgagtaccatttgcaagtacaactgcattggcgtcttctcgagtaccgtgtgataaattccaaaacatacttatgtgtcgcgcatgatgatgcttcaaatagtaccgcgcgcgctactagta

SEQ ID NO: 83460 - DNA, 886 bp, Zea Mays
aaaaaagaatattatacggtgaacggtagtataatcaactagaatttttggcatcttagagcaactccggtagttcttaaaaaatagtgttgggagttggtaactgaggtttgagcgtaaaaaattatgatctccaactgttccacatatatatagatagtaaatcaaatttgaaatcagttttgtgggccagatccttgtattccttttcgtttccttcctcgtcttctctggctattgcatggtgccccaccgccaggccaagtctatccaccagccatgcacacagcttgcagcaagtgcctagcaagaacgtgatctgctgaccgccactgccgagcaaggtccggctgcccagcgaccgccactgccgcctccgttgatgagcgtcggtaacagggagacggatcagaactagaacagcggcaagaaacacgaactagtaggagcggggagcctaacctggtggcggagcagccgtggcgaggaagctgtacctagcgacggagtagctgtacttggcagaggggaagttggacctggaggcagggaagtcggacctatgtgtgtttgtgacggcggcggggagaggagtaaaggcgcgagatagcccaatggggaaatctttggcacgattttttttatttagggagtggtgaaaggacagctacatttgaagagtacatagggttggattataagttgataaacttggagagttattttaggaaattactggagagatgttttcataccagttctccaaaattttgatttagggagttcttttaggcatgcaaccaagcatgtcgtactcattcatttagtccttgtatttggcagtttagtctctaaaagggactaagaccctgtttagtttctttag

SEQ ID NO: 83461 - DNA, 371 bp, Zea Mays
cggtggtctgaggaacagcaagtggcttttcacatgcttaaacaaaagatggttgaagctccagtgttgatggttccggatttttctaaacagtttgttctggaaacagatgcttgtgatctgggtataggtgcagttttgatgcagagtgagcatcctgtggcatacctgagtaaggcattgggaatgaagaatcaggcgttgtcagtatatgagaaagaatgcatggctatattgttggcagtggaaaaatggaggccctacttacaatatcaaccgtttgtcatcagaactgatcatcacagcttgcggttcttaactgaccaacgggtttccacccggttgcaacataaggcgttagttaaattgat

SEQ ID NO: 83462 - DNA, 444 bp, Zea Mays
gttggagatccgctgctcaccgtggccagggctttctgcggcgcactgtggggtacgtatacgttcatcgcattcaccttgcttagggcatcgtgtagggcttctcggatcagagctttgtgcacgaggttgagctttggggtgtcttggccatggcgccgccgcgctaggtgaccgcgccgctggtgggttggtcgggcgtgggcagtgaagggagttcctccgtccgatcttgcatgggcggtctagattagatggggatcgttgagtgatttggaccattgatctggccatggtcggctaagattaaaccaaccgtaccccctcgctaaattgaatctatgccgtcgaccttagatctaacgggtctaggtgaatcagtagagttttaaagccgcgccgttgatcattgatcgaacggctacggtgtcgtaccgtttcgtc

SEQ ID NO: 83463 - DNA, 653 bp, Zea Mays
tcagcagtgcacacaggcatagagttacccaaggactccgaatgaggaaggcaaaccatctctgtaatgttggcctcctcgacttgtatcacctatccctcctgaatctgggcatgtttgcttttgaatctgcttctcgagtatactcttaggggggcctcatcagcagatggatcgtcaggttggggcgaactcgcgccagcctgttccagcggcccagcaacagacatgtgtcactagggcgaaacagggaggacaaaatccggtgatcccgcagtagtcggcccatacggcccagctaagccaggacgacccaacgaggataaaacttgaggattgtttatcttctccacagatggcacaactggcaccgcctcgggtgcctgcacgccgtcaatgctttctgttggtatagcctcaccaggcacgttaaaccctagattatcctgaactgacaaaacagcaatgggaacaactggatcatgatcatggcagcggggagataaatcttccaaaatgttcttcgaagttgtcatgcttggaacttgagtggcaaaacggggtgagctcaacctagccttctccagcggctcagccaaacttctgcgctgaggtgaagaaggtctaggggaggtcagcagcccatcaccaac

SEQ ID NO: 83464 - DNA, 735 bp, Zea Mays
acttaactgaatagtcctttgatcgacattgataatagccttattctgggctaaccaattcatgcctagaatcaaatctacgtcttgcccctttataactatcatattggtggtgaaatcatatccgtctaaattcacgggtacatggaagactacttccttagtaaaaatttgacccataggtgattgaataacaaaacccttctttgattcaacactaggtatgcaatgcttctcaacaaaagccttgctcatgaaagtatgtgatgcaccagaatcaaaaagaatgacggcgggatgattggcaacgaaaacttacccatcatcacaggctctccttctggggtggtagccacttgagtatagtagactcgtctagttttactttcacctttgcctgcctgagtgtttgtcacatttcccttgccttgcgatgtgcttccagaagccttttgaaagttggatttattttgcttcggatagggacaatccttgatgaaatgtccagacttcccacagttgaagcagctgttagatgaactaggtagggctaggaaatgagtactatgagcacttggctgaatatttttagcacgagcagtagtgggacagatgaaaactagtttgttgaaaggataggcgggtggacaaggaaaagagcgatttgggttaaagggacgaataaccaaccttgaccgcttctcggatccttgagaggatccttcacccccttca

SEQ ID NO: 83465 - DNA, 738 bp, Zea Mays
gaggaactctaacttggtggtgcttgctgaagctggatgctgctgacctgcatgcatggggtgttgttgtcttggcaactgctccatcggcatcactacatgggattggtgtgctctggtgtttgtgtgcgagagggagggggagggaccgagcacgtagtccaagcatcccaaggacaaaaaaccccatgtcacattgggtaaaatggggtagggtatggtagggtggttgacgagctaggatcggagcatagagcagaggggagaagaaaaaggtggcttccttcttgatcatcgtaggacaccattggaattgacacgtacgtagcctgcttgtgcaactgaaaccactactcttgctcctcctcgttcttcacttgtggatccggttggcgtcgaagcccgggcacgtgtcccagcatgtcgggtggtggctccgccactgccttagaggaggacaaaatatcacttccatgactttgttattgtctgcacattgaaagacccatccatgcccacggattattgagttcccaaaactcggttctctgatagaaagattcatatgtggtcaccgaaataatgagttcctaaaagcttggttctataatagatagacccatatgtgggcttaaatttactaagtcaccactcggtcagtcaagtcaaagtcccacccatgggcaattgatgtctcaatcctcggtcataggctgctttttcgaaagcttccatcag

SEQ ID NO: 83466 - DNA, 595 bp, Zea Mays
actaatacatataaaatatcgttatgagtgatggtaccttcttttcacattatcagaaggcttagcagacttcgatggcatgaacctgcaaaaaatgatcaaataaatatttatatcatatatatttgtctatctatctctacaatacaagagctgtgagaaatacaatatacctttcacattatgtcaagatgctccctaggcttctcaatgtcagctactgcctacacccctctgtaatcgaaccataacattgatcacgaacaacacacacccattagtttatgattaagaaaaaagagacagtcatctcggagtccatcagcgatgtcgtcgagagggagactgaagaactaatgtttctagcagaattttcaggcaaaataagaagtagctggaattgacaagggtgtaaaaatgttttctttacaaatatatcatgttggatagcttacgacaaaaaagaatttgaactaatgataagtaattaaaatgttcacatggacaaatagtagctggtgaactcaccaaacctgaagctgagctgcatcgtgtccgcgtgaagaaatagagtccgatgcggatctcggctcgc

SEQ ID NO: 83467 - DNA, 3151 bp, Zea Mays
gcatgcaagcatgtagaacgcgaactgaaaagagtctagctgaagctgaactcgatcgactgccaagctcatgtcttgaagcctgtcctcgttgaaagcaaccaggaatgtttaggaagcgttctcacctcttcagaggccgcgtagctttgttaatatatgcggagaagagccctctgcatggcgtacaaattaccaaccgaaatcaaggagatgccagtattatacctttctattttacaacaaccatatctggactttcctatctttacaactcaggaactttccacacaattctacacatcaggactccatgatttcggttggtttgtttccatacaaaacatatgttactatattatttaacaaccccccctcaatcataactttactaagttaagattgcgtctgaaattatgcagtttgtctcttgtaagagccttggtgaatccatcagcaacttgatcatgtgttgatatcaaccgaacctacagaagtttctgaggcacacgttctctcacaaaatgaaaatcaatttcaatatattttgtacgagcatgaaacacaggatttgttgtgagataagtggcccctaaattatcacaccataaccttgctgcaggtggcgttggaacttttagttccttaagaagtgattgcacctagataacttctgctgttgcattggctagagctttatattcagcttatgtacttgaccttgacacagtggcttgtttttttgcactccatgatacaagattactgccaacgaaaattgcaaatcctcctgttgatcttctatcatcaatgtctcctgcacagtctacgtcagagaaggcactcacaagcatagatcggcacttgtttatgctcatgccaatatcacacgtgagttttacatatctaagaatccttttgactgcagaccagtgagctgtagtaggacaatgtagaaactgacagactctgttaattgcaaaagaaatatctggccgagttaaggtcaagtactgtaatgccccaactacacttctatatcgtgtagcatcttcaggtccaagaggttcaccttccttaatgcttaatttttcagcaaccgatagaggtgtagccatgggtttgcattgagtcatgccaacccgtttaagaatatctgaagcatatttactttgtgataaatgaataccatcacgtaccttattcacctctatgccaaggaagtaatgtaatgtacctaaatcctttagggcgaaatctgacttgagatccttcagcaatgctgacactgcttctgaggaagagctgactactataatgtcatctacataaaccaacaagaagatgctaacattgcctttattaaatatgaacaatgaagtgtcggccttagaggggcagaaaccaagttgctgcagtttatcactcaactttgagtaccaagctctgggggggctgtttcagaccatatattgctttatccaacttgcatacatgatgtgggaatttactatcttcataacctcgtggttgtctcatgtagacatcttcctcaagaacaccatgaagaaacacgttttttacatctagctgcctaagacaccagcctctagacactgctatagaaagcaccactctgatagtagcagctttgacaacggggctaaaagtatcctcataatctatcccatatctatgtttaaatccctttgctaccaatcgagccttatatctgtctatgctgccatctgcctttcttttaattttgtatacccatttgcaatcgataagattttttccttcctgtgctggtactaaatgccatgttttgttatcttgcaaggcactaaattcctcatccatagcatgtttccaatttttattaccaagagctttagataaatcatgtggttcattaccaaccgctaagcatccatagccataccttatagtgccatctgtgtatgcttttggttttctgatccggttggtccggcgtggaagatttgttgctgcagcattatctgatacagaagacccagtgccagggacatcctgatgtgaaaatccatctcggttgacaatgggccagtgggctcctgacccatgtccgctatcggcccaccatcggacgaagtcgatgggttgccatcattgcgcaatgatgcgctgccggcacctgggatcgtgcttgatctttgctccaagatttcctgcgcacaagcaccactgttttcttccaaagaggtatcattaggtgcagaattttgggtattttgaatatcaggcaacaatgaatcagctacattagtatcccccggataattcatggtggtactggaaggaaacaagtgaggaaggagattgacttcagcccgtaaacgagcgccgacattgggatggaactcacggaaaggaaaaactccttcatcaaatatgacgtctcttgatatgtagactcgtcctgtactaacatcaaggcatttgtagcctttatgagatgaactatagcccaagaagacgcatcgcttggaacgaaaagcaagtttatgagtgttataaggacgaaggttgggccagcatgcacagccaaatactcgaaggaacttatagtcgggtttcttatgaaagagacgctcgtagggtgtcatgaagtcaatgactttggatggggttcgattaataagatatgctgccgtggcaaaagcttcatcccataattttaaaggtatagatgcatgtgcaagcaaggctagaccaacctcaacaatgtgcttgtgttttcgttcagctgggccattttgttggtgtgcgtgaggacacgatactaggtgtgctactccaatttttgtgaagaaggagctgagtttttggtactctccaccccaatctgtctgtacaacaataattttgctgtcaaacattcgttcaaccatattttggaagtcataaaatttctgaaaaacttcagatttaaaacgaagcaaatagacccaggtgaacttactataatcatcgatgaaagaaacatagtatttatttcggcctaccgaatttgtggcaggacccccatacatcagaaaaaatgagttctagtggcttggatgaagcactagtggacacaggatacggaagctgatggctctttgcc

SEQ ID NO: 83468 - DNA, 756 bp, Zea Mays
gagcagaggcccctcacttctcccttttgtgcaagaactccaaatcttgagaaatctggtgaatccctattgtggaatgtgttcccctgtattccttgaactctcctgcaggttcttagctccttcgggagggttttcaaacctcaaatagccgtttcaccgtaaacctaatttcccgcacgccacgtgctcggtgaaatgcccaaaccagccaaaaatgctccaattgaacccaaatttttcaggcacctttacaacacttccagcaacatccttgccaaatttcacgccaatccgagattccaggcttaaatttcaccaaatttcccgttttgagcgatcgtttccgagccgagtgcccaaattcctttttcttcgcctaaattcaaaccaagcacacacttcactcatattcacctatataaacctattcgtgaagtatcggctcaattccatatcgttttgtgcctcaattcgaattccaaacctcctatgacactatttatccttcaaacgtcgttttcacgtcatttgacttctcgatcgtctcgtctcgtgccatatctctctgtgtatgtatttattcacatttcatatgcttatgactatgtgactaatacgtgctcacctcttctgtcatttcagtgaccttgattgaccgtgtgccgtctcccgtcctgcctggatcgtcacctctcgtgtgagctttccaggtagtcatctcatcttttgctaatctatcggtcactattgcac

SEQ ID NO: 83469 - DNA, 730 bp, Zea Mays
atcggttcactccaaacgctatagtgcgtctaggaattttcatttgggttgtatccttgagtcgtttcaacatagccggtcccaagcccggtaaaggaggagggttgtgttaggtccgacaaaccaacgtaaaaaccagccaaatcttatggagatgaaaccacaaagaaaatcgttggggcgtaaccctcttagcgacgcgccatatcggaacccgggtatggtgttaaatgagcaagggtcgggccgtcaccccttaagtgacgcgccgtctcttgatctggagtcggtgataagtgagcaaggatcgggttgtcgcatccttagtggcgcgctacatcggcgcccgggtgtagtggaaaatgagcaagggtctttgcatcttcctcggcgggtgcgaagggtaaggaagctagtcgaggaagaatcaaagaggctaggagatagaatcatcctagtcaaactggtcattggggacttggttctcaatgttatcagcgcatatgctcctcaagtaggccttaatgagaactcaaagagggagttctgggaaggcctggaggacatggttagtattgtgccagttggcgagaagctcttcataggaggagatctcaatggccatgtgggtacatctagcaccagtttcgaaagtgtgcatggaggcttcggctttgggactaggaatcaagaaggagaggaaatcctgaactttgccctagcctatgac

SEQ ID NO: 83470 - DNA, 447 bp, Zea Mays
ccgagacctggatcccgtcgctaatctcgccgccaccacgctgctcacgctcccgtcctcgctaatctcaacggttctgccctcgcccttcccccgtatctctttgtagtcatcgtccctccccaccgcgcctgcgcccccaccctcgccgcacccgcccccagtcctggatccgccgtcccatactgcagtttattgcgctcgtgctcccacctcctctccctctgccacaatgctgactgccaccaccttcgtcaagcctccaccaccgcgacatcggactccggcggctggggcaacttattcgtggttgtggcgggctccaatttcgcggtcgacatcggtgctgcgctcctcatccacgccgatttcgcggtcgacatcgaggagagccaggtcgtgtgtatctagggcatggatagatgcccagagatttggctctactgc

SEQ ID NO: 83471 - DNA, 797 bp, Zea Mays
gtgaccactatttataccaccaacatgctcaggcaatgatttatatgccatcttccaattgttaaatcctagtttattgaatacatcaaatccatgaaattctgcccttcccggttccttgaagagaaaacaatagaaacaaaatgctgcatccttggacacactatattctaaccaatcaaatttcttataccatgcttgttgaaaagccctactagaatcaccaaatttcttcttagggaaattaacaataggttgtgttggtcccttcaatatgtatgcccttttaatttggtcacgaatctctggagcatactcatgtataggttttctaagtgcaggatcgcttacaatctcatccaaattgatctcgttgccacctctagattgagcttgtggtgggtttggttgtgttgctattgcactttgaccttgtggtgcagacaataaacttctatcaaccaagaacctcctcattttcttctacaaatttgatagaagtacacaattaaatataatcaatctgtagacaacaattaataaagatgaaatcacaaattacaagttacagttagaaattcaaaccacaaggtgatggaggtggactggtcactgttgaaatcacaactgtgttgtctgtgtatgctgctgggatcctggcctcctggggacctgactacctgagcacttgacgcctggagccctggacagatgagtagatgacaggagagatggagccatggaggtaggggcgtgccggcatggggcggtcagcggtggcgggtggccgatgggca

SEQ ID NO: 83472 - DNA, 694 bp, Zea Mays
ggtggtctgggtattctcaacctgggtatgtttggatgggccttacgtgccaggtggctttggttacagaagactgatgcgtcaagaccatgggctggtctccctatccgagtgcaccataatgcaaaggccctcgttgatgtggctattacctcagtggtaggcagtggtgaatctgtgaagttctggtctaatcgttgtctccttggtaaaactgtggctgaacactatccaaccctgatccaaatgatttctagaagggctttaaagtgaagaacagtagccgagggctcacaaattgttaatgggtgtcagatattcggggaggattgtctataacagtcctagtggagtatctgtagctctggaacttggttgatggggtagttctgcaacctgacatcgtagaccaacacattttggcgcctctctgctcatggtacttattgtagcaaatcgacctatgatgctctctttgtaggctctatcccttttggcccttggcgatgtgtctggaagacctgggccccttaagatgcaaattctttgtatggttggcaatcaaaaacagggtttggatagctgatagactagcaaaaagagatctgccccatccagttgcttgccctctgtgtggtcaggctgaggaaaccatctagcatattcctgtctcctgtgtgttcgctcggcaaat

SEQ ID NO: 83473 - DNA, 519 bp, Zea Mays
gttatttgtttggggtgccatgatgtcaagcctccctacatcaagctcttcctctagcagaggccaaggcaagtctctagatcttagggccctaagagaggtcatcttagcatagtgtgcactgcaatagcttcctatatcgggatccttaaatgtgtcttagtagctgttgagtgtatgccctttatcgggtgctaacaagcaagagcatccttttgattatgtactatattgaaaatatccttgtaaatgcctttaaatagagtgttttggtcttagcattctagttttctagtgaatttcatcaccaattaaatttgtgggatccttaggtcttggaatcccttgagtggtagctctaaaaattcctatgtgtatagcctcaaggtatactttcatacaaattttacgatataggaaattgtcatcctcaaatatgggatgtggtccatcctcgtagacatattaacttgcttttaagactaaccaatgagcacaagactctaacaccaattgaaa

SEQ ID NO: 83474 - DNA, 432 bp, Zea Mays
cgcaaaccgaagctgatactaagcaagtagaagtcgaagctgcagtaattgaggttgaaaccgatgatgggccttcagtgtctgctgagacgaagctcgccgcaaccgagcaaaagacagaagggaaatctccagatactggcatagtttttgagaaaagtgtggccaaagaagccaaatcccttactccgaagcactctccgaagattttgattatatcattcgacatgctgcgggaaaaagactatccaaagaagaaatttttgaagccaaacactatgcccgggaactgaagtatccgaagggggccttagtgtttaacggtacggacgaagatgatttcctgtactgcttcccgaacaacaaagaattatccgtctgccgggagatggccagaagtatgggttttccgaagctcgaagttggcctttg

SEQ ID NO: 83475 - DNA, 719 bp, Zea Mays
tacttggtcctcaagatgccatcccccgcgggagtcctcagcgtgcggggcgaccacaccgccgcgctggtggccgttgagagactacacgccctggcggccgagaccgctcggccgggcggtggagggagaagcccctcagcctccggtgccaaagcaccgaaggtacagccaaccgaagcagacggcgggcccgcaaagaccatctaggtcggcgcagacccatcccggaccacccgcatcgcgggaaatctgggagagaaataggaactcgcgctcgtcaccttcctccgggcaaattctaacgtgttcgcttgggagccgtcacagatgcctgggatccccagggaggtgattgagcaccatctgaagatctatccggacgccaagccggtaagccagaagcctcggagacagtccgtggagtggcaggacttcatccgtgaggaggttcgaaagctattgcacgccggcttcatcgaagaggtccatcaccccgtgtggctggccaacccggtcatcgtgccaaaagcgaacggaaaactccggatgtgcatcgactacaccagcttaaataaggcatgccccaaggacccatatccacttccacgtatagatcagatcgtggactctacctcggggtgcgactttttgtctttcctggatgcctactccggttttcatcaaatccggatgtctagggaggacaggaagcacac

SEQ ID NO: 83476 - DNA, 545 bp, Zea Mays
tctccatggattaagatatacaagggcataaacctgacctaatgtcactgatttttagagtttaagccacatggtgcctttgggactttttgcaattaactccaatttgttccacaacacttgaaaatcttccaatgtaaaagttgtttagtttttttatactctaccactttgatatatgcactttggtccaaaagtgtatagaaattgaaatcaccttatagggcacaaattagggtttcgagggctcttattagggttttgagtgttctagggtttgtgtgccactcagatccatcaagtttagtctcttatgaacatttccactaatttttgagataatactcaatttggtatcacacacactcacatacctctatcccttggttaagtaccctattctagagttaagaagcacttcaagtcatcacatcacacttgttttgaagttttagcctagtggatgcattctaggtgtaacaatcataatgacatgtcaatgcatatgatgccatacccaagttttagttcttgtaacactaggg

SEQ ID NO: 83477 - DNA, 646 bp, Zea Mays
tcctcttgtatttttcttcaattttttacttgcaactttggtccaccttggatctgcctcgtcatctagaaagtagcccctgcccctctcgtccatgctgtcgagttttcctttctcctcctccctcctcctaagagcctccagactcctagatgccatcttcctattcttaggcaccacattcgactgccccctagcactcagcacaatcccagcttcaacagaacctcttttatcttctctaaccctgcccacttcacttaattgagtgccatccaggtccccctctttgatctcctcgctgttagctcttcctctcagctctagtaattcctcttcatgcctttccatcacttcatcctgatcacacacattcgaatgttggctgtcaataagaatagaccctccgacttttttggtagccaaaacattgacttcagccatccctcctagctcctctctcccctgaaaccccttttccagaacagttttaggatctgatacctttggcctagcacctacctcacagctcaccgccctaatctcttcactaatggcataatcttggacagattctgtggcatcactgttttccactccttcctgagagtcaccaagactagagatctattcttttgtagtttcc

SEQ ID NO: 83478 - DNA, 504 bp, Zea Mays
gcaggctattttcagtttttcacctagttccttgtgtttgttagtgcaccggatgtatctgcagggaaaccgcccgaataactgtctcacccatacacatcggcaccgcagcccatatgagaacgaatggcaccgagaccaggacctgaccatagaccccaacctgaaatttgctcccacggagagttgaattcaggacccaattcagctagaggctcttttgctccccctcgttttgtgaataaggacatctataatcccgttacagacttcctatagttaaagatgaggtttacactttacactttttgaaaaaacaactctgcagttgcgctaaatttctttcatttagtgtatcatgtagcatcagtgtgattttaaattatgtttttaatgaattcagattaaagaaccatgtctctacaatgaattgtctgcactagctgtctgccagtatcatatacatgtcattttttaatgaatcgttccaagcgtaaaaatcac

SEQ ID NO: 83479 - DNA, 773 bp, Zea Mays
cggaataataagcacaaaaaatcgaagtcttttccaaaagactctgcgcaaaagtcgcctacgggtgcagccggaataacaggtacgaaaagtcgaagtcttttctaaagaactccgtacagaagcctacgggagcggcttgatcaacgaaagcgtgcagcttcatcacacaaaattatggttacatacatatagcgagggcatcacacattacattggctcaaccttcgggatgatacccatctccctatagttgaacaacattatcctcaattcctcacccgcaaacagacttcgcaactccccctcacctacactcgccccagccggcgaggacaacaattcccgtttgccagtcccatccacacgaagacgaccaccctccatctcaccacgatgacgcctatcacttcgcgacaactcacccactctctgtttcgccatcgcccttcgccgcctatgcccagcactcgcacccggaagattctcagcacccatcacacgcggagaagtctccgccgcagcctcatccaatgctgcaaaataatccaagtcctcatccgaagactcctctgtccacacaatcaaactcccagaatcatcagactcaaaacacttagacacagaatcatcagaatcgtctttagcaaccacggtcgaagccgccacaaaattagcattgtcagtagcggttgcgtgtgcaggcccaaacccctaaacctgcgcagcaaccgaggttcagtaacacacagacaaaatttacaaactcctca

SEQ ID NO: 83480 - DNA, 417 bp, Zea Mays
gcttttgggccgcttctgccgcgggtttccttccgaatgcgcggaatccttcttggggaaacgttcttccagaagctccgtttctagtttcaacgcggcaagagaagcgtctcgtccgtaagagatgttaatcggtgaggctgtaaggtctcgttacattaaaaactccctgcatcaataggacaattctcgtgcattgcgatggcctcaattagactttaaccttctaaataaagtccggtcaggatagcaatacgtagattaaaatgtaaagtacacatgcatggttcaaatctcataacaaaatacaacacatctccgcacgcagagaagtacggtgtagaaaatcatatacaagtcgaataacaattcaacatgtagatattttaacaagtcttagcggtgtatgtcactaaa

SEQ ID NO: 83481 - DNA, 418 bp, Zea Mays
agaaaatgtaggtggcttgtgactcataaactctcgatgcttatctctgggctgagctggtggtggtggaggcggtagttgctgtcgttcctgtcattcttggcacatttcttggaattcttgcctcatttctagtcgttcttgacggatctgtgcttgcatttctatcattgtgttggccatttgctgtagtagtcgtatttgagcagtaatcacgtcatcaacatgcgggggattcagagcaggattcattgttggttccggattagctacagctcttcttcgacgtattcgtgcgggtagatcaacacctcccccctactggtattaaccatttgagttagagacatatggtaagatacttttgcaagggaataatttagtaggtagaacagctagcctattagttggtcgtaaa

SEQ ID NO: 83482 - DNA, 368 bp, Zea Mays
cgacgctagctctcgctgatccatcgtgataaacagatccgtcaaagttcaacttgaaccatccacgaggcggcggtgaccacttcaccaagatgacgcgacccggctgatacggccgcgccgacgcggacagctccgtcgcacggcagcatacgctcggaggagtagacgacggcgtcaggacagaacacaccatcgtctcgatctattgaagaactctggatgacgctgggtcagcgtctcagcgagagtgcctggcaatgtcgtgtgggtggctagctagcctttatatataggctggggaacgcaagcaggagagcgacggctcatttttggtttatccggtagatggtgttgcccacgcgatg

SEQ ID NO: 83483 - DNA, 497 bp, Zea Mays
acacaacttagcacattagatcaactcaaccatgagctaacccaaacaatagtgtcatgatgaatggtataatcaatctatcctcacctaatatcaaacaaacttttgatctacatcttgtggtttgcctcatccatatctattttaaccatatttcccaaccccgataatgtacactaacctcgaaacaatgacaccaagaccagaggagaaaagatcaacatcgacaaggaagggtataacagtcaaagtgaatttcgagatgaatcaggagttaaacattttggataaagtcttttccttgccataatctttcttacctcaacctgttcagtttatatcccacataaatagtagctggataactatgctctcccaatcttccactacctccaccaccaccaacagctacaccaagctacataaacatatatatatatatatatacacacacgttactacttgtaagatctaagtgttattttagttagtggttg

SEQ ID NO: 83484 - DNA, 478 bp, Zea Mays
gattaaacccaaattctcaactctttattatatttttatccacattactattttattaaatgcacaaacaactaaactccagcatgatgcacattcttttatttgatattttaattggtagttagggttaatctcatggtttgaaatacgcaagaaatgaaaataacaacaccaatggtcaaatgacccttttatatttcccattccattaatctcactatttgggtattacagctagccatcgacaaatctgcctcactcgcctctacaaactagacttgctcaaaaatggaatcccctcgatgtttcgtccggtccccctgctcgccgttgtggcactactgctgcactgcgaaacgccgtagtcagcccggtcggagtacccatcgttggcgggtggtcttcctgggagatcgcccagtcatactcattgttttgtagtgatgggatcgagctttgcgcagggggttcgggtctg

SEQ ID NO: 83485 - DNA, 918 bp, Zea Mays
cgaaactatttctctgtatgtagattgcccaggagcctatgatattgtagttactgattacaaagtgcattacttatagggatataatttttcattcagtagagtccatcctccaagtttcattcagcaattggtataactaaaatttcactatatatgcatatgctctatgatacaaatatatgcatccataacacaaattatagtcctctctaattcgctatagctagatttgctgatatatagccatatacgcaatgcacttagatcctctatcacattctatatcgcatcctatgttttaaactttactttgcaaacattgttaaacagtattgtctatagttccacgtccctattttactctacccgacgaagacagtgttatatgcatgcaccgcgcctcgggtgcgcttagctacagagcctgcgtacgtttattgatctcactttattcactcacgtacgtagatgaagacacataaactggtacgatggtcggcacacatcctgcttcagatcagtcgcctctgctcatttttgtccaattaacgccgagagtactgcaagcttgtcttgtaggcagtgagcaagacggcaccagcttttgctgccagcaccacagctagcatgttcatgcatgtaagggtagccgggtagtagcagggcgccttcaaaccacgggcagtgtgcagcggcgtctccgtacggcgatctgttgccggccgaggggcgggcaatgcaccatgcaatccgtccggcagatcagtatgcatggctggcgcagtggcaaatactagacgacgcccgcgtatgtgcacaaggtttcaaccggggatatgatgatggcgccgcgacacacctgcgcgcgtgtccttccaacgtatgaaatgcatgcatgggccagcgccggccggc

SEQ ID NO: 83486 - DNA, 425 bp, Zea Mays
gctgaaatagacttgaaaattttaaagtcccaaacatagccttaattatgccactagagttattaataagggtgcaggctaggacaaaaaatctttgttgtaagagttcttatttttaataaaataaaaaagagggtcgaataaactcatttattagcaaaagttgaacaatgggaggaagctgataaataactgattttaattagttttagacgctaaagcatgaattcttcatgattatgtcgtcacgagtgatggactatacgtatcttgctagttcacacttatcccacacgtcaatacaaatccgttttgcatagaggttcatcataacagtctcttgagaaactgaaagaataccctacacatcttacaccactcgtgcgatcgattcgaggcaactctatctgcacacaatgacacaa

SEQ ID NO: 83487 - DNA, 699 bp, Zea Mays
cgcaactccaaaccattgttttgagctgaaaggatgtgtggatggacctccaatcggaagtgcaaaaactgtctctgacagtctaggctataaagcaaatgctacacccagcagcgctgcactaggcaaatcaaccggtacattttgaccagcttttgggcagaatcagaagcttttcttaactaccgcctcctttggtagacacattatcagcctaagcaaagcttttgttggatgagtttattaatctgtcgacatttttgcatctttacatcagtggttcattgtattttcagggagaaggaccggtgtggaaaaggacgccgggcggtctggtaggctgggctacctgcaaagatcatgcatttgctttggttgctccatgcatccaccaatgattgcctcccgctggaatgaacatccggggcaggagaggaaagcatagaaaggaagagcatactggccttcttcctaagcaaaataaaggcaaagaagggtggatcactcgacctttccgacaacggtggaagagagctaggattacaggtgagaccaggtgaggcacatgagtaacatcgacgacgacgggacctgcgatgtggcacagtaggagacaacgacggagagtgtggacgacggtgaggaggaggggaccgtgacgtggacaccagggtgatgcaggcgacacgaacagcgtcg

SEQ ID NO: 83488 - DNA, 552 bp, Zea Mays
tcaccttgggggtttaatccctttatatggtttaatccctgccttaaaaatctattcggttaatccctgtaactatgttcgaccctacgctgtcatgccagacaattgaatagcagcgtcagccgttagacctccctccaccaggcaaccaaaattgctcagttcagctaccggatagcttgattgtgtttcattgttgttgcctgctattgcctaacatgtttgaagagtttagctaccatgtttcacgcctccaagatcttgtgttttagctggtgatcatgaactattcagtcggtgatcttgtttttcacgcctaccatgtttagccggtgatcatgtgtttcagctgccaatcttcagtaacatgtttgaacagttcagttgttgaatagtttgaagaacactgcacaccaacaaaccgtcagttgttgcctactgcagaaggtgacattaagatttgcatgtatcctccagttagtggatcacaatcacatcatctcaggattaggtttcagaatgcagagaaactgggttcatatatgattcctg

SEQ ID NO: 83489 - DNA, 420 bp, Zea Mays
gctccccacctcgtcgccggcctggcaaggagagggtcgacgacggtgatgtggccgcgggagaacgggacctcgggtatcagtcccccgagcaggtcctcaaagacatcctcactggagactccgactccggtgatgataccgaccgtcacaagaagttgtacgtgatgtacggtggaagctgggagctcacctcccgcaggaacgtgaagtccctgcaccgcgaggtcctatcggcgaccccaggggtcctgaaagcggccccacaccagcggtggtggagcacaactatctcctttggggcatccgactgccccaagaacatggcaggggccagcatactgccgctcatcaccgccctgtcatcgccaacatcaagctgcatcacgtcctgatcgacggtggggctgggcacaacgt

SEQ ID NO: 83490 - DNA, 367 bp, Zea Mays
ctaaatgcgacacttgccaaagagtcaaggccagtcatttgaaggtagcaggtaccttacagccccttcccataccatcatggaaatgggaggatatttgcatggattttattgtgggattgcccaacacctctcgacaccatgattccatttgggtcattgtggacagattaaccaaagcagctcatttcttgtcggtacataccacccacaaggcagagaaatatgcagagatctatattgaccaaatagtgtgtttgcatggaattccgagaattattgtatctgatagaggagcactatttgtagcacgtttttgggagcagctccaaaggtcactgggaaccactatgattagaagttcagc

SEQ ID NO: 83491 - DNA, 584 bp, Zea Mays
cgctactgagcccacctccaaaattgctaacctgttagagtaggtctcattggaaccatagaagtttgtgcccttagaagatgcttaatgtggatccactcaccatcgatatggatccaccactgagaagcatcacaccattagatttgtacacataaaggagtagtgccattggatttccaccatactccactaaatatgttgcctccaccagaactgcacatcgccatcaaataggccgctatgtaagatccatagcaacccaactatgcaaaatgcactctaggtcgtcgaaccactgtcattgaggagcacaacctttccttagggtggccatgcgagctttgaggggaatgggagaatgttcagaaagagtgtgcaaatagagaaagagatagaaatgaaggacacctgtaaagtttttataatctaggattgggcaagaggtgggataatgggcttgtcacaaattacctcttaggaggtttggctttgccctcaacagcctattttcagaagtagacctcttaacgggcccatctttatacaccaattttaagagaaaataattcaaggttgtgtcc

SEQ ID NO: 83492 - DNA, 503 bp, Zea Mays
gagattgcaatctaatgaatgcaatgagtaagatatatgcatggcatgatatgtaatttaacaattaagatttgatgggggtgatcaatttaataaggtagggcttattcttactattgaagatttttggggtacacttagcaaattaggatcaagcttagtaagctaattggtaagtccattttggtgttccactgatttccttttaatgtcttagtgagagcttattaagatttctagctgaacttattggagtgagatttattttccctctcttcctttctaattcttttatgcttttaaagtgggtttgaactacaagacagtttaataaatttccaaaaattctgcaaacattacagtggcttcttattggtatataattctctgtctcagaatttggggcttacacagtgaggggttctctctgtataaaattatcaattattagggcagagggggtgttttgaactacaactcctttttaacagtgggttattctc

SEQ ID NO: 83493 - DNA, 899 bp, Zea Mays
aacggcgctctaacacgctctgtccacggtgaccgtgcgatcaacggccaatccaacgcgttcccggcgatctaaggggtcctagcttaattggtgaggtcgaggagcatcaggggcacacaagaacactaaaacgagagaacagggagcatgaacagacctggaattcgctggccacagtgagagttctaccacggtggcggaaacagaattgggggaaaagaggaattggaaggctctggtggataatctgaggcaaggatcggtgcgttggatgcataattacctagcggagccgcgggtgcgcttaatttataggctccgggggcggcggtgcatgaatttggtttggcgcggtggcgttcggagatgaaaaggggtcactagcgcatgagcttagtggctttcaccgtggcggctctccggcgatcatcgggcatgcaagacgcgattcactgcgatgtggtcaagcgctttagcacgtggcgtacaacggtaagcggccaacgacggtgaggtctatctcggctgatcggcgagcaagtgggtacggtgaaactcatccgcgaccgagcccaagcctatcttgtgccaagattcttactccgtcatgattatcccctcaccagagagcatgaatcgcgacgacggcgcaaatcacggcgcaaaggtcaccggcggcgagggggctaaacttgtgatctgtttcagttactgtaccatggtggttaccatcagagtgtatgacagaccattttgtagggctcagatctcaaattttcatgtgatgacttgctaatctatctttaagaaagttgttgttctactatccagcttcaatcttgctatagcaatcactcccaaattcttactagatcatgctcgaatcccagctcaaa

SEQ ID NO: 83494 - DNA, 869 bp, Zea Mays
ctcgaccgtcgccggaatggcccactagttgaggctgcagccgactcaacacgggtggtgcgaattcgtgctgggacgtcgtgatcccggtcatactcctcccggcgccttatctcattttcgtgccaccggtcgcgcgaagcgtttatggagctccacgcgtctcggcggctattgatggcatgacgtaggttgttcgcaggatgagcgaggggtagaaggtgattagctgcctgagtaagcagccgccggtagccttctgtgtctggggttcgcgggagaccgtcagctatctgagccagtacccctccgacttcactcgacgtattcattgcacgagcaaagtaggggtacatgttccaagcgaagagagggttctctcggcgcagccttgcgccttgctcggcttgctctcgttctcggtcctgagcttgtcggcgatcgcgacagcgagagtttcgcctttctcgatgtgcccgctcgttgagagtttctcccacttctgaggcttcgtctcaggatatgggctgcgccggatcctgttccccaactttgtgatgtcgtcatatgttccagcgtctgttcctccgtcgccgcgcttcacgctggggaggttcttccccttgcatggtaggctcatcatcggaggtgggtgctgactccaatccccctcgatgaagaggacgtcggggtagaaaggaaccggcgtgatggcgctcttctttccgtcctcctttgaaggcggaggtgtcggaaggatggctcagcatgttctcgtcccctaactcgggacgtttgcttctttctttcgagtgatccgtgtctactcctttgtgggcgaggtggacagcggagttcttcgggtaagc

SEQ ID NO: 83495 - DNA, 500 bp, Zea Mays
gcaggaattgttccattggatggagatgatagtttacaagggacactggatcctcaaccatcatgctcgagacagttacctcatatgacttgtggattgacatattttttgggggtcacggggtcgaacaacaacgtgaacatgctcaaccagccgttgttgctcactgataatgtgaacttcacggtgaatggtcatgagtacaaccaagggtactccctcgccgatggcatcaaccctcagtggttggtgtttatgagaaccattctcctcctatagactcctaagcagcagatgtttgttgtagggcatgagggcgcatggaaggacatagagagcatttcagggtccttaaggctcgattatatattcttgctaccccatgccattcctttttctcaccaagtattcagtgtgatcatgtgtgcatgtatcatacgttgtggacgactacaatatagtcgagtcctccattgcagcaccaaccatcacccctcaag

SEQ ID NO: 83496 - DNA, 574 bp, Zea Mays
tgcaagtcaatcgtgaacaaactgagtatctttgaaatcccttttttattgatgacatatttccattttacagagtacattggcgtcccgatagcttttgaaatacggctagggataaaacttcctgaggtgttctatgttccaggagttcccgacttctgtgccatccatctaagtgagacgatatgatccgggccgagtgacttctgctactatgaagggtccttcccataagggcgataacttgtgccgtccctcccccgttagaactcggcggaggacgagatctcctactgagaaggatcgctgtcgcacagccttgtcgtgatagcgccttagagtctgttggtaccgtgccgattggattatcgcattcagccgttattcttcaagtatatcaatgtcctccagcctagtggcctcagcttctgctatgttttcgaagatcaaccttggcgccccgaacttgagatcggcgggtagcactgcttctgacccatagaccatgaagaaaggagtgtttccatgcagagctcggctgggttgggttcttaggctccaaacgacgtaaggg

SEQ ID NO: 83497 - DNA, 487 bp, Zea Mays
ctttgcctgtcaagctaagtccactcgggccacaactgacgaagctttttcagaaggaaaaggagcccgcgaaaacgaagaaggcagctaggccaaaaaagcaaagaatcattacagtgatagaagtcatcgaagggacaccaccaggagcttcagctccgaaggcaccggctgttgaaagcacgacagctactgaagctacaccttcggaagccacaaatgccgaagctaccagagccgaagatattcatttagaaagcacgattgctgatatagataaaatactgctagacatggtcgcagaagaagctaccgcagccaccgaagagactacggccccagagcccgagaaggagaaagaaatagccggagacacttcagaagatgaagtttttaactttcaaaacttagttggtcaagaactgacaaaggctgaaaaggaagagctaaaagaatatgctatatcttgcggatatcggccgggagc

SEQ ID NO: 83498 - DNA, 638 bp, Zea Mays
cctccgtagatgttgatgcttcacaaactctccataggccacgacgattctcctaacacctttccggcacgcactcggaccccagaccgcggcgcgattgaagtcccatggtggcgacgctccctactccctcgatctctctctcagtgctcgctcacaaagatgctggcgtgaacagatgaggaggggcccgagtctttgtcttgtatgcgccgaggaagcctacaacgtctaacgggaaaatgggacacatgatgatggatacgacgatcttcgttgcctagggttgttacgatgaaggagaggaagttgtccaagcgggtccaccggacagtgattgcttgcacatgcggactcggggaaataggatacgctggccgggtgggccccttgtgttggtgagctaagaggtgttgaccgcgtgcgctagagtctatgacccaatgggcccatccgtcggttaacatattgcccattgcgcgatgaacggtgactgaggtgccgacgaaccgatcccacaagtcagcatgctcccgtggctgggctgtgtggcgaggaaaaagagactgggcctgcggggtaatggagatggccacacggttggttgaggggaattgggctaggatgtgggttttagt

SEQ ID NO: 83499 - DNA, 597 bp, Zea Mays
gagaaatataccttcatgatttcttcatcattaccagaattggattaatgttgcttgcaggtatccattgaatgttagttcactatgagctgtttggatatatgaatatgttttgtattgaagtgagtactttgtaagagtcgttggatgttgcatatggtatcttctgtgttggctgctagtagtaattttttatgtttgagttacttaagatcagctgggcggtagatgaacaacacattataccaaagaatatgatacatcatacagagtgtgccttcatgggtttgcgaacaaaataaatgtgtagatatttttgagcatcgaacagtccctaaatgtcagataaggagagcaaaacaaatacattcatgttcgaactcgaagacctagatgactgcaatctaaattttaatggtgtgttcctcacacatgtgtgacatgcatgaagccaaatgttttcagtagattaaagtagcccgagcagaagcgtatactgaccttgacgagccacggagaggttgaggggctcagctgtctccctctccggctgcggctactgctgggccatagaagccttgagcggcaacaccagag

SEQ ID NO: 83500 - DNA, 849 bp, Zea Mays
acgacacacaattgtttttacataaaagcaacacagactttacaatgtttttacatatcttctacacacaatttaatcatcttccttcaaaactttctccgcggcttcgtttagtagtttatcaacagctccgtctattgctacgtttaccaccttgaattcattaaggattcccctaagagctggatctaggatcatacggttccgagggggagaaagttctgctacataaaaacgtagttttgtcatgtatgaagctagtacatttacgaagctagagcgcaacacaaacatacatatacatctttctcgctttgcagcatcttcaactttcctcgcctcttatgaagctcgatgagtttcttcttcattctttctaatggcctcgtctgctatctcccttccaccgctcatccagatttcagaataaaatttcccaccgagggcgatagcttcagctgaaggctccctgatgtcatccgctgaaactaaaaactctggctaaattacagtcttggtgtgttcgctgccagctttttcaagtaatgacacgacccatcgagcacccacacaggcactgaaatcccctctaccaatgaggacttcgtcaaaagcttcaacttcaccttcgatccatttaactacaccttcgggatcaccgtggataaaattttgttcagttaagaaagcgccaactttagcaaatgtgcttttcaatttattgcaacattccatgcaaacattaaaacattcttcctttgattggtgaagctcatcaatatttctttgaactctgatccgctccatatcagatatttcacgcttcaccttttcaacattaaaattctt

SEQ ID NO: 83501 - DNA, 442 bp, Zea Mays
aacaaactaagtattcttgaagcctttctttattgatgacacatttcccactttacagagtacattatcgtcccgatagcttttgaaatacagctaggggtaaaacttcctgaggtgctctatattctaggagttcccaatttctgtgccgtccatttgagtgagacgatatgatcccggtcgagtgacttctgctactatgaatggtccttcccatgagggcgacaacttgtgccgtccctcccccgttagaattcggtggaggacgagatctcccactgaaaaggatcgttgtcgtacgaccttgtcgtgatagcgtctcagagtctgctggtatcgtgctaattgaattactgcattcagtcgttcttcttcgagtacatcaatgtcctccagcctagtagcttcggcttctgctatgctttcgaagaccaacctcggt

SEQ ID NO: 83502 - DNA, 546 bp, Zea Mays
ctccaatgcctcttcagttatcttggaacaattattgtaacatatatttgtcttgcagcaaggtttgttaaattaaccaacttctaaataaacgaaggaacacaacttactttgcattctaaaacacatacacgttatcgagttcttcaattgacctatccaatacctttactttgcatccttcccttcatcatacgccttctgaattcctatctttgattgtcaagtctgcagagcttgtctatttgtgaataccaaaagttggttcagacccatcacgtgtgttgcaatgtaaaagtctggtgtcctttttaggtgtgctcttttaatttgccctttttactctttgtatctgttagagtgttaggcctgttaaggctaggcccatgtggcccatgtaaacactatatagctaatctgttgggttagccctaatctatggaatattcactccaatatggtatcagcctggtttccatccctacagccgccgctgccctagccctagggtttctggcgccgccaccctccctacagccgccgctg

SEQ ID NO: 83503 - DNA, 406 bp, Zea Mays
aacgtttatttcttcgttcatcttcagtcccattttatatgtgatttagtatattttgatgccatttaaaatttatcaaataacatcataacaacaaaccttactgaaccacgttattatccactttatatccatctcataaatttttaacagtaataaacaatccatccaacacaagtacaattacatttcactatctgactcgtcacttgtctctagactcattgcatgcttctttgaagtagttgtttcatttcattctggagctctcaacgtattaatgttctcgaccctcgcggacgccctctttttcttgggttagcaaggattaccaaacgagctctattttcttcgattgaaaggcaagttctgctattatgaccatctgcaactccgcacttcttgc

SEQ ID NO: 83504 - DNA, 344 bp, Zea Mays
agatttgtgtaaccacaagagtagtaccatgctcaaattcacatccagtgtgttcctcatttttatgagtgtcttctacctttcctgcttcagcttcctcttcactagctgatgtatattctccatcatcattcacaaggatcacacgattattgggacactcctttatgacatgaccacgacctccacacttgaagcactgaataccactactcttggctgttgaacccactgatgttgaagtggatgttgctggtttataactcgtgtttggagcagcaccattctttccactagaattgccttgaatattggatcgcaagcctctagttgaaccttttgtc

SEQ ID NO: 83505 - DNA, 422 bp, Zea Mays
gccggtcttgttgcgtaaatcaaaggatgagaaataccagcaggcgaaccctatgggtgcgctactaaacatacctagccaagactatgtgcaggtcgtgtcccagttgggggtaccccttgggggtcacgacaccagttcctccttatgaatcctggcatccagccccgacgcgtcgaagccatatcccagggggccgagtactagggaagaagtgggtaacaatgcacacagcaaaggaaaagtggcgagcagataagttgtaatatcgcccgataagtagtacctaaagagtatcttacgaaatcaaagatatattacaacccgctctccagcggaaccatcgtttttctccacgcaggcctggctactcattgtcagtaggatcccgctggaagcgcccgaccaccacgtccacaacg

SEQ ID NO: 83506 - DNA, 1129 bp, Zea Mays
gttccaaatggcctccttaaccttttcaacccacgtagcacaagtatatatagccctctctccaaaactatttgttatgggccaactaccccttttctgcgcactagcggacagtctgtgatccaagcccagaccgtccgcacgagaataccaacggctataaatgactataaaaatgtcagagcgtccaaaaaaggcatgcggacggtctgcccctcaaggccggacggtccacgatacataaaaccgagccaaaccgaagttttgttgactctgcacgtttgctgaaaattgtactacggacggtccgcagttcaaaaatgaaaaccaaaacagaacttcccgagttctgtccaaacactagtccttcaactgcggacggtccaccacctgggaccagacggtccgcagtacaaaaaattcatgaatcacaaaaactctgtgttttcgcccatcacctcaagttagacctgtggacgttctgccatgctcgtccgaacggttcgtagtaccaattcaacccatattcaaaaatcacttttgaataagtttttatttcaaaaaaccaaagcgttgttagccctcatgcacatgcatcaactatatattctatgaggcactaagaatatcatcaagaaattattgacctctcttgatagtacgactatctagcctactaatctagttaatattcttctctaaacaccttttggccggcaaaagcaaaaacctatcttttacctttgcctagagtattcaattccatctccttaaatgatgaacaatggccatccataagtgtagccaaccattctaccttttaccatttgtccatagcatgaagttcctccatcatcatcatcatcatcatcaagccacttgattaatagcccagatcaacagatggcttgataacactataatgatatgatccactccatgttatcacatgtccttcttgcttcatcaatctcaacatagcttgcccttcatcgttgctttatgtccatcagtgccaagtccttgctcttgcttcaccgccacatggtccctcacacatgagcctctgacttgcccttcacactagacgctcggtccatcgaagccaagccatatctccttatcttct

SEQ ID NO: 83507 - DNA, 548 bp, Zea Mays
gcgggcggagcatgacgtaagggctctaagccgcgtagcctccgcatttattgcggagaggacacgccacctgtccacccttctgacagatgatgtgcccccacggcatttattgcgtcctgtccatttcgctggcagacggcaccagggccaccctgcagacggcgcacatgtccagtctgttgtcgaaacagtgtgcccgtgctgcgcggtgcactgtattcatcccttatacgagaagcttcccccagcgcgccgaggcgacgcagatcacgggtgtcagggcgcacggagattacacgggcatgacaagcagtagttctatccttccatttgtccctgggcccacgtgtcggggctcagaacccttgtacctgtcccccttgaactataaaaggggaggcatgcaacgttacaacacaactttagagagggacactcagacgcaagtcattcaggcttacacacaactcaagctctcgagcaatacaacacccagtcgagtatggtattacgctccggcggcccgaaccactcaaaacccttgt

SEQ ID NO: 83508 - DNA, 829 bp, Zea Mays
tgaaaacgaaggcatcaaaatcctctgtgaagtccacagcggaacttgcggctcccactcaggacctagggccctcactgccaaggtgattcgtcagggattttactggcccgcgataatttgtactgccaatcgagtcacacagtcatgcaaagcatgccaaaagttgtcccctcgctctggcagcccttcgcaattcaccaaactcatcgcccatacatggccacttcaatgctgggggctggacattgttggaccactgcctacggctcaagggaacctcaaattcacattcgtcgccgtcgaatatttcacaaagtggattgaggctagagaagtatccacaataacatcgaagtccgctcaaaaattcttctggcaaaacattgtctgccgcttcggagtcccgtccaaactcacagtcgataacggcaaatagttcgacagccaagacttcagggatttatgcttttccgtcggcaccaagcctgtctcaaatacaatggtgtccaatggcaatatttttagtgccatcaagaaaaggcttcttgacgacaaaaagggcaaatgggctgataaattacctcaagtggtatgggccctaaacatgatagagtgccagccaaccgagttcacacccttccgcctattgtatggatctaaggccattacgccgcaagagttaaagcacgggtcccccagaacaaacaaatcagcagtgcccgatgtcgacgaaccaactttcaaagatctcatcgacggagaccacgtcctcgccctacaggccctcgacaaatatcaggttcaaaccaaggcttggcgtcacaac

SEQ ID NO: 83509 - DNA, 858 bp, Zea Mays
gtgattgtcatgtatatatatgtgtgtgaatatgttttatgtggattgaaattcatggaggagaaaggagtacgtgtaggtgtgtttgcgtttggaaagccaacaagtgtatgtgtggatacgtaggtagattggagaaacgaacgggtcgtgcttgtctaatgtgatgagtaagtttggaaataaaagttatgtgaggatcgaattagtggacatgtgtgtgtgccatggtgcattgtattagtggtcgcataagttatttgattgaggagtgcaggtatatgccatgatatggttatactcgcaatgaggaaagatgtatgcattatgtaacatgacgtttagattgctattgtatatcgtgtgaaggatactcatgatgatcatgtgactgtagggtggtctagtgacaaagctagaaataagtttagtattttaaacggttaattgatagtatctatcggtgttgtcatgatttttgttctatggcggatcgatacttcgctttatcaattattgcattccatgcccattggataaataaatgtcttgttgatcgattagaggtcttatatgagcgttatcgcagcccaataattattggaagcgagtagcgttcataagtcggtccttgttaaaattgaagaacaatccaataagatatgcacataagcgccttaggtccttcagtagtaaaaatgtagtcttatggagttctatgccatgtgttaatgctcttcatgttatatctcctaaaatgtggtgttttaggtgacttgtgtgttgtccagtttatgttgagaaatggttaagaaaagctaattgatctgctcccacccatgttttgaattgcaatgt

SEQ ID NO: 83510 - DNA, 553 bp, Zea Mays
cccctgtgtgccttctgtagaggaccgtcgagatctaaaccccacaccccaaatggccaagttatcaaggtcatctggaaggcctggcccggcatatgcgtttgcttcgcatagaactggcatccccgacaggaccgcacgatcttgatagcgtcggctaccgtagttagccaataaaacccttgcctaaaggcgttgttgacgagggttcagggtgccgcgtggtgcctgcatgtcgctgagtggatttctcccaatagctcctgcccatggctgataggtatgcatcactggagtattcccgaagggatgcgtcggtacaactcctcctctcctatcagcacgaaagtttttgctcggcaagcgaggcgtcaggcctcggccttccctagagggagctcccctcggaccgaggttgtcttgcccacagacctagaatacggttccccgaggctacgagcatacaacgagcgccgcaatcaagtcagtcgtgaagattcacttgaccagctggaggaagcttgggacgtagcactccttcattcagctaaat

SEQ ID NO: 83511 - DNA, 341 bp, Zea Mays
ctccattggactttgcacatgtttatcactttgttcctggtaactcgagtcaggttatcgatgatctcgataaggtacttgatatatgtcagatcaccctacacactaagttcttccataggcaactattcctccgggactctaaagcacttcttcaacaacgacacatgaaacacatcgtgtacatctgctaggtgatttggtaactccaattggtaggccatttctccgactcgctttagaatttttaagggtccaataaagcgaggggacaacttccctttgactttaaatcttctcgtaccccaaattggtgacactttcaggtacacatgatcacc

SEQ ID NO: 83512 - DNA, 471 bp, Zea Mays
agtgtgggagtggcagttggttcagacagaagttgttctgaaacttctctttccgtttctttatctccaatttccagggattcctttttggcgggctttgagggcccagcttcgggtttggcatgactctttgcagcttcggcttcagtttcctttgtttcaatttgcatttttgaagcttctgctgttttccctggagtagagcttgaagtctttatttcttccagtacatctagtacgtggaccatccttttcctcttaggggtaactgtaagatctttttgtgccttcggcactgtcacctctgccgaaggacttgtaatttctgatatctttgttctctcgacctccggctcacccaatttggccaatggtgccttcgatgttgcagtcggctcttcagtcttctgcataagcgcagtttctttggcttcggtagccgaagaggtctcatcgccaaaatcaggcact

SEQ ID NO: 83513 - DNA, 1120 bp, Zea Mays
gaaattctccggctatggtggctaattgaaggcggaatgggtgctctggctttgtgatagtatagcgcaacagaccagaccatcaatttataggagcgcaaggcggtggtgtccaatttcgcgaagacacgctggcgaccggagagggagaaggctactggcgtgggtgaaaccgtggcactcaccggctgaggggctacggcggttatcggcgagctggtgcggctggaagcgacgtggttaaaggcctggggcgtggcacaaccgcggtgaaagatgccaactccgttgacggccgtaaagccacgtcgctggtgcaagtgactgaggaacagcgaggccacagtaacttgaacccatccgcgacgagatcttttcaccggcgaactcaatccacagaccagacgcacgaatcgcggcgagcagcactaatcccggtgaagggtcactggcggccagttcactgaatctgctgattttttggttactgtaccttcacgatcttcttcagtcagcctgacagacagatttgtgacgccaaaatcttgaattttcacgtaagaacttactaatccatttgtagcaaatctgtagccctatgatccagctataaaccgactgtggtaaccatgctcaaacatccacaggatcatcttcaaaatggcccccaaagttcatcttatgccactgaataccataattcaggttttaggcagactgacagccaaactttgggatgcagtttctttaatttttgtataacaaccaaagaagatatctgcaccaaaggtactctcctacaatagctctagacttttgatgtgttgacctagggcaaaatcctcataatttggaaaatatagggctccaaagttggccctataccgctgcaattcagacttagcccatggagcccaaatgtggctttttgcaaataggcccaaaacttagggtttcatttgcaaatttccaaatatgtgaaccatataacctaaggtaccctaatttcatggtttttgcacttaggtccaaaaatatgtacattttgcatataaccccttagggtttcaatctagggttttccaggggtctatttagggtttctggtacttctagggtt

SEQ ID NO: 83514 - DNA, 984 bp, Zea Mays
tgtagactgtccggtgtgcccatctcgcgttttaaaaaacggcctccagcccgagccgagccagaggctctctgtttctctctggcagcgcccgtgctctctgcgtctggcgatttcttccacccgacgacctctccggcggccaccatctccggccaccatctccggcgacctcgcctctctccttccctccctcggtgagcaagtcttcctcctatctcctgttcttcttcctctcagtcccctgtgttaagtctgcctcttctccaccccttctcccaccttttgcaaatcttccaattcctgtgaatccaattgatgaaatgtgttcatgtacctccattgtgtatccctgcaaacttttagctccttcgggagggaatttccacctcaaatggccatttccctaaaaccctagctccccgcacgccacgtgctcggtgaaatgcccaaaccagccaaacttgctccaattgaacccaaatttttcaggcaccttcaccacacttccagtaacctacttgccaaatttcacaccaatccgagatcccaggcttaaatttcaccaaaattcccgttttgcgcgatcgtttccgagccgagtgccccaaaccctatttcttcgcctaaattcaaaccaagcacacacttcactcatattgacctatataaaactattcgtgaagtatcggctcaatcccatatcgtttcgtgcctcaattcgaattccaatcatcctatgtccctatttgcctgtcaaacgccgttttcacgtcgtttgacttcttgatcgtcctgtctcgtgtcatatctctctgtgtatgtatttattcacatttcatatgcttatgactatgtgactaatacgtgctcacctcttctgtcatttcagtgccttgtgtgaccgtgtgccgtctcccgtcctgcctggatcgtcacctctcgtgtgagccttccaggtagccatctcattctttgctaaat

SEQ ID NO: 83515 - DNA, 313 bp, Zea Mays
gtcacaagtcacgccataaataacgcaaaacgcgagcgagcgcgtgcgtgtgtggcattattcatagccctttatttatctcatgtgaagtgtagcgaacactcacacatataaattggttctttcatacttagataagcaatatgggattaaagcctcatacccagaggcgggcccagggggtattcatgggtattcattgaatacccaaattttttgtgatctatagtaatttaccaataatgtattacacaaaatagcgttagagcactaatttctttaatcttttgaatttttgaatacccaatatcaa

SEQ ID NO: 83516 - DNA, 1766 bp, Zea Mays
ttagcgtgagcatgtttcaccgacttaagtcgtcgccaacttaagccgattgctccgttagtagggtatagtggtcaccctaagtcgaataaccgtgctgatttcaagtccaatccaatcgaagtaagctgaaagtcaagagtttgaacgcctttgaaaacgaaaactttattgatgatgaagtccccaaattacagagtacaatgtttctttgagaatttttgaggcgtcgctagggatagaactttctgaggtgctctatgttccatgagttccccacttccgtgccatccatttgagtaagccggtatgatcctgaccgagtgacctctgatacgatgaatggtccttcccatagtggtgacagcttgtgccgtccttccctagttagaattcggcgaaggaccaagtctcccactgcaaaggaccagtgtcgcacgactttatcatgatagcgcctcaaggtctgctggtacctagccgactgaattactgtgttcaatagttcttcctccaacacatcaatatcttctagcctggtagcttctggttcagctatgctttcgaaagtcaacctcgacgccccaaatattaggtcagcggacagcactacctctgacccataaaccatgaagaatggggtatttccatgcagagctcgactgagttgagttcttaggctccaaaccacgtatgacagccctttgatccattttcctgcaagcttttcattcttgtcaaatactttcttcctgagtgcttccagtatcatcccattggctctttctacttggccattggctcttggatgtgctactgatgcatacttaatctggatgctccgctgctcgcagaagtcaaagaattcagagctggtgaagttggatcccaggtcggttataatgttatttggtatcacaaacctgaatattatgtcttgtatgaattccactgctttggctgaggtcaaagaggcaatgggcttgtactctatccattttgtgaatttgtcaatggcaaccagcacgtgagtatatcctccctgagctttcttgaaaggtccgatcatgtccagcccctagcatgcaaatggctattttacaggaatggtctgcagctgctgtgctggtaaatgttgttgctttgataagaattggcaagcttcacatctctggactaactcggtagcatcactcttcgctgttggccaatagaaaccagatctgaaagccttcccgaccagagttctgaatgctgcatgtactccgcactgcactacatggatttcatctaacagctgcttcccaataaccgagtgaatgcatttcatgaggactcccgtcgcacctcttctgtatagtgtgccccctatgagggtgtagtgggctgactgccttgcgatgcgttctgctgccgccttgttatccggttcttcttcatttttatgtacctgatgataggctctctctagtcattggggtctgactctggttggctcaaggtgttgcactcttccgtctgatatgagaggatactcggttgtgatatttcttagacgaagatccgaggggagcctgagcccgactggatcccatcttcgacaacgcgtctgctgccgcgttgcagtctctttccacgtgatggaactccagccattcgaatttgtcctgcaatttcctgacgactgcacagtacttgcccatggaattagtcgagcaatcctagtctttgtttatctggcttatgaccactagcgaatctccata

SEQ ID NO: 83517 - DNA, 410 bp, Zea Mays
gctttgctgggtgcccaggtacgttttcgttgcggcgccgggaaggaagatcgacagggtggcggggaatttctcgccgtcacgcaatgacgccatgaatctgccatacgttgtggacctgctttcctctgccctcaccctcggtatgtcacccttgtcttacccaccatgactctgccataggttagcactatttggattagggttcgggtcaccggatcatcgggcgagatcacgatggggctgcgctgccgcgggtcaagcgcagcgtcggcctacgggaggtcgagttggtgaagacgcgctcgcgccatcggatcttcctagggaggtctagattgagtggtgtgtggaccgttgatgtcatgggtatggctgggattgggcgccaagcgtgcctattcggtatg

SEQ ID NO: 83518 - DNA, 531 bp, Zea Mays
ccgctgttatcttattcttggagtcttactagggcccatcccttggtcatgccattgtattatagatatccatttcgaggcaattgccatacttattgtagggtaggtatgatatgttgtgtctacagatgtcgtgtcccattccatttggtacgtgtagttggtagccggtgtagccttttgtaccttaatatacttatggtatacttcatgtacgcaagcatgcttacagggttgatccatgcatcataaagtggtcttgagtatcccgcaacctaactcgtagctacaacacacttgtcaggcttgtaacgtttcctgtcgcacatttaatgtgttgtaaccgaaacttatgcattaaggtacaagtaaggaatagtttgcatgcctttagatgtgaggcctctttcctaagattgtaccatccttggtgcgccctgatcacacccttgttttgtgatagagttacacttaactatccgaagtccttagttcctttggggcacttaggttctagagggccaagttctg

SEQ ID NO: 83519 - DNA, 642 bp, Zea Mays
atttttgtctcccatgctaggtgattctacagaggcaggagttagtacctttgtggattccataacagcatccaatacacttaccattctccttctcctcggagttattgaagcaatcttttgaaccttcgccagttctgcctcttgcaatgaactcaaagtttttggccgctccgctgctatcttcgagattgcctcttcgaccgattctaccctggctttggcagtagtggggtgacttggctcaacggtagaagaaggcccttcagcaagcttcggtactttggccgtttcaatatacctgggtcggtgcgtcaaaactttaacctttttcccttcggcgtggtagagatagctgaagcagcaacctttctcttctttccctactttcgcgaggggtaacaatagtctaggtaaacaaagccaatgacatcaaaaaccctatttaacgttttcttgcctcaccctccgaaggccaccatcatggcatcatctttggcccttgagtaggcaccaagtaactcgtcactggtcgtgtcgatagcatctagtcagtcatcgtttggttcgtcaaattgattcatgtatttgaatgtataattcaggtaaattaagccactctgactagacccagcagcagct

SEQ ID NO: 83520 - DNA, 305 bp, Zea Mays
aaaataactaaccttggattagctctggactagggttctttgtatttttcctaggttcctcatcacttaagtatgctaggacaaatatgctccttctctgtttattatttttcactactttcttaattttctaagttttggacagatatagtttttaatagcaaaacttgagttaatcttgtatactggggtgctcagtatttttaaacagtgcctaagttgggtatgtatctctacaaattttcttaagcctaggacataagagtatctattttttccttatattaataaggtttgggcggttt

SEQ ID NO: 83521 - DNA, 1018 bp, Zea Mays
cccacttccaggtaaacgcgcccgcaatggcaatcttgcacagagaccctcggtgatttgaataaccagtaaagaacccctaagcactattcaatcgtttcactgacatgtgcacttagacccctaggtttctatttcttcactggataagtccctggcaacggcgcactcacctttcagccatctccttgttgggaacaaccatgaatagcgacgactaactaaaccaagtactggactagtgtccccgatcccaggcgaccctaatccatcccttaattgagctagtccgacccggagttcttctgtccacaacaacggcgagacccgagggtgaaccaaggtgttcccgatgactaggcgtggtagcgttaaaattctaagaacagggagcaccactataccctaaggaagctagaacagacagtaattgggttggaactacctcaggcgatgcttgccacggaagagctctccacggtggcgatggcgaccgaattaggggaaaatccaaattcaggcgctatggtggctaatcggaggcgagggttggtgctctggctttgtaacaacctagcggagctagctgtacactcaatttatagtatccgtgagaggtggctctgaatttggaagagggaagctggcggttgaagagagggggtgagtcaccggcgcgaactactatggcattcaccgggcaatgtctcaggcgatggacaggctacctacgacgatctactgcgacgtggtaactcttctaagtacatggcacggcaacaaagagcggcaaactccggcgaggacacctcaatcaatcgcacggcaagtggcacggtgaacagtccggtgatgaggctccaactcttccctgcattgagatctttcaccgccagccgttatccgcacaccagggcgcatgaatcgcgatgaccagcataaatcgtggagtaagttcaccggcggcgagatacactgaatctgaagatcttttcactactgtatcatcaggatcttc

SEQ ID NO: 83522 - DNA, 595 bp, Zea Mays
cacatcattgagcgagagccatttaatcaggaggcgagatgtctgacctacaagattagcattgctgctagtccggctcccctttagtttccctcggacagcagactgcctccttcagatgagaatgagtttcatggtgaggaggatggagatgtccggggtctgtccaatccccggatccgacagccacgccctttacagcgtcagtctgtccaccatcgcctcggatcacatcagggagtgggcagagaacggtctgtggctgtgcatggaaatatgatggtggcgtcggtcctagctctggaggatggtgctgctgtctgtgttggtgatgggctgctgacctcacctagaccttcctcgcctcagcacagaagttcggctgagccgctggagaaggctaggttgagctcgccccttcctgccactcaagtgccatgcatgacaaccttgaagaatatcttagctgggccgtctgggtcggctgctgtggggtcgctggattctgtcctccctgtttcgccccagcgacacaggactgttgctgggtcgctggaacaggctggtgcgaattcgccccttcctggtggttcat

SEQ ID NO: 83523 - DNA, 315 bp, Zea Mays
gttcggaattatttcgtcaccctaaataataagtctgaatctcattcgactctatcgtaaaatgaattggaaactcaatctcgtctcgcgacttttgtcccaaatggatttaatagaacccaacgataaaagttgttgatgtaaaaataaacggaaccaaataatttgaacctagtccgaactgatggaagatgatttggtcatgactgttttggaactctgcaaccaaaaatcgaaatataaacctccctctatgaagcacttaaattgttgtaattgtgacgtaagtgttaccagaacaaattatgcgcgagg

SEQ ID NO: 83524 - DNA, 981 bp, Zea Mays
ccgaatccccgtaatccccgctgggattagcactggttggactcgtcttctacgcagtccaaggccacagcaacaacacctccgtgctcgagcggattccacagatggttaagacctcgctcgccgcatccggctagggaataaaagccaagccctcacgcctcccttcgcccacatcgacttgtgacactacggaagtctcagggagcaaaagcttacacagaaggggggaaaagccacgccgccgcgtgggtatggctcaccaccgaccgattcaccatgggtggcatgccctgggttttcactgcctggaacctgccatatgaaacgccctgtgcaaatatttctcgcgcgtgaagttgatggactcaattcgttgctcgccgagggggacttcaccatggagctcgaacgggtggggatcgccgggcggatcggacccctggtcggcggatacctccactagcggggagcaaccattgctccgtctacctcgcgaagggaagatgatggaggatcgttggatgcgccatcaaggattgaggtaagaggattgttatcggccgtggatcagaaatccaaaggctagaatggtttaatgcgggagagagattttggaccgtggatcttggatcctgtggtgcctaccgtgtattgcttcatgatctattctgagcctttggatcgggatcggatggctggcgatcgaagataccccttcgtcgtggcctaattgctaaagagccctctggtttttgaaaaacaaacctgtcgtccaccgcgggttaaagctgtgtctgggaaaatttatatcttagcccctaacctttctggaatttgacgcccggtccagtgaaccaagaaaatagtaaaaataatatagtaaatactttttagtacataaataaacctagaaactcaataaattcatagaaaattcattttaaattctttttggtccattcttgtggcattaatttt

SEQ ID NO: 83525 - DNA, 351 bp, Zea Mays
ttcaaaaggattttctaaaaagacttatctagaaactctcttcccttcttacctaagtattctgaagagtctatcttaaagaccaggtagtaagagtgcaatacatagaaggtgtgaatcaactaaggttgattctgtaattatacatgcatcatgctaagaaccatactaatcaaattttcccccttagaaaatgccgccgcgcacaaggagaacagcgcacaaacatactggaccgattggtgtgccgagtcaccagctggccccaaggcatgataatagtagtagcggaagcaatgatcctataggggatctcgaagctgaagtaagtcggctccaagcggaactccg

SEQ ID NO: 83526 - DNA, 572 bp, Zea Mays
ttcggcattgcagccggctcttcaattttctgcgtgggaggagcaggtcctttcgctgaagaagtttccccactaaactcgggcactatagccggttcaatatagcggggccggtgggtgaggactttcaactttttactcttcggcgcaggctcgcttggagcaaccgaagcgacaacctttccagaggtcgcaccctttctcttctgcccccgtggcgggtagcgatagtcagggtacacaaatccaatagcatcaaaaaccatgtttaatcttttcttctttcggctcccgaaggccgcagatagtgcattatcttcggacttggaatatgcttcaagtaactcatcgctagtactttcaacacacttcagccagtcatcatctggtttgacaaactggtctccaaacctgaaggtgtatttcaatcgaaccaggccgccttcgctagggttagtgatggtttctttcgacatttcccagctgtctatcagtggccatatcctataggctacatgttcctgaactaagtctcttgttccaataaaagagcaaactgtgctgaaggccct

SEQ ID NO: 83527 - DNA, 768 bp, Zea Mays
ggagaatgactttgctatagagatcatgccttggtaccatgaagtattttgagataaatgtgcccaaagttgggatgtcagtctgtctaaaacctgaattatggtatccagtggcataggatgaactttgggggccattttgaagatgatcccgtggatgtttgagcatggttaccacagtcggtttatatctggatcatagggctacaagtttgttacaaacagattagtaagttcttatgcgaaaattcaagattttggcgtcagaaatctgtttgtcaaactgactgaaggagatcgtgatggtacagtaaccaaaaacaatccgcagattcagtgagctagccaccggtgacccttcgccgggattagtgccgatccgtgcgtctgggctgtggattaagttcgccgggaaaagatctcgtcgcggatgggttcaagctactgtggccacgctgtccctcggttccccacgcaggcgacgtggccttacggccatcaccggaatccacgatattcaccgcggttgcgccacgcctccagcctttaaccgcaccgccgtgactcatgttagccatctgatcatcgccggtgagtccgccacggtattctccacgaataaactgcgccagtagccttctccctctctgttgaggggaaacgatggttagggattgaattcggtctctgccaaagtagaacgccagtcctcaagtattctagccggtacaagctcgccggagcttggccctgcgccgttcaccgtcg

SEQ ID NO: 83528 - DNA, 790 bp, Zea Mays
gtgggcatgccattctaagtacaattttgcccctggttacctgcttcagccccggaatattcccctagcgaggttaggtatagtctgattaaatacactataaaccctaccccaggagggggcttacaaatgggcccaaatggccaacggggcgttgcatgggccccgccaatgtacggcgcagtcctgactaggacgcgacacttttcgctttagggcatcgggtcttcgatccttgccaaggctgtgactcggagccgcccacgttggtggtgatgccgagcgaagtcctgatgagtccccgctttaaacagtaggtcccttcgcctccaagcctttgacagttctccgaccaagacctcgacttcggtaagggtcgaagtaccctttgcctcctgtgtacgggatagaacctgttcaatttatgttaaagaaaactgaacgagggggtggatggcattcgctccaacactagcccctcgaggagccggttcaacttggtgagctagtcccgaagtcttttccgggagatggccgaaacactgccctcgtcaagttgaagtggtcccctagggggtttgaaatgtgaccgttgaaaggtgacgttttactgtggaactgttggtttcaaaggcaccctttcgagtctataaaagccgctcgcggccgcagcggaaaaacttttacccactagtttacaaaaaaccatggtttcttcgccttagcacctgctgcgcacttcctgcttttctcgccgctagtgaactggcccatgtgaagcagatcgccc

SEQ ID NO: 83529 - DNA, 489 bp, Zea Mays
atctgatcaaggactacgatttggaggtgcattaccatcctggcaaggccaatgttatggcagatgccttaagcaggaaagcccagtgcaattgtatgagcatggatgcaagagtcaccaccctgtgtaatgagttgtgcaagctaaacctggaagtggtttcttcaggtgatttaaattatatctcggtggagcccacattacaagagcaaatagtcagggcacagattgaagacaagggtgttcaggtaattaaggatatgatcaagcagaaggcagaaaaatacaaatgcttccgtcaggacagcaagggaattctatggtttggagaccgactggttgttcccaagaaccctgagctcagaaagaagatattggatgaggctcacctttcaaaattctccatgcacccgggcaacaataagatgtatcatgatctcagatccttatactggtggaccagaatgaagagagaaattgccaagtatg

SEQ ID NO: 83530 - DNA, 688 bp, Zea Mays
cgacttagggtgggggtcaactttctccagggtattctagaggcattttggcgccactttgtcaattgggtcaaatggttttgaagtttgaatgagggtgaacatgtttgatctttgaccaagggttggttttggacttagaaaaattttgatttttcttttgcgctcaaccctttggtgaaccttttggggtttttctgaaacctttttggggttactttcttactattatttgtagggtattaagtgcactacatcttttataattggcccaagacatgatcaagtggttttcatagctttttgggtcatacttacttatagtactccaattgtccacaggggtgcattagggttttgggcaatttctcccccttctatctgcatggtaagccaaggcatgatctctaagataggttgcacttatttaggatcttgatttccaagtttgaattcctttactctagttaagtcacatgtgatgatgggcttacttgtgtagtcttaagtgaaaaccctaagtaacacctaaggtgttacactgcccccatccaccagagctttcttgacctgactttcttggatcgagggatcgacatgcagagggtacttgccgaggtgatcgaagttaagccattgatcgacttggctgaacgtgatggagtgctccgaccaccaatatggtgtt

SEQ ID NO: 83531 - DNA, 349 bp, Zea Mays
atcagtttgcagttgcgacggtgactcaattcagtctgccatgtctgtgtctgaatgtgttcctagatgttagccatcatgactagtcacttaacttctgcagccctgatcaagactcattgtttgtcttcgctgcttctggcctatcaccacgaacttgtatgccctctttggactccacacctgtgtgtcacatagacgaagacatatgctacacaaatacactcgcactctgtttagcccacacgactcaatccaagacactactattattgacaatcaatcataacccgaaccacaagggcgcatatcaacattacgttcgcaacttcatattatatatataagg

SEQ ID NO: 83532 - DNA, 508 bp, Zea Mays
acgacgtaaaatttgaaattgttgcatgttacccaatttacgacatttcctggcgcattttacaacaatcttatgcggtgagagatgcattcaggccacattcactgttacaaaacaaattgatgatttacgctaaaatgcgtactcatttacgcaattttggttcacgttttaatcttagattcgcccgagctagaacccgtgcaatgtcgtacacgcgtgattttcacgtcgtaattcaggccccattcgtcgttataaaatagatcgacgacttacgctaaaatttgtacccattaacgttgttttggttcacgtttcacgctaaaatctgttcaagacagaacccgtgcgtgattttcatgtcgtaatttttggccccatcattgttacgaaacagaactacgatttacgctaaaattagtactaatctacgttcttttggttcacgttttatgctgaaatctgtctgagccagaacctgcgcgcgtacaggtgtgagactgtg

SEQ ID NO: 83533 - DNA, 856 bp, Zea Mays
gtcggctcactacacactcattggggagacattatacagaaggggtgcatcaggcgtcctcatgaagtgcattctctcatctactgggaagcgacttctggatgaggtccatgccgggcaatgtggaatacacgcagcatccaagacactagtcgggaaggtcttcaggtcaggattctattggccaacaacgaagaatgacgcagccgagttagttcagaggtgcgaagcttgctagtacttgtcgaagcaacaacatctaccggcacaacaactgcagaccataccagtgacttggcccttcgcatgctggggactcgatatgattggacctttcaagaaagctcaaggaggatacactcatgtactggtagcaatcgacaaattcaccaaatggatagagttcaaacccattgcttctttaacctcggctaaggccgtggaattcatacaagacataatattcagattcgggataccaaacagcatcataactgacctaggatccaacttcacaagttcagaattcttcgatttctgcgagcaaaaaagcattcagatcaagtatgcttctgtagcacacccaagagccaacgggcaggttgagcgagccaacgggatgatactagaggcactcaggaaaaaggtcttcgataagaatgagaagttcgcaggaaagtggataagggagttgccctacgtcgtttggagcctaagaacccaacctagccgagctctgcatggaaacacccctttcttcatggtctatgggtcggaggcagtgttacccgccgatctcaagttcggggcgccaaggttgatcttcgaaagcatagcagaagccgaagctactagg

SEQ ID NO: 83534 - DNA, 586 bp, Zea Mays
aagaagagattcgtaaaggacaagagtctgatgagaaaatcaaggaaattaaagttttgattagtttgggtaaagccccagatttcacggaagatgaacaaggcacagtatggtttaagaagagaatctgtgtactagaaatcgagcaattacgccaacttattttgagagaagctcatgattcagcttactctattcaccctggaagtacaaagatgtaccaggatcttaaggaaaagtattggtggtacagattgaaaagagatgttgctactcatgttgcattatatgacgtgtgtcagcgagttaaagccgaacaccaaagaccagcaggattgctacaacctctcaaggtaccggaatggaaatgggaagaaatcagtatggactttatagttggactaccccgtactcgagatggctatgattcaatatgggtcatagtagacaggttaactaaagtggcacattttatacctgtgaagacaacttactcgggagcccagttagcagagttatacatgtcgaggattgtttgtctgcatggagtactgaagaagatcgtatcagatcgaggaacccaatt

SEQ ID NO: 83535 - DNA, 338 bp, Zea Mays
tgtatagaggtggcatgcctattgttgtgccacccatcaggccacctcccaccatatccatcactgtggcttattgacatgtggtccttttgctagataggtcgcctggtcatacgtgcgacgcctcggcactgcggtagtggtcaaaaaatggttttgaccgccacaacagacctaagcaggtacatattgcacttgttccatgtacgaggcggctcagatcccaacatttccacacatgtttctagcattccttttgcatgagcggcggacctagccaccatgtcatagacagggtcaccagggtcctaggtggtcgtcatctaggattttgcgtg

SEQ ID NO: 83536 - DNA, 2251 bp, Zea Mays
gccgcgacattcttgggatcaaccgcaatgccctgctgactaatcacatgccccaggaaagccacttcggacagccaaaaggcgcacttcttcaatttgccataaaattgattcttactaagagcactcagaacgagacgaagatgccgctcatgctcttcctcggtcattgaataaatcagaatatcatccaggaacacgaccacaaagtcgtccaagaactcatgcaacatcctattaattgcttccataaaagcagcaggggcattagttaagccaaaagacatgactatgaactcgtaatgcccatacctggtgcaaaaggtcgtcttctcaatgtcctcctcacgaatcctcaattgatgataaccagagttcaaatcaattttggagaacacctgggcacccctcaactattcaaagagaacctcaatacggggtagcggatatttattcttgattgtcacttgattcaaagcccgataatccacacataacctcttgcttttatccttcttctcaacaaacagtactggggaagcccaaggcgacctgctaggcctaatgaaacccttagccagcagatcatccaattgccgcttcaattccacctgctcctttggagccatccgatatggggccttactaataggctgtgtacccggaatcagtttgatttcgaaagctgcatcgtgatccggtggaaggcctggaagctctgctagaaatacgtcggcaaagtcacacaccaccccgatgtcctgcacccacaaggcaacctcaccctccaccaccatggagaaaaagattcctgacttccttgaccggtgatccggaagcaattgcgccaacaaggataacatgaactttggggaacttcccaagaataccacctccctacccgacggcgcctgcaataacactgtcttccaaaaacaggatataactgtgcgatattgagataatcaatccatacccaagataacattgaatgcccccattgaaatcacaacaagattggctgaaaagacctcaccagcaagaatgacggaacacccctaacaaactgaacagctactaatggagccattagcagaactaaccaaaattgggttacccaatatctgcaccgaaagaccagcccgtgacacaaaatcctccgaaacaaacgaatagctagcgccagagtcaaaaagagcatgggccacaaatgaatcaactgagatcgtacctgtcaccacgtctccttgctccctgtcatccgccgagggtagcacataagctccggaaatacccgcagaagaggaagctcctggagtgaagttaacataagaaccccactgagccgtcgggtgaggaagacgcggagctccaaactgagacgacacaggagtagtcggtgtaggagtaggcacagccagatactgaggaaacccctgcatcgccacgaactgagaagtcccaggcacatagaactgttgcggagggagtggaactgcaaattgctgctcagcgcttgacatcatgttgatagttccctgagaagaggaggaagtcactggctcccatctgagcttcccattaggattcctcctacacaccacatccttgtggtcttgactacagatggagcacctgccactccactgacactcagcacggcgatgcgcatcaccacaacaaaaacacaccagccccagcccgggcttaggaacagcctgatacctctgagtagttcctcccgaactacccgattcagaagatttgccatggtaggggtggtggcgctggtgctgagacttgcccctcttgtgggctggacctctagtgttgccccttctcgcgtcctggccatgaggctgatcaacacccgaagacttctatgactccatggtgtactggtgttgcatctccacacccaatgcgtgctccactgtagtatagaaatccaccaacggaaaggctcccaaggcatgcctgatagaaggttttaggccctgacggaactggcacgccttctccatctcattgtaagccacatgaggaacaaggcggaccatcttgttgaagcccacttcatactctgtgatagacttcttctcttgcttgtaggattgcaaatcaatcttcattttctctaggaaggtgaccgggtagaacctcctctcaaactgcctgatgaaaacatcccaggataggactcctggtgaagaagagtgagctgcctgcacgcccctccactagatttgag

SEQ ID NO: 83537 - DNA, 334 bp, Zea Mays
caaacacggttcaaaacgggtgtgattaggctatccacgtcatgtctttatttatgcaccgtccgatttttcatctacgatccctgtctgcccaaatgctacaagccgtcggagctctggtgccttttcccattccatacggctctagaaacttcatccgtattcattgttttttgcccaccagtccaccgcgctcaacctttgcctggacgacatggacagcaccgcccgctccgccgcctgttcgtcctagcgtcctgtgccgccacgacctacaggtacttctcatccacgctcccttctctgttgtgcactagacatagctgctgatccg

SEQ ID NO: 83538 - DNA, 752 bp, Zea Mays
gcaaagaggaatgatacaagagatagtaatataggggagattttaggtgacgtggcaaggtagtgggatataggggacaaatttagatagtctcagaaccagtgattagaaatacttgcgtctcccagcatcatttaggtcattctcatggaagtttcatactcattaaatattgtgatgcatcatcatacttgataacatggcatcatcatacttgataacatggtagtgcaattaagaggagaatctttcatgaaagatgatagttttataacctaatttaaatttgatattacaacattggaaacagtacattgaaacttaccattaagagcaagtttaataatacagccgacccctagcggtaaagatctttgtagcctaccatttagctcatttgtatagtagttagtttttcattattaatgtagagcctcacttatctctctcacaaagtatcttagttctttaagtctaagctagctttacatggtacttctactctctcctccatcttagcatttagtcaacttataacctcttattatacttgctctaaagctctgtttggtttagtgtgattagtcactaaaattagggtgattaatcactaaaatatcaaacgtatgattaaaagcctactcctaaagttgtcttctagtcatcaagaggaagaaaaataactaaagtgacattttttagtgtatctatgctcacccttctttcatgcgtccaattaaataaaggtaata

SEQ ID NO: 83539 - DNA, 315 bp, Zea Mays
cgaatactcccacgatctgtcatatttatcagatctaccataaaaataggatctgcatgcatgcacctgtgcatgtggtacagtggctggacgatgtttttatgctatctctatgaactatttatgctatttctgttgactatttacgctattaaaaaaacagaacaacaatttaaggcttgcgtcacacgtgggaggttggttgttggaccgcgagtttgattgacgcatgtggtggaggttgacctggtgtatgggcgggggacgcacctaacagcctagcgtggaatgtaggtggccgcgctgttgcggtcc

SEQ ID NO: 83540 - DNA, 1095 bp, Zea Mays
cagttaaaggatgatgtattatagattggaaccttgttttgaaatcctcttcctcaaatctagcgtacaactcgtttaaatacggcatatacctgttctgaacatgccacaaacacaaacgatggattgtgtttggaaatactctgcctagtgcaactggcattgctggatcttgatctgaaatcataaattttcacaacattatgcaacacattaccaactataattgcattcaatacaatcatagtagaacgtaataattgataagcttattaatcatacctgtaagcattactcgtggtccttcagctcccatgcacgttttgaatgcattgaaaacccactcgaatgtgtctacagtttcgtctcccaacaatgtgaaaccaaatacggtgcactgcagatggtggttacaaccaacaaacattcccaagggtttgtcatatagatttgtcttatgagttgtatcaaaggtaactgcatctccaaagtcaatgcaatctgcttgctggctagcatgggaccaaaaatgctcaaaatctttccttcttggtccagttggaagtcagagaaaaactgtgggttatcttttttacacaatgcaaaaaaagataggagcttatacacatcattggcatttctttctctttgtcactctttcttcctgtgaacattaaacaatatgccatacgtcaatacgtacacaacgtcattatgtcattatatcagtgtaaataacaatatgacttacaggttaatcatgtcttgtgtagttaacggtacattctctggtccaccatgcatttctaaaacaaaatctataatacaatgttgcggaatcctgctttcttgcatcacactaaggaactccatgtattctggatcatgtgtcttgttgcactgtaactgattcttttctgtatcctttctgaagaactcatgattatgttccaaatgaataagatcaatccgcactaaaattatattctctttggcatcgtcatagatttttttaagtttcattccagctttgcgttgtgttcacttggaaattgtatttcgcacttttggattaccatatcctcttttggcacg

SEQ ID NO: 83541 - DNA, 282 bp, Zea Mays
cttgcagacgtgtcaaggccatacacatgaaaactgctggtccattacagtcattaccaataccgacatggaaatgggaagacatcagtatggactttattgtgggattgcccaggaccgcaaaaggatatgactctatttgggtgattgttgatcgacttacaaagattgctcactttctaccggtcaagacatattatctggtacttacctatgcggagttgtacattgcccgtattctcagtttgcatggtgtcccaaagactatagtgtcggatcgtg

SEQ ID NO: 83542 - DNA, 412 bp, Zea Mays
ggcttatggggtgcccttcatgacaacagaagatgaagaagaagaagaggaagaattttttgatgatcgtgagcagtatgtcccgcctccccaccaaggggatccaggtcaatcttcttcatatcctcctccccaggatccatcgggtagctatccccccagctcagcccggggaagaaaactttgtagctaatttggcatctcagttctttgatccatctcctccgtggtaatttgtggttgatgtttctctccatttttggtgctagttgccaaaaaaggggagaaggattgacagcttggcttggtagccctcaggggcttttatttttgtaatgaacactgggtctgtaataactttattcgcctatgcttgttgtgatgcatgtgatgatggcctagagccataaac

SEQ ID NO: 83543 - DNA, 368 bp, Zea Mays
gtgggaatcaagatgccgaagatcggccctagagaccaagccatgttgtcttcgggaaatcaactattaagcaagggcagattgatgcaatgagggggaggtactttcgtgatatctcaattgtgagggctagaggggaaaataatgtccctctgcccgaagctgacgaagtggtagtttacagaagcttcatgaaggcagggctttggttccctctggataaattgctggtcgaagtcctgaaaaccttcgaaatttaccttcatcaacttactcccgaagctgtcatcaaggtggggatctttatatgggccatgaggagccagggactggaaccaaatgcaaaatgtttctgcaacatccatgag

SEQ ID NO: 83544 - DNA, 488 bp, Zea Mays
cagggctgctgctgcttcgtccgccgctcaggctggagggagtagcgctgcaccgagcaccacttgagatcgagtacagtagacctgcagatcttgtttaattatcgtctccgcatcgcaagatttgagctttcattctacttttgctccacatatgctgcttgcttctttctttctctcggcagtttcatcctttttttgtaacgtgtttctgaatcttttttcctttccgatttattagctaggtcagtatatgactagctagagagttcgtagtagcagccgaaggggggtgaatgggctgattaatcagtgtgactatgtgttcatgatctgatacgcatatgtgtatatatatatccttggtaaagcaagctaggacgatttgaggcatggtaatggcttcctaacttgctaataataacatctcagctcaaaatctcccaagcatatatatggttgcctcgcatggcatgtatatatacttg

SEQ ID NO: 83545 - DNA, 311 bp, Zea Mays
gttcgatgaacaccgtcgtccgccccgcgtcgtggacaacgatcacgacatcacaattcccggtaagaaccactctcacccattcactttcatccccacgttgtgtaactcggttaggattggtaaatcgtgcgccagattgatggattgtgtggctccgatgagcatctccgcgtgggcaccaaagtgtcaccgtgccccgatgtcataaagggaagtggcgcaccagtcgtggatcgtagatggatggctgcacttagatgtagcgtgctggttcggtcagattgattcagaccgaagatctaaaatgg

SEQ ID NO: 83546 - DNA, 613 bp, Zea Mays
atggaattgagccgatacttcacgaataggtttatgtaggtgaatatgagtgaagtgtgtgcttggtttgaatttaggcgaagaaaagaagatttgggcactcagctcggaaacgatcgctcgaaacggggaatttggtgaattttaagcctgggatctcggattggcgtgaaatttggcaagtatgttactgggagtgttgtgaaggtgcctgaaaaatttgggttcaattggagcaattttggctggtttgggcatttcaccgaacacttggcatgcggtgaattaggttttgggagattgaggcaaattaggttgtgaaaccctcccaaagggagctagaaacctgcaggaatacacagtggggacaattgaacacattccacctttgagattcattggatttgacaggaatttgaaaaatggacaaagggtggagaaggagtgcctcactgcctcactgaccgatagaaatagagggaaggagaggggggaagtgctgctcaccggagagggaaggagaggggcacgaggtcgccggagagtcgccggtgggggggaggtcgccggcggaggagagacgctagagagacagagagaagcactagcgggg

SEQ ID NO: 83547 - DNA, 523 bp, Zea Mays
ccatgcgctcggattcgtgcccaccatggtgattcgtgcccagcgcaaatggataacgaagaagggtaaaaatcttggcgctcagattagctcggacttgctgaccgtcgtgccgccgtacccacttggaccgcgactggtcggaatcatcattgccggcgttagccactcaacggtcgtgcgccacatgccttggtgtcttaccacgtcgtagtatctcgtgttatgcatatccggtgatcgtcggtgagctcgccacggtgaaagcctccaattgcttgcgccagtgcacccccttctctccggctgccgctcgtctttccccaaattagccgccaccgctcatgaatcctataaattgagcgtaccctcagctccgcaaggtattcaagcactcagcacacccactcgtgtcccaaatcgttcaccagagaaccccaatttgggattttccccaaatcggtccaaaacaccgcgagaagtgatctcgccgtggccagcgtgctataggtctgttcatgct

SEQ ID NO: 83548 - DNA, 664 bp, Zea Mays
ttttcattagttttccaaaaagtctaagatcatcaaaattgaagttcgaagctaaaaactatacacaaaatacaaaagtgcgtccgccaaaaaaatagcgcaagacatatctgatgttcatatctggtatgcatatatagtgcatacacaacattgtagtaactttgattcaaccgttggacatgtctagtactcctatctagtgctagtgtctggtgctaatagaaaaacatcgcaacggtcaaatttcgatggtcgaattgtcacaggtctgatatgatgtccaacgctagctatcaccaaacatgtccaatgcatatgtgcattactgccacttttggcattgattagttttggaattggggtctataaacaccaccccaattggtcatttgaagtgtattagagcataaacacaccaaaggatttgatgctcaattctagtgatgtccactctcatagttcttagtgatgatacacatggtgattaatgtaggtgctttgtgaaattcttaggtagtaagatcacttatatgtttgatctaagtttaggtctaatgttaagcgagctttccatacctattaccattcggtgcttgcgcgcaccattattgtactcaaaggagattgtagtcttaggagaccacaccaaccatgttgaaag

SEQ ID NO: 83549 - DNA, 638 bp, Zea Mays
catgaaggagtctatgatggatgggaagattcatattccacctgataccaaggatcctctagcatctagcagcaaatttgcaagagaaaaaagatgaccaatgtcatcaactcttgcatcctggcatagaggacataagctagaatggccttgcacgaggtttttctatggagaatatccctggtattaagcctattcacaagcatgagccagccaaaaaaatttgatcctcatagtgcatatacatttctagagcttaaggaatgattttggaacttggatacccttgaatttgcccttgtagtaatgtttaactaagaaaatgatacacctattgagaagaatccaactatccttttggtgattatatagaccatttgtttcaatcttttctctaagcctgttatctcattgtgagcttgaatggacatggggaggtgaaaatagagcatagatccggcacccccaacacacccaacacagaaatgtgggcgaaagggtaaaagaagcaaatttggaaagtgggttttcttagatattgccagactagttatcctcccaaaaggaaatggatgcaccattgtcaaggatacatttcgccatcatcctaaagtgattatttaatctaaagacgcctt

SEQ ID NO: 83550 - DNA, 1482 bp, Zea Mays
tgttcatgagtgagttttattaagaaactttggcctggtgttatgaagatttaggagatcagggcgcctaaattacccctgtcagaaagaaggcaatggggtgaataactgaaaattggttcaggcaaacagaaatggtaacaagattttatagtcaacttttggatgccataacttctaatctaagaggtttgggtctatgaaatctgtagaaaattggtaggccttggattactaaacaagttttattaacaatgattaatctgtcttactcagaaaatgagagaaatagctagctgaagatggggggatcagttatctgttgaagattcagaagcactgaaatatctacccttgatatttaccctccttgccgtgaccaactttggaataggatgaagattgggatggtgtgctggcaggggtattcagatttgctcatcactgaaatatcacctgtgcaaatatccagaacagtgccatcctatcttcaccgccctctcttttggccatggataaacttcatcctgcatgaccatactctgtgaacctgcgtggatctgtttgggggagccacgactgcatctagagttcaaagctgtccttgctgcaagttcaagcatccaacccctttgatcttttctctgcctatataaagagcaaccggggagggaaaggcaggaacccacccagtgatccttagttcaccatcaaccatattgagcagccgcgattagtagtactaaacccccaaatcatatcctagacacgcccaagttccatcgatcaaggcactgaacttatttgatgaccacccaggcaacacctcggcttcatgtggccaggcgactgtggtatgtcttaacccccacaagttgatattttagcatccccgtaccttggtgaagctcaccgagaagtccgtttggtccttacggtcttagtttggtcggaacacgggcttgacaccgcgtaaactgccctggtgatgacccactcaagattcagatggtccgagggcaattcttgtgagcatcgtactgcccatgtctagctcgtgccccctgtgcctttaatttgtcgggtccggtgctcaaatcggtcgagcttggaccgcggtgctggagctccgccgtgggtgcggtccggccgctctgtgagttcacaagtcaaatccatggccgaaattgctcggggtaggttagggtttgctctagtcactatcccatgactgctcgggctcccctccgatcgtcgggtcacggggaggatgcgttcgcgccgccgacgatgtcagggactcaatttgtgaagaccagaaagatagaaggggcccgaagtaaagtgtcagtggctggtataatctgattgagggcttttgttccaaattgttactttggcgagggctttgtgcaaaaccggcagcgctgctgtgggcgtgccccgttttccgttaaagctgggccggttgggctagtttgg

SEQ ID NO: 83551 - DNA, 293 bp, Zea Mays
ttcatttcttacaagtctagggtctctttaggaaaatgccacggccgaagaggtattctccatctagggcagcccgatacggaatggtcgactcagattagatccgagccacaacgaaccggtatgttctgtccaccgtaggatccgtgatccacgaacgacaacatcccacgcccaggaatccatctcagccgcccgatctagttttaatggccaagatcaaaagactgaaatgatgattgagatctaatgccaaccgtttatcctatgatcaacggctagcactattcttc

SEQ ID NO: 83552 - DNA, 364 bp, Zea Mays
gttgagtgcagtatggattgtggacatcacaagtgaagttgaaggatgatcactgactatatggaacttggtgtgtataacttggagacaactgattgaattgaggatgaaggcaagaagaacttcgaggaatcgagtgcacaagagaatgtcaagaagaccgaggtacctaaagcccggggtgaagaaaatggcttgcaagaagtcaaggttagtcaagttgagaagagttggtgcatcgaaggtcacaacataaggacatgagttggaaccattgaagtaattcttaggaattatggttcaagtcataaggatcaagatcctagctcaaactgtttgacatggtcacaagaaagtggaaaag

SEQ ID NO: 83553 - DNA, 562 bp, Zea Mays
cgctgactttgtcgtcggtgatttgttccaccgtgcggtggcagggcgccaccgtgttgacaaccaggggaggaagaagatggccttctggcccttcaatctgagatggacggtcacgattaaatctaaaggataccggttcggatgtggggtgcacaccattgatctagcatcggatggatctggattaatttcaatactttaaaatccggaccgctcgccattgatccgacgaccgggaacgcataccgcttcgcggtgggctcagtctaatctgatccgtttggatcggatcggacggctgatcgcggccgataccccttcaaccagcgcatcttgcataagagccctcggggttcttcataatcaacccgccgtctagtatacatgagcctaagtcttgggaatccttgcgagttagcccctatgtttctggttatttagcgcgcagtccagacacctattaaaatcaggaaattcatttagaaaatgtttttcagtataaattaattgcagaaacatgttaaattcctagaaaattcatacgaagtccaaattaatc

SEQ ID NO: 83554 - DNA, 388 bp, Zea Mays
gtcgcacaagttcattcttttcctttgtcccctttagcttcgacatattcctttcactcattgtcgggaacaccttataggccagatattcttggactagatctctggtgctgatctgctcagctaccaccctggattctgccacaccttgttggcacggtgaccccgacaacatatggcacaggggcctagtcaacccgaagcttaagcttagtgggctcagtactagcgtctttagcttctccctcttcttttcatcggccttaacatagaaccactcatttttccaaccggttggccacttggtgtgatagctaaccaccagagtcttcatatctttgcggtaagcgaagttgtaacaaccaaaattctcatgaaggccatcttc

SEQ ID NO: 83555 - DNA, 454 bp, Zea Mays
tgagattctttttcattcttttaatggcttcatcagccatctcacgaccgcccttcatccaaacatcataagagaatctcccgcctagcaaaaaagcttcgtccgaggggtgcttcatgtcatgagctgagaaagtatattctggctgggctacggccttaatatgttcgcaatcggccttttccaaaattgttgcaacccctcgtgcacctgcgaatgcacagaaatccccgcgatcatcgagtatttcatcgaaagcttcgacttcttcaccaatccactggataactccttcgagatccccacagataaatctttgttccaaagagtacgttcccacctttgcaaagctatctttcagtttcttcgcgcattctatggatgtttcctagcatttctccttcgaatcctggagctcttcaacattcttttgcaccctggatctatccatttc

SEQ ID NO: 83556 - DNA, 550 bp, Zea Mays
atgatatgatacatcatcatcaccatcattggagctacttgataactcacttatgatgcatcatactccttgcttttattcttctctctcactgctcttctcttggctctctcttcttttttgattcttctttcttctttgagataaagcttctcttcaagcttcttcttcttttctcgttcttctcttcttgcaatttttcttctctacttactttccttttctttcttctcccttcattggtggacttgggattttttatggaagcctcacttgctgttgaaagtgagagctcgctgctacttccaatatcctcaaccaacaaactgttggcttgtgagcctccacccacttccatacttcatgcgaagaagaaaataaaaagcaactagctccgataccacttgtaggatcttttggaatgcgatggaggcctcgagggggtgaatatgcatgtaaatattcagcttgaaattctatcaaagtagagggaggcactataaaccttatagggcagcactaccgacctgcaaaacttagatcagataag

SEQ ID NO: 83557 - DNA, 735 bp, Zea Mays
ctgggcgcgcgtggatatgccactttgctgacctgtttggtggttcaccggataggcactgtacagtgttcggtgtgcccatgaagcgtttttaaaaagatttcctcacccgcgcccgaggcctgcctcagtttatcactagcgccagctctctgctctctgtctttctccttcgtcgctgcctaggctcatcgccggcgagctccagctgtcgtgctccggtgtgctgctccagctggtgttgtctccttcccagtctcatttttctctgtagtgaaggcgagtctcccacctcttgattcattctctctaatcctgtgaaatcgtgtgcaattactttgtgccattgtatccactatccttcagtgaggttctctgcaggttcccctctccttttcggagattttccattcacaaatagttgtttcgcggtcgtttaatgaacctgtgcaccaagtgcttggtgaaatgcccaaaccagtcaaaatagctcaaatcgacctcaactttttccagcacactccagcaactaccactacctctcacgccaaatttcacgcctatccgatatttctgacacatgtttcacaacctatttatctttatggtgatccattttgagccgagtgccaaaaatgttttccgtctgccaaacttcaaaccaagcactcgcttcactcattttcatacatatatacctatccgtgaagtatcggctcaattcccagtcatttc

SEQ ID NO: 83558 - DNA, 419 bp, Zea Mays
gtgcttttctatcctttctcattatatattttttcaactatgtagcactaaagaatccaccctctacgccacgtagcatatgaaaaggccatcaccagccacgataacgatagcaagtatatttctaaatgcatcatcattagtaggcaccagttgtgtgtagacacccatttcgttattagtaacgatctctttcctgattagacaagtttccttgggagggggagggtatgttagatatgattacatcagcaaaggttctcttacagaacattgtcaccattaccccatgtttattactctatattatctagtctttcacgacccctctggtaatcaagtgatacagtatgtgttccatattaataaatcaccttaattagattttgtaatctctgcattggcagtacatgtagcat

SEQ ID NO: 83559 - DNA, 698 bp, Zea Mays
gacgttctcagtgcgaaagttttcctcggtcccgaatgtaacctggagtgcgatgctcccaaggggatacaccggctgagggcctactctggagaatgggtgtgagggccctagtcgggaccctgggatctggagctgcttgaacgcagcgtggctaatgacattgagcccagcctcaccatctatcagcacatgatgcagcttcatgttggcgatgacaggggcggtgatgagtggtagtataccagcccctgccatgttttcggggcagtcggatgccccgaaggagatagtggtgttccgccaccgctgatggggggctgccttcgggacccctagggtcgccgaaaggacatcgcggcgtagggacttcacgttcctatgggaggtgagctcccagcttccgccatacataacgtatagcttcttgcggcggtcgtcgtcatcactggagtcggagtgtccagtgagaatttccttgagaacttgctcgggggcctgatacccgaggtcctgttctcccgcggccaggtcgcgttcgtcgaccttctccttgctaggccgacgacgaggcgacaagccatccctggaggcctgctcgcgccgctcgctgatgcgcttcatgagcttctagatctcccggcattccgaggcactgtggtgactattggggtggacagggcacgacccactgtcac

SEQ ID NO: 83560 - DNA, 405 bp, Zea Mays
tctgttattagttgttcttggggagacatctatctgtttatgccagaaaataaaatctggttcttctgttttgtagtttcactttcgtttgtattgatctggcgacaaggaattccatagtactcacaacaacaacacgttccaagttcacttgtctgttggtttggttgttcatccttttgtgtcttgaaggtctgttcatcagttgtttcatttatagtgttgttttgacttgtcaacacaccgcattctttgcatttagtgacatcacttgtagttgacattccaaggtctgacatctgtatgggtatggaagagtgggagggacgaaagggttgagcaaagatagattatagagagcagagaaaacccatctatctaaggttttacctagctaactgatgt

SEQ ID NO: 83561 - DNA, 381 bp, Zea Mays
gagagctggcacatgctctccgcttcgaatcatctgcactgcacgcacccatgattctgatggtcctctgtcaatcacatgcccccgaccgacaacaggtcaacagcacacaggcctcgaccgacgacagggccctgcttgcttccttctccatccgtgccggctccacgtcagattctcaccaccaccaccagcagcagctttcattccatccctgctcctatagctatagctcctcagattctctcaacgtccgcgccatcgtcacactgcatgcacaggcggcagtcaggcaggccagggcaagcgtacgtgtcgacgagccagtatttctcgcgagaatccacacgtacgcattgcgtgtccatcgtactctaaaac

SEQ ID NO: 83562 - DNA, 666 bp, Zea Mays
gtgatgcctttttaaacagcagaaatttaaatgcataactatggtaggtctttgttggtagaaatttaaatgcataactatggtaggtccctccatacttgcccccttgggatggtgggaggggtctaactagatctattccacatctttgtagaggctatgttggagctattagttgtgtggccctgaatggttggattgatgtggggatgtattttagcaagcttaacatgtttttactatgtgatctacatctttgatgtgggtgggctagtggaattcttctcttattgccttcactaacaatgaccttgctgctatgtgtgtgcagtacaagctaacatatatttcatgtaaggacacaaggcctttagctttgggaatggatttgagcaatgcaacacccctttcttgtacatgttttttgttgattagggtgtagtttttggctcttatcgccattctactggcagaaccttcatcctttgtctaataagtcatattaagttgttccattattccgtgcctctaaaattttgattttgtgaggtggacagtcctgaaggtcgtaagatgattgccttttgctagtgacaccaattcctagtaaaaggtgcctttggggattcataggttatttgttgttgtcttcaccatgtcatctgc

SEQ ID NO: 83563 - DNA, 315 bp, Zea Mays
agacttgcctcttgtttagaccatctatcctaccctgccgtccagttgagtttcctgtcaattatttggatctgcccaagaagctcacgaaggaccaactacttcccctaattaaccggttggcagacctccttcctggctggaaggttgatcttaccactagggttggtcaggttgtttaggttcagttcgtgctcacggcgacaattatctatcacgtcatggctttggacctcccatgctaagctataaagggaagaaaggaagctaatggaggctatttcttggtggcttgaatcttgatcgagagtcact

SEQ ID NO: 83564 - DNA, 423 bp, Zea Mays
cagtctgagtccaccccttattcttcttgcagaacttcttcttctcattcccctcggtgttctttttttgttcctggtcatcattatcagaataatttgctatgaaatgaccaaacttaccgcacttgaagcagatgcgcttcccccttgaatttcccttgttggagaagtccttgtgcccccttgagttcattcttgatgcgcttgatcacaagcgacattttcttgtcatttagaccgaccgcctcaacttgttccaccttgcttgggagcgcctccttctcattcaatgttatgagagtgatgggtttcggttcattgtagtggaggctcccattggtgatgttgtttatgtactttgcattcttgaacatcatttggtggctaacaaacttcccaacacctactcaggactcatttttg

SEQ ID NO: 83565 - DNA, 539 bp, Zea Mays
cgccgatgccatgcccaggattcctggcctcatgtatgtgcccctagagctttggttgctgctagagctagccctatggcgccgccatgcccaggattcctagcctcatgtatgtgcccctagggctttggttactgctggagccagccctatggcgccgccatctttggtgggtcagctgcaatctaaatcatgcctggtgtgactatctttcgcttctttgtcttcatatatttgcaagtgtcgtgcacacgaacctaatactagagtcatcttggagatgattcatggaatcatttgcttatgggacacattttatttttagatgcaacctgtggactttgttcgtgagcctatgggctagttcacgactctgtcttcatagaacagtttgcctaaaaattggatgttgtcacggatctcatggccgtttgatattatcaagagttggtagtatgccagcatgagcatggaaagaaggtggaggcaaggccagtgatctttgattttggtgggccttttaggtaccggactcgtcg

SEQ ID NO: 83566 - DNA, 517 bp, Zea Mays
aggagtgccatgattaggtcagtggttaccctggagcatgcttcaagggctacagatcaagggatgaagctgaggaggccttccagcatgtgcacaacaagtcagatttcaaaattcgagaagagcctatcaagaggataaaaatatttaccttctcaatcaaagatgtaataatattagtccagtcactaatcattcttttactactttggcaattgatgtaaaatgagtgtagtaatctgttttttaatcatgcctctcggaggtgtatgttcaagctgccggtggtaacctcaccaacctatatgcatggtgattgaaccacatgtacaattgaactaccaaacaccttctttgttgtccaggtgtactacatctttaaaccaaacaacatctcctgcaaccaggccggtgacagccagtcatccaaacataccccttttgcatgcacagagcatggcctgctgggtcctggttcctagatacgggacaggctactctgggaagacaaccaatc

SEQ ID NO: 83567 - DNA, 711 bp, Zea Mays
ctcctctctctccctcctcccctctatctctctctccctctccctccccgtcttctctctcttcctcatctccctcatctctatctccgtcctctcctatctctctccctctacctatctctatccctctttatgcgatctgtaggtagcggcgcgcacgattgaaagtggtagaggggggaagggagggagagagagagggagggaaaggggagcgtaactatggcggtggcatggaggatgaaatggtaagctagaggaatttcggcagcttgacgacatggaagtgaaacagtcttggcgccaaggacttaggaaattttatggcccctgcccacaacccttatataggaaacattggttctcaacgaccaccgtcggtagaaatgatttctactagaagtggtcatggataactgcaagtagaaatggcttacttctaaccgtaaccctagtccaaaccctaaacgtaaccctaactcctaaccttatacgctaaacataaaccctaaacactaacccttaatcataacccttaacactaaccctaaccgttaacccttaaccccaacccataaccctaacccaaacccttaaccctaaccataacccctaaccctaacccttaactcttaacccaaacccataactcttaatgctaaccctaatcagaatcataaaacttcatcctaaccctatatacaaagtctc

SEQ ID NO: 83568 - DNA, 648 bp, Zea Mays
ggaagttgttccttgctagccttttctgcaagtcttgccatctcggtgtccaaacgctgagctttgcgtatgagatcttccagcatcggtttaacttctatgctgctattttctcccaaacaagcatttagctgagctgattctctcttccagtcttccaagaagttggttgctttctccccgaaaggtttctggctgagggcgtctgctactacattggcctttccggggtggtagtggatctcgatgtcataatccttaatcagctctagccatcttcgctgacagaaattgagatctggttgggtgaaaatgtacttcaggctcttgtgatatgtgaatatatgacatttgtttccaaacaggtaatgtctccatatcttcagagcatgcactatggctgctacttccaaatcatgggttggataattctgctcatgaggcttgagtaggcgagatgcataggtgatgactttctcattctgcataagtacacatcccaaaccttgtcttgaagcatcatagaagatgacaaaactttggtggatgtctggcagtgtcaaaactggcgcggttgaaagtttcttcttgatgacttggaaactttcttcacactttggggtccacacaaatttgttgtcttcttga

SEQ ID NO: 83569 - DNA, 1036 bp, Zea Mays
tgcctctagatagcttctagcccctcaatctccgaattgacaccatcctattcaacaaatagctttacaacttttctcttctcctgccttcagttgttagattcgatatgcttctcttcactatagccttgttattcgacattgttatgacattctgttatgctaacaatccttacacttctaggagtcatggctatggtcgttgtgacttcatcgtagatgaatgccaaatgttggatacctatcaaatttttgaaaagaacaactttaggacaacaccattaatttaaaaatccttctttcttacaaacgttttcaaaggagaaggtatcaaatagagttgcgactattttaacaagtgtgtaaaataagaacaacaataagagttcgacaccatttgattgatcattactccaatggttatagtttccactcatatatatgtgagcatgttatatacagatactaatggaggagctttagtacattagtaccatggaaggctcttcacacacaagaatgccaccagcgatatttataaatggtcgatgcctttagctgtgacattgtttatttatttatatggatgtgtccgtatacacctttgtatgaaattacaattttaccctagttactacatggtaattcttcataaatgagggggtatatttttggcattttacaaccctgacatgtcatgtacacattttcttcaccttggagacctttgttttctttatccgaagccttttttggccatgttaagttgcactttcttcttctccggcttcatgcatgcttcaacttatctgacgtccgaagctcccctaagcatgatggcctttggctttgattaagaaaatgtctagaccttgattttgtcgagatggaccttcgtccagaggcattttccccaataggtgactaccccaaccatgagtcttgtagctattgctagtagtgttggagtgatggcagggtccccctaacttgtggacctacatgtgaggagatgccatagaagtggctagttaaa

SEQ ID NO: 83570 - DNA, 872 bp, Zea Mays
tactagtttaggcttacgccctagtccaatgcagtgctaatcgtagtattgctcagagtgtgtgttacaataggtgtgcttgtgtgtgagaggaggagggccctcccttttatatttcaagggaggaaccttacagggggtcttgcttttgatgagagagagagagagatcatccgccataggctaatgtggcaggtcttccgtagggtcgtgcgtggtcatgcctctggtatggcaccatctatcgtgttggttcctataacgagtcagttgctgacatcctaacggtagtgcatggcgggtcctgcgagtcagtctcatggcacagtcgtacgtggtgcggcttctcctgtcgttgtgtgccctgtgtcacccgtatcatgtgcggtcacacatacgttcggtatggcgtgctgccatgtcctttctgacatcctagtcactgttgagattctggtgctaatggctctctagtgccgatctgataagttgcgcgcacgttgaggcatggttcggtgatgatacatcttgtcgtgactgacgtgggctcgtagcactggatctgggtctccgcctcgcaggcttgcttggtgaggacttggtcggtcgctcctcgtcgcaggttcgcttggcggggacttggtcggccaccctgccttgtaggcttgcttagtggggacttagtcgaccgctctgcctcacaagcttgcttggcgaggacttggtcggccaccctgcctcgcaggcttgctcaatggggacttagtcgaccgctctgcctcgtaggcttgcttggcggggacttggtcagttgctccgtcttgcaggcttatcatggctgggtgtggtgtcaacgcatcttggcagcagga

SEQ ID NO: 83571 - DNA, 404 bp, Zea Mays
gttatgatatatctagtttatgagcatcatcgatccgatgttctacaataaaatctgctacaacctggcctttcatagatttcaatggttcaggccaagtcatattctataaatgcataagcccatttaccaattctaccactcataatcgggttttgcaacatgtatttgatcacatcggtttgaccgacaacggtgcaatcactagacagtaaataacatctacacttggtgcatgcataaaacaggcataagcataacttctcgataaaagtgtacctcatttcagcattcactagcctccgacttaggtaggttaccacatgctcctttccttcggtctcttgcatcagaatagctccaataaccttatatttagctgcaatgtacaatctgaacggtac

SEQ ID NO: 83572 - DNA, 1016 bp, Zea Mays
aggaagcctggagccaaaatgtatcgtccgcccatcggcgcactaagggtccaagggtatctcctttacatcgttcactactttgaaggtcacacccatccgtttttcatggggcgttattcgtctgtggcctacaatatccccgagagctcttgcttggcggcagttccctcagctaggtcgtagcacttgacctcgcattcgtacgcgtggcgtactgtggtgcccacggtgatggtgcctacggggcccgacattttaagctttaggtaagtgtagttagggatacccatgaactttgcgtaacatggtcacccaagaatggtgtgatatgtcccatgaaattcgaccacttcaaagttgagggtctcagtcctaaagttggccggtgtcccaaaggtaattgggaggtcgatttgcccgagtgaggtcacccgctttcctaggacaaccccatgaaagggtcctcctgtctgtcaaaggtggccctggtctaatcccatggcgtctagcgtagcagagtaaaggatgttgagcccgcttcctctgtccatcaacaccttcgtaagtcataccaaccccatgatgggactaacaatgagcgggtatcgtctgggccgggggatatgtttcgggtggtaagtgcgatcataggtgatggtttgatcggaccagtcgaggaaaactagagacgcttgtcgagcctagagcatttcacgtcgttccgacttccgatgtcttcttggcgtgtagtaatctaacccccctaaaaatcatctggcatccggtctcatctcggaacgcaactcctgccttctttcgctcatcgccatgcctaggctccaccccaatctcaggcggtgtttctccaccaaggaacctttttagtagcttgtagtccttgtacgcgtgtcggaccgggtagcaatggttcggacatggggctttgagcagtttctcgaaatggtcggtagcttcctcggtcggtggtctctttcccttctgacctatcgccg

SEQ ID NO: 83573 - DNA, 499 bp, Zea Mays
ctgttttataagaaaccagggtccaactataattactttatactaggataggacgtggggttgattcgttagaattttgagggtgtattcgcaaaaagggatcagtgaaggggtacgtgctgatctgtgtcgtctgatgaagatccgggggcctagatttacccagctgaatcggtattgaccagatatgatcctagctatccaaccccgatgggacggtcacaaagcattgcgacgaagggatatggccgtgtctaatccggactgcccatttaaatccaacggcccgaggccatcttcaacctcccgtcgtatgggcacggcgacgcgaccaagttttgccacggagttcaccggggcgacaccgcccgtcgcactgatgcccaaaactcaacgatgactggttcaaaacgttgtggggaggacgattccgagcatcgggatccacgcaccagaggcagcggacgacagcacatatgctggagttagcttacatgcg

SEQ ID NO: 83574 - DNA, 556 bp, Zea Mays
gtccgaggttagtatcgcaaaagtccatcagactcaggttactgctactgtggacggcgagttgatatatccaaatcctagggtctctatcgcaaaataagcggtcaaaggggtatcaagcgaccacagctgttggatctgattctacgcctaggattagatctaaaccttaatgaaacggtgagcatccctagccgcaaaaatatagatcgacggtccagatgacattgctacgtgcttggatcccatccgtccgcgacggattaaacgttcaggatttaaaacgccgaagcgttaccttcctatctaatctgggtcatcaatcacaagatcagcggaccatgtttcccatcgacttagcactagatcaccaccgcccatacccagatctacggccatgaccctgtcatctaatcttatctgttggatacgaatccaacgacatagacatcatctccttccctggactacccatctgccgggcacgcgcggaccgcagtggcgcagcaccgacgaccgtccatcctagcgcccggtgaaccattccttatgcccc

SEQ ID NO: 83575 - DNA, 428 bp, Zea Mays
gcaacaatcgcccctgtttctcaggtaatccacctcagtagttcaagcagagtcaccctcagcagcagaaccagcgttcacatcagcagcagttccagaggtagtaccctcagcattagcagccgtatcgtcagaacagtcaatcaggaaggagttagttccagagacaggataatcaggcacactgtcttcctgtcccagccaccaatcagagcaatcaggcagtctcagtgcaaggaggtggcagaggatgcttccactgtggcgagtagggccactggacaatgcattgtctgaagaagatggctcaacagcagtcaacccccaatgccctagaaagacagaatgtacctcagcagggagcagataatcacggtcagacacgctacaaccatgggaggctaaaccatcgggaggctgaagcagtc

SEQ ID NO: 83576 - DNA, 515 bp, Zea Mays
ctcgtggtgcttttgggtaggacggcgtcgcaaattgtgactcgatggtttgtgttgtagaacgaggaggggaacacacgagcttgagcaggttcgggctacttggagaggcataatactctacttcctgtgatggttttcggtttgagggtgagtttacaagctgtgactactaagctggtgggctgatgatgagattaaattggtaggggtgcctctatagacaactagagagagctcccccgcataagtgttgattaaatcttcctgcttatcccctaattagtagcaaacaatcttccattatcctagggaaatctagtgctcccgcgcccaagctatcgcaggtggttcaggatgtcgagcacgcggaacaaacccggcccgacatattcgcacttatgccgcggctaactcgatcgtgggcctctttcgcatctagaccggctcgcttctgttgattccttttatccggcccatagcgggacacctccagagggcggctgctatgtggc

SEQ ID NO: 83577 - DNA, 814 bp, Zea Mays
ttagaattattaggattcttattgggtatattcagaaagccaatgttcaaaccggatttaaatttgaattgaagttttaaatttggaaaagaatggataaaaggaaaaaaagataagaaactgagctatgggccttattttcctgcttggcccatgactgaatcgcaccccactggcccatcagcgcccttatctttttctctgagtcacttacgcatggggccatcttgccattctccctcctcatcccttacgcgtgggccactccttcaggtcggtcttcaacctcacagactctgccccaaatctcaacttgatgccgaccttccgcccgtggatctcgcttctcgtgcccatgctcggacttcgctgccggggtataaatcgggcgtcgcggtatcctcgttctccccaacccgatgtgtcgagcccttctcctagaacctaagcttgtctgtcgcccgcacgagcttacaccatgaattctcatcaccgccgccagccgaaccaagcttgaccgcagcctgtgcctcgctctggaatcgggtgcgatacttggtactcgacgcactggcccttctcgcctccgccgtagcaaccatggacgaacggatctcgacgtgtcagaccaccggtggccatctctgcgtgggcaatagcttggcttcgacgtgccggtgagacctcatcggaaccacgggagctcgcgcgttgattgcctgactttgggaccttctccggtgtggggatttgctcgccggagcaatccttccgcctcggaacgcaggtcaccgtgggcgacccagcactctcc

SEQ ID NO: 83578 - DNA, 480 bp, Zea Mays
ggcgatgcaaatagctaggaagatgatacaagaagcattggtagtgcttgaagctgtaccacatgacattgttctacaagacgacatatcaagcacagcgcatcaagctgatcctatgccacccgaaacagaagttgttgtcgtctcagcatccgcaccataagtgtcgacaacaaaaggcgacaggaagaaactccacatgcccttaaaatttggaggcaggaagaaactccacatgaagcttttgggtagttgaagaagttgttgaccacgacactagtgttggcccaaccggatattgagaagccgtttgatgtgtattgtgacgcattagacattggtattgggtgtgtactaatgcaagaaggctgagtgatagcttatgcttccaggcagttaaggagtcatgaggaacaatacccaactcatgatttggaatttgcaggagtggtccatgtccgtagaaaatttggcggcatt

SEQ ID NO: 83579 - DNA, 463 bp, Zea Mays
attaaccatcgatcaatatcatgctcctttgcaaaaaaatactagtactccatcctttgtcatgtaggttaaaataatttgcaccacgaatagttgataaggagtttgatcaatggtcggatagatcagggcacataattccataacatcaaaagaagggatttagttccatgtcatgctaggggatttaattatcgagacacatcaaaatgctttgtatattcgatgaagcaactcataacacatcaagagctctgagcatcactagtgacaaatgacatctttgggagatagcaggtgcatggatcctctcttatttgactggtccgactcatgaagagtaataggttcatgtctaaggatgtctattaccctaacatgtatgtaaagtggcatgtgtagtgtgtgggtattgctggtattttttgttttgtttgtttgtggttgtattggccctcttttt

SEQ ID NO: 83580 - DNA, 281 bp, Zea Mays
cactttgtcttatccaatttggcctcgctagagttcggccgcgccggttcgctgtgcccgcgcggtgactggtcgattcggccccatctcgagcccctgctttagtccgtagtgttccccttaccttggcggagctattctaggccttagtatgccaattccccctccccacggtcgagattcctcgccgaagttacccgacctgcccagagcacctccctctaccgttctcccgcctcgggtcccattctcgcggtcggagtcctgccaacgagttcgcc

SEQ ID NO: 83581 - DNA, 1122 bp, Zea Mays
caacccaaggtccacgacgtggagcagcggagaactgagctccggcgaactcgtatcggccacgacgttcaacaaccggtgctctaacttggctgagacttaattcaacacctaaaaagcatttcccctcgatcaattgcatagctcaagctctaaattaccctattcatggagacagtgcgagcaacggatgaacagaagtgttcccgatgatctagggcagtctagctcaattgaatgggtcaaggagcatcaggagaacctaaggacactgaaacggaagagcagagagcatgaacagacctaaaatgagctagccacggcgaggtcactatgtacggtgtttcggaccgatttgggggaaatcccaaattggggctatctggtgagtaattggaggcacgagcgggtggattggttgcttgaatacctaacggagccgagggtgtgctcaatttataggacccttgatcgatggctcgtgaatttgaaggagacgcgcgacggccggagaggaggaagagcactggcgcgagcgattggtggcatttaccgtggcgggctcaccggcgatgaccggacatgctagagcgagtcactacgacgaagcactgcgtctaggcatgtgtcatccgagcgccaggcagctaactccggtgaacttatctgaattcggtcgtgagccaagcggacacggcggccgggcacaatagtgccctaagctcaataactgtgaagatctttctgcccgaggcgttatccgggcacaagtgagcaagaatcacctcgccggcgtaaatccacacgcgggggtcaccagcggcaagttcactgaaccaatggatctttttggttactgtaccatcaagaacttcttcagtcagtgtgacagagcgaatggcagggagatttgctccaaatttcatgcagtgactcgatcatctcactatatcagagttgtagcctaacaaaccagctttaactttgttacaatgttcaccatcaaatagtcacaggatcttactcaaaatcgagctctaagttcatccaacttcactgttactgaaaattcagacctaaggctaactgacaccacaactttgagcttatttttctccaaac

SEQ ID NO: 83582 - DNA, 1096 bp, Zea Mays
ttccactagggagtctccataaaccatcaatcgctttaccttgtgtgaaacagcaatgtggaacccgtgtatcatggcctcatactctgaagcattattgaagactaggaatagaagttgcaacacataattgacttgctcccccattggggcgatgaagtgaatttctactcaagctccttgtagcttcagcgatccatcgaagttcatcttccaaacttctgttggctcggggtttttaggaacttggtgcttcgtccactttgagatgaaaacgattagggcctggatcttgatagccatgcgagaccggaactctatgtcacgagcccccaacttgcatgcccatttggttgttcttcccactaccttcttgttatggagtatgtcaccgattgggaatccagtgatcactatgactttgtgatcgtcgaaatagtgacacaactttcgtgcagtgcggaggacatcatacaacaacttctgaacttgagggtaactgatcttggacagtctgaggacctcgctgatgaagtatactagatattgagttggttgtacatgcccttcatcctttcgctcgactactaatgcggtgctaaccacgtcagtcgtacacgaaatatacggtaatagttcctcgcccggtagatctatagtagcttagttgggtggcttgacgactggtagagtcattagcaactccttgatggcttcaaatgcttcatatgcctatgaggtccactggaatatgtccaccatttttagtaacttgtagaatggcatgccctttcactgagttgtgagatgaagcggctcagagctaccaagcagcctgttagcttatgaaccttcttctatgattctagaggttccatccacaagatagtatcaatcttctaagggtttgcctcaatccctcggtcactaacgatgaagccgagcagcttccctgctggtactctgaacacacacttgtccgggttaagtttccaggggtagcacctcaagctgttgaaaacttgtaggtcatcgttgaagttctctagatccttcattttgatcataacattttcgacgtaggcctccacacgct

SEQ ID NO: 83583 - DNA, 567 bp, Zea Mays
ttggtcgtagttgtcaacagtgtcatgtgtgatgtatgactctttcgtcccatgaagatttcatgatgatttgaagatttattagttttgtggtttggactaggcttgtgaaagattctgtgagcgctattgtttagagtgttgttttgaagattttataccactcggatttagatagatctaaagttgtatactgttctagtgtttccactatttgattgctctagggtttgtgatgctcaagagtatccatggttgtacgtaagaatgtcttcatttgctgtaactatagtttctttgggcgtactctttgaggatggtatacgtagttattgtgatatactatgtacagtgctttgcacaatttgagtaatgaccttatgagagatacatttaatatacgtgcgctatagggttggtggagttctttcaagttgtttgtaactatctctatcgataaccttgttcgcatgtttgatgacacctcggtgccataagcgtgtttgcacttgtccagaagactggtatatttagcccattactaccaatacgacctacatcatcttc

SEQ ID NO: 83584 - DNA, 762 bp, Zea Mays
caccaatggggattggggccatagagtcagcccccagctccaagccagatgaacgttgaagtcttcttctttttcttcccctcggtagacacggctgggtggcccattcggcacaatcgtttgccacaatcaactccgggactgcaagctccttcatcctctccgaaaacatgactagttgcggcgctcaccgatttagtacgagcagattcagatgactcgcctggtagcatattaagaacagcgttcacttcagcctcatctgcagtcgtttgtatctggagatgggtctgtctttcctcttcagggagattctggtatggagcaatgaaggcctcaataccttctgaagaaggtcacactctatggcctggactgtcatcttgaacaggtggattggatatgaactctgaaaagggcctctgcgggagaagattctaggcagaatatgaaaggggagcaccaacattcgaaaccttgcctctcagcatcgaatcaacccgactcaacacgtcctccttagatattcgcttattggtaattcgagtggggtcatcaacaccggtgtacagataagcagggtagactatatccttcaaaaactgaatattcttgaaaataaagtcgacaacaacagcttcagcagtcaagcctctatccttcaatacacatatctctgcaagcagcaccctgtttgtctggcatattgtctgctatggagatatttgagcatgtcagagatttagattgctatcctaatgt

SEQ ID NO: 83585 - DNA, 579 bp, Zea Mays
cacaacgagtcgcaccgaaccctaggctacaaaaacaaggggtcagcgtcgccagaatatggcgcctaggcccatcaccgccccacgtcatccaccacgataaattcgcgacagccagacaaccctaggccctagaagtacacgtggcctcgccgggggtaaaaacgctggttttacccttgccttatggctccttcccagggaatccaccgctagccgactcctatcccggcctatgaaaggaagagaccaacctccaggtagggggtggaggagagggctctgggaaatgattgtatgctttaagacagagaagaaccaacaaggacaaatagaaggaggagcgccaatgaggaccaagaggccggagtcccgccaagccaagatttagctaggactccaccttgcagcttctaaactccacttccaccccgataagagatctatgagcctctcctccctatctcgactgcttgtaacctctactatgattttgatcattaattgtgcatagcccaagccaccgatgactggaagtagggacattctgcctgaactagtgtaaatcttgcgccatcc

SEQ ID NO: 83586 - DNA, 547 bp, Zea Mays
gttgagatacatggaagacatcatgtacatccgcaagatgatcaggtagctctagttgatatgcaacttctcccactcgctttaggatcaagaagggtccaataaagagaggggacaacttccctttaactttaaatctcctcataccctagatcggtgacatcttcagatacacgtgatcaccctccttaaactctagcagtcttctccgggtatcagcataacttttctgccttgactgtgcagtcctcaaattctcccttatcatccgcacttgttcttctgcctcttgtataatttctggcacaaagaactgcctttcaccagtttgatcccagtacagtggagttctacattttctgccatatagagcctcaaacggagacatcttcaaactagcacggtagctattattgtaagagaactccgcatacggtaagctcttatcccagctaccaccatgtttaagagcacaagctcttaacatatcctctagcacttggttagtcctctgcctatcagtttgaggatggtaggccgaactaaa

SEQ ID NO: 83587 - DNA, 823 bp, Zea Mays
aagaaaccttcgaacaaatgactaaaagtattcttttggctcctgggtacactgaaacaaagcttgcgcaatgaaagacttggattgaaaaccctggaagttagtaagaagcatttctttaagcttcgaccatgaattaacagtccttggtcgaagtgacgagtaccaagtttgggccacacttcggaccgccatgatgaaggactttgccatgactactaagttaccaccatatgatgatatggtggcttcgtagctcttgaggaactgcttcgggtttgctaggccatcatagataggtagtgttggaggcctgtacaatggtggccatggtgtggcttgcagttctagtgtcagtggggaagcttcatcatagaggaaatattgggcattgtacacttcatgacgaagattgtcatgatcatgtccatcataatcttgatccctaaaattgttcaaactttcatgtgcttcgttattgcgcatctattcagttgttttatcattctttctttgtagctctaaaagacgaatcatttttccttgctcttctccacttgctggtggatgagttcaaggttgttgatttcctcgtcaagcgcttcttcacgagggggcgaactgattgcattcttcttctggttccttgcctctctgatgagagcttcgttcccttgattgggatcgatcggtgcaaagagggagctagttgtcactgctttctttggcggcatggtgtatgttgatgtggtcgtgaaatcaccggtggtgggtgccaatgttggatacttgttttcaattgttgtatgacattgaaatcaag

SEQ ID NO: 83588 - DNA, 506 bp, Zea Mays
tggacatgctgacgtactcgaagattgaaaggtcccttatgggttttggtgttttggatgacaacacaattaaaggtctaatcagggtgttatgtgttggacaggttctaagtgaaaaaactaagaggttcaacacatggagacatgtgtgatgatccacacaacctgagatgactatggtttgtgaacatcacacataaagttaaaggatggataatgactatgttgaagttgatgtttataacttggagttaactagtccaaccaaggatggaggcaaggatatcttcaaggtacgagagtaagggagaaagtcaagaggactgaggtacctaaagccaaggtgaaaaagaggctcttgcaaagtcaacactgatcgagttgagaaaggttatggtgcatcgaggaccatgacataggacatgacttggaaccattgaataagttcctaggtttatggttcaagccataaggttcaagatcctagctcaagtagtaggacatgg

SEQ ID NO: 83589 - DNA, 588 bp, Zea Mays
gaaaacatcactggctgctcccaagaggtagccactgtctccaaaaaatctggaaacttggtccaaaaactctcaaaatggaatcttcgcttccccttgacattctcattaagatgcagagctaagggacaatggtcatagagttctgaagagttgctatggagaatacaatccggatggatctcctcccagctggctgtacagaaaacatggtcaagtttaacaagtgtagggacatttctctcatttgaccaagtgaatttcctgcctaccaacgagatttcttttagctccaagtcatggataagtctcctgaatctgcccagcatggccctatttatattggtattgttcttgtcttctgagctgtagatctgattaaaatctccagctattacccaagggccagcgcatgtctccctgacatccctaagctcctggagaaaggaatgcttgagagggtcttggtgtggcccataaacacccgtgaaccaccactgagcaccaccttcctcttgcaacttgactgaaactgtgaaatcatgcaccaaactctcaataacagaatagactacctctctacaagcc

SEQ ID NO: 83590 - DNA, 384 bp, Zea Mays
ctcaaagtgactctgtcagtcgagttagggccaaagggaagttcagatcagatgtaaaaactgaaactgtgtttcagtgacatggagccaaattggcatcgtgctgtgcttgatccatgcggttttgcatggtgaatattatagcaaggttgttaagtgttgtatcgggtacaactttgtctaggatcaagtggagagttgctttacgattggtgaagtaaagatccattgaagtagctcggtcaggctggctgaagtagcaaggttgttgagtgttctatcgtgcactgccatagaccgccgcaacatggacagccaactcaggctttcctccggttgtctcttccgccgttcccgagtctaggcgtgcttgtgatgctttcc

SEQ ID NO: 83591 - DNA, 601 bp, Zea Mays
ctagctttgactctgtctactaaggaaagtagaattttatctttctctgcagcttcattcctcagtttgttaacctctgaccgaaggttaccaagggctatttggcaactttcatcctcagcattcttttgtgctcttaaagcgttgctcaaaattaagccctacaaaaaaagggggagacaaaggatcagcacaagagtaaaagacacaaaaataatctgcttataagtcaataacttttgtaccttcaaactattgtacgcaaggctatctgcgaggtcatccttcgacatagcagaaaggccaacttcaagattcggaaatcctatgttttttgccatctcccggcatacagatatttccttgttgtctgggaggcagtataaaaagtcatcttcgttggtgccattatacaccaaggcccctttcgggtacttccattcccgggcataatgtttggcttccacaatttcctcttccaacaactttttacccgaagcatgtcgaataatgaagtctagctcttcactagatgcttcaggagtcagagattcaacctcgggcgcatcttctttctctggcaccagaccgatgtctgaag

SEQ ID NO: 83592 - DNA, 604 bp, Zea Mays
ccttggccataattccacatggttgctttgcttgtcagatgagattggccatgcaatcgctcatggaccaaccaatgctccgccagtacagtcccatcagtgttggaaccccatcagctgcttaacgcaacgaccgatctgtcaggatgggatcaaatttatgaggccgtgtccagtgcaagtgcaggtcccaccagcagaccacctccgttgcaatgcatgcagacgcgacactttgtgtgtgtgtgtgcgcgcgcgcgcgtgtgatagcgattgcatctgtgtggatgcagcggcgttgatggaacgccgtgacagaagctaagagacaacgtgatcgaaattgattaagcgaggcatcgcttcgtttctaatccatcgcccttttgatttgcctcacactagatagagtgcctgatactagccctcatttattgggaggctggagtgctgggcatgtgtgatgtagaaggtaatgaggtggcaaggttgcagacagtccctgatataaactgggtacagtattattatgtagtgaaggtgtcatgatctcattagttaatactacacggtttctcactcactgtctggtctagtatctgac

SEQ ID NO: 83593 - DNA, 502 bp, Zea Mays
ttttcattgctaatttctgtgatattttcagttcacggtaataataatgtgtgggctctgctggacgtctagggcaggctaaccatcttgcacggagaaataaatacaatactgctgctggaaatgcgaaaccgcttttaggtctgccaaatttgcgtttctgccaaattacgcagaaataattcatcagtactagtagtatagtttagtatctctgtggatggatgtcaactaatccttcagttgcagttaagctcactgatctgttaaggtttagcggaaactgtgccctcgcgctgcatgtgtcatgtgtgtgcatgcatggtgtgctcgatccctagggaggctggttggttaattaggttgtagctgcaagcgttggactgcgtaatctgtttggccttagccatccttgcttcctccagtgtgcaagtaaccccagacaaaccacagcaaaagagccactgcagtagcaatctcactctattccgttccactactg

SEQ ID NO: 83594 - DNA, 443 bp, Zea Mays
ctagaacttgcgcaagcgccctaactgaaagcgcaccccttatgtcagccacccaatttagatcagttagagcatctttaaccagtcttttggaagcaatacgcctaggaacatgctcaagaacctcaggtgccacctctccgatgcatctaccattcagccatcgatccttccaaaaaaggatatcatttccatcacccaaatcagacacaactgcaatattgatcaaagcatgcaccgttccacaagcctgaacagggaggaccgaccaaggcttagagtggtcggttttctggagccagggccacctagcccgaagagccacgctcaacagccgcaaatcagtgatccctagcccacccaagtctttaggcctagtaaccttgccccacgccaccaaacagtgacccccattggcttgtcttcttcctttccaaaggaag

SEQ ID NO: 83595 - DNA, 495 bp, Zea Mays
ctctacagagcaaaattttattcgtggtgattctgatgaagttatttggtggatcagcggcgaagccgaagcttttgaggagattctcaatcataggggagacttctgcaccttcgctggcgcccgcggagctgtgtcactccttgagaaggttggctgcgaacatgcaaaggttgtggttcagccaggattcccgatctcaaccaacaacattaagaacctttcggtcgaagccgctgcgctaagtggaaagttttattccgaagtttggttgaggggtggccgagaggtagctgatgaagctattagaaaaactgagaaagagtctcatgctgccttggaagaggccaggaaaactgacgaagttgcagaacatgcaagacttataggtatatctatcgtgacctagcttcataaattattttagcttcgaaactaacatacacttgtgctatggtgcagctgaactctctccctcacgggagccatatgacc

SEQ ID NO: 83596 - DNA, 610 bp, Zea Mays
taaccggaagatcacatagaagataaatagacagacaaatatgaccgaaagaaaaagtaatgtgagcacttgtggattgtattgaacatactagcacggacgacatttttatggggcccaactgcaagggtacgaggaccaacaaatatttatggtagagcttgccaaacattggagattacattgatggagttctttgtgttttttttcggatgactttgatatttagagttaggttttgagttaaatttgttattattttgtttggcttggggtgatgaatttagcacatcggacggatcgctccccaccatagacgaattcggacacttctttctatgcgtatagccgtatacaagctatttggtccgtcacctccaactcaagcaaaccctagcgcagcgctaaaggtagacagttcattccaggaagtatttgtatttgcggcgattctatacgtatacacatcctccgtgatgtgagtgacttttgtgactcatgcaagacgagatagaaaaattatcagcgcatttctttccaaacaactctccggtgatagaaatagaaaaattaggttaacctgcagtgcgagacgggccgctgccggcgc

SEQ ID NO: 83597 - DNA, 307 bp, Zea Mays
ctaacttgtatataacctattctgtttcgttgtatttaaaaaggataacaagaattcgcgcatatgactacgaaaaatgggcactctcttctcgcatccctaaatctaggcaacctcctcttcctcccctgttttttgcaatttgctggccgcttctgtccgtgtgtattcgcgccgcgcttgcaacccgctggtgatggtcttacatgacgctcctttgttagctcacctcacattagagctctaaagctcaaaagttagttaaactgctctaaaccttatagagctcttacatggcgctcctttg

SEQ ID NO: 83598 - DNA, 315 bp, Zea Mays
ccgagtgaagattgcacccaaaattatctcatcaatttgggcatcgtttgatgctatttttttcccgaaaaccttttctgtcaaattctctttaggttgggaaggccatacaactcctttctactttcattggtggattcatcattgcattcacgagaggatggctcctggcccttgtcatgctttcaagcgtccctccgattgccattgccggtgcaattgtttcaaagttgatgacagggctctccacccgaatgcaagcaaactacagtgatgctggaaacgtggtggagcaaactcttggtgccattagga

SEQ ID NO: 83599 - DNA, 795 bp, Zea Mays
ggtccttgttaaaaaattgaagaacaatccgttgagatatgcacataagtgctttaggtcctccaatagcaaaatgtagtcctatagagttttatgccatgtgttaatgctcttcatgttagatctcctaaaaatatgatgttttatgtgacttgtgcgttatccaatttaagttgagcaatggttaagaaaagctggttaatatgcaccaacccatgtttttgagttgcaatgtttaaaatggtttgctaagtttataccgtgttagctaactcttgttaaataagagtcaattacgttaagtgattgttgtatatatgttgtgtttcagattgcgatgataataggcaagccgacgtgtatgttgtatagcgggttgtgtcgttgctctggttagccaacttgttagatggctttggttaagcttgtaatcgcgatgatttgcttgttatgatctaaatgcgtatggttatgatcacggatgaaaagtagtagtgttcatgtgatgtctaagttaaaatgcaaattagtgtgtgaagggcgcatcgatatacatatatgtaccgggtatgattattgtggtagatgcgttgttaattatgtatggtaattctaggcacgagatgacttggataaaaattagtaagtcgacttgttggtcctcatttgattattttaactctaacaaatggtaaagtgttagagtaattctagtctctagaacatggcaattattgaaataaataggagctgaaatttattagttgctgttttgggctgcacgcactgttttcg

SEQ ID NO: 83600 - DNA, 482 bp, Zea Mays
agggtataatggtcaccctaagtcgaatagcgtgagcatgttgcaccgtcttaagtcattgccgacttaagccgattgctctgttagtagggtatagtggtcaccctaagttgagtaagtgtgagcatgttacaccgtcttaagtcatcgccaacttaagccgattgctccattagtagggtatagtggtcaccctaagtcgagtaagcgtgcaaattggtaataaatagttcgagtacccttgagaatgagatctttttattgatgatgtattttccgattacaaaatataatgctgccccgatagcttttgaaatctagctaggggtaaaacttcctgagatgctctatattccatgaattccctatttccgtgccatccatctgagtaagccgatatgatcctggccaagtgacttctgctaccatgaatggcccttcccatagtgggacaatttgtgtcggccttcccccgttagaat

SEQ ID NO: 83601 - DNA, 453 bp, Zea Mays
attgagcatcaggcacagttgacacgtcatccacaacacgattatagtcttcagggggacggtctactacaacccgccacaccacaaccttcatgagttgcaactgggtcttcatagacgaagtaacataattctcctagtctagttgagaatcaatcggaatgactcgtcttatgacatttggtggatgaccaatgttaagcactctgtcaaccgcaatgtcatcatcttcatggtaacctagcttttgtttagcctttgtaaacacatcactcaaggagggtctaccaacgaatagcacgggcacatgtcgcatgttaatgaacttagcatttccatagggatcttcttcgacattgcctccatgatatatgctcaaaaaattatccatctatttaaaacatgaattaaacattgttcatctactaactaataacgaactaataactaaat

SEQ ID NO: 83602 - DNA, 705 bp, Zea Mays
tgagtatccttacgaatatcacaccataaagcattgaaacaatttctagcatgatgcccttcaactccacatttttggcaaaaagcgggacgagcaagatcaatttctttcttcaaagaagtaggagacgggatgggattaccagatagagtgccatcacccgaggaagaagacatcaatccctcttgtggatcagcttttcccatctgcgatttcaatctccagctaagattgtgattccgattccaagattgggatccttgggcagaatctttctgtccccatcgatcccaggagggattggggatgttcttgtttttcggatccatctcgccaagattcttgctattgcgaacaaaacccgaccccaaccgaggccactcttcttcaggcaccggggggcgaaaggaggttacgcaccaacctccatggaaatcagatctagaggagacagggagtgaccaaagacatgagaggaaagcggcgcagtgagggaaagaatatgaacccacaaagtcgggcgcaaaccctaacctggactggaagggcgaagcttcaaaggtcgcggcggggagaagaatccgcgatgcctgggttagggttggagcgagcggcgaaatgccctgactccatccagtccaggaaaccgaagaggcaaaaggagcaggcgagcagcatccttgggccgcacaggcaacagtagac

SEQ ID NO: 83603 - DNA, 428 bp, Zea Mays
ggatgatgatgttgccatggaaaatttggagaaaacctgccctaaaccttggctgtcaagcgcactgaagatgaattccatggtatagtgcctggatcagactgccagctcggtcagctcaccgttgacgagccgcgcgtagattcgtgccctcgccgccgtgattcgcgatcggaccgactggataacgctcgggattgagtaaatatcgtcgccgtggatatattccgaccaatagtttactccggccaccgtaccgaattgccacggtcgtttcggatgagctcgccggtgacagccgattcacggccttgcgccacgtacctaggcacattcaccgcatcgccgtgactcactttgtctgtctgatcatcaccggtgagggttgccacagtagatgccacgaatcccttgcgccagtgacctcc

SEQ ID NO: 83604 - DNA, 866 bp, Zea Mays
cagcacacgggcaatcaaggtcactgaaatgacagaagaggtgagcacgtattagtcacatagtcataagtatatgaaatgtgaataaatagatacacagagagatatggcacagaaaacacgagacgagacgatcgataggtcaaacggcgtgaaagcgacgtttgaacgataaaaagtgccataggaggtttggaattcgaattgaggcacgaaacgacatggacttgagccgatacttcacgaataggtttatgtaggtgaatattagtgaagtgtgtgcttggtttgaatttaggcgaagaaaaagagatttgggcactcggctcggaaacgatcgctcaaaacggggaatttggtgaaatttaagcctggaatctcggattggcgtgaaatttggcaagagtgttactggaagtgttgtgaaggtgcctgaaaaatttgggttcaattggagcatttttggctggtttgggcatttcaccgagcacgtgacgtgcggagttctagggtttcggtgaaacgactatttgaggtgggaaaaccctcccgaaggagctagaaacctgcagggatgctcaatacacacagagacacacatactacaacatggatgcacaagatttcacaggatttggagtttgggcaaaaggggtggaaatgggagcctctgctcaccagaacagagagggaggagaactgagggagagatggatgggctcctcaccgagagggatgaagagaagcacaaggtcgccgtgggatcgccgccggtgaagacatggacgccggcgaggggaggaatcgccagggacagagagaaatcgctggcagggtgaagaagtgagcctctggctcggtctcgg

SEQ ID NO: 83605 - DNA, 380 bp, Zea Mays
ggaatatgttggagcgaaggctgaacacgacctcaattagatttatccgtccacaactaaccatgttttagtgtagggtcaacagtgaaggaggacttcaacccgtatcagcatcgaggtcctcgatcgcggccttcggagacatcggagtgaagggccatgctacaagaaggggggctcgtgtagctcccccacgcatcccgaaggcttaactcctctctcaacagtgaagtccaagccccgtcgaagtcgagggtgcgactcgccagcgaaggccacaccagactaccgtgggacccaggccccacaccgccacagtcggggcccacttgtaagcccttcatggtgtagattctacagtatgtttgggttactatact

SEQ ID NO: 83606 - DNA, 557 bp, Zea Mays
gaaaaatttaaccatagccgaagctttttcaccgcattctcgagcgaaccgtcactttgaattagcttcgtcaaaactgtaaaaaagcatcatcttcgtaaaaaccacaaaaagatccatcagatggccagagtacgctcaactgcgagggtgacccgtgaaggagaagagactgaggctaccgagacagctccgatttccgaagtcatgagacaatcgggcttagttgtgacagagggaaccattgaagaaggtgcacctactgccgaagctgaacaagctgatattgaggaagaaaatgctgatgatgaagaagaagattatagcattctgattccatcaaaacccagccacttggattttgaaaaatctactgtatctgaagccgacgtgcccatgatgatgaaactgggctacttcagagaagctgaaaagaagcttattcgctttgccggagaagaaaccactccaacaccgaaggatgatgaagtagtagttttcaaaagcttttttagagcaggattacggtttccgctgaacgagatgattggagaagt

SEQ ID NO: 83607 - DNA, 743 bp, Zea Mays
tgaggtgtggagagtacgcgtggacggaggccgcgcacgtttccttaactgtagcgacggaagattattccagggccaagttgcatgaccgacaagatcctacgacgaaaagaagataatgatccaacccgtgactcgatagctcggcatgaagcgcccggtacagccatagcataataagcctgcacagactgacgcagaggcgcagaacacggccgggcacaggccacagctcgctttccttgcaccaatcgaacggctcctcggacagaattcacctgcatcatacaggcacgcccattaatcctttgtcgccattaacagctgagctccagtatatatactctcactgtttcactgctatgtttgtccatggccgtatcgtcactactccatccgccccacaatattggtaaaacgcgcgaccaagctatacactatataaatgtagaatatttaattgagatataatagaggtgcataatcctgttgactactcatgtatttttatcaaggtatcgaaaagattatcgctttcccctactcctcgttaaaacccgtcgcaagaaggtcctcacaagagtcaagctcctaatcaggtaacttcgtggatagactataagtcttctctctcaacacgtgggtcttcaagatgtcctctcttgcaccgctctttaccgtcttcactatcaaacttccatcttaaccactacagaccccattatcgtcagtacattttttag

SEQ ID NO: 83608 - DNA, 454 bp, Zea Mays
ttataaactccatctttacggggaatatcaaaggagatctccctgggatagagcaagtatctcatgggaataagagaagtacgtaggtgagggcaggcacagatctatgaaacattgtgtacgtaggtgagagcacactgtacactgtgccaccttctaaaggcaatcaaagactcaagggatgcatcgaatgatacggactcgtggtcacttggggtttgcagcatgcagctggtcctccgacgagaccacccaacccggctgcaaaagatggcctcattttcccgctactttccagctggtgtttcagtcgggtatgtgttttaggtccctttagaacgcaaagatctcagtggaatcatacatgaatttcataggatccagtttattttcacataaaaaacacatgaaacagaaaaaaattattgtatttcaaagaaggccttagtctcgg

SEQ ID NO: 83609 - DNA, 524 bp, Zea Mays
agataatgcaacataggtcagaataatcaaatgcgagtctactgaatgtcacatagtttggcaatctagttaaggacaatgtctttcaaagaacaagtcttgtcgaatacattcttgatatatagcaagaactttttaaaaatatcccaaaacatggagctagtatgcgacaattatagcaaaacagcgtgtgcagatggcacagtgaactactcatcgttcgttaaaaacagaaacaaaatcttcagggtacctgaaaaggaataataactgtgctgcataatctttagatggcacagtgatcccagcagcgagccacaacaataatcaactcttgaggcaaaagcatcagccagttagtcacctcctcacaaaacacggtgagaataacaagaattttgttacaccaaaaacatgcagtaagactacaatgaaggtgatatataacatgtaacaaaggaccaaaggagcgttcgtccatgaactccaatccacccatcgtttacacttccaatgcaaatcat

SEQ ID NO: 83610 - DNA, 600 bp, Zea Mays
cgagcggcttctgccgctagggcgtgcaacttctcgacagctgcaagcgcagcggggcggtcgtcccgcacggtgaggaccccagtaggggatggcatcttgaggaccaagtacccgtaatgggcaatggccatgaaccggtatagggccagcctgccaatgatggcattgaaagggaggttaacctccgcaacgtcgaactggacgttcttagtgcggaagttttcctcagtcccgaatgttaccgggagtgcgatgctcccaaggggatacaccggttgagggcccactccggagaatgggcgagagggtcccagtcgggatcctgggatctacagctgcttgaacgcagcgtggctgatgacgttgagcccacccccaccatcaatcagcacatgatgcagcttcatattggcgatgacaggggcggtgatgactggtagtataccagcccctgccatgttttcggggcagtcggatgccccgaaggagatagtggtgctccgccaccgttgatgtggggctgccttcgggacccctggggtcgccgaaaggacctcacggcatagggacttcgcgttcctacgggaggtgagctcc

SEQ ID NO: 83611 - DNA, 537 bp, Zea Mays
gttgaactgggccacctcgaagcacaggaactcgatgcggtagttatcggacgtactaaaggttaccgacatgcagacatggcccaagggatactcttcttcaatgcctttggatcttggctagtagttatcggacacccccttcttcgggggcccggatcttggctgatagatgaggtcatgggcccactcgtcggtggtgatgtagatgtcgacatcgcgaaagagttgctcggaggtcatcagagctttttgaaggacaactgatacgaagatattgcagccattcatgggccgaccgacgtggtcctaggatgttcgtcgaggtagcaacggagttcgctcagcctacagctccccgcactggtgcgtcgtggtcccgatcatacccctcttggcaccttagctcttcttcttgccatcgggcatgcgacaccacgatgttgcttcacacatcacgacgattgttgagttggtggtgcatgttatcctccggatgagtcagtggaagaagatgaattgccgcccgagtgagga

SEQ ID NO: 83612 - DNA, 281 bp, Zea Mays
cgcggacttgtcggcacctacgcgcgaacgatccagtgctcatgcggacggtccgactaacttagccggacagtccgtccatggccagaggcgtcagcctccacataaagcaaggaaagaacgcaagggcaaagcacatatggttggctggtcaaagccatccctaattttgatcagttactctccaaatatgctagcaagaagttcgttctatgtgatcggccaacaaagaaactcaggtcacccgctaaaacaaaacgaccgaataaaacggctcgaaa

SEQ ID NO: 83613 - DNA, 591 bp, Zea Mays
gccaataggaacacgacaggatggcccactggcgcgacctcctaatgcgatgctggctcgtatgtaccctataaaggcaacattagtcgacgtcaaacagcacatttagcggacgaaagcatgcctggtgctagctagatcactccaaaaatctgtcaactgtcacccgcccggagcaaccaacagtgcccaatattttagtgcgcgaacgcgagtagggttaatcaaacgtcctctcacaaatgaatcatcagggatagatgtaatcaatcatagacttatactaatcataatcatcatttcatgcatgcatgcgacgatgatgggctggtagggtgcattattaggtcccacatttttgtccttatttaccttttaccacttcaccatgatcttgctcacgtgtccactcccacagtttcaaattttaagccgttttttagtgttgcgaaacttgtctgatttcagtcagatttatcagaaagcaaatttattattatgtacaatatcctctcctatccatccaaaaaggatacaactacgagatttgcgcaagttaaattgttggacttctcaagaagtgcgaattgc

SEQ ID NO: 83614 - DNA, 641 bp, Zea Mays
atttctaaagacctaaaggaagctgtaagtgcatgctgcacatatgaagcagttaagggtaactttgtgacacaaattggcttcgaagttgataagctagttgaattgcttgatcagacttcactggaacgccacatggcattggaggatactcttacaacagatgattcaaatgatgatagcgaactattggagaaggtcttcttttggcaagatcgaatgcattgcttgctgatgcttcaccttccaaacagtttgtattactccctccaacattatgagctgattcttcttccctttgatcaaattcaatctcatcctgactatgcaaacccaggtggatatacaatgctcgttcacttataacatcttgtctaccttccttggtccacctatcttcagcttcatttgaatcccaatcaacatattgacttgagttacaatttccttacagaacaaactcataattactacatactttgaacaaactagagagcatcacaaatacattactcacaaaggtaccgaatgtgacacgatcatcctggccgatacaagttaaactctaatattcctcttcacaccgtgggcattcatttcatcgacgagtgacacaccatggccgactaaggaaatcgcaa

SEQ ID NO: 83615 - DNA, 1362 bp, Zea Mays
taatttcaccagaggctacctggtttgctctagccgcagtgaccgtagaccatgcggtcggatgaacgcattcccgacgattggtggactcctagttcaattggttgggtcggcgagcatcgcagacacacgagaatactaaaatggggaagcagaaggcatggactgacctgaatcgcgttggccgcggcgaggctaaactgtgcagtgttcttgagcagattgggggaaattcgaaattcaagagctctggggaacgattcaaggctcgaatgactccactggttgcgcaattacctaacggagcgagtggtggcggctatttataggaggcttaggcggtggtgcgcaatttggtcggacagtgcgggtggccggagaggaagaaaggactctggcacatgacacaggtggcctctcaccgtggcaggtgctccggtgatcaccggacatgcaccgcatgattcactgtgacgagagccagcgctaaggcacgtggtgcgcgacggcgacaacacgacggcggtgagggttatccgagcgaccgacgctggggggagtacggcatgcttagccgcaaccgagctcgagtggatcagacgccgagatctttactgggttatgcttatccatggccacggcgcacgaatcacggcaagcaatcgatcaacggcgacgggccaccggcgacgagatctttttggcgctggcggtctgatcatcaatagagcactgtaccatggctagtgcttcttcaataagcctgtcagtccatgtttggggtggattttctccaatttttatgtggtgactaaggcaaccttctgtatcaaagttatacacctataatccatgttaaactttgtcacaatgcttaccatcaaatagttaccgaagcccattcaaaatcgagctcaaagttcatcccatcacactgttactgaaaattcagtccagggattgattgacagcccgactttgagcttaattatctctaaattcttcttaacaactaggcttacactcttaagcaaagttgttctcctttgtttgatctataactttgatgtggtgacctagggcaaaaaccctatattttaaaagttgcaaggctccaaagttgagctcatcaatctgaaattcagacagcatgaaatcacaactaggggcctttttgcaattgaatccaaagcttagggtttggcttccaaattcacaccttagtgaatcaagtgacttaagatactttattaacttggtttttgcactttagtccaaatgtgcatcaattttgcacataagcccctaggttttagttttagggttttccagggttcaaatggggatttttggtatcccagg

SEQ ID NO: 83616 - DNA, 629 bp, Zea Mays
gctcgatgaggggagatcagcaggaataatctcaagagcatgacttggggaaacttcagccccatcagcaggtggcaggctcctggcgtctggttcgttggcttctaaagcgatttgaccagcgagagctgtagaacgtgcgtcactgcagcctcctcggaccggactgggggcgatccaatgtggacgtccatggaagaagcagagggggagccctgtaacacccttggtgttacccaaagccctggccaaagaagcacattgtgtcctactcaaactttatgctaaaatggaaaatgaaaggactcaaagtttagaggcatgattaagataagcattaaccataacaagaaagaaattctatccttcatacaatgttcacccacaaacaagattctaaaaccctaattccttcttaagcccttaaaccctaaccatgggattaaaagggaaagggtgggcaaatgatcaaaacataaaaaggaacctttactaaacatgaagtgtattagtaaagctacaaaatttagtcagagaaatattgcaaaaaggccgaacaaaaacctcaaaatagtgcatcaagtggaaaacacacttgagcctttaattttttttctaagtcccaaaac

SEQ ID NO: 83617 - DNA, 442 bp, Zea Mays
caaaaatttgtgatgaaggagagcaatacaataaggtaatgacatagccctacagatttgactgaacatcattcacagtaactaaggaagtaaaggaccatctgaaatgttattgacactttgagctactcaaataaacaatgaccattactttggcgcggttaaggttagactttttgggttaccctaggatgaatcatgctgaaactttagtaaatggtcaattgtagtggacagtggggaccaaaaaaatgtggcacaacacttgacagtttaaggcagattcgaagtgtagccgtagtgtagggtttcaaaaatatgggaatctgcagagcaatagggcgtaatcgtttggagtaacattcgtttcctaaatatctaggatattccgcgggattttgactcccataaaaatgaaaccctaaggcacaccagatccgtg

SEQ ID NO: 83618 - DNA, 555 bp, Zea Mays
gtcgactccataacagcgtccaacacgctagccattctcctcctcttaggagttgttgcgggagcctttgcaaccttcggcaattctgcctctgctggtgggctcaagatttctggcagcattattgctttctctagctctggctctttggccgccttttctttggctttggcaccatgttttggcgtttcgactagtccggctgcaggaacctttggcaattcagttagttattccctggaagcgacacgagcagtttgttctgcctctacagtggaggatatcccttcgccaagctttggcactatggtcatttcaatgtatcttggccggtgcgttaagaccttgatctttttgcccttcggcacaacagagatggccgaagcggcagttttccttttctttccctgcttttgcgagggataggtgtagtccgagtacaaaaagtcgatgacatcaaaaactctattcaaccttttcttgccccatcctccgaaggccaaggtaattgcatcatctttggcccttgtgtatgccccaagaaattcgtcactg

SEQ ID NO: 83619 - DNA, 561 bp, Zea Mays
ttaattgacgtggctcccatgcactaactgcacacaagtctacacgtgcaccaaggacacttaatctggtctgctctaacatccccaaaatatccactctttgcttcagcaagcagataggagaggaagtagatgagaccccaacggtggttgtactatggcccagggcttgatattatctgcaggggtgagaccactagaatttccattatttaattcactcattcaatagctagcagataaaccttcacttgcttactgctctcaaaacagtccaacttagatattttcccagaagcaaattaagcccctagaccttcagtcacacactacaaccttatccccacttagatacataagtgacatcaacagggtcgaggtgatcttcttcagaaccctagtgcaacactgatccctctccatcagcactgttgttccatctgcacacctccctgttgacccctgcaatctcttagcttctcatagcaatagggagagcaggtttaataaaacttatccaccaaacaaccctataccacttgtccacatggaccttaggct

SEQ ID NO: 83620 - DNA, 620 bp, Zea Mays
gaagtagtggttttatgtgaagaatgacctgagccagagaagcgatgttaaggatctaatccagtggcccgttcgatcctactttggattaaagagatcagttatcgtgaacacagaaaaatctcaagcctacctggtagcgtttaacgctgtgtgtggttacatcagcactagagacttagtgcaggagcacatagccttcaaggtatggcccctggctgctaagtgagaaatgtcgaaggatactgaggctggtacgagtcaaagtgctggaagaaatagtctagtatatctgaagtatacttatcgctacagaaatcaatttggtgatccagatgacgattggcttgatgccatcgaagcaacaagtgatgagttgttaggggcctacaccaaggctaaggacaaagctatgaatgccgcctttggtgcccgaggaagaagattaaacagggtttttgattccattgggttcatttaccctgattattgtttccttgcccaaaaaagggggctaaagagaaaaattgcactgaaagcttcttctgcgggtcgaagtagaaaaaataaagatcctgactcatcggccaaggtcatattatacggaaagggcagcagag

SEQ ID NO: 83621 - DNA, 485 bp, Zea Mays
ggcattttgcaaataagaccctagtgtaggatatttaaccctgaatagggatctaaagggtaaaacaggacccaaatatagaaaaccctaaatattaagtgaaataatcataaaatgttcctaagaatggacctacattacatttacacccctgagatacaaaaaaccctaaaaaggaccttggaaaaccctaaacctaaaccttagggggttaagtgcaaaatcagtgcacttttggactaaagtgtaaaaactatgatgttaaggtatataaagttacttggttcacatttatgaagatttgcaatccaaaccctgaattttggacctatttgcaaaaaggaccccatttgtgttcttgagctaagtgtgaaaattcactgtttgagctcaactttggagctttgtaacttttaaattctaaggtttttgccctgggtcaccacatcaatattgtagacctatcaaaggagaataactttgct

SEQ ID NO: 83622 - DNA, 302 bp, Zea Mays
attttggtaatgtaatatgatggtgtgtgctggcatgttatatttttttccaaatgtttctttgcctcagatgccatcgcggactcgcgcacatgatggtgcggggacttcccgcgatagggaggatactcctaacccaccaccagtaccaccaactttggttgaggctatcactgcccttgtcaatgccactgcggataatacgcgcttcttgcgcgaaatggcgggcaatcagttccaacagcacaaaggcagagctcctcctcaaggaccgcctgaaactacatacttggaattctctg

SEQ ID NO: 83623 - DNA, 614 bp, Zea Mays
cgcacagcggagaaccgagctccggcgagcctacaccggccggatcactcaactaccggtgctcccgtgcgacatacaccaaattgaacccttaataaacatttcccctcgcttaattgctggatttgagctctacatcaccctgtccatggtgacagcgggcacaatggacgacatgaagtgttcccgacgatctaaggggtcatagcttaattggctgggtcggggagcatcagggacacataaggatactgaaacgaaagagcaagaggcatgagcggacctggagcacgctgaccacgacgaggtcacaaggcgcggtgtttcggactgaattggaggaaatccgaaattggggctcgttggtgagcaattgaaggcacggtttggtggcttgggtgcttgactaccttacggacccgacgacacgctcaatttataggctccgggggcggtggcgcgtgaattggagttggcgcggtggcggtcggagaggaaagaggttaccggcgctagcaattcgtggcgttcaccgtggcaagctcaccggcgatgaacagatgagttatggtgactcactatgacatggtaaggctttgaggcacgcagcaggg

SEQ ID NO: 83624 - DNA, 324 bp, Zea Mays
gctcgctaatgaccgccgtagtccttcggccagtgagtgccacagtaaactgcaccggtgactcatctcttctccccggccgccagcgcaatctcttcgaattagacaccaccgctcatggactctataaattgagcatgccatgagctccgtagggtaattgcacatccaaagcatcaactctcgtctccgatcgtccaccagagcctccaaattgcccacttcccccaaatcggtttttcaccgccgtgaaaaggctctcaccgtggccagtgcgcttcaggtccgttcatgccctcggatcactcgttttagtactttgct

SEQ ID NO: 83625 - DNA, 640 bp, Zea Mays
actctaaatgcaacatgaccgagatggataaaataacatacacaatcatcatggcatcacaaaatttgtgccactactccgaggcgcacaaaataagggtgccaacagacagaagtctcaatgacttattcagcaacccagaagcctccgctagaataggcaaatgggccagaagcctctggctataatatcgccttcgagccagaataacaataaaataacaagtcctcgccaactagacagggtccctggcccccgattgtcccaatacagaaataatctagaccattcactacgacagtgcttggtgccatgcaggggcacgcatcgcagcaatcatcacaacaccatctagagcaaaatacagatatgccacccacctcagcttcacccttgagttagacaaaagcacaaacaacatagtagaatacaaagttgtcatcttagggctctacaagcagagacctcaacgtaaagacttgtgtagtaaagacggactccaaaactatcaccgggcaaaatgagaaagattgcgcagcaaaaaaaccgatccttgtgcaatacctatcaacattacaaaatctggagaagcagttcaaagggtttactctacaacacatagacaggaacaagaacgaag

SEQ ID NO: 83626 - DNA, 301 bp, Zea Mays
cctcatgagcaatatcaagcatgatatgtctatccaaaagattatcatgataataagacaatatatcatatttttcagtaagagcaagtttatcatgatttagcaattctacatgcctctcatgcatggcattttccattttaagttgagcaacacaagataaatcatcatcattatttctttgctcaattaaaactgaatcataccgttggaccaaatcatcatgagagcactttagcttctcatgttctttggtcatcttctctaggctgtcgttggttttgttgagagtctcctctag

SEQ ID NO: 83627 - DNA, 372 bp, Zea Mays
tgactatggatttcatagagggtttgcctaagccagagggattcaacactattctggtggtggtagacatgttttctaaatacaaccattttttcgcctaaatcatccttttactacgaaggttgttgcccaagtgttcccggataatgtagtgaagcggcatggtgtgccaaagtccatggtctctgtcggtaccctaaaactagggtaccctcaactgctggtcgaagacggagttttgtgtggcgatctgcagccacgtaggaaggagctaagcaacacgattcagaatctgggcccgtctagtgagactattggcctccaggcctactcccaagtccccacctctctgagtgggtctgggattgccac

SEQ ID NO: 83628 - DNA, 758 bp, Zea Mays
taaaatagggggagtattgatgaagatagtgaatcaatgtttcatgtgagtaaattcagtttcatatggataaaactagtccacacaagaataggtcacacattggaagaaggctagtcctcaagcattgtaattgagtttgagacatggggaggagtgcctgaagctaagggcatggtgaggagggcttggcagctaggggcaccatgacagagagggaagagaagagagcatgcagagtgagtgttgggttcaactaccacgtggatggatggacctagacacttggggaaactagtactcaggtgcacgacaagacaatgagtagggaactgtagagtgttgttatgtgtctctcgtctgggtacaatgcgtgggtatttatggtaaccgtgtgggtagatgggtccccaaatacggttatacccccggttacctgctacattctcgaaatattcccctcaatggggtcattacagtgaggtgaagtacaatagcatgaacatactatagaatctaccccttaatggggcttacagatggacccaaaaaatggcatggcggagcctgagccccactacgttcttgctcagcctttggttgcactctgcaccttcgaccctatggagttgtgccttcctgatcctgcaaagacttggacctcacgatctaggagagttcgtgccgtctgggcgtatgcgcggggaaaaggcgagccccccgtcctctagctattgaggcccttcgctttatcccct

SEQ ID NO: 83629 - DNA, 683 bp, Zea Mays
gtgaagttatccaagtgtgaattcgctcaaaccagcattgcctatctcggccatataattagtgcccaaggtgtttccacagatcccgacaagataactgtcgtgcaacaatggcctacaccggcaaacagcaaggagctacgcagttttctgggccttgctggtttttatcgtaagtttgtgcggcattttggcatgatatctcgtcctctgactgatctgttgaagaagaatgtgctgtttatttggactgtggaacaccaacaggcgtttgagttacttaaacaggccttaagctcagcaccagtcctggctttgccagactttgcaattcccttctgtatttatactgatgcctgcaacactggcgtgggcgccgttctcatgcagcgtggacatcccctggcctttctaagcaaatcactgggacccaagaatcagggactgtctacgtatgagaaggaatacttggcaattctgatcgcaataacacagtggcgttcctacttacaattggctgaatttcatatttacaccgatcatcaaagcttggtgcaactcaatgaacagcggctccatacagtctggcaacaaaaattatatatcaagttggctggtttgcagtaccgcattatttataaaaagggttgtgacaatatggctgctgacgctctttctcggat

SEQ ID NO: 83630 - DNA, 856 bp, Zea Mays
ccctctctgacatttacacagaggtcccccgacttctgtttcttctccaaataaacccctggccacggcgcgctcaccaccgatcaccccgcgacttggactggccctagctggcggcggatgcccagtctagctacatgggagcattaccgacccaaggcgacttaggaacaatcgtcaatgttggcttgaacacttagagaacgtcctgcccatgtgcacagcggaaaccgtgacgccaagcccatgtccccgttcaaaaatgcccgaattgaccaaacggttgccacaatgagcttcctgggcacaccgagctgctaaaacaacatatgagaagcgcagagccataccagagtggtccggccacggagcgcggagaacttgtgttcgccggtgacagagaaaggggaaaatggcgccgcgacggcttagggtggaattaggaggtgagattggggctacacggccgtaaggaactatagtttcaccgtgcacactcaattcaggaagaggtggcagaagcagtgcgaattttgggctttgattaaactcacaggtggagatgtgaataccccgccgtggatcatggtgctatttatagccacggcggtccggctagctatccacggccacggataactttgttagcgcatgcttaccacgtagggaagagacacaatgagggaggagcaaggcatgggtgataccgcggtggatttgactgagtcacggcggccgccggtgaataactccggccatgcccggctcagcttgcgagatggtgccacgttcgacgctatccttcccgcgatcgattcccaccactggatcacgcgagcacatcctgttcaacagt

SEQ ID NO: 83631 - DNA, 447 bp, Zea Mays
gtcaaaagcacgaaggtgaaggaaatacaaagcttcttagtcagagcgattcaactcacattgataaaaaattgtccttatgtttggcactgttcctcaatttatagccgcggggtacaacttcgtataaaattacaaacatatcatcaatccctatacatgtcagctacaaataatatgagggtaatactatacttttccatccatatatcttgctgatcagatcttccaaaccctttagcttcttctccacttcgtaagccatcacgcattgcccaaagcttcctccttcggcttcgtttgtcttaaccattccacaaacttgaatcttcttgactttgtcccttctatcagctttgaatcgatgacaaagatgaacatgtttacctaaagcttgctttcttgacaaagctgatatcacgaagaccttcgacgatgaagccctcc

SEQ ID NO: 83632 - DNA, 866 bp, Zea Mays
caagaacaccgagttgaccatttgtaacatgcccgcctatgacaggaacaaggaagttgaagacaaccatttttttgtttttctggacaagggtaggaaaggttccagggtaggcctagttaaacccattggtaatcccaagtacgtgaagtgaaaggtcctaatttgacactgaaatggccaaaacttccatattttgtgctaacacgtttagggaatatatgttggacttaagataattgacgcgcagaccagtagatttagcaaaagagtttaagattgccttcgggaagaatagtttcttctgacatgcttccaagaccagtacagtgtcatctgtatattggatgatcaggaagtcttgcccacatctttgttggagaagaaaccttagaatacctagcactttcgacctgttgactattatttggagtaggtcagcagccaacaaaaaaaggagcgaggagaggggtgaccttgtctgacccttctcttacaatggaatggttacctagggcaccattcaaaagcactgcaaatgtaccaaaattcataatcattttgacccactttatccatttggggtcgaagctttgtgttgcaggatactgtagatgacctcatgttcaagtttatcaaaacctttcacaaagtcaagctttatgatgaccacttcctttttcggatgcttacagaggtgaaggaattcaaaagaccatgtcaggcagtattgaattgatgtgtccttgataaaaccatactgattagcatgggccagcttagtgattacccattgaagcatgtttgctagcaatttagttaatagatttacatttgagttcagcaatgagatgagcctataatca

SEQ ID NO: 83633 - DNA, 718 bp, Zea Mays
cttcggggatgtagtgttcacggaaggctgctttaaactcatcccaggtgacttgatggttaacaggttgaatagccacgaaatttccccaccaggtactggcaggaccacggagttgttgtgctgcaaataacggcttctgcgtctctgagcaacggagaagaccaaacttttgttcaataacccgaatccggtatggagtggataacgtcggggagaggtaactcgtacgtggcaccatcccctgagcccggccgaagttactcaccggcggccgccataactcagtgagattccgccgcggtggcgcgcatgccgtaattctcccccactgtaccttttaccgacgtggtcgacatgccatagtgatgctatccgtggccgcgaggtgatcaccagagttattgccacggcgttagccacgtattcactgcgccgccttcttccttatctccgaccgccacacgttgccgttaaaattcccagccaccgtcgaagctgcctataaattggagcctcggccactgccgctaggtaattgtgcgtccagagaacccacgcgcagctccgattacttcccacagctctccaatttcatatttccctcaaatcagtcgaagaacaccgtgaaaccaagtccaccgtggccagccgattctggtaaagctctgtccgattcaaaccttgtttaagtcttctcatagctcagtgatgctcg

SEQ ID NO: 83634 - DNA, 360 bp, Zea Mays
gggtcctaagagtagggagccttgtattgtgagtccagaagtaaatctcctaggttatggttttcgagcgcgtcttggcagcagtcggggacatgtcctttcccgcacaatgacaatatcattgatgagttttggtgtttcaaaggattaggtgaagattaaggaagaaagctaagattaccatgtagaaaagatttttattgcctccaattcaatcctgtccgatctcctatttcagtcctttgttcaataaatccccccctagatccacgtccacccccgtggatcaatgcatcagatgtctcctcgcagacctgagttctgtttcacccccaaggacaagccacgccatatggaaga

SEQ ID NO: 83635 - DNA, 318 bp, Zea Mays
gcccccgagggtggtgccagcagttacccagcccctgagggtgttgctggtagtgatccagctcttgtgggtagtgcaagccacaacccagcccccgagggtgttcaggtgggctctctttcccatgcctccatggatgtccacgttgggtcgtccccacctcagcccgatggggcgacgacaacacgtgcttctacagctttagctggacaagtcgccttagaggttggtgagttagatatgagaggcctactttctgctggtggggttgaggtcattccagataatgctcttcaaattgttcatgctgatcttcct

SEQ ID NO: 83636 - DNA, 484 bp, Zea Mays
ctccaagtacattgaagacttggcgcaggggaacatctctttcaatgagtcataacccgttgccttttaagacaaaaatgagaaggaggaaaccccaagcaaggtagaacaagtcaaggtgggtggcctcaacaacgaggagatggcacttgtcatcaagaggttcaagctagtgtttaagggccaaaaaacgatgaaagtaagccaagagagaagcgtgcatgcttcaaatgtggtaagactgatcattttatatctaactgtccaggtaataatagtgatgactaggagaaggataagaaagagaagaagaaattctaccagaagaaaggtgaaacccacatcggcaaggagtgggatttgaagtgtagctccttcgaatccgacgatgaaggcctcaccacaatcgcctttaatagatcttctctattcctaaggtcacacacacctgcttgatggcgaaggagaaaaaggtatattctac

SEQ ID NO: 83637 - DNA, 852 bp, Zea Mays
cacctaatgggtgcatcagtgcaccttcggtgcacccaacaaaattataaatatctcaagtcaaacgatgagctcataagcaagaaccgagaacctttaaatcgattatttcaaaatcaactcaaagattgggggcttgtgggggaagtatatccctcaggtccactcaggggcgaaaactttgcccggggccacacgccagtcgcccctctatgacatcccatcgtgggccaagcaaatgggaatagtggaagcaggccgacccaagagcgtgatgggcccacacccgagctaatcgcggtttgggcatgatcgtgttgaggccgttcggttttcccgcgcccgccatcctcaaacaccagagatagctcggagcggaggcgccaggttttcctcgggacagtgaaggttgtttgctattaattaggagataagtaggaaaagtatgatcaacatgtttgcgggaagcaccctatggtcatgtatataaggccaagggggatccccttcattttcatctcacagctcggtagacaccacctgtaacaccactcatatacaaagccatcccagtaagtagggtattacgctcttcaaagcggccagaacctactgaaatccgcttgtctctctctctcgtgcccaagcacgaaccatcgagttacgatcctcgacactgtcctacccaaaagtaccacgtgggtaccccgggtgtgcggttggatacaaaacaccgacacctggtctttattttaatcacagaaataggtctaatttagtgttttgaattataaaacttgggaatttcatatcttctgcatatgaactccaaattggatggttcaaattgca

SEQ ID NO: 83638 - DNA, 448 bp, Zea Mays
gttggagtcgcattgcctggtgccaagattctggccatggcgccaccgcggaaggccatcacgccgtcaggtcctagttgggtgtggggaaaacaatcgccagttgttggatcagttatgagcgtctaggattagatctcgggtgaagggtcgtctcaaccgtagattctagagtgtgtgactgtgatgtcgtagcaacatacctcttcatttataaagtcccagccattgatcgtcgatcctgcggccgcaagcgcttagcgggtcatggagtgcgcgatctaatctggtgcgtcgggtttggatcggacggtcgtagtttcgagatacctcttcggtcgcgcaaccttgcaaatgagcccctcagtttctagtgaatcaacccgtagtacctctcgggtgtggcagagtctgggtgattttgcaagttaaaccccaagcttctctg

SEQ ID NO: 83639 - DNA, 567 bp, Zea Mays
ttcgataaagatgagcaaaaggttgtcactagctaggttgctccacaaggcatggagaatcaattcataaatcatcgcgagcggactttcagtcatggatcgacaatctcctcaaagctgaatacgtggacacaagaaactctagtcaatggggtgataacctcgcacgtcacctatctgcttttaacccttaaactgtttaaaagggtgatgaatttgatagacttaaaacgtaagcaatttctttggactggttcagagaggttaaccggcggtaagtgtaaagccaactggatctgtggtgtaaggtcaaaacagtataatggattaggcgttcttgtgacaggaatccaagctgttgactactcagaggatgacaaaagatataccttgcacaacttggacaagcgtctattcacatcaacaacctcagtcatggtgggggatgacaagtcttatttgttctggaaaatcgtttggctatggggtacaacacctagaggcacctaccctttgatctactctatttgtaaaggggaaaaattccatccaagaggctccctcaaa

SEQ ID NO: 83640 - DNA, 1244 bp, Zea Mays
atgggcgtcgccatgcttcttctcgcgcggtcccctgttctccgtcggcccgtcgaggcggtagcgtggcttctgggccgtcttcttcgcgccttgttcacgttcctgcgtctgagagcggcccacagctataggaggtcggcacggcttacgccggaagacttcattcaggtacgcggttagggtttccagtggatttcttaggttcgcattctttcccccatcttgcttcgcgtctttctcgcctctggtcccttccgagttcgtcgcgcggaagtttctgcggggggtggatttcttctccacttcgctcgcctgcgcttggcgaggagtggcctctcccgagtcgctcgagtgttcctgatcagatggatccgaaaaatcgcaaccctaactgggatcggtggggtccgaaggaggctccgcagggatcccagtcgtgggggaagaatcggaatctcagctggcggttgaagactggatccggaaaacctgatggcaaagatgacatccctgcccccactcccggcgatgtcggtcagccaggtatcctcaaaacccccccctcctaccattctgaaatctgagatcgatctggtgcgtagggttttttgccagaaatgtggtatggatggccatcatgctagggagtgttttaaatctttgtggtgcgagatctgttgcaaagaaacccacaacaccgctcggtgtgttcttcccaaacagaataaacccagtatgcctattgttggtatggcggcagatgggctagggttttactcttctcatttcgccaagccattatccaacaaacctaaacacagttttattggcttggttaaaatcattgagggtttgatcacggccgaggatctggagaaggatttcggttttcactttccttggggccgcacttggaaagctactaagtgtcattctggcttcctcatgcaattcccctctcaagagaggttggatgaaatgattaatttccctaaattgaaaatgaaattgtctggggccaaaatttctgtctcttcttggagttctcaggctaagcctaagtcaaaactgcattctgtgtggattgtggctgagaatgtgccagaagagctgcaaaattaccaggccatttgtgaattgggatccactattggggcagtggaagaagtggatattaactctttaaactctaaagaaattgtgagattcaaagttcatgtgaagagtgttgctatgatccc

SEQ ID NO: 83641 - DNA, 355 bp, Zea Mays
catgggagtccggacccaccattgataccttggaggatattgtcttccctggccacgtgacggcccttgaaccgcccacgtggaggggtcatgtgttgttcgtcacgcgactaaggatagctgcatggacaccgcaccttcatactgtagtaacgggtaccccatttccagggtactgacagtggcccccgggcccgcctcaggggaggatacgagcctgcaggtggggccaaagctggacttgtcgattggtgcgctgcttctgtgcgcttgctggcgaaattactgccagcccgccttcgaacacgccaattgccacacctgtctccgcggctgactgacccgtgacctccgc

SEQ ID NO: 83642 - DNA, 644 bp, Zea Mays
tgcagccggagcagcataacaagtgcgtcaatcgaagtcccttgttaaaaacgctccatgcgaaagacgcccaagggtccagccggacaggcacaataaaatacgccatcgaagtctctcgccaagaaaatggccaacatgcaacattacaatacaagttacagttacatacacacggcgagggcaccatatactacatcggctcaaccttcgggatgatacccatctccctataattgaatagcattatcctcaactcctcacactcaaaaagatttcgcagatccccctcacctatgctcgccccagtcgacgaggataacaattctcgtttaccaatccggtctactcgaagacggccatgctccatccccatacgacggcgcctaccacttcgcgaaaactcacccacactgtgtttcgacaccacccttcgccgcctgtgctcagcactcgcactaggaggatcagcagcctcaccaacctccgcacgtggtgaagactccgctgcggccacatttaacgcagcaaaataatccaatccttcattcgaggactcctccgtccaggaaaacgaactcccagactcaccatcagacacaaaacactcagatccagagccaaataaattattatcggcaggc

SEQ ID NO: 83643 - DNA, 331 bp, Zea Mays
ggagcgctgaaggtgaccgacatgaagatgtgccctaacagaaactacccttcagtcggtatgatgtcgaagaatggggtatctgactgaatgaggtcagcagtcgggatcccttggtgcttccaccatccaccagaaccttcttgacccgactttcttgaatcatagggtcgacaagtagagggtacttgccggagtttgtcgaagttgagccacttgtcaactcgactaaacatgatggagtgttctgaccaccgatacggtgttggggcattatgggttgccaccaggacctaccaatcggtgaggttctgctgtcttttgctctcct

SEQ ID NO: 83644 - DNA, 775 bp, Zea Mays
atcaatatatgtatttatttctctgatttttctattctctggtctaggcgcaataaaactgagaaaggcaggggcctcggggtaagataccctagacacaacgttccactgataggacggcaggttgatttattactttccagggggctcttttacgaaatgacacaggcgaaggggtatcgatgtttctccaccgttggattagaaactggcggaacagattagatctacgactccttgaaccggtatcggagacggatcgtcagatcaccatccaagggtcgggatctaacgacactagcgctcccgctcatccacacatccgcagatctacggtcctaatataatatcgcgaatgggtatgctaccatctaatctccgccatacatcaacagatcaacgacaggcgtcctttcttcctccctgcaccaaaccacggcgacgccgccaggatgccgcgatggtccatcatcggaatcgaaatccaagccaaatcgacatcacgggcgccatcaacagatctgtgacttgctacgtgatgcgaaatacaatctgaacactataggtaggtccttaccgatggcggggtcgaagacgaggctgcccacgtcgctcggtgaagttgtggcaatggcgagcaattgcagtcagcgaggccgccctccttctcccacgccgaactctatgcgatcccgttgcacgaatgacaccccacgaccgcgcgaacacccccaagcggagcttttggtggcgattacccgaggcggctcaccac

SEQ ID NO: 83645 - DNA, 856 bp, Zea Mays
ttcattttcattgtattcaaattcatagatcttctaaaaccaccagcataaccatcggggaattttagatccttcatccacttcatcacttctttccgctgtttaggtttcagacaatagtcagcttttggtttgcctccgtttaatctaagcacttgggttggacgatcacatatcatggctaagtccatgcgtgccttgtcattgtatttcgttttatccgggaaatccatgcatgtatttatgagggcttggcaaaagttactctcttgatgcatgacgtcgatgttgtgcatcaaaatcaatgacttagcataaggaagctcccacaagccacatatgtgagtctagttatgcttctcaccaaaaccttgataccttttcccactctcgtctaggacaagtttcctatgctattctgtaatttctatcccactacgtcacttgggcggtcccttcgtgacgatggtgcccttcctaaactcctttctctgccttctaaaggggtgattgaagggtagaaaacatctatggcaataaaagtaacatatcttgccaccagcactaagacgaaaacaatctgtatctttagcacaataaggacatgtcaatctaccacacacgctccatccatagaaaataccatacgccataaaatcatgaactgagaacagatacgcaacacggagattgaatttctgcttcttgaagcagtcataggcttccactccttgccataacttctttaactcttcaatcagtgattgaagcatcacattgaggcgtacaccaggatgctcaggcccaggtataacaagacataggaacataaactcatatttcatgcaaagagcag

SEQ ID NO: 83646 - DNA, 639 bp, Zea Mays
ggaaaatatggaagaccatcgtgcttcataattcaattatatatttttatttggtggtggaaccttgaatctgtctcaaactctcaatacggtctggggaacacggagtaaatacacttgagattacaattgccaatagggagaacatgcttttatgaattcacctttactgtaaaatcatcgcatacaaagacctgtgttgagcattttttgaagcatccaagtatacaaatataataaccagaattgagtttaaaagcggtgccacccacaccatgctcatgatatccagctccattgttgattcatgcccaagctttctttctatggacttgggtacaaactagaaatcactgttcttgtgtataaggaggaatcacccctttgaggaaatagttgagcaatatgagtgctctctcgggctggaaagacggaaccatgtggccagcggccctcacagtgataaatgtgaagcctcctgcgtactgctgaacatagcctcccacctgcagccatcggcatagtccacctattaagcagaaacaccatggaacgatgttactaattaatcatgcatagtccacctattaattacctccattttcgctgtccatggacgccatggcgtcgtgactgaga

SEQ ID NO: 83647 - DNA, 587 bp, Zea Mays
cagagttgatagaagagttacgcagacaatagaaggagagaactcagtttcgaggaaggagattttgtctacctcaaggtctccccaatccatggagtcaaaagattccaagttaaagggaagctagctccacgattcgtcggcccctatcctatcatcggcagaatagggcccacagcctaccgccttcaattgctagagtccatgtcagatatccacaatgtgttccatgtatctcagctccgcaaatacttgaaagtaccagaaagtcacatcgaagaagagacaattcagattcataaggatctgcagtaccgagaaaagctagtgaagattctcgattcagccatccgaaaaacccgaaactcagaagtaaggctctgtaaagtccagtggagcagagaaggagaagaggactctttgaggaaggaatacccttaccttttctcgaacccagtctaaatcttgagggtgagattcttttaagtggggtaggtttgtaacatcccaattttgacccaaggttagaaaccctaaactccaaaccccccgaattgtctcttaagaccccatctcatgaaacattt

SEQ ID NO: 83648 - DNA, 628 bp, Zea Mays
gtgatacaagttgtgtaatggagttagttgttttaggataatctttgaaatgctctgttcccctgataaatatgtatgtgttcatgatttggtaagtaagcacgtaatagttttgaattggagattggtggtttacgattcgtacgatttagtcggtgtgcgaatatacgtgcaaacatgtatgtttacaaaaatgttgtagtgaatgatatgtctcggattccgataataatgggcaagccgacgtgtatgttgtatagcgacctaggttattgctctggttaatcaacttgttagatggctttggttatgttcgtagtcacgatgatttgattgttgtagtcttaatgcgtatggttatggtcgcggatgaaaagtaatagtgctcatgtgatgtctaagtgaaatgcaaattattgggtgaaaagcgtttcaatatttattatcgtagagaatgcgttgttaattaagtatggtacttctagtgctcgaaatgacacggataaaaatttagtaagtctacttgttagttctaccttggttatgttaactctaacaaatggtaaagcgttagaataatccaagtctctagaacgcgacaattcttgaattgtatagaagctgaaat

SEQ ID NO: 83649 - DNA, 499 bp, Zea Mays
caagaataaataggtgtaaggaagattatggcaaggaaaagacttgatccgaaaagtttaagtcttgattcatctcgagattcgctttcactgttatatccttccttgttgatgttgatctttccttcctggtctcattaattcgaagttaatgtatatcatcggagttgggaaatatggttaagatagttatgggtgaggtagagtacatgatgtagatcaaaagtttgtttgacgctggatggagataggcagattatgcaatccatcatgacactattggttgggttagctcttatgttcacggttgagttggtctaatgcactaattttaggtttaagtgcatgaagagagaacaagatttataggagtaggatccagtttattttactagtgttaacttgttaagggactgtccttaggttagctcaacttaaggttagacttcatcaggttagattaacctattaggttggttcagatctagaataaatcgat

SEQ ID NO: 83650 - DNA, 443 bp, Zea Mays
ttagcacagaagtcaagaagatggcccatttcttaaaagggttaagaccagagctcaaggctatccttgccagccaagacttcctcagcttcttgcacctctcaaacaagtccatccaggtggaaagagcccgataagaggaaaggttcacctcaagagaaagtttcaaattctccaagctcaacagcaagacaagcatcagagggttcaatcttttgggtttcctcccaaggggtcaaacctcagcaagccagcaggatctgctccaccacgtttcaactagcctggtcagagttccttccacacctagtccgttgcaagcagccaacctctagccaatgcttgttggcactgtggtcaccccggtcacttcaagaataattgtccatacctaaaggcaaccacacctgcctactccaactcggtgaatggccccaagaacg

SEQ ID NO: 83651 - DNA, 803 bp, Zea Mays
tagtatccacaaccccatcagtcactagactgtgaatgatgtcgacatgtgtctcgatgactcgaactgagctctcaaccatgtcaagtggctctttttccatctctgaaactgaaaatgaccaagtctcacaatcaaaattgagatcgcaacaaaggcagggatcagagggaaaacaaggatgtggcttatagggcaaaaagagggtagcagcagattatgatctccctatttaagattaatgagtaactttgctttaaaaggatggagaagttgcttttgatatgtggattagaagtggtgaagcacttagggtggttgagtatctataagcagattatgatctccctattgatagattttctagttttcagacttaaaacagtagtctgaacatgagtttcagtattttgagctgtttttggagcccatttgtacctaatccatgaggttttaggacgtagagtatatagaggaattcaagaccacctaatggtgaacaactttatgaaaggatgatggacatgatcgcacataaaaagtgaagtaacagctgctcaaaggttggactatcaggtggctagtgattaatatatggagtatgagacccacatttggagctctctggtaattaatatatggagtatgagccctacttcatgtagaaaagttaaataccattgtcatcattgtcacgggattccagacactacaagctcaagcgatcgatcagtgatccttgggttgtggggctatggtttttggttgaggctaatgcattggcttaggaatgccagccccaa

SEQ ID NO: 83652 - DNA, 738 bp, Zea Mays
cgtgctcagtgaagtgcaaataactatgtagggtgaaaaatctggcgctggggatgagcttgggacactgttccgccatggccatcgtacccacttgcctcacggctgatcagataacctcaccggagttggccgcctgccgctcggtgtcacgtgcctaagcgcaataccacgtcgcagtgactcgccttagcatgtccggtcatcatcggtggtcttgccacggtgaagtgccatggtaaccctgcaccagtaactctccccctccccggtcgccagcgcaccattccaaaatcaagatctaccgccctcgaacactataaattaagcatgccatcaactccgttgggtcatcacgaagctagagcacccgctcctgcctccgattagccactagagagctccaatttcttactctccccaaatcagttttccgcacatcgtgaaccaccgcatcgtggccagccttctgtaggttagctcaagcctccttgattgatgttctagcctccctcaagttccctggtactcatagaccctttggattgaactagatcgctctggataacccaaaacacgtcggtgtgttctcagtttcctccgttgtcgtggacagtgagttcccaacccagaatgttgcaattaaatgaggggttaatgtcgccagggttgaattagatgtcagctgagttaggggcccggtcttggcatattccggccggatcatgctcgccggag

SEQ ID NO: 83653 - DNA, 374 bp, Zea Mays
ctctaaaaccgaccctatccataaaacagatcatgtatctaaaccaaccatatccacaaaacaaatcctatctctaaaaccgaccctgtgctccatagccgccgctctggttcctgccgatttgtgcctttgaaaaccataacttgaggtaccttccataaaatgggcataacttttcactcggtgctccgtctgagctcaattttttatagaagattcctgactccattctggggtgacccaaactcgccttcagcctgtttgattcggtcaaaaattcaaaaaaatcgggaagataattaaaaaattgtttaagtgtttcaggaatttcagagatcctttgtgattttctctaggtcacaatacaactttgt

SEQ ID NO: 83654 - DNA, 458 bp, Zea Mays
taggaggatgttcctgttgtccacaatggtagaggaaagagtggacaagagaggaagatgggaagaatagagtataccagtgtctagagtagtgtggtcgaaggcatctgaatcagccacctagtcggtgacagtaagaggggtcaaggtcatcgtactagagaagctagcaagagaccgctgatccgacccatcagacaatagggtccatgacaaagcggactagggtggagaggtagaagtggtaggcgctggtggcatagagggtagatggacgaggggataccctagaccgagtagcgtcaagtgagctagatgtggtggagggagacactaggaaggtccatccagagctaggttgggccacaaggaaatgcagttgaaccatgagttgtagatggagggtcaaggagagtagcctctgtgccatctccatcaccatgatctcctggtcgccg

SEQ ID NO: 83655 - DNA, 508 bp, Zea Mays
atttgagcccagccgatgaaaattctacgcctggaaagtattgtttggcctaggcaaattttcagactgcaaaccaagcataccctaagtcatacgcgtgcaaagtctaagtttttgcatggttgtggggaaacagttagcagttcgttttctcaaagcttggctgtgcgcagcacaagacgagctattttcctttgtggctggtggctcgcgcgggaaggtgaaacctccgcacgcgctcagtatcgacgaatcctctcgtacttaagctgatttcgttgtgtgtccttccttactctttgagctcgttgccctcattcctctctcgtgagataccggtggtgctgagcagtggtgtgtggtgccggcgacctccatcggtggccttcgactctgttcgcccaacttcgagactcgtcggcgtgacgctgctccagcgactgcaaggactccgagctgttggacttcttcctctcctcttcgtccccatctgctcccccaccatgcc

SEQ ID NO: 83656 - DNA, 524 bp, Zea Mays
tccgcgcagttggataacatagagaggtcagaaatatcaccccgtggatgtactccggccgctattttactccggccgtcgtacccgctcgtgtcacagtcactctggataggctcgccagagttagccccccacaactttgcgccacgtgcctcggtgctttaaccacgccgccgtgagtcatcttagcccatccggtgatcgccggtgagcttgccacggtaaatgccaccaatcgcttgcgccagtgcacctcttcctctccgaccgccaccgtgcgagctgaaattcacgagccaccgctcaagagccctataaattgagcacatccttggctccgctaggtattcaagcacccagcacatccactcgtgcctccaattgttcacctaagcccccgaattgcacacttcccccaaatcgggtttccgccactgtaaaaaggtcctcaccgtggctagctcgtttcaggtccgatcttgtcctctgctctcttatttaagcacccttacatgcccctgatg

SEQ ID NO: 83657 - DNA, 384 bp, Zea Mays
actgaattaggggaacctctaaattagagctctctggtggacaatccgagacacgggtgggtgcgctggatgcgtgattacctaacgtagctagtggtatgctcaatttatagagtccaagggcggtggctcctaattttggaatggcgtcctggcggccggagagaaggaaggttactggcaggtgatatcgtggctttcaccgtggcaaggccaccggcgatgaacggacacacttcagtggtttactgcgacatgttaaacctcacaggctcgtggcacccgagtgacgggtggcaaaactccggcgaggttatctggaccggcgataaggcaagcgggtatggcggccagctcccgatctcatctacggtgaagatcttt

SEQ ID NO: 83658 - DNA, 339 bp, Zea Mays
ttgcgagtgaactgattgatgaagaacattctgtcaaaaccactgttatgcatctctagccgaaattgcagagactgaaactggaaataaaattcatcaactgaaccagtttgctttagagtgaacaaatcctgcatagcatgatcataatcataagcaccaaatttatcctccacatcggtcatgaattgggcccaggaaggaaaacccccctttgaggcgctgcacctccatccacctcccagcattatccctcatatgcattgttgcagaagtaacccaaaggtgctcaggaacattgtagaacagaaagtaatcctcacactgccggcgccagat

SEQ ID NO: 83659 - DNA, 549 bp, Zea Mays
atttggaactgtgattcagggggtccaggcatacggcgtggcttcccaaactaaatcctgcaggtcctgttgcatgaatcaaaggatggcagataccagaccatgggtcctatgggtgcgctactaacacttcaaagctgaagctgtgtgcaggtccaggtcccaatccagacgcaggtagtctcaaaccgtagagactacctcctagggaccagtcaactaattttcccttaggtatactggtatccagcctcgacacatcgagcctacatcccaggggggccaagtaccagggaggagttagtagcgctacacacagcaaggacaaatagcatacagataagtgttgtttgattaatggtacttaaaattatcttacaaagccaaaaattattacaagccgctccccagcggaacccttgccctgtttctgtagatctagctactcatcatcaacaggatcccgctggaagcgttcggccaccagttccatggcatcttgtacgccctcccaagcgacgtcttcagtgtcggccaccgaactagcga

SEQ ID NO: 83660 - DNA, 993 bp, Zea Mays
tacatcatgaggttcaaaagctaaactattttgaggagtacaacttcctaacacttctactgctaacacaacttatcaacaagcaaccgaggctgcactagactcaggtgacgagggtccactagagtgagctaagtcgatagtgtccaagctagatgttgaatagctactcggggtcctcctactgctcgatgtccttgtccacctccatgccctgccacatctcctgatgatgcatctccaagtggacattggtctcgtccagctcaatctgcaagttgtggagctggttctccaggacttcaatggtgttgtcctagacctccgcttgctcctcgagctcgcaggtgtgggtgcccatctgctcgatctggagatcattctccactaactcaaaagacaaatccaccacaaagacttccctgtcgtcaagggttgtcttagtagtctgtgtcaggcccgtcaggtgtggcatagcctcaatctgcaagacctataggtgatacaatgcattcatgcactggaccgtcaatcgaggggccgactcagggtgtagtgcccatgcatcctttgcatggctcactttgtcgcgccacatcgaatcatccttccgctcggtaggaaagagtctgaggggatgcgtcagcatctctagtgggtgaaacccacaaaaggtcatcaaagcccgcagggctgtggccttcgtggtgtcgtcaactcggaatcagacagtcttggagtccagcaagcgccaacccagctgcaaagggtgggccacaaagtcagccacaccctgcaacgaggcactcagtgcccatcgtgcaattgtattatgtactaaggaggcgtggggtacccagctgcgctcaagacctcccacaagaaagaggggaaaccctcccatgaaggtagtggaagctaatgtgggtgtctactccatcagtgggtgtaggcaaagccatccgtgcaaggataagtgtaagtaaggggaaa

SEQ ID NO: 83661 - DNA, 441 bp, Zea Mays
aacatagtatgcgattaattggttcgtaatcgctggctgtcctgtcttcgtctccaaactgaatgctgactccccgtccgtttgtaacggcttctggacgtgttggttgatacgatttgtctttgactttcctttaaagaaaaccttgtttggttgcacgagctgtgaagctcttctttcctcaaaaaaagggaaagaactcttagtctacttctgaagctcatgttcagatgagggggaaaaaaagcttccctcgatggtccaagcttggtttgaatacaagagttttcacagaagaactatgaattcatgttattctgaatacaagagttttcaaataacaaatccgaattcatgttattcctcgtgattataatgggtcatcacgattcgttcttggcttgaaccagtagtgattgctttctcatactagcataaagc

SEQ ID NO: 83662 - DNA, 403 bp, Zea Mays
acttgttcttgatcgtgacttcattcaaagctcgataatcaatgcacatcctcttggtgccatctttcttctccacaaataggacaggggcggaccaaggcgaggtgcttggccgaatgtaacctttctctgacagctcatcaatctgcttcttaagctcaaccaattctggtccagatattctgtaagctctcttaaagataggggcggttccaggaagaagctctatggcaaactcaactttccgctctggtggcatacctggtaaatcctttggaaacacatctgggaattcggaaacaaccttgatactctcgatcgggtctgcttcactgctatcaacggctctccgataacaacttcctttctttggctcaggcaagactaactcagtcaccacttc

SEQ ID NO: 83663 - DNA, 773 bp, Zea Mays
gtaccggccgtaatacccaacaatttgtgctctaattcggtctacgcctaattctaaccttggcactccactggggatcactaattgagcccgatcacctttctagagctcgggccacgtacacccgcggagcttaagacattcccgacgcgttcctagtgatctaacgtggtatagcttaattggttgagccgacgagcatcacaagcatgtgtgggtgttgaaacacggacaaggagggcgagagcggacccggaggtggcttgccacgacgcggcgtcacacggcggcgcacaatggatttgggggaaacacgaaattagggcgctacggtggacgatcgggagcgaggagtggttcacttggttcgtaacgagtaggcagaacaggaggtgcctctaatttatagactccggccaagcttatcacgaattttggattgagattgaggttacagcggccaggatattttacggtggcttgctcactatggcgcgcgagagggaattggtccagggacgataaccggttgcttgccacgacccttacgacgcggaggagagatcattgcgtgtcacggccggagaaacggtgagctccggtgaagctaacgcgactgaccgcgacgggacacgatggccggtccggccagtgactgggttcaccctccctggatattttcaccccatcccggcgttatctatctctcccgtggcacgaatctcccaggcgagcgcgaattgcggcggaagatcactggcatcaggttcatg

SEQ ID NO: 83664 - DNA, 704 bp, Zea Mays
aaaagtctagttttgtgtgaagccacatgccacccaacgaggtatcaacaagggccaataaaaaaaatgtagccagcgaggattttagtcatcaaaggtggatgctacctttcaaattcacaaaaagtgacctgcaaacaacactaaaaaaatgggcgccaaagaagcggtctctctgaaaaaaatcaatcatgtgttgtgcaaattcaagtaaagcagtttgaaggcggagggtagctatccaccatcctcggcaaaagtgatggcaaaacaatcgcctcggccatattcccaaaccttacccccaaaatgttagccatatcccacattccccattgaaaagacgtgaatggcatgggacacatgactgaagggaggtctgatgatggtccgcctagcttcaagaggtcataaggaagtgctaacctttgatacgcagacaatacgaggaagctgaagtacaagtgaaaatcgtgttgaagattcgagaagtgatgctaaacataccctttagtggcaccgttgctggctatcatataacttggtgacctaaaggaaagccaacattttttttaaaaaaaactttgttcctttcattctttgaaattttcgcataagtcctcaatctaggagtgacgtttttgttgtctatttgacaaatgtgttttactagagatatttacccctttgtagtaagattttta

SEQ ID NO: 83665 - DNA, 828 bp, Zea Mays
caaagtaaaggacccaagggaacactactgggcatcgatcttggaccatgttcaggattggcccttagttcggtgatagcctcagacaaccgaagctaccaaaattgcacgataataaaacaggaagaaaccaactaccacgattggaagcgcttacgcaaggaacagtctagtagtggtccgacccataaacccggtctgctaacatacaactcgtaacccgatagggtcgccaacataaacctggtctctagaaccctctgcgaccaagcccggtgggtgccacccttataaactcggtcccttgtgatctccgtggcaattacattgtgtgtggaaggaaactttgaaaaaggaaagctttggaaaagtaggagggtggaggagcagacaatattttgatgggatctatgcagtcggatgcagttggcttagtgtgacctggtcaagtgcacatgggtgcgtttgtgtaaaacgaggatgcgatcggatgtggtcaggtgaagcttcacctaaggtgatatatatcatctatactaatctattaagaacctgcttcatcatccgcggtgacactataggcccgccccacgcgccccacctcggcggtgtgccctctgggccccacgcccagtgatttctcagctactatcctgtggacccaagcgtctgtctagcacccgacctcggcccgcgtagctacatcagaccacatgtaccttagtgtttagaattaaacaataatttgctctagaaatttggggctaaccaccagaccacacgtacattagtgtttaaaaataaacaataattatatgtgaataaata

SEQ ID NO: 83666 - DNA, 273 bp, Zea Mays
aaccactgaacccattgtgaaggggtttgatgcacagcacaccttaagaacatttcaaggcattggttaattctttcagtttgtccatccgattgtgggtggtaagctgaacttaactgtaacgtagtgccagtcagtctgaagagttcctgccaaaaatggctagtgaatactctatctctgtcagaaacaatagaccttgggatcccatgtaattttacaatctgagaaaagaatacttgagccacttgagcagctgtgtaaggatgtttg

SEQ ID NO: 83667 - DNA, 837 bp, Zea Mays
tcaatcttttcatttgtagaaatataattgactttggtgaacatcgtgccaattgtcgtgacatacaacaatcttttgctgatggcgcgtgtctcgacaacgtgtttatgcaatgcttcattgagtgtgtccgcgatgactgttctaaacatattcctccactgaatgctcaccagctcattctagatgttaatgttggggtatgacttctacatttataccactttttaaaatgtatagcatatatggaaaatacataatactactctatcctattaggctatattgaactttgaggagcaggagcaacatagtaagtctcctcatccatttgacccttcagttttggagagttacctcttgaagacactgccttccttcaagcagctggatgagtacaaatcagtaaatttctgttccctgacccatcacactctcactgcattttgctgcatttaaatttcaatcaaatcatgcatatcaaccatagtgtattcaacattttttatttccatttttttacatgtagataatggtacccatgctacgctctggacattgtatgttgttaatcttcagattggacgcatacatgtgttagattccaacctatatggaccagagatgggtgggactatctggaagaattaccattgtatacctatggatatgggtgataggaaggtttcatgggccaggttaataatgagtaggctcaatctagccatacaaaatgctcgaccaagatcagccctccctacttttttgaagtaccctattgaactcttgaataactgcccaacaatgaaattggggtctaatgattgtggattcttt

SEQ ID NO: 83668 - DNA, 639 bp, Zea Mays
ttcaaaccaaatcactcattccctcgtccacccacttatcctttcaagccaccagtttttatctgccccacttctgcccccccctcagaataatcagccgagtccccctggtgcttgtttcccagccctacctagttcctcaatggctgtttcaactatgggaagtccagacacttcatcaaggactgtccctatccaaagcagaataaatcaaattctcaacagacttctgagagcacgtctcaaggcaagggaaatgtggccaacagtcaagcaggcaaaaatacaaggaaaactgggcgagtctactacacacaagtggcgaccaccccagaaggagaaccggtaatgatgtgtacatttttcgttgccaaccatcccgccatcatccttttttattctggtgcgtcacatactttttatgagcaagacttttgttgagaagcattgcatacatagtattgaatcaaaggagggttttgttattcaatcacctggggttcaaatctttacaaaggaagtggtcttccacgaacccgtgagattggctgggcatgagttccctaccaacatgatagttataaaggggcaagatgtagatgtaattctaggcatgaattggttagcccagaataaggc

SEQ ID NO: 83669 - DNA, 1086 bp, Zea Mays
ccgttcggtgacggatatctcacgtttcgattgctcaatgttgaaattttcagtaacttcatcaagcttcttttccagtcctgctacttcagatatgtgtaatcccacatgaatagataaagcatattccagatcagctatacgttttacatctgcttcgtttactttctcaaattttagaatcttttcgtccacttcagagagtttggccaaattagctttgcttgtctttaacctttcgaccaaggaaagcaggatcttatctttctcagttgcctcattccgaagagttattataacctctgagcgtaaattctcgaagactatttttgtgctctcatcctcacattctttttgagccttcagagctttacttaaaataagtccctaataacaaaagaagtgtttattaaaacaagcaaataatatacttaaaatgattaccaaaagatcgagaggaatagtaggcacaaacctttagactattgtatgctaggatgtctgccagatggtcattcggcattaacgatagctcaagctcaagctttggataacccatgttgtccatcatttctcggcagacatcaatttctttcctgtcaggaaggcagtataggaagtcattctcttcatcgccttcgtacactagggacccttgaggatacttcagttccctagcgtaatgttttcagttccctagcgtaatgttgggctttggcaatttgcctttgtgtcattagcttttccgaagcgtggaggataataaaatcaagatcttcgatcgaagccacttcgggtatcggcagtgataacttctctggcaggctctcctttactttctctcttaacctaatttcaaaaggtctaggagcagcgcctacgtagataactttttccaactctccagtttcatctatgcccatcttagcatgagcagtagtcatgttcaaaggcctcaggacagcgtttagaacgctggccatcctcctccccttcctaggagtcgccgttggaacggttgttgtctttggcaacccagcattgctagagaactctgcagcttcggttgttgttcggtcttagaac

SEQ ID NO: 83670 - DNA, 675 bp, Zea Mays
ctcgtgcttcgattttcgatagtaaaatggctctcactctttgatgactctcgatgatgagctgttttttaagaccgtttagtacgccttcggaaccctgccaaagggggcctaacaaggagcagataggctggagatgggccagtaagatttgatcccgtgcccaccaccgcatgcgtggcatggtgaaaaaatgtactacccttgaacgcgttgtctgttctgcgtgtgcagctgtgcgcttgcagcatcagtgcagcgacacgcttcctttacgtgtttgtccgtgtctgggtgtctctgctgggaattctcctctgcatgtatcggtaaccggtttgctcctggcctcttgctggagccggacagcacccaaggctctggctctcacaggtgtcgtgttggcgctagccctttggactcgatgatagtaccagcatttcacccgagatgaagaacttccaacagaacaaacaccaaggtatacatcgaaaacaggatggtaacagctaccagcaggtcatgtagaatcttaccgtgtgtttggttgcccgtgtcgcctggtgcatggcccatgggatgcagaaataaaacaaactcattgtttggttgcctgttttcatttttgggccaggccacacgcgtgcaaatacccacgctcatccagacccacgg

SEQ ID NO: 83671 - DNA, 403 bp, Zea Mays
cgtcatgtagaagagttgtagataacattattatcttgcttgtactaaaatttgacagccataaacctgatcgtttaggagttgtgtttttcacaagcccagcatctgaatctgtcgaatttcagaacagatttcagaaattgcaatggtttcttaagttaatgttgaaatcagttatttgtgttcacaagaaagttgtagatgcttttctcatcttgcttgtgttaaaatttcataaccataggcctgacggtttaagagttatgaaattcacaaactggttgttttgttttgtcctctatctgaacagatttcgaaaactgtaatgtttgatttgattaaacctggaatcacttcttggtgattataaaagttatgtagcacttttcccaagctttccaaa

SEQ ID NO: 83672 - DNA, 1074 bp, Zea Mays
ttaaaaccggtgtgacaaagggaaagcatcaacagtactgtgctcaatctggcccgagacggcccacgataggcgaaacgcccccgtgcgcacccatgctgatgactttgcgcaaagggccctggcgttttaaacaacttgaaaagagtctgaagcactatttcctgagtcactgacaattgcaccgagaccctcgcacttctattccttcacaacgccaggtccacgatgctgaacggcggagcagtggctccggcgagcctgtaccagccaagatacgcaatgaccggtgctctgaagaggttgacacctaattcgacccctaataatcatttcccctcaaccaatttcaaggttctaggccccaatctctgtgcccatggtgatagtgcgatcaacggataacttgaagagttcccggtgatcttatgggttctagcttaatcggccgggtcgagaagcatcaagggcacataagggtactgaaacgacgaaacagagggcgtgaacagacctgtagagtgttgggccacagcgagctcactcagaacggtgctctggaccgatttgggagaagtctcaaattggggctctctggtggataatcggaggcacgggtgggtgtgttgggtgcttgactacatagcggagccaatggcacactcaatttttaggattcgagggcggtggcccgtgaattggagatggcgcagtggtggccagagagggaagaagttactggcgcaagcaattcatggatgttaccgtggcaagaccaccggcgacgaatagacatgctaaggcgatgtagtgcaacgtggttaaagggtcatagcgtgtcgcgatcacggcggacgatgcatacctcgacgacggtcgcttgaccatgtcgccggcgcaagtggacgagtgatagcgcggccacagtgtcctgagctcatccgcgacgagatcattttaccgttgagcgtaatccatacatccgaggcacgaatcgagacggctggcgcgaatccgggcgcacggctcaccagcgacgaggggagctgcacctaggatctgtgtcagttactg

SEQ ID NO: 83673 - DNA, 290 bp, Zea Mays
caacccctcggcctcggctcttagcaggaaatcagcaagtgcaagtcaacaatgcagtacattgtcatatcactcacaggacgccaagacgtctaacttgggaatacgacggcccctggcttcacagcatacatcgcataggtgtaaattagggcaatggtagttcttccaagggcaggcgaacactcagtagttttcctccaaatctttcggtattggcacttgcctcaatcagttctagggacctagggacttcccctctcccgctgtgcttataaaccctactacag

SEQ ID NO: 83674 - DNA, 584 bp, Zea Mays
ccaagggctgctctgcccttctgtcgtgttagacgtcccgtcaggggatggtagacgacatgcacgcatagtggcacatgcgtaatcatgttgttgggcttggacaagaccgccgtcttgttgctgttgtacacctatagcgctatacaaggtaggtatgtgcattgaatgcgggtgtcccccgttggtcttcggacgtgctttgtccttatcgcctgagacaggctcggacgagacggattcgacgaccctagggtgaggtagccttgggcaaggtggagatgggggaacttagtcgtgagaggctcgggcgaggcggagacatgcccgagtatatgactactagggattgagctcgggcgacttagagattctgatggaccatccgggagggggctcggtcgagacgatgcttttatggggaatacctccaatgtggacctcggatgaggcgaagacctggttccatgctcttggagggcatgcctgggcagagaatcttcctgagcgcgttttgagggtataattcgggtatccctaattatcacacctgacacatatatatacactataagacatccatt

SEQ ID NO: 83675 - DNA, 371 bp, Zea Mays
gtgtttctgcccttgttcaaacgtctgttggtcgacctaaacttgcatatcttggcaaggatcctgtgtatcgtctcttcaccgtgccaagggctctctgtcttgtgtgagtcccgagtgaagatatggtctgggtgggaagatatggtggtgtgaagtcagctctgtatgcactgttcaaaccgagacaaaacccatgccaaatcatgtcaaacgattttggtttgatttcaaacttcaccagagtgtgcctagggtattttggcgccactttgatatttggactttgtggattagagttttggaaaatagggaactcatctgaactttgggaagggtttaaaattcagatttctgaatttctaaatttt

SEQ ID NO: 83676 - DNA, 431 bp, Zea Mays
tgcatttaaggcaacaagattatgtcaacaacatagatcaaatacaacaaaatatattatgttatctgttaccttgtttttgggactccataattgcggccctaaaatatgggttatcgacctttcgatccgggatgccaatggcatgacaagcctttgcctaagccctaccaagaatctctttcgagctccttcccttacttgtccagggaccagtatctatcatttgttgccttagtccataggctagcaagattgtagtctctaacacgttcaggtacttgttccctactccttcccatcatcctatcaagtggcccttgagataccctctggctggaggatccaccacccctgtcataccttgcaccagccctctgactaaattcgtgctccacacgtgactgatgcagagccgctttaagttcatc

SEQ ID NO: 83677 - DNA, 538 bp, Zea Mays
ccgactttggtttgtgcagtttctgagctagagctaggaccacgccctatatagcacgccaaaatgaccatatgcatgtacttgtggatgtttgatgaaatatatacaaatttttagacaccccgaccgtgagttgactacgcatgcagaagtaatgacagtctcttgtgaatcatctttctagatagatctggtgtccgaggcttccacgtaaataaggtctgaaaaatagataaacaagatacgcaaatgcagagatcctctccttctccctgccgagtctgatagccttttatttattttttctttctttctttctttctccatcttgttcaatctcttgtcttgtctaagcatgtgggtccatacgtttatgcagcctgtttctctccctccaaacgtccttttttcaccttttttcctataaaaaaataaaagaaaagaaaatacaggtgctcacatgggacaccagacacaaaagaacaaaacgacataaagcacagaagatcacaaaatagcaacatgcggttcctctatt

SEQ ID NO: 83678 - DNA, 277 bp, Zea Mays
gctagagagcatctgctcaaggccggaccagaggaggtctcgctgggggaagcgccgacctgctcaatccagggcagaggcatggagcgcccaaggaaaaccaggaaagagggagcgcgtggggagatatactacgccatgggaagagagggaaacgctagggagctcgaccaacgaggttgctggccgaccatggagacctcctgttgccgagcaccatggagggagctggagatggcgtggggaacagtgggagtttcctgcgcgcaggggaaga

SEQ ID NO: 83679 - DNA, 804 bp, Zea Mays
aacaatttcgtcacagattagatttgatatcgtcatcgctaatttgccatgtttggctgacgtaatgatgaaataaattggtcacagatgagttttagtaaaaaacgccccacgtgtacagcacttgacggcgtgggatccttggcctacatgggccgcatttttttggtaaagtgggacacagcccctgcctggcgacgcggcctcgggccaccaactggaagtggcgacgcgcggcccgacgacgcgtgtgctaagatttatttggcaaaaaaattgctcccgcggagcttcgaactagagacttgcgccttgcttcgaatcagtgttaccactagactactcgcttgttcttataaataaagaaagttagagtgcataagttggtcaattgggcctaatcagaacagaatcattagcgtagtacctgttcccatctgtcgttctattaaggtgttcctagccgccattctgcgatctgcatggctgttctgcttctgccttctgcgatctgcgcttctacgttatatgattgacgatctcagtctcgacccttaggttacggcacacaacgacgccggtgtcggtcgtccgcttgatcggcaactgggtagcgtcgcagcgaacgagcgatcttgtcgcctgatccattgatgcattgagtaagtccataagttttgatagattaataattcatccattcatcaagatgcaaattaaataattatctttcaagatgcaaatagtatggtaattatctttcaatcactgtttcttgcaaatttcatatttcatatgtttggg

SEQ ID NO: 83680 - DNA, 361 bp, Zea Mays
aaacaatactacaaaagcgcacgctatgcagcatcctgcatggatgcctcggcagtgtctcgcttagtgataaaataatgctctgagtaggcctctgcaccccagagatcatcgtccagacggcgcaccaggcaggtagcctcccattggtctgggtataacccacgacggtgctggtagactatagtgtagtactcgatggaccaagtgtgtcggtcgagggctcgacacagcgaagtgtcaagagcatcatggaaatgacaaccgcgagcagcatcacgagtgatgggtcagacaatccatcctttcgacccctgctcctccaaaagctttgtgctgtggcccaaactgccaccgtcgt

SEQ ID NO: 83681 - DNA, 610 bp, Zea Mays
gtaactcaaaaaccatttggaacttggagaaaaatgtgtgctaaattgtgctgtcagactagttttctgagtttggttcagtaagctgaaatgcagtttcagttttcttcttgcccaactttggagctctgtggtacctaatccgtggagaattgggttaaggattttatagcaaaatgaaagccataaaattgtgaatagcttctcttaagtaagtggggcttggtgctgtacaaagtttggagtaaactgtcccaaaacattcactgtcaggtccttggtttcagtcatctaaagaagaagaattcagtgaggtttcagattcagagaactgaaccttgttcaacttggggcctgtaacttttgatccttggctcctggaccttgagttgctgcagtataatagtagagctatatttggtgaacagcttctgttaagataagtaagtgtagtgctatatgaaatcgggattaaattgtgctcaaagtcaccctgacagtcggggagggtgtctgcacattcagttcagctaactgaatttgattcagttcacgcaggtgcaatgcacctcgccgccggtgtgatgtgggccgtgggcgctgtgattcg

SEQ ID NO: 83682 - DNA, 291 bp, Zea Mays
ggggagggagagagtttagggtttaggatggctctggtaccatgttggattgtgacaaaacctaaccctaaccagggttggagttgtattgatagattagagtacttgggcctggcccattacaaagggatagtctaacatggaggatgagttgcatgctatggctcttgcgacggcagagacgacctggctacggtggttgtttgctgattttgatgtttttgtgtctatgcccactcctcttttgtctgacagtaccagtgttattagtattgcttgtgatccggtaaa

SEQ ID NO: 83683 - DNA, 358 bp, Zea Mays
attttataccctgtcacaaaactgataatgcttcacatgttgctgatttgttctgcactgagattgtgcgtttgcatggtgtgccaaatactattgtttcggatagggatgctaagtttttaagccatttttggagaaccttgtggtttaaattgggaacaaagttgttgttttctactacttgtcatccccaaactgatgggaaaacaaaggttgttaatcacactttatctaccatgttgcgggctattttgaaggataatttgaggttgtgagaggaatgtttgccacatattgagtttgcttataacatatcaattcattccacaaccaagcttagtccatttatggtagtata

SEQ ID NO: 83684 - DNA, 635 bp, Zea Mays
gtccggtgcttcctcgtggaggtccggtccaactgattgcatcctaggatatatcatcttttttggccacgtggcgcccctggagccgtccacgtggtagggtcaggtgttgttcaccgcacggctagagattgtcgtacgggcactgtgccttcatactatagtaaggggtacccctgatttagggtaccgacagactacatgtgtgaagtgctactagcaaacatggtttatgcatatgagaaataaaatgcttatgaggcttaggctttaaggaaaataaggaggggttaaggagtttagggtttctaaccttggagccaaaatccgggatgctacaaacctacctcacttaaaagaatcttgtcctcgagattcaggctgggttcaaaaaaaggtaagggtactcctttctcattgagtcctcaatctcccaggttgcctcctcttatccttatctgctccattgaatcttacaaagccttacttctgagttctgggtctttccaacagctgagtcaagaatcttcactgttttttctcggtactgcagatctttctgaatctggaccgactcttccgtgatgtagctctctagcactttcaagcattttcgaagctgggatacatgaaac

SEQ ID NO: 83685 - DNA, 565 bp, Zea Mays
gtttaaaacgaccgagatgagacaaccgctttgtatcctttctccttcgttttctttttttttgtttctgttttttgacgtaaccgaaggagaaaaacaaggaagcggcgttgactcggtttgttttttttgtttttttacgtaaccgaaggagaaaaataaggaagcggtgttgactcggtttgtggcgttgactcggtttgatgtaaccgaaggagagaaacaaggaagatggttgcggcacgctagggtttgatgtaaccgaaggagaaaaacaaggaagatggttgcggcacgctagggtttgatgtaaccgaaggagaaaaacaaggaagaaagaaggatggtgagaaaaaacacaatgcgaccagcaacaaatgacgcgaaagcacacaaattcaacaatgcagattattgaaagaaggtgcgaggctcaaaagggtgctggtataaggtctaacctgaatttttatgtggttttgtggactgtaggagaaaaaaacactcgataaactcaccgatcaacctggaaatttgataccacttgatagagctggagtgcccg

SEQ ID NO: 83686 - DNA, 1086 bp, Zea Mays
ctgtggcatgcacctaccaatgcaggagcttgaggacacgtcaagaatccaacccttaggtgctcccatagaaaaccatcgttcgctcttaggtcctagaatccaagccatcgtcatcctcgtctaggaatagattccttgtaggcttggggttgtggtcgttcttcttctaagaccatgggtactgctgtcgttgcagacgttctaagcgccgctgctcggggcattgctagtcaaggcacaattggaagaggtgccgctaaaagtgctcggtcaagtccttgacctccctacactcactctaaaccctaaaacccatggatatctaatgcatagggcagtacttcacgatgctctcgagcatcaggtcgggctgcttctcgcctgacgggcaggcttactatggcttcccattggggcactgatttgggggcccttagggccttaccttttttccttttttgtgctcggttcgggaggtcctgatgcatggcagcctcgactacatctcacggggaatgtgccacgttctaccctttgtcgtacatgcacatttgtccaccaaagagaacagctctctagtgtcttgaatgttatgggtggcaagcttctcaagcatttccttatcatggtctctcctcttatataccaagggaggagagaggttacaagttaatcaaactatagatctggttagctaagacctaacagccctgatcttatcctggtcgtgaagtgtatgtagagtcatgccttcaactgtggcccaatgtcagggatgtccttctctagtggatgtcaaacttgtcgtaggggtaggtatgttatgttatattaatggacaatagtgtcgatgtctctcggtgcaatatatttgataatcaatgtagcaacttgtaattgataatacgttacaatacattggcacgcccacacatggttattaggtcgacgcacttaccaaaaaatggtcttgagtacactaatgcctaagtcgtggcgatagtgcgcttgtcagacattgttgtacatcacatttaatgtgtcgtacggagctttatatgatgtgccaatgttatgggcttg

SEQ ID NO: 83687 - DNA, 593 bp, Zea Mays
aaaatttcagtttaaggcagattttaagggatattttggagatgctctcactaacgaacacctgagtgagctgacggacctcgaccacgccacacgacaatggttatgaagggaagttattatagccgaatgatgcaataagttacaaatttatggtagtagccttgaaacacctcacatcgacaaaggccctatatagccttctcggaaaacaatctctatcaattgttgcatgttcctactactctttactgggttatagtcaagaagattctacaatatctaaaattaagttcaaatgtcgggtcaaagctattcaaatcgtcctctttgacagttagtgcatattcaaatacaaattggacgaagatccaaaggaggttttgttgtgttttggcctccaatatcatctcttaaagtacaagaaaataggccactataccgagatcaagtaacgaagcagactacaaggctttgacacgtgtggatttagaacctatcaaaggagctaaagattgaaagtccaaagatagtatatgcgtggtgtgataatacaagagcaaaatattaatattccaatcgtgtgtttcata

SEQ ID NO: 83688 - DNA, 357 bp, Zea Mays
gagagggccgccttagggcagggggatggaccgatcgaggaatagaagggcagactgagggacgaccggacaccttcagacgggacgaacccacaaggacgaacaggaggaggagcgccgatgaggactaagctccacttccaccccgataagagatctaggagcctctcctccatctctcgacttcttgtaacctccacaaaaatatgttttaattgtcgcatgcccaacatctgtgcctatgttcactaccgaggcaaccatcagatgcgtgtcaacacgagattgaacagactttgcaggttggggcacacgttatctccctccctaacaccttccctccatactcactcgtct

SEQ ID NO: 83689 - DNA, 306 bp, Zea Mays
cttccacactaccaagttctagacatgaccccttcacatcatgcagccaccacttgcatttgtatagggaaaggaatcaacacacaaccactatcgcttttatttcttgcaggaccccttcttttgtcttcagtacttcctctctgccttcatgtcttcagtgatctggttgtacaactaatcaaacctcctacatgcacgaccattatacgaaaactagccttcactactagcctatcactgtcggttgcttacaaaccgccaacgatgacttttcattgatggttcttaagtcaaaaatgatcg

SEQ ID NO: 83690 - DNA, 1047 bp, Zea Mays
atgtgccgctgaccgacaaaaagagttgccataagggccgacttagctcacttagtagttgcaggtttcattagagaagtaacacatcccgagttgcttgcaaaccctgttcttgtactgaaaaagaataaagttgattggtgcatgtgcgtcgactataccgatctcaacaaacactaccctaaggactcctttgggcttcctagaatatttcaagtggttgactccactatcggctgctccatggtctccttcctagactgttaatcgggatatcgctagatcagtctggcggaaggccaagaaaaaacgatgttcattacgtccttcgaggccttctgttatacctccatatcgtttggtctcaaaaacactagagcgacctaccagtgatccatccaaatgtgcttagccgaccgttggggcaagtgggttgaggcctatgtcaatgatgtggtaatgaagaccacagacccataaaacttcattgacgacctccaataggtctttaatagcctaagacggtaccgctaggagattaacctggacaaatgtgtgttaggggtacaagttaggacgcaccttggtttcatcatcagccattggggggatcgaggccaacccagagaaaatcaaagccatcctaaggatggagccaccacgatcggaaaagaaggtccagaagcttactggcggctcggtgagagaggcatgctgttttagaaactacataagaaagtggatagattccagtggacccctaaagctcaagaagcatttgaagcactcaagaaatccctgaccaccccatcggtcctcaaaccacccaatcgagccaccaccgaccgaccggccaaagatctgttgctgtacatttcatgcatgactcacgtggtaagcaccatgttagtagtcaagcggatagaagaagggcacgcacatcaagtccagcacccccatgtaattcatcagcgaagtcctcgagccctacaaaatcagataccctcaagttcagaaactgctatacgtagtactcctcatcgctca

SEQ ID NO: 83691 - DNA, 889 bp, Zea Mays
atttaatattaaatgctatagaacaacttcccttaaaaaactaagagttcactttgatacccttcacattaacgctcttttaaagattgtaatcaccgtttgttgggtatgccaaatcagagtgacatcgattatataagtataacggggtggatgtccaacatttccatgcatagtgttggtttgcttaacaatgttatcaaattaggatcgaacctttgtcatgatgttgggagctagggcattggatgtcacccaataatcaagagtcacagaggtgactagcaaatgttccttacttgtgttattaggtttctagcagtgattctaaagctcaatagaacttagtgaatatggatcttgtacactatatgcatgtcattagtgggaactggttgcaaaacatacagtgggagattcttttattaaattgtttaatgaaagaataaagtaaacatgatgctgaactttgccttttattttattgtagttgtcacccaacacccctaccattttatatgatgatcaattcttgacaaataaaaactcactagaatgaagtttattgattggtaccataacttgagaattattctcaagtaagagaaaaacaagtatgttctcgagactctatactccgatgagccagcaggaaatgcgagtgatgatgactaaagtgcttatgagaaacacaagaatgactccctaaatataagctacctcatgcttaccaccttgtcctctaagcttcagaagcaatatgacaatgcacatggccacactatgactgtgtgactccgaggcatgttcatgaaccagacaaaggttatgtgataagagatcttcgaatccctattttcatgcaagccaaataaagaaagtctagtca

SEQ ID NO: 83692 - DNA, 731 bp, Zea Mays
gtagtgtatgactgaacagtcaacaatatttgcttccatactattctgaggtaaaaaagcatctcacatgagaattacctttatgaagaatgtagaaatggtcttcgatttgaagaatgagttggtttattatatttttactccttacttttttatttgttttgtgaaatgaaataaattggtacatcatcacaaagaacattgtaaatatagtgcgtgcatgcttgtttctcaaatgatgcttccttcgggtactaactttatgtgacaccttcatagacactaatgaacgaaacaattctagatgaattagggcatattctaatgcactagagttaatagatagctgacttagtaataataattagttggctaaaaaattactagtgaagtagctatctagactgtttgaatgttttcggttaattttagcaactaattattggctctaatgtattcaaacaggaccttaatactaaggaagtgtttagttctcaccttctaaagtaatttttagtcactaaaacaataccaaacatgatgactaaaataagttatccaaataaaatttctagagactaaagtttagttcttaaagtttagaacggttactaaacgaaccaaacatccattaaaaaaccaaacctgatttagtaaataaatagctctatttcttgtattagtattaattattagtttgtgagaaataatgtgacgatataataatcaca

SEQ ID NO: 83693 - DNA, 545 bp, Zea Mays
atgtaaaaggaccggtttaaaaccttatcgagttatagttgttttagaccaaaattttatcttctatcgatcgaagcgttaacctctctaacttggataatttgatagggagacattttgatgattaacctcacttacgtttttcttggataacgaagcgagtcgaaattttaaacatcaaacattttccaaaaatcacactcgagcgattcaaacggcatagaatatgtcgtcttatacgacaatttatttccaaacattgagaaatcttttatgtagtctaaataaacggaggtgaatacgatatagagatcgttattcttactgacactccatacatcgatccatacacgttgttgaacttatgaaaacattgttacagtgattaaacattcatcattggaatatggtcttttacatcatatagtggaataaaactaacattattatctacatttctgaccgtgtagcaagcctaaaagactttaagacccacttagatccttagaattgaattccattcggataaacataatttagacata

SEQ ID NO: 83694 - DNA, 471 bp, Zea Mays
gccagtgatagaaaatatgcctttgaatcataccatagatactcctcaccacactttgtacggccaagggatttccttgccccaacatcccctttttttggcaaaaacagtattggaacaagatcatattcagacaaaaaaattacggtgtcttaggagtcaaaatagtttgtcgtacttaccttacatgcatggtttatataaaggtcgacctccacataatcagtattggccgtaggtcgttccactatcatgtactcaatggcagcatcaacatcaccagccatttctcccaaaacctgtatggtggtagcagatttcacactagaagaaaaatggctaataacaaggaatctaaattctctcctgtgcgttctagaaaaacaaggaatctaaattaaagacacaattgaactgcaaaaaaatgtgatcgatcatctcttttattaaaactcggtgggattctcatcc

SEQ ID NO: 83695 - DNA, 684 bp, Zea Mays
gcctaacgatggtgttggggtcagctagtgtaggtagatttcaaactttttcaaaacctcaccaatcatctcataaagggggaaccaaagtcctgccctgaaaaagctcctaaaaactacaacttcatcttcttttggctctggaatcgtctcctctccagcaaaacgaaccagttcatcatcattttctccaaaatatcctagcttcttcattagaactaggtcctcagctttaactgtggatctcccgaattcaatatggctgggcttggtcagacataggatactatcatcatcctcgctttcattttcactctcagcctcaggcacggtctgtttagcttcagcattagtaataccttcagcaataatttcctcctacacaaccaacccagcacgcctcatcatttctaagataggagctatctcagtcatttcagtctcatctccctcgtgggtcacccgagcagttgatcttactctggacattttgtttttcaaagtctagcagacgaaggtgcgcttaagcagtgaaatgcttgttcaaagcataatgcagaaagcttcagctttggtgaaaattttcaacagcacaacggtgcaatatcaatgaatgttgtggtaacttctcaccaacttgtctatttatatagccctgcaggagaagaaggtgaaccgccaaga

SEQ ID NO: 83696 - DNA, 853 bp, Zea Mays
gttttcttcttcttttgcttgtacagaagatggcaaaggcttttggtatgtttgttggatacttggatccatgctgtttatgagcacctgtggtggtatgatggtcgtctagggagccttccgtaggctgactgcaatggatatcagcggagctgggttcctttgttgttttctccccctctttttgttagcagtggatttgttcttacttcagtttgagacaattgaagtgcatctagattctagactctagagacaggtgtctgcttgctcttgtgaaatatgggttgcctctttcttgatcttttttatgggcagaactactgaaggtgccttcaagattattgcaaacagtcaaatcaaccaagcgcatgagccgcagtttttttaaaaccatttgaattctggtccgtggaatggtactcccttcttggctcgcttaaattcatgcaatctgtgttagaagagaaatatggtcggtgtactgtcgcaatgtaaggcaacgcaagggcatcctaacatattaggagaaggccgcaagggcatcctaacatatttggagaaggctgcgtcaactttaaggtcaactgctacccactcagattttgtttgttttaggctgtgtttggttctagagtctatttagatggaagatggagtggctctgttctaaattctaagtatagaatgattccgttttgtgtttggcagttagaatggagccactctgttttccatttgattctaaagtgaagcagaacagatcaactttatcctagatttggttgataagtgtaaataaataattttgtaactatagtacattcatacaaccatattatatcgagacgca

SEQ ID NO: 83697 - DNA, 682 bp, Zea Mays
ctggaatgttgagcaattgcgttgtttttacgtatcatgaccagagatgtttcctctcgaccttttaatttcatgttctagaagagttcttaatttctattgattactaatcacttcttgaatattttttcttgaaggataaaacatggttaagcccctcaactctgtcggtctggtcatcgctctaagggtactagttgctagccccactgctagcaatacctaggtgattcaactcaggcatagttggggtccctcaggggaaggctagtagtatcacctacatggttgtgctaccgcttgctacctagcctcgatgaaacctctccccctctctcatgacattttgatagtcaatctaagggtattgaggggactcgatcaccctcgctactacgatacatagacatcaatttgtatggagtagggttccctttggggaagctgacaagtaccacctacacagctttgcttcttgcttgagacccatccgtgtgatagcaaaagttggcaagtactacatacacggtttggtttaccaacagggcatagaaaaaaggtacggaattacagagacttctgctcaaattttaacatgcatactctcctaggggtataacaactactagatcctaggatttggcctcttaaggtggggatctttatgaggatccacatcctt

SEQ ID NO: 83698 - DNA, 397 bp, Zea Mays
ccggccggagatttcctctccgacatttggcgcgccatgtagggggctaggcattaggtttttgcttgtttccttgctcaagcatgatggtgcaaatcgttgagaaccgtgccgagactttggttgatttcgcggtggaaggagaagctgcttcttccacaccacaggttcccaaccgccctgtgccaggcactgctgctgtgcacgctgcacggcagcacacggctgcacagacgtcccggactccatcgagggtgactccgagagcattgtcagcagccagggaattgttgtggcaccctccaaactccatggcctcaccaggggccatgaagcaatggcgggacgacgtcgaccgactactcggtatgacacattctacctcgaccagatcgag

SEQ ID NO: 83699 - DNA, 300 bp, Zea Mays
ccagtctttagatttttaaaggataccctataaagcacccttctgatttggagaggagacattattttcagcatgcatgcatgcattataaaactaaaaggcttagacactaaagaagtaaacattgagctaacccgcttccttttaaaccaccaggctcttttattttctttcttccaccataatctttacatctgatactcttccacagatgacttcacccacccccgccaatggaggagacacccgtttcagtttcgatttcctttctcacgatggtttcccttccatcttgtggga

SEQ ID NO: 83700 - DNA, 877 bp, Zea Mays
ggctaagtatgacgccatggaatggcgctatgctaggtcatagcgtcgagcgtgcgatccctagttcgtcaaagttctcaatgtacatgatgttgaggtcagttcccccgtccatgagcaccttggtgacgcgcttagaacctatgactgactcgacgacgagagggtagacctcaagatgtgggatgttgtcggggtggtcgcgacggtcgaagacgattggaaattccaaccaccaaaggtatcatgggattgtcggctccgctgcgtggacttctcgatgagcagcctttatgcgatgcttgtcgtcgtaggctcggccccgccgaagatcatgaggcaccctattgactcggggaaatctttggtggggacttcttgctttgctagctttgtcggctcctctggccttgccttttttgtgagaggtatggagataaagcgcttcaggagctcgcactcctagagcttgtgttggatggggaagccatgattttgacacgacgagtccatcagcttctggaaatggtcgccaccgttcttggccaacgacctagttggtcgatttgctgtgacgatttcttcaccgcgccgaggatggtggttccttcgacacttgttagggtgctcacgacgttccctcatttctccgctaggctcgccagcgtcccgtgggccctttcctatgcggaaaatggctcccacgtcatcatatccgtcagcgaacttggtcgctatgtcaagtaggttcgccgctattcttggtcttccccggccaagatcatggacgagcgcttcattagtggtgtcgtaggtgaaggcactcactatatctacgtcagtggcatcggggagttcgttcctcttttgggaaaac

SEQ ID NO: 83701 - DNA, 930 bp, Zea Mays
gctacgcttagagagcacaatggctgccttgtccgacgtggtaatggcgccatcgcaagcaagcaaaatctctcgcacccgggcctcaaacgttgccttcatatcctcggttgttctcttggcgtcatcagcttgagaaagcatcttccagagctctaaggaggaagaaaggataaagcaaccaaagacaaagaggtacaaaagtgtcgaaggggacctacccccagtggcattgtgctctcacgaaagctccatatttgtcctctttaggtggccgttggcctcaccaagttatgaatcggcctcgctgactcagagacttgcctcacaaagggccatctggagttggtctcctcttcctagaggcgattggctttaatctggacaccctcgccctcagaatgaagtggggcctcctcgctctcaagagactcggccctagagcagagctcggccatcgtgctgcatggccacagaatgggcagcccccacatggagctactccacctcccactagatggagaacaatttctccgccctggcccttgatcgcgcgaagatacgctgcgaaaggataacccgatgatcaccttaggcgaggataaaaggcaagaaacaaggagtaatcgataagcggtgtctacctacccaaaggggatgaaatcctatgtcatcgacgcccgagcaatcgataccacgtcccgaaagctaccgagcatcacctcaatagtgccaggctgggattgccctaagacgaagccgatttgactcgcctctaatcctccatgtctgcccacgacatcttagggggaggagaagggcatcctgtcggtggcgaagggaccgagaccctttcaaaagaagaagaggccgtagccaaagatgatgccacctcaagttgaacgatcaccaccaccaagagcatccttc

SEQ ID NO: 83702 - DNA, 785 bp, Zea Mays
tgctgagcaagatcgcgaggaggaacgaccgaccaggtccctaccgagcaagatcgcaaggcggagcggccgaacaggaccgtaccaatcaagtctgtgaggcagaacgaccacccaggtcccaaccaaggaaaataagcaaggtggaaacccaagtcaaacgtcacaaagtccacgccaactaggacaatacatgacatcacgagccatggtcagtcatccaaacggtaggccacaggcatgccgagtggccgctatcgacacgaccacacctccctaagtatggccccatacgcgctctcacagcctcaagggatcggatgaccctattcataaaagtacctcagcataggagcttctacagtgatccaaatacctggcagtgaaacagatacatcataccgtgtgtatgcctacacacaccaacgagggacgtaggctcgtgacaacaggtaagaccacacgacacatgactattccgtgtgactgacctgtatgacccttcgcgcactaccgtgaggatgtcagtggaagaccggcaaaaggaacccgtacgatgagcggacgagacatcacgtcatgatgagagtacagttacacacgatcctatggacaacatcagaggaaccacgctgcccaagggccaccgatcgagctctttctagcagaatacaagtccccattgtagagtctagcccttgaactatagaagggaaggacccctctttctaagagcacaagcacatttctaagaacacaaacacatcgttaatacgccaagaaca

SEQ ID NO: 83703 - DNA, 639 bp, Zea Mays
gcatgaggacgcggtggtgcctcgtcgaagccacacgcgtttgcgctcctgagctccgtttgcctatccttcgatggtgttctggcatcaccggcccacggtacgaaacggacccgcggtagagcatggtcgatggtgtgaggaattctggccacccccgatggtcccccgtgacacccaccgccatgagaagttgcacaatagaccagtgatgccccagtgctcccatccacggactgaagcgcagcctcgcccgatccccatggcggcgtcggctggtggcttgtttctctggtttttcgcctcgaatcgatgttgggcgctcggataatggtgatggtgattgcggtcgaggggttccatttatgcatgctaggcgcggtggaagttgctgagttggcgcaacagtctggtgagattgtcggcgtccgctttggtgtacatggtttggcatagggatggcaacgggtaaaatatccgcggatagtgtctctggacatccatatccgcgacttatatccaatatccgaacccgtacccgttacccgctatggataacaaacattatccacatccgttacccgcgggtaacggatatccgcggatatatccgtttgcccactacacatacaaaatatt

SEQ ID NO: 83704 - DNA, 3048 bp, Zea Mays
gaacactagaacactttacacaataactaaacacgacctcaacgaccacacccagcctaaggagcctccctatgaaggagcgcttcttaaggttagaagccccagccaagccccatgtgcgggatgcaacagccacttgagcaaagatcacttgaggctgaggttgaactccatcgaacacgcacgcatttctgtgcttccaaagctcccaaatgaccaaaatggccaaggaattgaacccttttttaaaatctttggggatagcagcaatggctttacaccaccaggtccaaacccggctacagaaaatggggcgtgggaccatatcaagcctaagtttcctcaaaatcccttcccaaatttctctggacagcacacaggagactaggatgtgatttatggtttcctccgcctggtcacaaaatgggcatgctgtttgatgtggtaaccctcgcctagccaaccggtctgaggtccaacacctgttgttgatggccagccaagcaaagaatttacagttagctggagcccaactcctccagatttttctccagggggcaaactgaatggtccctatgaacatcgcttggtaggctgatttgcaggaatacgttccattagatgataatttccaaacatgtcgatcaaggacacctggctgcaacactacaccatcaaccaagtcccagatttgagagataatcagcgaggacctgaactgtgagagctccttttatgtcctccacccaacatctgttcacaagtgcctggctcactgtaagccgctgcacggttcttttaggtactgaactgaaaaggttaggagccaaatctgcaacagttttcccttgcagccatctgtcagtccagaattttgtattttccccattgccaaccaaggtggtaactgccgcatcgaagaaagcacgagccttctttggtacatggatgggcagcccgacccaaggtcgtgagttgtctgtcttttcatcttttgtaaccacagccatctaatacgcagtgcccagccgaaccgttcaaggtcatgcacccccagaccaccatacttgagaggccgctgaactctaacccaagagaccaagcaatttccccatctagtctgttcacggcctttccaaaggaaattcctcctgattttatcaatctttttcatgacccatttaggcaattctagcgcggccaagagatgaatgggagttgctgttaaaacagacttgaccaccaccagccgaccagccttatttaataaaggagccttccaaccaggaagcttatcagccactttatccaccaggggcaataaatcagacttagatggcttgttgatggtgagggggatgccaaggtatgtcattgggaaggaaatgacaacacaagccaactcctgtgaaacaagtgcaatgtcatcctcagaacattgaataggcgttacagagctcttggacatgttacatctaaggccagctgcatgcccgaagccctcaaggatttctttaatcatgcacagatcagaaacaactggcctcagaaacagcaccacgtcatcagcgtataaagataccctttgtcgattttgatttccccccagaggcagtaaaagtccttcattagtggccactttcaccagggagttcagaacgtccatggcaaggatgaacaacataggcgaaagcgggtcgcttgtctgagcccacggagatgtgaaattggaggtccaggttgcccattcaccaaaatctgtgtagaggacgttgacaaaagcaaacagatcaggttgcaccactttctgccaaagcccacatgctgcaagacctcaagtaaaaatggccatgacaaggaatcaaaggccttagttatatccagcttgagcaacaaatgagattccttggttctgtggggggatctagccatctgctgcacaaacaaaaaattatcttgtatactcctgcctctaataaaggcgctctgattattggagaccaaatttggcaataatggggctagcctgtttgccaagatttttgtaaccagcttagcaaaactgtgtatcaagctgattgggcaaaaatccttgacagcacaagcatccgacttctttggcagcaaagtaataaaagctgaatttaacaacctgaaattgaacacatgacctctatgaactgcagccagggctaataacacatcacccccaattatattccagcagcatttgtaaaatctacctgtaaagccgtcaggacccggggccttatccaggggcatatctttgattgtagcccaaacctcttccgcagagaatggagcatccagtggggacaggtcatgcggttgggtatggaaggcggataaatcaaaagagtaccctctctcttcagcagtccccaacagattagttaagaaatcgaaaactgcctcctgcttattttcttggtcagaaacaacctgatcccccacatgtagcttggcaatgaaattttttttcttcctatatccggcatgctgatgaaaaaactgtgtttgcatccccatccttaagatggagaacccgagatcgatgccttgcaatagtgcgatcaagcgaagcaaacccaagacagtgcagttttaactttctcctcaaccaatcctccttggcagataaagctcttgaatctcttacaatttctaatttgtgaaggatttcctttgcaattgccagttgcaatttgatgttcccgactttacgttgactccacttttgcagcccccgactaaggcgctggagagcaaaagcgttcagcagcacaggaagaaaagaccagtgcttcccagttctgtttcacagcctcatagaatccaggcaattgtgtccagaagctctcaaagtggaatctgcgcttctgtggtggacaaaagttgagaccaagagtcagcgggcaatcgcgcggcgagccgaaggagaagtacttctgcgcccagcccaccgtcttctctgtccgcgacgtgtacgcctcctcccagcatccccagcaaccacgccaccgtcaa

SEQ ID NO: 83705 - DNA, 516 bp, Zea Mays
caatacccaggattacctagtgaccgttagattttaggctaacaaccagatgagtcactacgctactcaacattctcgaccatccattaaatgatcaatgacccagatctaactacctcgagatctactcttatccgtacatcgtccgatctatagtccagatccacccttgaaccggtatgggctgatctaatcgcagtcattcaccgcggatccaacggctggcacgccatcttcctcctcacgctggcacaaaataggagcgccaccgccgaacacggtgaggtcacgccggcgctaggcacatgtgcccgagatggttcaaaccctaattgagcaatcgctaaacgcgggacgaagtaaggcagagggacggagatagaattttaccgttgattatgtagttctaaccgcagaccacggtggtgtccggtccgtggtggagcaatgactccggcaaggaatcgcccccgatcggtggccactaagacccaaaactggctgggaacgcattcc

SEQ ID NO: 83706 - DNA, 414 bp, Zea Mays
aaaatttgtttttctcaagggcattcatgatctgggaaaatgatctccaagatgttttcaaaagattttgaacttggctcattgcacaacttacttaacggtcgcggatccctcttaattgcacggtgattcctatgactcgagaagtataaatttagcaccgccgttgtttcttagcacttggagcacgccatttgatgtggaattttaaatccgctgtgctttatacttttatgctcgtaagatctgtgcttctcctgtctgtagaatttctatgtacatgctaggagcaaacttgttagaatctcagtttgttttgtcactaatcaccaaaaccttcaattagggttgattgcatttacaccattcaagcaaccacttttcatccatcccactcctacccctgctcaaaac

SEQ ID NO: 83707 - DNA, 1051 bp, Zea Mays
acattgtgaagcacttcgtgtgtccgaacattgattatgtgagcccatcgtgcaaaatgtataaactagttattttttacaataaattactaatttattctcctgcagccatacgggtggcgtaagtgtcgtttcagagagtggttgtatggtcctttgtcccattggccagaggcacaggtaaagaaaaagaaaaaaaaatcagtgggcggaagagttgaagtttgatccagtactctgcagatgtggtattgaagctaagtatggattagttccttccgagcttggtgttggatatttttgtggacatatggtcgattacgatgaagttggtatttatttattgttttgcaccagctgtaatgttataccggtacttactatttttttgtaggagacgagaaaatgcagttgggagagttacgacgacaaaggagaggtgatgcgcacaatagagtccaagagactaatgggacagaagatgcgttgtggatctcagctcgtcgattcgtacattaacgatcgcatacgcgacatgcgtaggtacgcgaaatctgtcttttatgacagcccgaagcgtgcagagttaggaggttgaaggcagcagatgagaagagagcacaggatgcaagggaatgggaagcgatttgagccgagaaacagatgttggataatcttgctgatcgtctcaagggaagtgagtgagaaaaataatactataatttttttagtacaatttatttatcctgactttgctaacttatttttctcattatatttgcagagattgaatgtggcgtaaactatatggccgatgaggcgcatgcaagatatgttcaggaaaaaatggcgacagtggatctgatggaggaggaggacgacgacacatctagattgagtgaggtaggattacatggagaagagaaggacgatacatcaaggttgagtgagctcatcgcactagctgaggcaggattacgtgctcaagagaaagaggacgagtttatgtctcaggccgccgaagaggtagaggcggcttattacaagcaga

SEQ ID NO: 83708 - DNA, 553 bp, Zea Mays
tggacggtggagtctttagacgaggacttggattattttgcagcgttagatgtggctgcagcggagccttcaccacgcccggagggttctgaggagctcccgggcgcgagtactgggtataggcgccgaagggcgatggcgaaacggagagtgagtggattgtcgcgaagcagtaggcgtcatcgtagtgagatggagagtggtcgtcttcgcgtgggtgggactggtaagcgagaattgttgtcctcgtcgattggggtgagtgtaggtgaggaggagctgcaaaatctttttgagggtgaggaattgaggataatccttttcaactatagggagatgggtatcaccccgaaggctgagccaatgtaatatatgatgccctcgctgtgtgtatgtaacagtaatttatatgataaggctgcgcgccttcgttgatccgcccgtgcccgtaggcgacttctgcacggagtcttttgggaacgacttcgatcttcgtgtacttgttgtgttgttcaggccgcgctcgtaagcgacttttgcacggagagtcttt

SEQ ID NO: 83709 - DNA, 522 bp, Zea Mays
gcaatctaggccaaggcccgcatcgcatcgacttcccttcgactagtagagaagcaacgagtacatacctgctctgaaatggacctgcctgccttggagcatcgtacctgaaatcctgcatccagcatttgccactgctgagtgttcacaagcacaaccaatgaaccaatcaatctacacgggggccagatgaagaggcagtattgctgttcctctaattgagtggctacacttcacttccagatgtgcattgcatgctcatcttccggaaactgctcgatgctgtgcttcataatgaagcgagaaggacattcggatccagatctgtttggtttatatcgaatcgatcagtgttcgtttctgtacttttaagcaacagttttcgttaagtagctagtgatgcatcaaatgcaggggtccatgttcagttttggcgcaagtatggagcagaggtcgtaagaagagtccgtcactgatggattgatgaatgtgagcgtgccgtggagacacactacactaccc

SEQ ID NO: 83710 - DNA, 518 bp, Zea Mays
cttctaaacaccacaacttcatcatccgtcgtctccaaaatgatttcatcgccagcaaacctaattaaatcatcatctttcttgccaatatacccaagttttttcatcatgtacaaatcttcagccttcacagtagatttcccaaactcaatgtgactaggtttactcgggcaaaggatattgggatcttcttcgtcgtcttcaccttcagattcaccttcgacttcagaattactatttttgaagcacacatttcttccctcggctcagcaatgccagactccctcatcacttctaaaattggagctgtcttagccatgtctgtctcctcaccctcgttaaccaatctagcagttgtgcaaatcctggccattgcaaggcaagacgaagcctagtcgaaaacttgaaagtgtgaaaataccttcggatgcaaaaaaaatagtagcacaacgacacaaatgcaacaaatgctgcataaacctaaagccaaccaatctgtttatataaccagataagcg

SEQ ID NO: 83711 - DNA, 573 bp, Zea Mays
aacacatgatatgataatgctcatgatgttatgctcaagttttagtgatagtaacaccaaggatgttacatccttccccccataaaagaatctcatcccgagatttaaagtcctagggcaagtagtggaaaaggaaacatgtcacatctttatttccttatttgtcttacaaggcaggggtagtatgggggtttacttctcctttacaatccaatatacacatcttacaagttacatgaagttaaaaagccaaggaaattcttttctaagaagtcatgggttttcgatgtagcttcatcttcagtatgttggttccattgtatcttatagaatttaagagtttttcttcgggtgaccctgtccttctaatctaggactcgaatgggatgttctgaatatgttaagtctggttccaaggtaacatccacaaaatcaatggttcgatcaggaacccgaaggcacttctttaattgggatacatggaacacattgtgcactgcagacagtgtttctggcagttggagtcggtatgccaccggtccatatcgttcaagaataggaaacagatcaatt

SEQ ID NO: 83712 - DNA, 581 bp, Zea Mays
taggaacaatttctatggtcaggggggttatttccacgctttcacttaacttcggcacaccggccgtctcgatgcgcctgggtctacgtgtcggaaccttgattttctttgacctcaacacgccagtaaatgccgacgcaacggttttccttttcctcccttgcttccgggtgggatagtagtagtctgggtaaacgaacccaataacatcaaacactttgttcaacctctttttgtcacgagcgtcgaaggcagttgtcgtagctttgtcttctgccttcgaatatgctccaagtatctcatcacttgttacttctatggcatccaaccaatcatcatttagctcatcaaactagttcctgaaccaaaaagcgtacttcagattaaccaggccaccctagctagagccagcggcggtctccttcggcatttcccactcactcgcaagaggccatactttgtaagcaatatgctcttcaactgagtctcttgtgccaatataggtgcacactgtgttgaaagcagcatggcacgcttgcatatcattcccaagtgcattgggtggccttctaatgccgaag

SEQ ID NO: 83713 - DNA, 606 bp, Zea Mays
ttattttcactcccttaaatcgcctccaccctattggataaagccgttggatagaggaatcagagttatgtagttgggatcggatagcaatgtgatccgttgcagatatgtccaacgaaacacaaacaatggaatccattatcactgtaaatggattacggtctatattcttagaaccaaacaacacctaaattatatttatttaagtccatacgtaattagatccgcactaaaaactgataccggcttatttaaacttattaccgctgtaactcgagtgtcaatcattacatttaccatttatgttatattttgtaaacaaaacgacacttttatgcttatagaattcatccttagaaatacattagtgctcagtacaaaatttaaccatgtttactgaaggtgatgatacaagctactcgcagaacaacatccacgccatcatcggcagcggcaatggcaatgacaatgcagtggcggatttatcttattcagcgagatattgtgactacttataatttatgaaaagttattcacatttgccttaacataaaattcactaagcattgtcattcactaagcaaatagaaccacattgaactctag

SEQ ID NO: 83714 - DNA, 465 bp, Zea Mays
ccgacgatgatgaagatgatgatgaagaagaagaagaaaacaatgataacatagaggatgtcaacaatgaacaagcagacaactttgttggattatggcctatcgtagaacattacacttcaatgttcgagacgggacactttccaaacttgctgcaggatgtgctgcatgcactggaaacctacgttcgacctatatatgacacaaggtgagtgtctgaacctcctcgggcttgttactacatcactcgcgcgcatatcagagtgttggatgcaggagatagaggtttctaatgtcgttatccacctacgctgctttggtaagcaatgctgctcggagagctctgtgccccccatccatacatatcgacgacaactacacgacatgacgtacaggcaccttcccccacattctcgtggagaaagccagacaattgttgttctaggtaaagctggagaagatcgc

SEQ ID NO: 83715 - DNA, 951 bp, Zea Mays
gttgcttcacatgtagcactatgtgatgttttccagagggtaaaagctaaacattagggacctgccggtttgctgcacccgcttaagataccagagtggaagtgggaagagattggcatggacttcatcgtagatctaccccggacatctactgggtatgactctatatgggtgattgtggacaggctaactaaagtagcccactttattccagtgaagaccacatattcaggagctcgactagcagagttgtacatggcacaaatagtatgtttacacggggtgcctaagaagatcgtgtccgatcgaggatctcagtttacttctcggttttggtaaaagttgcacgagtgcttggatacaagattgaattttagttcggcctaccattctcaaattgatgggcagaccgagaggaccaaccaagtactataggatatgttaagagcgtgcgctcttaaacatggtggcagttgggataagagattaccatatgcggagttctcttacaataatagctactaggctagtttaaaaatgtccccgtttgaggctctatatggcagaaaatgcaggactccactatattgggaccaaactggtgaaaggaagttcttcaagccagaaaatatacaagaggcagaagaacaagtccgattgataagggagaacttgagaactgcacaatcaaggcataagagctatgctgatacccggagaagactgttagagtttaaggagggtgatcacgtatatttgaaggtgtcaccgatccggggtatgagaagattcaaagttaaagggaagttgtctcctcactttattggacccttcttgatcctaaatcgagtgggagaagttgcttatcaactggaactacccgatcatcttgcagatgtacatgatgtcttccatgtatcacaattgaagaagtgtcttagggtacccgag

SEQ ID NO: 83716 - DNA, 868 bp, Zea Mays
atcactatttgcgtgggtcactgacagcaacacataagccctttggtttttcttctttcacagaaactcggccacgactccgccgcggggagctccggcgagcccatgctggattggccacggcggccgacatagtctatggcgacggcatcagcacacccatgaaccgaagcaaactcagtcacgtgctcaacccaaccgcgaagattctagacctaggttaccgacgacggttgcagaagggctggaccgacgatcctactctcgtgaccaccgcgaggtagagcttgaacgaagggcgtgggaagcttcaacaacttatgagggtctcggtgctcgcgttaagtcgatcggggacaacgtaggttaattggtccacgcggaagctgtccacgacgccaaattgagacgtcgcaaccccgttctatgcaacatgcaacagtagagctagaaattccaactgggtgagcttcactaacctttggagagcacggaacgagaaccacatgagcatgcaacggtctggaacgctttggccacggcgaggtggtggtttcggtggtatggtcaccactcaccaggctgggcgttggctgtgaagaacaagggcaaatcgacctggggattgagaggggaactcaagccgcaacacaaactgcagaggtaccaagggaccagctagagctcacgaacagcagggttctctggatcagcaatcaagtaaaagcaataagaaagttagggcagggttccctgaacttagccaacacttgatgaagagggactccaagggtgccagcactgcatggctgatacacgtggatgcccaacccaaatagcaggccacccacaagctcaacacagaaac

SEQ ID NO: 83717 - DNA, 401 bp, Zea Mays
cactggtaagaaatgagcggtcttggtcaacctgtccacaataacccaaacggaatcatggtgcctggaggtatttggcaatcccacgataaaatccatgcaaatgtcctcccatttccaagatggtatgggaaggggttgcaaagggcctgctgcctttaagtgactggccttgattctctggcaagtgtcacactcggatatgtacttggcaatttctctcttcattctggtccaccaatataaagttctgagatcatggtacatcttgttgctaccagggtgcatggagaatttggaaaggtgagcttcatctagtatcttccttctgagctctgggtccttgggaacaaccaatcgatctccaaaccataaaattcccttgctgtcttgacggaagc

SEQ ID NO: 83718 - DNA, 633 bp, Zea Mays
gacgggacactctactttggattgtcgcttccctaggtgagcgagtgagcgacaatcacttgtggctcttcctcgcggtagtcagccgaaagcaaagaagaaagagggtgttcttaaaatgggtcgagttcattatactaagatcaaagctattcctgagggtgaaccagtcaagctaggtgcttttccggttgccaatcacttggctactattttgtttgattctggtgcttcccatacttttataaatcagacatttgtgttaaagcactagttgtctttggaggtggtagagaatggatatagcatacaatctcttggagggcgtttacatactaaggagatggtatatcaaatacccataaagctagttggtcacatgtttcctaccaatatgctagttcttctaggttaggacatagatgtgattctaggtatgaattggcttcgttagcatggggcggtgatcgacgctctacaaaggacgatacagttggactcacctaatggtaattgtaagttactaatccgattatcgactcttaagagagcagtggaaagagtgtgtgctgctaccgttaaagaggtcaaggatatacctattgtcagggaatttctagatgtgttccctga

SEQ ID NO: 83719 - DNA, 457 bp, Zea Mays
gagcgtttgggggaaggggaggagggaagctgctcctgcgggaaggagcgtggagggagggaggacgacacgaagaaatggagatatggagcagagacgggacccgcatcgtggccttcgccagttcgccatcagctgagaacaaccgcgatctgtactgtacgtcggctggaaatttcgcgtccgtcgaaaacgagtctcgcgtccgcgtgcgtcggacccacggaggacgcgcgtcacgcgaccgatggcgtgaagcccgccgaacacggaggagcctccaattcccagtagcttttaacaagaagtaatatgatctgcaagatgtgaattttgtgtagaactatgcctttcattttgtttagaactcaagaagtaccgggaattttccttaactcatgtataactcaagaagatgtgatctgcaagtttgtgtagcttaatttatgtagctaag

SEQ ID NO: 83720 - DNA, 282 bp, Zea Mays
ctctgcgatcacacattcaccgccgtcggcaacaagttggtcctcgccggcagtggtacggtacatgggtgcgggaatgaatggaggagacggcacgcgaacagtgtttagcgagtggtcgtacgtccggcagatttagcgtctcggaggcagccgctaaattttagcgtatggtttagagtctcttgctggaggcgtagagaacgtttccatccgctaaatttggcggacaggacggtttagcgtcccttgttggagacagtctaacagtacagatatgag

SEQ ID NO: 83721 - DNA, 571 bp, Zea Mays
gtggaatacaaattatgaagcgtcttaccctgctcttacaaggttcttactagcactgcaggtgacaaacggtgaccggtgtgactgtccatcgagcgtgggtgtgattgcaaaggagtacctattctgctcgagagaaagctggagctatgggaaggctgactaaatatatatatgtggcacacaagtcagtaacagatagcaatgctgaataagtgttccaagtactcgtcctagttgctggcctagaaaatgtaatagaacagttggaccaaggcacaagaaaggaggtacaagtatctaggtgcagcaagaaacaagcttggggaaaaataatcacagaggtgcacagaacactggcgtttctggttatgtgctacccttcttttttgtgatttttttcaaatttttttttatatttttctattttgcagcagcacataagaagataacacaccaagtttcagattttttgtgcaatgacgcgtcctctagaatttctgcaagttttccctaaaatcggaataaatgtttggaaaatgagaagtcctatttccgagccgaatttggg

SEQ ID NO: 83722 - DNA, 726 bp, Zea Mays
tcagatagccttcgataacttgcggtctgaagttatcgagctttggcataaggttgaataaaaggaagaaattttgaacaccctggctagtgacttgattggggatcacattgagtttaagaaattatctgaagaaagagatgataaaattttgaagctagaaattgagaagatctagcatgcaaaacgtatcgctgaccttgaatcaaaaatagtagcacaaaccgaagcacatgaggctgaaatggttgagttaagagagaaatttgatgaggacaataaaaattttgaagtggaaaagtcaaagcaagaaattcctgaagctaaaagggacagagttcaaaaaatcattgaggagcttcgtgagtcgaaagaaacatgcttctctaccactgctcgatgctacgagaagctgaagggtatgtttgtaaacattggcgctttctccaacgaggaggagtttgttcgtggcgacgctgatgaggccgtaaaatggatcgaaggtgaagttgaagcttttgacaaagttttgactgaccgaggcgacttctgtgcttgtgtgggtgcacagggagcagtctctatacttgaaaaagctagttgtgatcatgtgaagtctattatttggccagactttgaagtttctgagaacgatattaaagatccttcacccaaagttgttgaactgggaagaaatttttatgctaatgtttggcttgctggtgg

SEQ ID NO: 83723 - DNA, 644 bp, Zea Mays
cagcttctcgcacctctcgaataaagctatccaggtggaaagggcatgacaagaagaaaaaagccacctcaagaggaagtttcaagttctccgagctcaacaacaggacaggcaccagagagttcgatcttttgggttccctcccaaagggacgaacttcagtaagccaatagggtccgcttcgtcacgtttcagccagcctggtcaaagttccctccacaccccatctgttgcaagcagccaacctccaaccaatgcttgttggcactgtggagacccagtcattacaagaataattgtcctcagttgaagacatccgtacctgcctactccaactcggtgaatggccccaagaatgtttcatcacccgcctccaaggcaccctccaccaacagctagctaagcaagacccagtttcacggtagggctcgagtgaatcacgtcgacgcccaagaagctcagcaagcccctggagtagtgctcggtgagttcctagtcaaatttaccccacaactgtacttttttattctggagcatcccgttctttcatcgccactagttttgtgtaaaagcatggcatccccactgcatctttagaaatccctttggtcacccgaacccctgggtcagaccttctatgccac

SEQ ID NO: 83724 - DNA, 387 bp, Zea Mays
gaaacccctccagtttgaagtgggagatttcgtatatcttaaagtatcacccacaaagggagtgcaaaggtttgggatgaaaggcaagttagccccctctgccctaaattttaatatttttgtgcagagaaaaccattctcattttatgcctcaatttttgagactgaattatataaaccagtgagaagccactgtaatttttacagaagttttatgaatttttaaatcgatattgtagttcaaagccactctaaaagcttaagtagaaaaaggaaaagaaaggattaatgaagtactcaaattaagccataaataacttcagccaaaaacctgattaagtcttcactaaaacattgaaggagtgttgagtacaacattaatccaac

SEQ ID NO: 83725 - DNA, 741 bp, Zea Mays
cgcgcatgggctggattcagcccagcaagggggggagggttttctctttttctttttattttctaattcctatttccatttttgtatctttttcttttgaacaatctatttagtagataatctaggtgctcgaaaataaaatttgagtgaggtgttcatattcaaacaaagtgtatgcatatgatggaaagaatctaagggagttttggaataggtaataagaagggggggttagattagggtttcaaacctgggttagaaattgggatgttacaaacctaccccacttaaaggaatctcgccctcgagattcagacggggctcgagaaaaggtaagggtattccctcctcagagagtcctcactttcccaggtggcttcctcttctccttctctgctccactgaaccttacaaagtctcacttctgagttgcgggtccttcggactgctgagtcgagaatctttactggcttttcccggtactggagatccttttgaatctgaattgtctctgcctcgatgtggttttctggtacttgtaggcatttacggagctgggacacatgaaacacattgtgaatatctgacatggattctggtagctccaggcgatatgctgcgggtcccactctgctaatgacggggtaggggccgacgaaacgcggtgctagctttcctttcatttggaaccttttgacaccacgcatcggggagaccttgaggtatacgaaatctccttcc

SEQ ID NO: 83726 - DNA, 561 bp, Zea Mays
gaattgctgagttaactaccacgtgggtttaagagttgttgttagagttgagaaaaaattgttgatcgaagttaacttgaatcaggtccaatttaacttttgaggcctcaataataggagttcctgttgagaagctctaaggctctcagtgaaactagtattctagcctcagtcagacttccagtttatttgaagaaaggaaaactctagtcagagttgagtgcctgttgcttgacttccagtttttttatagcattattatttaggagacctaaccagtctgagctcatccaagctcaacatgttagtcatcccgtcagacttaagatcactacatcagttaaataaatagacaaaacgttgtctgcactatatactgtgttgttcacgtagagttcaaaattcaagatgtgtattgttaatgtagagttcaaaattcaagatgtcaatacagaagttgataaccttagcctcatgacggtcaacaaacagccagattacctagtcttttcgtatctccctaaactttaaaactcaaaacgtaagctaaaactctaaata

SEQ ID NO: 83727 - DNA, 487 bp, Zea Mays
ttcggagttataaattaaaagatatcgccgtttgaatccgggtatgtggctgtccaaaaaaacagatttttcaggtggacgaacaacagcagtattagcagtttctggtgatgtttcgtgagtaattagtgttaatcagtatgagaatcatgtagggttttgtcttacctttccaacaagtacttatgcgctcgattcggaattatattttaaaagttatcgctgtttgaatccgggtatgtcgctgcccaaaagagaaaaaaacagattgcagggtttaacttgaggaccgtttaggggtaattagatgttagaatttaatcataatttgtatacaaaacttgtgggtaattttatgtagttgtctctggagtttttgtttgtcaccactgctgccttaattttaaggttatggaattgttaagcagcgccgctgcagtttggtgggtgtggggaaaattgttacccgaggcggggtttgagactg

SEQ ID NO: 83728 - DNA, 379 bp, Zea Mays
aaaaaaaggaggaagaatttatgcataccaaagaatttcctatgatgcaatacctggatgaggaggctggtccatcttgtgcgcctttagttaagccagcagattctaatgttccattccggcgaaggaaatacagttcactaaggccatttagcacaatagcaactaagtcaaacatatttggaagtacttcaaattctaatgctgatgttccagtttgtcagcttgagagattcacacccattgtactaaataagaatgtgcagcgtgtgcaagctgctaaggaattcatagaaaatagtgctggagctgaaaatttggaagatttctctgcagtttggaagcagacatattatcctcaggatggcagtgaggatca

SEQ ID NO: 83729 - DNA, 467 bp, Zea Mays
cttggagacaaccttatttcctagagttatcgcaagcaagctagagtgtcccggtaaagcactgaagctgaaaataaagccatcgctgatgccacaacagagatcatctggcttcatgttcttcttcacgacattggcatttctcttccacgaccaccgtgcctatggtgtgataacatatgcgctacatatctcacatcaaaaccatttttacatcgtcgtatgaagcatgtggagattgattatcatttcgtccgagagtgtgttgccatgaaacaacttgaggttcgtgccaaatcgtcgaaggatcaagtgatcgacatcatgacaaatgcgcttcctactccgacattcaagcatttcagaaacaatataaacttatttccactacgtccagattgagaggaggtattagacgaaaacatggtttgttacgtctattcctagattagagggagctacgtctc

SEQ ID NO: 83730 - DNA, 702 bp, Zea Mays
ctcgtgttagtgctcgaggcttctttctcaaacgtgttcacgctgcactccgacgcaagtgtgcactggcttgtgcaaggctaacactatcgcgtagagctccttgcctattgcaccttggcatgcttgggaagcacgtggaccttgtcacaggtcttgcactactcagccatagttggctgcaggagcccccaaattatggcacggtagcggtaatgttctgactaacatggggaaaactgggggactctaggtgtacttcatggccgttggttgacgttgtgggaagtggcgtgtgtatgccctccatcttggtgacgctcgagctccacgctctcatactcgatttggtgacacatgtcctcaagatcttcttactgctccctcagctggtctagtagttgctaaggtccggtcgtagcagtggaactatcgtcgcagacgatctcgacatggcccttgagtgttccagccatgaagcacttgtgtgaggggtgatggctccactcccacttgaggccgcatcaaaggattccaacaattcctctacgaggaggttctagattgataccgacatgtagtacaccatttccccaaagtcgatgtacatgggaggctaatggatgcacttctctagagtcctactgaagagccccatggcatcacatgtgccatatgggaacgtcatatggacgtttcccg

SEQ ID NO: 83731 - DNA, 481 bp, Zea Mays
gagagaggcgagcgacgctggatgactggatgctggagcaggtggcgctggtgtagaagagggaggtgggcgacggtggaggagagggactgcaaattgacattgtaacatttcattccactggaagcatgtgctagttatgttgttggcccttatggaccatgtggcatgtgaggagttatgatgtgtgggtttagtgcaccttgttagtttagtacactacaccaaaaatgtaaacttcctacggtttactattttcctacggctttggatgaaaacggtaggaagttaataacttctgagagggtactgcgagcatgcccattcaaacatagcacctctaggctaacccttttacataaatcggtgatgaaagtgtaagaaaggtgttacgcgtgtgcagcatgcccattcaacatgctaaacgaggccacataagcagattttggatgaggggtgtttcaaacgcacacaaacacat

SEQ ID NO: 83732 - DNA, 292 bp, Zea Mays
gctggtataaattcaggaccctgggacttctgcctcgcatctccgagctcggccatcctcaaaccctacccatcagtgctcactccgtcgtggcggattcgggatcgaattcaccaaccggggcggccgccatgggtggcgctcggggccctgggttcggtcagtggagatcaccgtggtgtgcctgacgtacgcgttgcggtgtcttgtgtggtagacgaccgtggtgccgcgaattgctcgccggagtcattgactccgcggattgccgccctccgccgtggatagaact

SEQ ID NO: 83733 - DNA, 404 bp, Zea Mays
ccatgtcctacttttgcgtcacgtcatcaacaatttatccctaccttaattttttttatcttccacggtggttctctctaaatactcttatatacctcactataaccataaaatattattcctatttttcatccattataaaatttttatctactaacaattacacgtggatacaaaacacaaaacatgaacagtgcaagggggtcaccacaaagctgccgagagagaaaaatacccggtgttggaggtgctttaggggcaagcggtgcagctcctggtgacctagtggtctactgtagtcgccaaactagtgagggggaggggtagaggaagccgctgcagtcggtctgggcttcttcacaactaatgcttagtcatttactttttgttttggactttagtga

SEQ ID NO: 83734 - DNA, 636 bp, Zea Mays
catgtcctcgtcatatcatacataatggagcaatagtggagcaggtatgaggcgatagttcgatcgctccatgcacacacgacctaactatgtgagactttgtacagctcggccgaccctcttctctagtatcagtttggcctaacccctaggagttagctttaggtccgcctcttgggccgggtagaggatatcaggtggttcagccatggttcgtctggactatctccgctcccactaactcgtggcctcgagggcttgggttttttaatcccaacaaaactctaataatgttcatagttaggagctacttgagattgatgatgttgacactaaggcccctttggcatggctgactcctctaaaaacagctctagccctggctcctcttgcactttggcttctctggagaagccaaagtcgttttgcaattcgtttggcaaaacaacttctctagtgtttattttgaatggggtatgaagaaaatataggaggagccagtagaagccatatttttagtgctctggctcccaataagaaaacgactctaactctcagaggtctctcgacgagaagcagttttttgtgaccgtttggtatggcttcacgatgagctagagctagagctacccaaag

SEQ ID NO: 83735 - DNA, 668 bp, Zea Mays
ccccgcatcggtccatggctctttctggcgaggattgcatccgagatgggaggaattcctcacgggaattggattttgccgtcgtggctcatatccttccggggacagtgtccgcgctgataaactctggtaagccccttttccctcttcactttccccctagatgcgcttgggccgtattaggttgggattcatacacggggtcaccggagatttccttgtcgaacccgtgttgccgtcgtgttctgcttggacaccgcgttgcctgcatccggtggggaacataggtttctagccgttggatcgtgatctggctgtggtgaatgaatccggatgccgggtggggtagaagtaacataggatgttggatccatatcgatcggatgcgaatggatctagcccaataaaatctgggacgtaggttttcgatccggtggtctgtattgcataccacttcgggccatggtatatctaatctagaccgtccatatccgatcgcgcgaccatgacagatcggtaccctttcgccgtggcaagtttgcaaaagagtccccatcctttatggaaaatagcccgccatccctcgctggttgaaaactattacggttagatcctcggaatttacaaaatagcccctgatatctcatgtattagcgtgcacagttcag

SEQ ID NO: 83736 - DNA, 606 bp, Zea Mays
gttgttccctttagaattcatcttgttgccttagctccacacacagccttgtaaactccaacttatgctctaactggcgatgattgctagccctagattgtcgggaggaagacaagcctgacctccaacatataacctccctagagtcaatcacttcattgaatattaactaccttcagaatgaataaacggaacgatctcttgctgagctttggtgtgatgcactaagccccatgtagctccctgtattgtttcactgtattttctgttttccctattccatgtaactctctattttgttttttgatatgtatcaccctccaatgtaacatgtcatccatcaactaattgcagcggaattcaggtggggatatcctcccctgacacactacaacacgcatggtcgtttatgacaaatagttgatgacaatagagtggttcatcattagatcaccttgcttatgacgattttcagaagatgtcttagtatagtggcaaaaatataacctccgtcattaaaaccgtcataacatactctaacatccggtttgtgacaattttctatgaatatatgaatcatcataataataaatcgtcataaccttt

SEQ ID NO: 83737 - DNA, 312 bp, Zea Mays
gtttgttttgtttgtataaatgtgcatggctactctgcaccaaaatgtggtagacttaccaccacatcttcacctttctctccccgttgtcattatatcaaacattctattggtgtgatcacctagaagcaagtggctgacacgatggtggtagagcacaacttggctcatcgtggcgagcatggtggtggcggtgtaggcatgccctaggtcggtatgatggaggtggtggtggtcatgtgtgtgccctagcttagtaggatattggtcccatttgtgtaccctaacatgatgcagtgacaatgatagtca

SEQ ID NO: 83738 - DNA, 368 bp, Zea Mays
aaaatggtgaatgttggttccacatgggatgtggaagaaggtgaaatcaatttcaatagtttgtctcttaccattctttgaaagaaagcataagagagagaaagttgaagacacatgcacgcgcgtacgcatgcacatttcacgttctttttacatgattattcatgtgacttgtgatttgcgatgtgggaatctaccagatcctagagattgtgaccaagtcagtttcctacatcttggcatctggttatcatgagcctaattctctaatataatagagatgtcattctccctaaacgtacaagaaaaaacaatctactatgatttagggttttagacgagagagttctcggtgttgtccaacctca

SEQ ID NO: 83739 - DNA, 928 bp, Zea Mays
aaagaagttgcggcactattcccttgtctctctaacaatcacacttaaacccctcagtttctctttcttcgcaagatcaagtcctcggcggtgaacagtggtgtgcgcgctccgacgagcttgcaccgtccgcaacaccaaaccattcatgccctaagtcggtctacacctaattccacccctagcgatcgtaatccatccctcaattgaactaggccagccgggagttcttctgcccacgacggcgatgagacccgagggaaacccgaggtgttcccgatgactaggcgcggtatagctttattggcggggtcaatgagcataataaacacacgagagtgccgaaacacaaaccagaagggtgagagcggacctagagatggctgaccacgacggggtgactcacggcggcacggagagtggatatgggggaaattccaaattaggacgctatggtgtacgatcggaggcgagggctggtgctctggcttcttaacaacctagcagagttaacggtgcaatcaatttatagccttcgggagcggtgcctccaaatttgaggaaggaagctggcggccgaagagagggggtgagtcaccggcgagcgctatcgtggcattcacagtgcaaggacttatggctgtcactagctatccctcaaggcttgcgatgatgtggtgaaacgaccgagagcgtggcgtaaccgagagaaacggcggcacgacaacgatggtcgcgtggccatgtcgcggcgcaagtgggtacagcgaactgagcggtaacagggtccgagctcatcccaacaccaagatcttttacctcgagtcattattcatgcatcactgggcacgaatcacagcgccagcgtggatcgcagctcgggttcaccggcggcggggttcagtgaatctgcgatcttctctaggtt

SEQ ID NO: 83740 - DNA, 640 bp, Zea Mays
atttaggcgaagaaaaagagatttgggcactcggctcggaaacgatcgctcgaaacggggaatttggaaaaattaaagcctggaatatcagatgggcgtgaaattttgcaaatatcttactggaggtgttgtgaaagggtctgaaaaatttgggttcaattggagcatttttggctggtttgggcatttcaccgaacacgtgggggtggagttttagggtttcggggaaatggccatttgaggtgggaaaaccctcccgaaggagctaggaacctgcaaggatacacaagaggcacaaaggaacatttgcaaccagttggtttcacagggattcacaagaaattgaagaaaacacataaggggaggaagagaggtgcttcactggtggcaggaactcagagagacagggaaaagagagagaaggggatacacaccagagatggaagggaagatgcacttggacgtcgctggtgaagagatcgccggagaggaggggaggtcgctggcgagggggggagatcgccagagacagagagtggagacagagcagagaagaggaatgccaggcctcgggcgcgagaggggaaagattttttaaaaaaccggatatgggcgcaccggacagtctacagtgtctgtc

SEQ ID NO: 83741 - DNA, 530 bp, Zea Mays
cccccatcaaaccctagccgcccctcctcaagcccttctctccaaggtgccattcctttcccgctcggatctacgtcgcgttggtgcaagtctccaattggattttggtggagggaagaagaagggaggaaagggggaggattcaaggtgattttgagattgtatcttgtttaattgtgctataatccaattgattatatgtttacctatccgaatcggtagatgtgttgttctgaaattttgtgggtgggcgaacaatagtagttctagtgatttctggtaatttttcgtaggtaattagtggggatcagtgagtgaatcatgtagagctttgtcatacctttccaacgagtacttatgcgctcgattcgaagttatattttaggagatatcgttgttcgaatcctggtatgttgctgtccaaaaaaacaaatttctgcaggtgggcgaacaacagtagtattagcagtttcggaggatttttcgtaggaaattagtgataataagtatgataataatgtagtgctttg

SEQ ID NO: 83742 - DNA, 361 bp, Zea Mays
ggatggggcgcgctgagccgtccgatcggatctcatcggccatgattaaactactctttatccgaacaataagaagtgacggtcgtaggatcaaaaatccatggctcggattttatgaacctgagatctcatcctgcccgtttagatttagatcatggatttagattttctcaatagaatcggtacgttaccactaatcagagtcgtccaccagccgatctacggcccatattcaaggtgtccccattccaatcatttgcatccatccacggatcgatgactaccacacactcgtctccctttgatctagtgttcggtggcgccgcttgattccacgacggaggacacaccggcgccccca

SEQ ID NO: 83743 - DNA, 625 bp, Zea Mays
ttgccgtcggtgaactcacaccgtgatgcacgccgtccgccgcgattcgtgcgctgtggtacgcggataacggctggcgataaaagatctcgcgcgggggatgagcttgggcactgttacttctcagttcgtcgtacccacatgcgcagcgacgtggccggacagtcatcgtcgtggtggtcgcgtgattgcgccatgccatgaccctttcaccacgtagctatgaccgtggcaagccgaaattaccatccttcaaccgttgtatcagtgagcgccatgacagatagctccggtgactcattctctcatcactgtgggctcttctctgttcaaattcgtcgtactcgtcgtcgcccgctataaattgatgccccgacctactccgttagcttgttatgaactcagagcaccgctcctcgcccccgattagccaccgtagcgccagaatttggattcccccctaactggtctgccatgagacactctaccgtggccagccatcctcaggtccattcatccccttctataccgtgtttaagcatccttgactattaacgttgctcatcgacccaaccgcttgaacactaccgcactggatcgtcgggaacacctcgatccatcctcg

SEQ ID NO: 83744 - DNA, 324 bp, Zea Mays
cgtgtgccctcgcttgcctgtgcctgcgaaggcgttgtgtactttgtctggtatgttttgttatgctgtgctggtgtgattatagtcggtcttagcgcggatggtttgatgctgtcgtttctggttttgttgtactagttcggttgcgcccttaggcggcttctgcgtggatagtcttcgcggtaggcttcggttttttcgcacttgttgagctagtccggctgcacccttaggcgacttctgcgcggatagtctttgcgatagacttcgggttttttcgcacttgttgtgctagtccggctgcacccttaggcgacttctgcg

SEQ ID NO: 83745 - DNA, 385 bp, Zea Mays
aagacagcctccgtttgggttgcagctttaacatgttcatagccagacttttctaaaattgctgcaacccctctggcatcggcaaaagcgcagaaatcaccacgatcgctaaggatctcatcaaaggcttcagcttcttcgccgatccattcgatgattccttcgggatcgcctctaataaatttttgctcagatgtgtatgcacccaccttcgcaaaactatctttcaatttcttagctcaatccaaggatttctcataatacctcttcttcgactcccgaagctcatctacattcttttgcaatcttgcgctagtccattcgcttatttcctgttttgctttagccacttcaaaatcttcattcttctcggcaagctttttct

SEQ ID NO: 83746 - DNA, 523 bp, Zea Mays
gaggttagtgacgtaccgggacgcgccccgtggccgtggggcagagagggcacaaaattcgtccgctggtgtagacggcagctataccaaaagaacaacataattcaaatgaacgctggttataattcaggcagccggcttaggaatcgcatcgccctgaatccttttctagacggacgaagcatttataatgccagcagtctatagaaaagaaaagaaaaaaaacttgagaggtcggcaggagagaagaaatggatgagcttctgcctaagacttttgcgtgcatgcatacgctctagagggagacagaaaggctggtcaagccgtttcagacaagggcagctgcttataaatttttacaacacggcgctgaactgttgaaacgtacatgccttgtgagttcttttgcggataaaacatgtacctacctgtaaccttttttcgtcgcttcgacaagactttaacctccgaatagtccatggaattggcatttaatttgtgacaacaacctgccactcagttt

SEQ ID NO: 83747 - DNA, 861 bp, Zea Mays
tccagactcagagaaaagtggatgtctctctacaagctctagtgaagcatcaaccacttcacctagacgacagaagcccaggcagcccttggtcggatcaaggtgttcttgacctaaccaacggtcttggtcgcgcctgacctaggcgagaccccctcctctatgtcgcaatggcatgtctacttcatcagtgaagtgctgattgagtccaagacgtgatacttgtagatccagatgtttttgtatgcggtactcatcgccaagcggaagctgatccactactttgaccaacactccgtgtcagtagtatccacgacaccgctcggagaaattgtctgaaatcatgatgtgtctaggcgcatcgtgaaatggtccctcgaagtcaatgggctgacatcatttacgtccccaggaccacgatcaagtctcagacactcgttgactttgtcatggagtggacagaggcctaggagccacccctagttaacgacccagagtactggactatctactttgacgggtcctacctctagaccagaaggggcacgacattgtcctcacatcacctcaagggcacaaactccgctacgagatccacctccacttcgacgccaccaataacttcgccgaatatgaagccctcgtcaataggttttgtatagcagctgaagtggggctcgatgactcttggtcaggggagattccaagttggtcgtcgaccaggtcatgagggcgatggagccacgcaacccatagatgtgcgcatattacggtgaggtacgtaggttggaagagaagtttaaaggcttcaagctacatcatagctacagacgtttcaacaccgaagctgacgaagtttca

SEQ ID NO: 83748 - DNA, 485 bp, Zea Mays
cggtgagacccttcttacggcggcggaaaaccgatttgggggaagtgagcaattcgggggctctagtgagtaattggaggcacgagtgggtgtgttgggtgcataattacatagcagagccgagggtgtgctcaatttataggacccctgaacggtggcccatgaatttgagatggcgcggtggcggctggagagaagggggtgcactagcgcaagcaattggtggctttcaccgtggcgagctcactggcgatcaccggacgtgtgtaatacaagctactgcgacgtggtaagaaaccaaggcacgtggcgcacgatcgttgagcggctaacgccggagatgatgattccgaccagtcgcagtccaagtgggtacggcggcacaatggtgagcaagcccgagctaatccgagcgccaagatttttacccttcttcgttatccatctacgctaggcacgaatcaccgcggctggtgcgaatccgg

SEQ ID NO: 83749 - DNA, 306 bp, Zea Mays
gcgagcctgattgccctctagccttcacgcccagagagaagcctaagagagaataagacatttcaatgtttctctatgcctcccttttaatatcacaaggtacaagagagttatatccctacatggacaacaatccctacctaccataggtccaactagtcctatcttattatagttgttgtaccgtacaaagagggtgcctctcgtgtgccatagtggcgagtgtgacatgtcacagtggaaggtatgattgcccatgccaacaagtatgatatagttagtagcttatgaaggcacatatattgc

SEQ ID NO: 83750 - DNA, 845 bp, Zea Mays
tgtccaacgagcatgggtgtgattgcaaaggagtacctgttctgctcgagagaaagctagagctatgggaaggctgactaaatatatatatatgtggcacacaagtcagtaacagatagcaatgctgaataagtgttccaagtacttgtcctagttgctagcctagaaaatttaatagaacagttggaccaaagcacaagaaaagaggtacaagtatctagtgggaatggtagttctgtaaatagagcagatttttcagcactagtagaaattaaaggcgcgtttccaaaggagtaccagcaaaagagctcgaaatattctgaattttttaccactaatccaaaaacacaaaagatggaagcacacaaaatttcacttgaaacagagttgtattgtgacctagagaaattcacaaaggatctctgaaattcctgaaaacacttaaacaatttttttaattatctttctgatttttttgaattttttgaccgaaccaaataggccgaatgcgagtttgggtcaccccagaatggagtcaggaatctgctgtaaaaaattgagctcaaacggagcaccgagcgaaaagttatgcccgttttatgaaaggtacctcaagttatggttttcaaaggcacaaatcggcaggaaccgaagcggcggctatgaagcacagggttggttttagagatacgatttgttttatggatacagttggtttagatacaggatctgttttgtggatatggtcggttttagagataggatctgttttatggatagtgtcggttgtagagataggatctattttgtggatagggtcggttttagagataggatctgttttg

SEQ ID NO: 83751 - DNA, 551 bp, Zea Mays
ccatatagtgccacgacccccaggcacgcctagttctctccttattcttgccctcgcgagtcgcgaccgccactaaccccactgcaaaccaccgccgtgtccgcccgggaagaagccgtcgtcggtgaatctcatcacggcgcgttgtttgtcctcagcgttgggccgggaagattgccttcgtctgggaaagccgtctgtgccctcaattcgagtcgaaccccaccggaacgcgtgtaattgctcgccggacttcggtttccgccgtgcgccgtggggagctgggttcgcctctttgaatcgtggtgagtagcatcctacacaatgccctacggttatcgctttgtactgctgcgatcagagtagagtttaggggcggcaatcgcccatgacgcatgctccggcaacggcgccgtcatccctggtctgtgcgccgccggagtttgagcagtgtctagggcggggtggattgaccgtcggatcagttctgtacggcttagattagaaattgcaataccccttcgtcgcgtttgagctgtatcgttgatcgc

SEQ ID NO: 83752 - DNA, 516 bp, Zea Mays
tcaagggtgtggtacacaagcgaaggacatgatagattactgggagacccaggctctgccccatagtcacctgggcccacttgtaagcccccttgctaggtagattttgttgtatgtcagaattattgtactccgtctattgtaatgaccccgataaggggaatattccaggaatgtagtaggtaaccgagggtatagcaatacttgggaacccattgcccattccagttacctataaatacctctaccctatacacggatgggacccagagctggtcgtggccttcaaatcactaaagcagtatctattcgagctagcaaccttgaccagcctagaccccgcttccccctttctcttatacattgcaacctcccacaatgtagtcagcgcagccctagttcaagagaaactcaaaggcggcaaaccacaacatcacctagtctatttcatattcgaagtcctcaccaattcaaagtgcaacatgatagagctagaaaagatagcctatgcagtca

SEQ ID NO: 83753 - DNA, 527 bp, Zea Mays
agaagcggacgggagtctgttgtggagtgggcgggtgggacgcaacaactgacatggcatggaggttgcggatggcgtgaagacgcggagggtgcgggaggcgacgcgggtgttggtgagcgtgtgcgagcctggggaggatggagtcatggtctgcttgtgtacggtaggggtgagttggtgtgcgttttggtgtgagtgtgtgcatacatgaacagatactacaactgtacttgtaagttagaggcaataaaagccattgcgctgcttgggagacttgtcgccaactatacactgctggggctggggttgtttctgcgcttaaactcaactgtcgcttctacgtgcatgtagctgttgctaattgttgccagactgtcgagccaccaggtgtaccaagctgaagctagttgtgttgggcttgggactccgatgcaaggccgccatgcttgggcctcgagatcggaatgaccaatagaggccgcgacgggctgcatatctgccggtggggtctgaggagggtgaag

SEQ ID NO: 83754 - DNA, 913 bp, Zea Mays
ctatacctcttatagccgaatcatgagatgtctcgacgtcatgatggaggggcaaaatctaatagatcaatcagcgcactgcatataaccattcggcgtcatgatggaggggcaaaatctaagagatcaatcagcgcactgcatatatccaaatcacgacgtgctctgggaaaccagagaaattgcagatacaatgttggaacacacccatcactagcacaattgtcaaggttttgaacccatcagtagcgcaaattatcgcacacactttcaaataggcaaattgaactttggggtagccgtgctaatgccaggacatttgtgttatacggttttaagctaacgttttattcctcattcatgagttgcctataaacaacttcatgatcaaatattgaatagatacatatttatatacattagtttccaattcaaattattcaccgttttgaaagtttccaatcaatgtcaaagtaagttatactacaaagaaggtataactgaggtttttgtttggtgactagtacaatgctcgtgcgccgcgacacggcacacaagaacatatattatactttatcttagtcaaagggctagaaaggtatgtgttgaaaaggagtccgactttatagttcgctgggtcgctcgtccttctctaactagctgggtgatactatatgtgggagcactacagtgcgtgcagctttctgtcatgctaggcttgtgtgatttctcatgttccatctgtgggtaacgaccccactaataggacttggataggttttacggtctatctataaggtaacaactcattgtaggggaagggaaatcaatatacgcgtttcacgcgtgatgcagccgtcaagaaggtgctttatagtagtaaagaagcttcagctaaatatgactctaattc

SEQ ID NO: 83755 - DNA, 383 bp, Zea Mays
gttggaagaatcggttcatgggaatccttcgtccatgccactcacttctgaataggaaggggacacatgtgatatagctagaattaatgataccactattgtatagaatgttggtgatatagtgtagggaggtaaaggtgcatccgctaacattcctaagacagtgtggtggccactgagggcccgatgctattttcacagtctcaacatgcatttagtattctaggatgacttaggattgagttgtagggttgtatcataccgattaggtggcggctcgatatcagcctaggaaggagggttgtgccaatgatggtgatcttatgggtgcatgtgtaaatgctctatagaattgatcgatctatacaatgtccatggtgatt

SEQ ID NO: 83756 - DNA, 1136 bp, Zea Mays
gacgggttgtttatagggttctacggggtctctttagcaaatgttacatcgcgaaggggtaccaagcatcctgaaccgtccaatcgtcaatcagtggctacgattagatctgcattaatccgaacgggtatgcgacgtggaccgtccgatcttaatctgaaggcccaaaaaccacttaaccgaaagggtatcaaccatttcaatcacagtcgtccgcggctagattaacggattggattgggtgatgagactctatgccaaggatctaatccacgtcgtcaatttcgtcatccacgaccagtacgccttcttcatcctcccgagtataggccgaccggcgcaggcacatcagccgtggtggcgccattactagcgcatagggtccacgtgattccacccccaaacacaagaacaatcgatgccctacgacgaggagaataacgcaaacacaaaaagggcacttgccggagacggacatcgccagtgtacgttggtcacggcaaggggcgggtccgcggttccccaatctcaccggtgagcaatcccggtcggagacagccgatgcactgtttgataatgtgacacgcagctccgtcatgttacgacgaagctccagcaccacccttcccaagtcttacggcggtcgacagtgaacacagaccctctctcctggccccgagcaccgcgagtgccggcgagaccataaaaaccctcagggcgtattcgttttggccgggaacggcgaggaatgggaataaaaccacgtggatctgcctggtctggaattcttccccacccatggtagaagatgtgttcggttaacctactcgaggatccatccccggtcgattcccggcttctaccctgtccctggcccgggaagcagcccccgtccgaagggtgtggaaagaatccacagagcacgacgccgagcgggcatcggtgacaacgcaaggcggcatgacagcggggctgcacacgagcggcgacggcagggctgcgcacgagcggctatgggggctgcagcacggatctggccctccctcgcccgcactccgttccgcgcgccgtcgcctcgagcctcccctccaatttcgtgagtctctctcgcctccggtcaaatcgaacagcgacag

SEQ ID NO: 83757 - DNA, 1065 bp, Zea Mays
agaggtcgatggtgaagaccccatccaagataggctttcgtcctaacgtgatggttgaaagcttgtctgcctcggcgttgaagcgtctgtagctatgatgtagctcgaagcttttaaacttctcttctaccctttgtacctcaacgtaatatgcacacatccatgggctgcgcggctccatcgccttcatgacttggtcgacgactaacttggagtctcccactcactaggagtcgcctgacccccacttcgaccgtgatccagagcctgatgacaagggccttgtattctacgacattattggtggcatcgaaagtggaagtggattgcgtagcggagtaggagtttgtgtccgtgaggcaatgcgaggacgatgcccgcgccgcttctggtcttgaggcaggacccgtcaaagtacatagtccagtactcccggtccttgactgggggtggcttctgggcttccatccaatctgcgacaaagtcggtgagtgtctgagacttgatcgtgatcctggggacataactgatgtcgagcccgttgagttcaagggaccatttcatgacgcatctggacgcatcacgatttcgccgagcagcaccgtggatactactatcacggtgtgtcagtagaagtagtggaccagctttcgcttggcgatgaatatcgcatacaacaacttctagatatgcaggtatcgcatcttagactcggtcagcacttcactaacgaagtatatgggcctctgtaccttgagtacatggcccatagtttttctttccaccaccagggtcgagctgaccacttgggtagtggttgccacgtagaggaggagggtctcacctggatcaagcatggccaagatcagtggtgaggttagaaacaccttaatccgatcaagggcttcttaggcctccgctgtctaggtgaaatggtcactctttcgcaggagcttgtagagaggcatccccttttccctgagtctggaaacaaaacggctgagcgcggccacacatccgaccaattgctacactcccttaaagttctggatggggcccatgcgt

SEQ ID NO: 83758 - DNA, 591 bp, Zea Mays
gcttcggatatactatgttatctgccatctcccggcagacagatacctccttatcgtccggaaggcaatacaaaattcgtcttcgtcagtaccgttgtatatcaaggatctcttcgggtactttagatccctggcgtattgtttagctttggcaatctactcttttgatagctgcttccccgaagcatgtcgcacaataaagtctagctcttcaacaagcattttgggagtaggagacttaactttcttgggcacattttcttcttccaaggtcaaaggagtagcttccgaagcatatgccttgatgggagctgatgtcctagcttcgacagtatctagtgacaaaccagcttcgctagatttctttgggatttcaccttttctatcaggcgttgaagcgggggtttgtatttttgaagattccataacaatgtctagtacgctggtaattctcctcctttttggagttattgcaggaattttggacaccttcggcagctccagctcttgtggtgggcttagggtttttggttgctctaccaacctccttggttctggttttttggccgttttttccttagtttcggcagg

SEQ ID NO: 83759 - DNA, 369 bp, Zea Mays
ccagaatccatgtcagatattcacaatgtgtttcatgtgtcccagctccataagtgcctacaagtaccagagaaccacattgaggcagagacaattcagattcaaaaagatctctagtaccgggaaaagccaataaagattcttgactcagcagtccgaaagactcgcaactcagaagtaagactctgtaaggttcagtggagcagagaagaagaggaagctacctgggaaagtgaggactctctaaggagggaatacccttaccttttctcgagccctgtctgaatctcgagggcgagattcctttaagtggggtaggtttgtaacatcccaattttcaacccgaggtttggaaccctaatccaaccc

SEQ ID NO: 83760 - DNA, 342 bp, Zea Mays
caacagtcgtgcttgtttaactatggagggtaataggattcgtttggctagcctagctgcacgcaagagaggacgacctcctggtttgaggaacaaaatcgggggtgctgcaccacagtggaatgagacatcaacatcaaaaaatgcacagtgtatgtcaaagatgatgattcatctgctagagagtagaataccaaaagaattatgagatcatggggttttttgtggtaactagtattgcaaatggattaatggtggaccttatatttgcaatatacgttaaaagtatagtggatggaacaaacaagacacaaagaaatatgctataaaaattgcattatg

SEQ ID NO: 83761 - DNA, 627 bp, Zea Mays
cttaggtgctttacaaagtgcttagattagttagaccactatcattagtgcttgatctaggtttaggcctagtgattagaagtgaggttatacacatctattaccccttgatgcttatgtgtgccattgtaaaagttgtatcaagatgggttgtaagtcttgcgagatcacactaagtgtgtttatggtgtggctaccaccatgtactagagggaacgagacccataacattttagctagaaactcgatagtggagacattagggagcatttgagagaggccacaatcaaagcaccacttgcacatgaagtagggctatccatggagttacttgtccagaagcttggcctcacatatacattcccttctatggggatccaactagaattaggggaagcttgcgtgcttgtcgatacatcggtaaaaataacggtgcatcacgagagtttttatctctaacacactttaagctttcatatttacattgttgccttggttgtttgatttaccttcctagcttagctataggcctgaggataggtttttggaacatgaattatataactctttgaggtatagatatcaacacttagacaaaaccgtaattacacataatatagttcattt

SEQ ID NO: 83762 - DNA, 456 bp, Zea Mays
agaggaagttgtcccttttattcgcaagaacaaccacagccatagcagcaatgatggcccaatgaaggctttatcgggactagttagtctctaggggttgacgatgtctgccattgaccatgcgctagaggaaattattcctgaagaccttttattggagactcctgaaaccgaaagttctgtcgtccgtacagaggtccaggatgacgtccctttggctggtaatcctatcgggcaagaaataacccggatagtttctcacgcttcttcgaccttagagggcggtctatctcacagggacacattggctcttgacgttgcaggccagggtctcctagctcttgtgggtatgactgagggtgcttcagcttccgaaggtgccactaaggataacctagcccccgagggtggtgttgaggatgacccagcccccaagggtgccgagcttggttcctc

SEQ ID NO: 83763 - DNA, 400 bp, Zea Mays
gcgaggtagatcgttcaccatccttgccagcacgcctccggcctgcttgaggtttgcatggactgggagaactccaactgtaggtcatgaggagggagtggacgctcgcgatatgtcccgacgttacaccagaacgcttcatcctcacgctcatgggcgaggcgggagttccattccaggcgataaccccactcatcgggagtttctcccaccacagacatctcgtcccaggaaacatgttcggtcgggttccattccccagcgatatggtgacgccggatgttgcaacgatagttccgtcgatgacgtgcctctcgttgcgggggctcctccccttgcatggtcggctcatcatcggagacatgattgttatctacagttgtgttgatgtagagtacgc

SEQ ID NO: 83764 - DNA, 383 bp, Zea Mays
gccgaagctaaagtcattggagttgttctgacacaagagaccgaaggaaaggagcatatggtaacctacctaagtcggagtttgatggatgctgaaacaagctacactttcatcgagaaattatgattatgcctattttatgcatgcaccaagtgtaggtgttatttattattgcactatttacggtcaaaccgatgtgatcaaatacatgttgcaaaacccgatcatgagtggtagaattggtaaatgggcttatgcacttatagaatatgactttgcctatgaaccattgaaatatatgaaaggccaggtcgtagtagattttattgtagaacatcggattgataatactcataaactagatatatcatatctcactgtta

SEQ ID NO: 83765 - DNA, 547 bp, Zea Mays
gccgatcccatttttagaagcgaattaccgaggcctgcacccaagccgccatataccgtgcaaaccctagataactcattcggaccgtccgcgtatgacaccagacagtccgaatataatgtcgaacggtctgcgtatttaaccggacggtctggcacagagttttttttgagaaggatggatatccaactccttatccatgctagctagactccccatctcaccatacgacacaccagcaccataatataatctaccaaacccatgagagtgagtactttccggcccccagaaggccagaaaggaatggccagtcctacgagcctcatacgacatgtattaacgcgctgcaaaacctaaaccaatagggaggaaaacaacataccaacatccaaacaaactcacccatattggaccaaagagccggtggtctcccaccggctgccatcgatatagtaagagagaaaatagctgggacgttccgagataagctcggagttagtatagtccccggagggcattcatatcggagaccttataatagcca

SEQ ID NO: 83766 - DNA, 468 bp, Zea Mays
aataaaaatctagacaaaggtctcaccttgaaattggaataaaataggctactgtcaatttgttggcgtcggtaactgctaatgtcggcctccagctttggaaacccaacactcttggatagagtgccgattatctttgccccggcgcggtgacaaatgcatcctaaaatttcctcatcaaccccaccgaagagcaaagaccccggctggtaacctcaagatattgcaaattctttcaactccaacttgtcttcctcagacagttcctggccgcccaagtgctgaagatcaatatccctctcgtctgaaggagtattatcaatttccttttctttcatctggcactgcggccatgatttcttctacagctacatttgtctctgcagtcacatctgcaaccatatctgatacaagcctatcaacttctgacattgtggctgctagttcttcagctttggcttcgccagc

SEQ ID NO: 83767 - DNA, 1718 bp, Zea Mays
ttttgaacaatttatttagtagataatctaggtgctggaaaataaaatctaagtgaggtgtttatgatcaaacaaagtgtatgcatatgatgggaaaaatctaagggagttttgggatacataataagaaggggggttagattagggtttcaaacctgggttagaattttgggatgttacaaacctaccccacttaaaggaatctcgccctcgagattcagacggggctcgagaaaaggtaagggtattccctcctcagagagtcctcacttttcccaggtagcttcctcttctccatctctgctccactgaaccttacagagtctcacttctgagttgcgggttcttcggactgctgagtcgagaatcttcactggcttttctcggtacttgaggtccttttgaatctgaattgcctctgtctcgatgtggttttctggtacttgcaggcatttgcggagctgggacacatgaaacacattgtgaatgtctgacatggattctggtagctcaaggcggtatgctgcaggtcccactcggctaatgacggggtaggggccgacgaaacttggtgctagctttcctttcatttggaaccttttgacaccacgcatcggaagaccttgagataaacaaaatctccttcctcaaatctgagttctcttcgtctgttgtctgcataacttttctgtcggctctaagcttcaagtaacctcttgcggatcaaggcaactttctcttcggcttctttaacaaagtcgggtccttctagtgtcctttcccctacattggaccacattaggggggtctggcattttcttccatacaatgcttcgaacggtgacattttgatcttggcctgatggctgttgttgtatgagaattcggcgtgcggcaaactggactcccaatccctgtcgaacgttaacacacaggctcttagtaaatctttgaggatcttgttgactctttctgtttgaccatctgactaggggtgataagcggtgctaaaatctaacttggtgcccatcgcttgctgaaggcctttccaaaagtttgaggtgaactgcgtccctctttctaacactattctccgtggaatgccatggagcctgactatctccttaagatatatccgggcaagggcggctcctccaaaagcggttttcactgggatgaagtgggccaccttggtgagacggtcgattattacccagatagaaccattccctttttgcgttcggggcagtccgattacgaaatccatgcctatgtcttcccacttccattcaggcactgggaggggttgcagtaggcctgtaggcttctaatgttcggcctttgttcgctggcaggtgtcacaccgggccacatactgtgctatctccttcttcattcctctccaccagtatctggctttgaggtccaggtacatcttggtggttcctgggtggatggagtaagctgagttgtgggcttcattgagtaggacttctcatgcctctcccattggtacacacagacggttcttgaaccaaaggactccttgttcatctgtcctaagatccggaagttgctccttgcgagctctctccataagtctggctgtctctacgtccaggcgttgagccttgcatatgagatcttctagcattggcttgactttcaggctaccgttgtctcccagacatgcatttagctgagctgattccttcttc

SEQ ID NO: 83768 - DNA, 454 bp, Zea Mays
ctagtcaaaaccttgttgcatcaacgatattgcttcgaaccatgccagagtcatccaccactgaaggacaccgaatccacgacgagatcaggggacttctggagtgtgctacggttcagcaggccaacgagatctgcctctcgtcttcggtagcctgcctcaaagcaacgggcaaggccctctcacctagagaggaaggtctcagtccaccccgagcccaccatggagcaagcactcgcagttgaagaccgcctcctcgacaactgctagaatcacggtgttcacgaccgcctcggcggacggctacaccacaacaaccgacgacacgccacacatggctaccacccttagagggtggtcgctacgacagtggggaagatcgaagcccctctctcgagccaccaggtgcacaagtcttcagccgaaccattcatagggcatcgttcccggctcg

SEQ ID NO: 83769 - DNA, 581 bp, Zea Mays
ttcgaaagggtcacaaggcatggcagaagtatttagaacctacatcaagccgaagtcaaacacgttcaatccttcttggtcatatatagaatccacaaggtggtttccactgtccaccgacaccaagaggtgatagaggatgccacaacttcagataaaaataaactcaaagcacacaacaacgaaagttgtattgtgtattctgtcgagaaaacaaaggccacacaaacaaggattatgcaattacaatacaaaaataaagagaactagtagctgctaattaggagaatcagccaaaggaaatatgtcacacgacatcttactgtcccccacctcatatccaacgatatgttcaacattaggggtcaaatacacatccttcggcttccaatgtttcagcacacccgtctccgcctcctcaaactgtagttcctattgtacatccatcatcatcttctcaaacttcacatgctgctcctcatcctctttctgacccaccctctgccacaagcatcgccattcagggctccaccaccttctcctcaccctcttggagacccactgtctatgccaccagtaac

SEQ ID NO: 83770 - DNA, 682 bp, Zea Mays
cgaaaaccatagactcatgggtatcctccgtgggcacggtaatcccttgccaaatgcgccataaactcaactccttcgaaagaagaacaccaatatggacctagtggagcaaatcaaatacagaaacaatggaagcatagttaccacataagaggagttggttgttggggccgatacgggggatgacggtcgcctcatcccctacttcttcttcctgggtgccatgagaccttttgtaagcgcggaatcaagcatggagtcaccaaggcacaagaatttcataggggagaattgaggtgaaagaatagatctagggtttgtctgctagaatccattaggaagtgggcatgtatactctaggcctaccataagcaccagcacaagggaaacatatttttagatcgaatggaaggaatgctaagtcggacgaactaagttggacagaaaacatgtttctacgcaaaatcagttgggacacaagaaattgaacgaaacaaggaactcaataccaacaatcaaacttcaaatgcaggatgagaaactcagtactcaaggtagataaggccagcaagttttattcatataagcagaagtaccattacaaaagaagagctagttcattaggaaatgacccttgcaaaagacccctaccactactactacttctactactacacctacc

SEQ ID NO: 83771 - DNA, 432 bp, Zea Mays
gtgaggtaggagaacgcgccctgaccgttgatgcgtggatgaagggttgagattagatcccgtgtaccctttcgctaggttcgatctggtccattgatctagatcggacggatagaaatcgatctagagtaataaaaccctcaccgttgaagtcggatccgacggttagattcgtgtaccggttcaaagttaatagagatctaatccgggccatgtagctgagatcggacggcccagatctgcccatacccgttcggcctggacaaaatgcagaacagcccctcggttttatcaaaaccaacccgccgtcctgcgcagtggggctctgtgtcttaggaaaaattatcccgagcaccctgggtttctctggttttgtgcgcctgatccatgagagtaagaaaactaggaaattaaatagaaaatagattttta

SEQ ID NO: 83772 - DNA, 481 bp, Zea Mays
attttatacatagggatggactgcgggttcgtatatcaaaatcacgagggttcttatgcaaaaagcgctggccaaaggggtaccaagcatcctgacctgtccgatcttctatcagcgtctacgattagattagcattaatttgaatgggtatgcgacagggacagtccgatcccaatatgggggcccaaaaccacttaactgaaagggtatctgccttttaatcacagtcatccacagggcacccaatggtccaaattttattaaggcacggtccaatctaacccatcggatagctgatcaacgactcggatcaaaagagcaaagaggtatgcatcttttaatcgggagcgtccatcggaatccaacgaccatgcgctaaacgcccttctatctaatcgcatccgtcgatgagccatccgacggacgccactcttctctctcccgtcgacggccgacacagtggcaccataaccatcgctg

SEQ ID NO: 83773 - DNA, 620 bp, Zea Mays
ccggatatggtggaggtgggatcagtggatgccccggctctctcggtagctccggttgaggagctggaggcgcccggtcaccctccagggttggcgttggatctgacagaagatttgggtggttcgacgcaggatgtcatctcaccggttaggccatgcttggaggttcctttggaggtggtccatgtgaatgatttggaggtggatgtctcagctgggcagcatggattcgggtgctcccatttggtggttgatggtagttccgttattggctctgtcagggcgagaaggcttgggtcttgtcagtcttccagggctgatagatggaaatctaagccacctgtgtttaaagtttattccagaagaagattatctcaggctcagattgttcaagaagaccttttgttgcaatatgtggtggaaatgattccacctttggaagagttcaagtctgcggtcactaagccttctgatggcctgttaccaccacctcccccccgaagtaccaaaagaagaaaaaaagcaatgccaagtgattttcgaccaaggaggagtaggagagtggctaaattcccccggagtttggttcaatttcggctgctcaagtgtgtaggcgtctg

SEQ ID NO: 83774 - DNA, 707 bp, Zea Mays
cagcaacaaaaccccgatgccgataggtgggtccgggttgacagccgctcatccagccataatgaccatgccaccgtgtgggccaccgtcagtcctcctctcacgcacacatgtatcgctatttggtgggacccgcaggtcagtcggccccaatcacctgtgtaccttaacgtcgctcctacgtgggcctgtaatgtcagcccttcttcccctatggcccttaacagattcgtgagcaatcccatgatccccggcgggcgtgacaacctcgtgtggcatccgtacctatgcaccagagtgtgatagggaagaagagcatgccaccatcgtcgaccgatgtgttgaatggcgctccttcctcgacgagtggtttgagtggattgagaggcttgctgatggtgctagtgtcctttccatcccccaaagtttggcagtcgtgcctcagttgctcgccgggggtcgtgcgacaccgtcgacctgcaccttacaggggccagggtgctctttggcgcgattcatggtaagatcactcctatcgagttcgtcgtagccccaacttcgtatagcacatgttggatcgcaatttggtcctcgggttggctagaaggcttttttcggcgacgcaaccgccgtggtctgggtcgctgtcacaatgggtgccagcggcatagcatcggggtgacttggaccgttagatccaagcgaac

SEQ ID NO: 83775 - DNA, 899 bp, Zea Mays
cgggggaagactctgcctcggaaggacccgcccccaaatagccccaaggcaccgagctcgggatcgggcgaggcgaaggcagaagggggcagggggtcgagtgaaccaagagaaagccactcgagtggaaaccacatccgaccaaggactgacccaccataaatgactaaccacattaactgtgcctagcaccgagccacggtagggaagttggtcctccttccactcatgacctacaaggccattgacctgcaacccactcatgacctacccagtctaggcctgagtaccctagcaatctatagggcccgcaacatgatgagccacactgagactcatagtacgaagggcaggggttggtgcgatgacgctggagctcctcgctgcccacgcataaccgaacttaaagatcctagccagagagctcatacgaccgaggtgcataacgacaagcacgtttttaccgatgtagaatgcttcgttctaccatgacgtagtaactccttccacgagaagctacctataaccgatcccctccttggtctataaaagggggaggattggctgagacaaataggggacaatgtaggcaaagccgaagagcacaccgccacgacacccaatgcttagctaggtagtgaacactaggtacatagtccttagaccttactacacataagagaattaggaactcctccctctctcgcccgcttgtaaccgctactacaagcattgagtaacccgaaccagtataaatcttgcacccactgagcacactatctggatctagaacacatacaaacaaatttactggtcagagctatttctaaacaccggtagttggcgcgctaggtaggggccttgcacgttctcgatgtcctcttcatcgagatctggat

SEQ ID NO: 83776 - DNA, 886 bp, Zea Mays
tcactagatcaccatttcttaatagctaaataaattccacagatttttgggaaaaaaggttggctgtcacataagaagtcccagacaacagttctgtaatatcataaaacaacctcaacctatcacaaagatgcatagaaaaatttacaatcttcttctgttggttgaaaaggggcacacaatttttccttttttgcaaggcgatcaaaaactggagtataaagcattgcagtgctaagcattagatatgtggaattccatctagttttaacatcaagtgctattcttttgtcatacttaatgccctcttgaccaacagccttttcaaatcgttcatgcctttttggtgtagatgaccaaaacccaactgtgtcccgaatcctaccaattcccacttccatgacttttactcctaatgcatcctttatacccatcccatctttgacaataagattaatgatgtgagcagcacaacacatatgcaacaattttccatgcaagatgaggaaggaaagaggcatcttatcttgcatttccttcataacattatcattggtgctacaattgtcaagagttacagtggaaaccttcttgttaatcccccaatccatgagtacatcatgaagtacatcacttatgacttcaactgtatgtgggtgtggcacatacataaacctacaaaatagagtaacaagaaagtgtccactataaatactagtataaatgcatggatgcagaaatatagagcagcagaaatattagcttaaaagatagctttttagactccaattttcatcaatatagtgtacagtcactgccatgtaacccttcttttgatgatttgctgtccacatatctgtggtgaccgcaatacgagattgttgtt

SEQ ID NO: 83777 - DNA, 429 bp, Zea Mays
ttggcattgggatgctcagatattattttcaattccgatgtaggcatcacttgaaatagcttcaattatgtgccttccttgagaattcggttcactctgcttgggttacaatgcctgaggattgaaatagcggaatcatctgtgcactcacaagatgagcagcaaaaagtgaaagcctatttgcaagtttctacgtttgatttgcagtttctgttctaaattaagttgttcaaatatgaacaatgcaaacaaaatggtaaaactgaatatgcctctagcaacacacgcgagatttcacatacagtatttcttagagctgcacatcctgatatccagctctaggaaatctatttgccaaacaaggagtgatttagactatgagtggacctctgtttgccaaacaggaatgcttgtagcggtaaactcaac

SEQ ID NO: 83778 - DNA, 730 bp, Zea Mays
cggtggccgaggagcttcgcctcggggcactgatcgtggttgtaacagttgcgggtatagagaaccgttttgtgggggccgaattcctcaccggcgctcttcaccgtcgcggggtccacgtttcgtcgtggccagggtagtccacgccgcgttcatcagtgagttttccctccctatctgttgcaattccttctgctttgctggcgactgctgaattggagtttcaggcggagatgcaaacttagggcacgggtcggcgatggcgcgccgacgtggatgggctggtgctatcacggttctaggccatgggaaagtgatagatgtggagagcaatctggccatcagatcggatttctgcgggcatgattagattaactaggtaccggtttgtctgggtgatcggtgttcattggatcgagaaatgtggataggaatagatcacgcttcattaaaaccgcaatcgttgatctacgatttgacgggtgacgatgcgtaccgattcatttaagggtcacatccattctgatccgctgatttgtgatcgaatggttaagaataggtcaacatgtgaatgttccttgggccgtggatctcggatcctagcatccagagtgcataccgatttagggtatggggagatctaatatggaccgcagaattctaatcgtgtggtagggaatggtcgtccccctttggtcggtgcagattaataaaagagccctcatgtttt

SEQ ID NO: 83779 - DNA, 855 bp, Zea Mays
atcacactagttgagcatctcaatatcaccaagccacatcaccaccatggctaaaataactcacactagtgtacctgtggactaatcacctgtgtatctcaacataaacacttattagtccatataagttgtcaatcaattaccaaaaccaaacagggtctcacactgggggagaaatagaaactcgcgctcgtcgccttcctccaggcaaatgccgacgtgttcgcatgggagccgtcgcaaatgcctgggatccctagggaggtgatcgagcaccatctgaagatcaaccctgacgccaggccggtgagtaagaagcctcgcggacagtccgtcgagcggtaggacttcatctgaaaggaggtccggaagctgctagacgccggcttcatcgaagaggttcatcacccagtgtggctggccaacccagtcatcgtccccaaggcaaatgggaagctttggatgtgcatcaactacaccagccttaataaggcttgtcccaaggacccgtatccacttccgcgaatagatcaaatcgtggattctacctccgggtgcgaccttttgtctttcttatatgcttattctggtttccatcaaatccagatgtctagggaagataggaagcatactgcttttgtaacagtggatgggctttactgctatgtcgtaatgccttcggtctgaaaaatgccttgccaacatttgtgcgggcgatgagtaagactttcggggacctgatcagggacaaggtggaggtatacgttgatgtcatcgtagtcaagaccaagagagggtcgaccctagtggaagacttgaccctggttttcgacaagctgcgggcaacccgcacaa

SEQ ID NO: 83780 - DNA, 293 bp, Zea Mays
tcttctctgttttggtttctcttttccacccgtcagtgagacagtgacggtgtgtctgcctgtccgtgtttctgaccggagtggacagccattactgcccctctgatctctgacggtgccgccgtgatgactgatgaagggggtagtgcagagcaaaggcacgcacggaccatgatgagatctgctcggaggagttaaagaccaaccagtgccaatctccaatctcgtgaccagatgcagacgcgtgcgcagaggatatcatcatcatcgaccgcaagcagcagagtgccagc

SEQ ID NO: 83781 - DNA, 862 bp, Zea Mays
ggctcaaagcagtcgagcacataaggtaatatcaggcaaaaacactaaggtggcaagacaaaaaaataaaactcaagaacatagcacctggccatcttgtcctctgaagggtatctaacccagatacaacgggaaaattgcaagtaaaatgggaaggaccttttcttgtaatagattcgaacagaccagagtcatataggctcaatgtcatggaaggaaatgacattccaagatcatggaatgcagatgagctccgaaggtattacgtctagttagcaagattcgtcaccctttttcttataaaggggagtaagggtttttaacgaggccgaagatgtagcacctcgcacgagtacctaagaagaaaataaaggtgctttattccccagacgctactacgtggtacattggctttatttctaaggtatgcaccagagctaaaagatttatcaccaagtaaaggtgaaaaagctctaaagtcattcctaaggggatgcagagctaaaagatttatcaccaggtaaaggtgaaaaagatctaaagtctttcctaagggaatgttgtaacaccccaggtgttacttagggtttgcacctaagactacacaagtaagcccatcatcacatgtgacttaacttgagtaaaggaattcaaacatggaaatcaagatcctaattaagtgcaacctatcttagatgtcaagccttggcttaccatgcacatagaagggggagaaattgcccaaaaccctaatgcaccccctgtggacaattggagtactataagtaagtatgacccaaaaagcaatgaaaaccacttgatcatgtcttgggccaattataaaagatgtagtgcactaata

SEQ ID NO: 83782 - DNA, 358 bp, Zea Mays
cgtcgattttttgaagcatttcggtcgattgaagtggatttgattgtaactcttattctccagctaaatgtgtgatttgtatccgtttatacatctccctaatcgggtcattacatcacgcattgcatctcttttttgttcaggagccccgatattagagaatatgtatttattctagatcccctctatcgcccgacattcatagatctagacaaaggctgtggattaggtatttattgatgagttagcagagagtactcttacacaacccaagtaacacatatatgcttattgtatttgatatatatgcatatcttcagtactgtttatgcacattcacttgagtcatttgttacac

SEQ ID NO: 83783 - DNA, 283 bp, Zea Mays
ggttaagagatggcaccaccaaaaggagattatcctatgtctcagatcctcgctcggattgaggaaggcaattgggagacccatcgaaggatggaggagatgaaggtgtcgatgagcgggatggagacaactgttcgaagtgtgttgatggagcaatgtgaattttagaagtggcgccctgaagtggagcacaaggtgtcacagatcagggatgctctcgtggggattcaagccaaggtggacaagttcatgcatccgactacacctgagtaccatacatcgg

SEQ ID NO: 83784 - DNA, 333 bp, Zea Mays
acccttgttctttttacttggggtgtcgcatgtggctgttgtttatttggttaaaaaacagagataagtgtgcagattagcagccctggctcgacgacaacttaatttataagtggactagaattagctggtttaattaagtaaataacggtgtaatttctgctgcatgaagtaccaacaacagatagtttaattccttgtcagatccaactagcctgcagatagtttaaatccttgtatagatccaactagcacatgtcttatacatctatatgaaatactttatcctaggactgaatctttgtccaaaatctcaagttctataattccaat

SEQ ID NO: 83785 - DNA, 811 bp, Zea Mays
ccggttactgagttcgcacaaagaggtcatggacgcatgtagtgtacccgacgaccccaacacacgcgtggatcagaaccccgacagcgctcacaactctctcacctgcacccggcctccatggcggttgactaaagatggctcaaggtcgagcgttgcttcatggaaggaggggggtatcaggacggcttcttaaaagggcagaggggcgcccagtttgttgtgaggtgcgcgcaacccgcggaataggtggaggcgggtcacaccggcatgcgcgcaaggctgttaggaggtaggcgaagctgacaacgcgggggccaccgctcggtgctcaatcatcgcgagctgttacagggcgcggattcggggaagaaggcggacctgaccagtgggccccatcgcgtcagcgaccgagcaccaggcgagcgcgtgggtcagaggggctgcaagtgggacccgcaggtcagcacctatgcgagcgtgaggaggagttattgggctgcgcgggggtgattcggggttgggccgaatggcatgaagtcggcccagctgcaagtttttcttttttttattttatttccctttttcttattttgtcctccacattcatgatttaaatttccattcaaattttgaatccaaacagtgttgtgaacctgtactctagttaaggtacaatatatttttacttacttatttttctcttcataatattcatttcttctcttttctaaattctagaatcccctttaaatcttaaattctcatctaggtactaatattctctttattttattttattttatttttt

SEQ ID NO: 83786 - DNA, 497 bp, Zea Mays
aagttcataaatgcatagaatgatttagtttgtgtttgctccaaatttttagaagtgtttcaagtgccaaaaagcataatgctatttttcttgaaagaactattgaaaacatagtacatttttttactgcattgtagatcctatttttggcttttaatataatgagatacacaagtatttatcagagaaagggagaaagggtcttgctagaaatctgtgtttgatgttgagtttccaactttttcaaggacaaaggagctcatccttatatttttccttcggggccaggtgcaggtgcaaaaggcccaatttatgctggttcttggtactccgtggctcagcgcacaggcaacatgtgcccttcttccacctcacgttgccactcttgaggcctcgaggccagaaacgcagaggcccaaatgcatttcagcttcagcaacaagttcgcggctttgttcaatcgttctgctcctaccaattccactcccagtcccagc

SEQ ID NO: 83787 - DNA, 392 bp, Zea Mays
ctcaatggcgagcgcttcaggcctttatgagctggccccgtgaccgtcttccccaccctcgcgacttgattaggagagcatcaacgcggtgagggagttggggaagaactcggcattccgccaatcgggttccaccgtcgtggtcaattgcgcgttggcgcagcatcggatccatcgtgcctgggcggagaacttcgtcgtgtctctacgggacttctggttacctctacgggggaggagagaccacatgtgacgtggaatttctcgccaggatcaccgttccaccgcaaaagcaccctacgccgtgagcatcatcgcctgagccatcacatcaggtaaggatacattaatccccttcggattgatccccgcatcgcgtatgactaatcgaa

SEQ ID NO: 83788 - DNA, 487 bp, Zea Mays
ggctactgtcggggacaataattagggacatttgaattatcccctaacaaacacacacagagaaataaggactaaacttccgaggggtgacagccaagccacctgtaaaaaccgagacatctccccgagagtctcctgcctcgagtagggctccacctcacccgaggtcaccgtcgctcagcctgtctcgcctgagccagcctcagacagataagacaagggtgcccaaaaataggcatgggacatgtacatttaatgtgtgtgccaacccacgttgtggcagcgagcacaatgacggacaatacagcgatcacgtccggtgcaacagcatgattacgtctacacaacagtgcgcgcacgccgcctgacaccctccgatggtacgcctaatacgacaagccgagcggacttgccttcgggcgcaatttcttcgcctcgcccgaagtaagatccagcccgcgagcacaacctctctgcctcgcccgac

SEQ ID NO: 83789 - DNA, 686 bp, Zea Mays
caacgagtgatggagcacacaaaaaattgtaacctaaaggtagactttttatcaagaaaaatatttttgaggtcatgtgatcttctagtctttaatagaaaattttctataatttttatgcatgtttttgaaattcaaaattttaaaacgaaatttacgaaatctaccgtagggtcgagatattaaaccctagccacacgacaaaggcccagagaactctcgtcatagactttgatgagtgtagctctcaacaaagaggcctcggcgaactatacatcggcaaagaaggatccagttagcctctttgtcagtccatttgccaagtgtcgaggccatagcattcgacaaagaagctttaccgattctcatgtatatcttctttgtcggccgctatggtcatggcactaggcaaagaacctctttgttgagtataacactcggcaaaatgaccagaaaacactttttatttgtttttattatttcatccaaacaaacaaaagatatatcacaaaatcataatatatacatcacaaatatcacagaatcatcacatacatcatgcataccacatatctcacaaatattaccgtatcaaacaagtttcacaaacataagtgtccaacactcacatacataagtcttaagtatctcacaaagtattaccaacaccaacaaacataagacca

SEQ ID NO: 83790 - DNA, 395 bp, Zea Mays
tggatattggatcttgattcctttagagggatggttggactcttatcattccccaacgagcttgatctccttcttctcgagtcttggtgtcttcatccgaattagggataagaggttaagttagatttgtaggcaacaactagtaggtagtgtagctggtttagtaggtagctataagttgaatgagactagtcagaatctagtttggttgttttgcttctgaatggtttggataggttatgtaacctatcatgtaggtcaagttgttgggtatggccgagttgatctaggtcaccaatttaggcgtaactaaattaggagtatggccttatcctttgtaccagcattgagtaactcacactagattagatcatattagattagataggatctag

SEQ ID NO: 83791 - DNA, 477 bp, Zea Mays
caggcaaaagagctatgctgataatagaagaagaccactagaatttgaggaaagagatcatgtgtacctcaaggtgtcaccacttcgtggaatgaggagattcaaagtcaatggcaaattgtcccctcgctttattggaccattcaaaatatttaggcgagttggagagatggcataccaactcgagctacctgctaatctatctgatgtgcataatgtattccatgtgtctcaacttaagaagtgtctccgtgtccctgaggaacaattaccaatggaagagctcagtgttcagggtgatttgacttacacggagtatcctatcatgatcctagatacattgactcgagttacaagaaataaagttataaagatgtgcaaagtgcaatggagccatcatggtgaagatgaagctacttgggacagagaagaagagctttgcatagactttccccatcttttccctagatcttccta

SEQ ID NO: 83792 - DNA, 444 bp, Zea Mays
gaacaagtttgtataattcgagagaattcgagggtagcttagaccagacaaaagagctatgctgataatagaaggagaccattggaatttgaggaaggagattatgtgtacctcaaggtgtcaccactttgtggaatgaggagattcaaagtcaagggcaaactatcccctcgcgttattggaccattcagagtttttaggcgagttggagagatggcctatcaactcgagctacctgataatctatctgatgtgcataatgtattccatgtgtctcaacttaagaggtgtctccgtgtccctaaggaacaattaccaatggaggaactcagtgttcaggatgatttgacttacacggagtatcctatcaagattcttgatacattgacttgagttataagaaataaggtgataaagatgtgcaaagtgcaatggagtcaccat

SEQ ID NO: 83793 - DNA, 535 bp, Zea Mays
gcgggatccactcgattggttcccttccggcacgccctgtctcccgtcaggttccaccacacccgaccccagacttggtgccgcggggttcgaccgggggcgagctcttttagggttgacatgtccatctctccaactgactaacggggcctagtgaccaggggtcgttccctcaacgcactctctgaccgacgggtcccagggactggggatcatttcctcgacaaggcggaagggttatacaggtttgggcacaatgtccctactatagtctttggttactagcgctaccgactcatgcttgctcgtagtagaggttataagcgggtgagagagggagagaccacaagtctctatgtgtggtgtcttacttctttagggttatttttcgttgccttatcgactgtcttgctctctttctaacgaggttgacccctcctttttcgttgccttatcgattgtcttgctctctttctaacgaggctgacccctccttttatagaccaaggagggagtgtttacagatagcttctcc

SEQ ID NO: 83794 - DNA, 1320 bp, Zea Mays
tgcaacatgttctcacattgccgttcaatttcattcttcaacagttgtgggtagtggtatggccacaccaccattggtgttgatccaggcgtcaacctgatgtggtggtcatggcggcgttgtggtggaagaccgtgtggttctgcaaagatgtcggagcaagaatccaataggggctatagaaggtcgcggtcccttgtcaaggctgagcagtgaggcagtggagcgcctagcctagtccacgtcacaatgtgtccattacactaaattgtcatggctcgagcatcaaaattccatagtatgagaccaagagagtggagccactaaactcctagcactatgtcaaagccggcaattggtaaaacatagcagatgtggtagaataccttggtgtacacatggaaacgaagcttggggcaggcaccgggactggcaaccccgtcgccatttgccaccttcactgagaggcctgagtgtggtgtgatttggaggctgagatctcatgtgatgtcctcctggagaaaggaatgcatggactcggaatccacaagtgccaccagagatgcagagctgatgcacaccttcagccacatcgtgacaccaacatcaattccaacgagggcatgtaagatacccaaattagcagccgcaatatcttcttcctcatcgtcgtctagtgctaataagaacacccctgtggatgcgcatttgtgctcgggtgtgaacttctcgttgcagtgatataattcaccactagctcgtttggctgcaagctcctctgctgacatccgtttaaactgtggatggttggtctaggccgactttgctagtactgtttgtgtgccgaacttgaatgttgatatcgttggcttggtgttggcctttgtggctttgtccatcttgttgggtccgcgtcccggcgttcataggctcgtgtcaaactcatggttgtctgtgggagcaatggggactgaagctccatgtctttgcgcaatggttcgcccagccctgcgatgaagagattcacatgctgcaatgtggaaagatcatcgcagcgacacaggagcaccgagaattgtcgtatgtagtcgtccaccaatctcgtacgtcagagatccttcaattcggccaggacgtttgtgcgtagggtggtccgaatctcatattaacgaagttggtcaaacgggaccacgagagaatgccatggtcgtgctccagagtataataccactctacagcaatgccttcaaggtgtaatgccgccatccaaacacgttcctgaaagtgcattcatcccttttgtgagttttggtgatttgg

SEQ ID NO: 83795 - DNA, 523 bp, Zea Mays
tgatagttttgtgggtgtgtggccaagtgcccaagtgtatgcccaacattctcatgaaaattgggcctcatccttttcgtgtataatatagcgctttgaaattggagacagtcaaccgtgcttgcaattccagattttgcctactcacgcagaagttagtatcaatttatcgtagccgtaagtagctacaccagacatcattcaaataaatcagagttccaaagtgggggcagagatatgcctatacgatgtttcttcaaagaagggtgctgtctgtcagttgtcacttaccatgcgaggctgtatattctacagtctgttctgatgtccgtgctgtttcttcttatcaggttcctggatttcggcctgggaagaccattccagaaaacgttcttataaactaagtaggaccgcaacatgtacaggatgccacgattgagctatcttaaaacatacgcttcctcaagcactgtcctcgttaataaactcttagtcctatttagggatgcatctctgacgtcta

SEQ ID NO: 83796 - DNA, 946 bp, Zea Mays
ttaacagaaaaaaccatacttgaagaagttgttgtatgctcctccagcaaatgaggacttgcttgatgaattgtggagaggctacacagtggatggcagcacggcctttgtgcctggagatgattatggtgacaatgatggccaagacgcagggacagaggatgaagaagaagggtttcaggcaacacctactagtacccagaggagcctgaaaggcaagaggccattgagcagcactactagcactttgactagtccagtaaagaagagtaagagcccgatggtgaagattgtcaaggacatagcaagtaccttcaaagagtctgttgtagccaacactaagcaaatggagaaacgtgcaaatcagaaggcagagttttctgtcaagaggtgtcaagaacttgcatttgagtgtggcattgagagaacagttgacaacgtgtatgctatgtcaaagttgttcgcaacagagtttcaaagggagttcttttgtggccagttaactcctgagcttaggttgggtttcttcaacaaatggtgcagggacaacaatttggagtagagaaccgttatctcatatctatgcatagtagtgaacctttatctatgtgtgtgctgaacctttatctatgtggtgtaatgaacctttatatatgtgtgttcggtcttgaagtaatatctgtgtgtgtaatgaacctttatctatgtgtgtgaggtcttgaaatattatatatgtgtcttgaaatatttgaacttatctatgagctgtgatgtctagtcttatgcaacgtccttatagtttgttaaatgtgttgaagcaggaagatgatgatggcatcatgtatgaggaagaagtagccgatggaggcagctcaagtgaggatgaaattatatccaggtgtcgcaacaatttggtgcaacaacaaaaaatgattgtgcagttggt

SEQ ID NO: 83797 - DNA, 1268 bp, Zea Mays
ggactggggataatggcagtttatcgactagcacatgcattctcacacctgagttctttctaaccagcttgcgatgttagagatgtgaacattgggctagagtcgtggagctaccctaacctttcggtgtgaacttgaacttggggttgaccttaacaggagcccttgcctcgtgccctcgaggtataagcagagctcttgttagacacgagtatttcgccggtaagaggagaacttctccatcaccttctatattggctactgccagttccaccgtgtattcagttcacttattctattacaagggtttatatttatacccctttttgaacccatgcttctgctgcaagaaaggattactaataaacctcttaacgggtccacatcttgttgtagtacttggtattgggtttcggcacctgactgctccttcgaacctgaacgcctacatccggctcctcctcacccatagatagcttagccccagtagtggtgttgttgacatcctccccccttgagacacagcttgtccccaagctggagcacctagaaattgttgacgcaaggcttgctcatcctcccaagttgtgagagcttctggccatcccgaccaacgaaccaacacctgagatatcaccttaccccctttctggaatagccttgagtccatcacctgctctggtatctataacccagtgtcaaaatcttgcaacacaggatatactggaagtcgaatgccaatcactggtttgagttgagaaacatgaaaactgggtgaatagctctgccagatggtaaagctaattcataggccacatgattcacttgcttaatcacctcaaagggaccaaagaacctgaaagccagcttgcgactagaacgggcagaaactaaagtctaacaaaatggctgtaacttcaagaagacccgatgacccaccttgaatgttctttccatacgacccttatcagcctgctttttcatacgatcctgggccctttgtagatgcatcttcacttgttgtagcatatgttggcggctagacaacaagtcttgtaactctggtactaagcattgctctcctgaaaccaacccaaactgagaaggggcatgaccatataagacttcaaaaggagaatttcctagagccgtatgataataggtattataccaaaattcagtaagggataaccaagaagaccattgtctaggacaggactgcacaaaacatctcagataagcttctaaacactgattcactcgctttg

SEQ ID NO: 83798 - DNA, 975 bp, Zea Mays
acgcgatatcggtcgtcggattgatgatctatgcctatggtttaaggaagcaaagagatatctgtgttttaatatgaaccgtccattgggatctaacggacacgctcaactctcacgacgacatctagacactacggcggctgacctgacgtggtggtcgccatggctggcaacaatcccgagcggctcctggtgctccaaactcggaacaaactggagcaacacaaaatacggagcagggtgatttgattaaactaggacataccagtgatgatgtagtgtggtaagttggccacgacattacgcgggttcgcaacggggaagacgctccggtgatgaattctggggccccctagtcaccaatcctcacgacgacgccaccgaatccatcctcgaggcatggtgtgctccttcgcacggcttcgaggaagtgacgacgacgggcacatgaattgactacggtggctctctcctccattctctcggttttacacatcgatgaacggtggtgcggggatctccgaagctaacacagatggatgggggaaggggtagcggtcgacacttataggcgtcgagaggaggatcggggagtcccaccaaatactaacaacctcaacctagaatccatgagccataacaaccggtgacagcaatggactcgagcttgaagactttactggcaaatggggcccactggcagtcacctcccaccacccctcgatagagcgcgggcgcgctaagaagctatggcgtgggacccacaacgtcaacgactcagggaggtagcttgcgcgtgagagggtttgggctgtgcggggtgtgagagggactgggccgacgatgcactggttgggccgaggtgagcactttcctattttccttttttcccttctttttctgtttccattcttatccaaatcagatttcaaatagagtttgaatttcaattttggaatgcacaatcaagaaaat

SEQ ID NO: 83799 - DNA, 707 bp, Zea Mays
gtggatcagggaactgccatacatggtctggagcctacgaacccagcctagccgagctctgcatgaaaacacctcattcttcatgtgtatgggtcgaaggcggtgctgcctgccgatctgatctttggggcgcctaggctgacctttgaaagcatagctgaggcagaagcaaccagtctagaggacattgatgtgctggaggaggaacgactaaacatggtaattcagtcgtccagataccagcagactttgaggcgctaccacgacaaagttgtgcgacaccgatcctttgcagtcggagacttggtcctccgccgagtactaatgggggagggacggcacaagctatcaccacaatgggaagggtcgttcgtcgtggcagaggtcacacggtcgggatcctatcggcttactcagatggatggcactgaggtggggaactcatggaatatcgagcacctcagaaagttctacccttagtgatacctcaaaagtctcgagggcaagttgtactctgtaatcagaagatttcattatcaataaagctttcatcttccaaaggcattcaagctcttgattgacaactgacttagattgggctcgactcaaaatcagcatgacatgacttagggtgaccactatgccctactaacgtagcaatcggcttaagtcggaaacgccttaagttggtgcgacatgctcacact

SEQ ID NO: 83800 - DNA, 469 bp, Zea Mays
acaaacaaatctagcaacttatcaagagacccatcactccctcggctcgatgcttatgtccagcaacctgtcgctcccatcacttgtttgaattattttgtactttgagcgagtaaagacaacttcttcttgattatcaccagctgagttctgctttgaggccttcttcctgagccggtctagacgcttcttagggcattggtgaatgaaatgcccttcttccttgcagtagaaacaagcacctcttgctttgacctctctacgagtcaactttgtttgattgcctgcagatgatgcttgattggttgtctacaaagttgaataactgagcttgatttgtttctcttgtttgggtattcatgagtttcagagcttttgcttgcggttgaggtggtttaatcttaaatccaaacattgtcctggtcctcttgttgttcttcattccattcaatagatatcaatctaactc

SEQ ID NO: 83801 - DNA, 700 bp, Zea Mays
cttgcaaactcaagcccaaaaagtgcttttctcattttacaaaatgttgcatatgtgggtccatgcttgagctcttttggacttgacattttcaattttctttcttctacacatgtgcttatgctcatacaaggagtgttagtacaaagagttgtgttgggtatttaatcactaaaacaactagaaatggctaaagggcacatttccctttcacaaagctcatagtaggggttacaagcaggcgagagagggaggataagctcccaagtctcttatcgtggtggaggttctgggagtccagattgcgctactgccattgctagccatccgaagcttggagaactttgtcgtggaatgcgcaagtcccctacctggcgtgctaactatcggtgtttcgagccttgctctgacaagtaaatttattgtgtgcgttctaggcttcggacaatgtgcgtggtgggcgcaagatttatacttgttcgggcataacgttcctacttccagtcatcgacgacttgctctaccgagaccattgatgatcaaagctcatagtaggggttacaagctggcgagagagggaggagaggctcccaagtctcttattgttgtggaggtagagctaagggttacagagtagagtcctagctaagtcttggcttggcatcggggctacgggcctctaggtcctcgtcggtgcgtc

SEQ ID NO: 83802 - DNA, 497 bp, Zea Mays
tctgtcccttcatgacgtgagtcagaatcataatgcacgttttggcataattatattgttctagcagattgatgttggtgcaataattcgtaatttctgtgatgcagctgagtaatttccgtccagagttcagatccggtctggatggtttcatccttgctggattgacacaatcgtttcttgatgctattaataatggtgttgtccctacaatctcttcatcatggcatgtatattatgatttcttatagcaatgtggcttctgtttttttggcttacagtttcacagatcgtgtttccctctgggtggaagctatctgattcttttaaaaatttattatgcagagtgtggaggaggcagaatgccagagggcatttgattctgctgtgggcacttacaattcttcttttgacacagatgtgttagatcatctaccaagatttatgaatcaaagcgtgtttcactggttccagtgtcaccaaaatctgcaataaat

SEQ ID NO: 83803 - DNA, 330 bp, Zea Mays
tttacgatcctcaccagtgatcgatcatttgatctgacgccaacgatcacatgctgagaggaacgattcacttaatcagctggcgcatcgttctgttcggacaacgcgggctctaaattgttcataaaatcagaagtcttctgattttcgtattcacttacgcgcatgatccgaatagttccaaattcgttagcggcaaagattcgataatccaaaagtttctcgaacctcattttaattgcttagactatggaaatgaaaacggcaccaaactcgatttttttgcgagatgattaaaattttgtatccactttatatattgatattccg

SEQ ID NO: 83804 - DNA, 851 bp, Zea Mays
cccctcaactgttcaaagagaacctcaatacgggggagtggatatttattcttgatagtcacttgattcaaagcgcgataatccacacatagctgcttgcttttatccttcttctcaacaaacaatactggggaagcccatggagacctgctaggcctaatgaaacccttagccagcaaatcatccaattgccgcttcaattcaacctactcctttggggccattcgatacggagccttatgaatgggctgcgtacccggaatcagcttaatctcaaaagctacatcgcactccagaggaatgcctcgaagctctgccagaaacacattagcaaagtcacacaccacccggatgtcctgcgcccacaaggcagcctcaccctccaccaccatggagaaaaagattcccgacttcctcgaccggtgatccggaagcaattgcgctaacaaggataacgtgaacttaggggaacttcccaagaataccacctccctacctaacggcgcctgcaataacactgtcttccaaaaacaggatataactgcgcgatactgggataaccaatccatacccaagataacatcgaatgcccccaaggaaatcacaaccagattggccgaaaagacctcatcagcaagaatgacggaacacccctgacaaactgaatagctactaatggagccattagcagaactaaccaaaattgggtgacccaacctctgcaccgaaagaccagcccgtgacacaaatcctctgaaacaaacgaatagccagcgccagagtcaaaaagagcatgggccataaacgaatcaactgaaattgtacctgccaccacatctcctttctctttg

SEQ ID NO: 83805 - DNA, 657 bp, Zea Mays
cagtggtcgaagacggcgaacacgttggcgaggagacgcagatggggacgacatcggacttgaactcgcccatgacgttctgctgtccgcccgcgcgcgttcttggcgaagccggacatgggggcggatccactctccctctcctcttaattctctctctccggcgagggtctctgctccccgaggtatccgcgatagagggtgaatcctcccagtcgtcgaccccggcgtggacgatgttgtgaccgacggcgacagatcaccccgcaaacctctctccctcacggcggccatggcacacgacggaggacactccagcaaggggggtcggtctgcacagctaaatacagaggagggcgaattcgagccgaggaatccgcggcgggtggcgcgcgccgttgcaacagactctcggaggaagcagaggcggatccgagagaaacggcgcaccgacgagctcggaatttgcggtacgcagtgatctcagtgggagaagactagcaaggcagtcccacatgccagagcctgatagcatgcatgcggtgaccagagggaggcccaatctatcggcgaaggcagaccagtgacgtttacacggccaagcgactgaaccacgggaccccatgcatcagttggcgtaaacaggctgactacccg

SEQ ID NO: 83806 - DNA, 583 bp, Zea Mays
ttctatctctatgcagagagattatgcataatgagcgttatagatttttggagtttgctatcaatgtcaattactggagtttactagcaactaaattattactgcttcctaaatgcaatagttgtcttgatgaacttttccttctcagcttcatatctctcagcctaagtctatatatgaagtttagttggttagtctatttagttcagttggttagataagaatgtgacaattttaatttccccaccctcttgcttagtctatgtgcctttgtgttgaatttacatagttcttattattatccatccatacatggcagctcgctcattaattcgttatggcgctttcagaattgaaatttgtgccttgagaactgaagctcactcataatgtttaccaaattgcaataccttgttcagtttgtgcatagtacctgggatttgatatgaatacttcaggttacttcattttagtcagtgttagcttgtggtcaatttcagtgtatattttctgaaattgaccatttggttttcagttaatgttagtttcagtcagtgccagcttgtggtcaatttcagttttg

SEQ ID NO: 83807 - DNA, 329 bp, Zea Mays
gttggactagataggttcgaatcttgttttgaaatagattgggggcgagaaaggttatggtaaggagagattccatcccggatggtggatcccgacttttgaagatcttttctggcttctgttcttccttgtcttgatgaggtcgatcacctttgatctctggtcttgacgtcatcatccaagctagggacatatatttaagatagcttgtagataagaacatatagctaataggtagatggcataggacaagtgtgatatggccagacctggtctagttgctttgttaggtcggctaggtacatatctttaggaacatgtagattagg

SEQ ID NO: 83808 - DNA, 285 bp, Zea Mays
tttgacttcctaatgatttgagtgtattccttaagcaagtcagctaattcatcataggaaggtgaagcaaattcatcatcactatcaatatcaatttgtaccttccgttcacctttagccatgaggcattggtgagaagtcgatgagggtgatggtggtggtgaagagaagtccccagcgatggcggcaactttttcatcattttcttcttcacttgaagaagacccgcttgatgactcaatgtcagtgagccagtcaccaacaatgtatgcctttccatttttc

SEQ ID NO: 83809 - DNA, 463 bp, Zea Mays
cgttgctattgcccaccaccataatgctgaggctggtgctggcgctgcaccagctgtcgcaaaatttcattccgctgagccatcaactcctgcattgtataagcctatggcggtggaacttgctcattttgcccacggcgcgctcttcctgccatctgtaaagtaggaattttcctgttgttatactaaaaatccatgtttacagagtgacttaaccattataaagtaaatggaaatatcaattttcatttctgagcgaatttgagaaaaatccactcatatgatctcttctcctcacttcactccgccactttggtgcaaaaccccaagggttccgtgtcagggacaaagagttatctcagtcctaagtccggtccgttggagggggtaaaaccgagagaaaaccttcgttttgtcttgtccagacttcgagttccaatgccatcttttggtatgtgtcagg

SEQ ID NO: 83810 - DNA, 851 bp, Zea Mays
tgcgatacggagcgaacaaccgagtctcgtctgagtaactcacgaggcggagcgaacgaccaactttataccaagcaaccccatgaggcagggcaaacgactaggtcttgtgtcaatctaatcggcataagggaagggtcgacccaatgctctagacccacgtcagcgtgataacacacgtcatcaccaaaccatgtccgggcctcagcgttggagtctctacagtgacccgcatatcgaaaaggacacggcatatataccatatcgggtgcatgtatacgccaataggtgacgcatgcctatgacgacaggcgaaactgtgctacgcacgaccgtaccatgagcctgatccgtaggacccgccgcgtaccgctacaaaggcgtcagcgatggactcactataggagccagagtaatggacgaccgacgatgccatactgggagtacgactgccctcgaccctacggaggacccaccacgacaaccggaagagccgatctttctctctagtaggaaacaagtctcccctgtaaggtcctacccttgagatctaaaagggcaggacccctccttcttcatacacaagcacacttgttgtaacatgcttcaagcaatactacgatcaacactaaactggaatagggtgcgagcccgaaccagtataacgctgtgtctcaaatttttcattgagtccaagtgattcacctttcgaagtgagtctgtgctagcaccccatgccgaacacaaatcttattgtcccccggttcccgaaaccacgacaccatgtctcttagctccactttacatgcgggtttcacttatgaaccaagctctaccatattatatggata

SEQ ID NO: 83811 - DNA, 486 bp, Zea Mays
aaataccacgagaactaagtgtggtcacggccacactttctcaaaaatccaaagacttagatgttatggttccaaacatctaaggatctcttagctagaatgagaaaagatgggattacaaactacatgagggaataaatgtgctcaagagatggtagaatggttcagccctctgtccgatttataatgagttatttgtctttcctgaactaccctaagatacatatagtgtatccactcagcctatggtaaaatggaccaactcttgatatgttgatatgacaaccacaccctttcacaaagttgctttgccttgatagatccttcataatgatgccacgtgtcgccttagattccctctaaaccacgttgtcggattttgaggcccaaacctagcaaaacctgtgaactaacgcgcttggtaattttgaggatcaaccagcgaaactaccgagggtagagtactccacacatgtcctgatgtcc

SEQ ID NO: 83812 - DNA, 474 bp, Zea Mays
acgggtcccaagtgattcttggagctgctcccaaaagtgtgccacaaacagtgctcccctgttagacacaatggtcttcggaattccatgcaaacgcactatttgatcaatatagatttctgcatacttctctgtcttgtgggtggtatgcactggcaagaaatgtgttgttttggtcaacctgtccacaatgacccaaacagaatcatggtgccaggaggtattgggcaatcccacgataaaatccatgcaaatatcctcccatttccaagatggtatgggaaggggcagtaaggtgcctgctaccttcagatgcctggccttgactctctagcaggtgtcgcattcggatatatacttagcaatttccctcttcattttggtccatcagtactaggatctgaggtcatgatacatcttgttactgccggggtgcatggaaaattttgaaaggtgagcttcatccaatatttt

SEQ ID NO: 83813 - DNA, 774 bp, Zea Mays
cgacgacacatcattgcataagcctctcttatgaagagaaagcatttccagcagaatccaccatcctctgctcatctcgctgatctatcggtaagttgcacccgcgacagaagtagaagcagcaaataatcgagctcgtccatagcagcattagtcaaacggggggcgcaagcgcagatcaaaattatgccttaaaaactccaaatgccgacaggttaggctgagtaacatgagagaacaaggaggaggggaaggagcagcaaagaggggaatcagagatccatctatccaaccgaaaggcagtggacttcacttgccatccccgacacaaaacgtaggtgcaatcgcggaaaaaggtcgacaactgaactgtaaatacgggcaaggtaagaaggagtgggagtcggcaccaaatccggatatatatatatgaacggccctgaacctgaagcaccaattaagccacggaacaataggaccattaagggccatgtcagcaaatctgagaaagaggcaaaggttttgggtaataaccatatttttgacacatatttttgacaccaccgagaccaacgcaatttttcggaagacaaacgttgtcccaagccacccaagacacttagaaccatgacagaggtcacccaccctctgtccaaaggaaggccctcctacgacgaccaatagcactcaggacacgtctaggaacaatcatagacgacatatagtggagaggcatagcactcaaaatgctctggacaaggatcaggcggccgg

SEQ ID NO: 83814 - DNA, 509 bp, Zea Mays
aagtcatagaagtacttaagaagagaaccaaaccaaaacaaaaagggaatagtcccaaaagaacttaagagtacacaaatagcagggagggcaaggtcgacacgtcgaaagggatgtaggaccccacaccacaacatgtaaggccaaggtccgcatgtcgcacccgtagatagagggttgtgcatctgttgtacacacacatgttgtactacccaatttatttattgaattatattgttatggtgttgtgctaatgctttgcatttagaaaaacacatatgttatcttgacttggttaggtctagagatattttgtcggttagttcggctgattgttaaaaatcgagttgtatgataaaagcatctctttacactgttccggactcattccgaaaagccacgcattggcacgcacaattgatttgtataaatacaagaccttaccctttatattatttatagttactgtgaatgaagtttttcgtagaacaatatcctccaacaagttc

SEQ ID NO: 83815 - DNA, 415 bp, Zea Mays
gtggagaagcttcttccctcctctctggatttagcttgtgtaaagctgcactgcagggggcgtttcttgcattgcaccggtgctttttatatgatttgttgcatgtcttgggctctctagctaccgcgacgcatgctgttcatctagttttgttccagtttggttcttttgaagcaagcaactcggtgttctgccttgggatggacgagcaatgcaatcagcttgtgctgcttgctggctccagagtccaggacatgggaaagtacagcagtatttctatgcgtttttttcttcttcttgcagggattgatgtggcttttggattaggtcctttggctaatcgcctcgacaaatgctagctagctgccttgtaacatcttgccctctccccttctccatctctctctctctctct

SEQ ID NO: 83816 - DNA, 532 bp, Zea Mays
tggaggcactcaagaaaaaggtcttcgataagaatgaaaaattcgcaggaaagtggataagggaattgccctatgtcgtttggagaaagtggataagagaacccaacctagccgagctctgcatggaaacaatcctttcttcatggtctacgggtcggaggcagtgttacccgccgatctcaagttcggggcgccaaggttgatcttcgaaagcatagcagaagccgaagctactaggatggaggacatcgatatactcgaggaagaacggctaaatgaagtaatccaatcagcacggtaccagcagactctaaggcgctatcacgacaaggccgtgcgacagctttccttctcagtaggagacctcgtcctccgccgaattctaacggggagggacggcacaagttatcacccttatgggaaggacccttcgtagtagcagaagtcactcggccaggatcatatcgtctcactcagatggacggcacagaagtcgggaactcctggaatatagaacacctgaggaaatttt

SEQ ID NO: 83817 - DNA, 762 bp, Zea Mays
aagtggagaaaaggcacccgaaaacaggttcttacctgcacagggacacctttactgaaagaatgaccaaagtgagtcgaactaatggctgtatatagtacggaaatttgctaacctggcttatataatacagccctagctcataaagaaaacaaaatagcatcttagtgcctccttggtgaataaccacaagacctcacaaacattattgggattttttacagaagttttgcaggcaacaaacatttgcttcacattggtttcaaattccactattccaatgcaacaagtttgccacttgaagctagaacattatatcgaatattgcaacaacccagaaaagaaagataaatacatcataaagttacagatgccaaattaccacagttcgcatgtaagtctgtaagacttatttgatctagtgaaacctagttctttctcagatgaagcaacttactgactagttataaaggtgcatcatggaaaccaacgattaattgagatcaggggcgtcttatgaagagtatagtgcacattactacggcactaactaaagttacttcttgaacaggaagatatagcgcacagtgctggagtaccaaacattgttagaaccagcggtggtctagcatggttgctgtgctgcactctttgtcggcgttaaaaaacccaggccttcaggcccacgagtcaatgagagcggagatggtctagaaccaaacattgttagaaccatccggacctaaaatgcgcatcataaat

SEQ ID NO: 83818 - DNA, 506 bp, Zea Mays
acccaaggccctggctcaaagcatacacctatggcctattatcacatgtgttatgtggaaagtaaaggcacccaaagctttagaaccatggctaacctaagtagtgatcatgatgggagggataccctagccttcatgtatcttcacctatgaaaaaggttctaaaaccctaatttcccctcttgagccatcaaacccccaaacattgggttaaagggaaaactatacaaatggtcaattcatggattgaaccctttaccaaagttgaagtacattaataaatctacaatatatagtaaggaaggtattacaaaaaggtcctacaaaaaccccaaatcaagcccccaagtggaaagcaccctagagcaatccatttttctctaaatcaaaaatcagccctaatctagagatcataagtgttcacccttttgctggcgccaaaaccacttggtccaaataacaaaaagtagccaaactacccaaggcacacccctgaaaaatttgaa

SEQ ID NO: 83819 - DNA, 402 bp, Zea Mays
gcttgcttcacgtaacttctctgcgaatgtcaagatgtggactgtttggagcattcgacatccttattcgaataaaggcctgcattcgttaaccgactttcagatcaagctagaaccgagctgaatgatatgcagatgcttccctccacgatcactttgtcggacgcccctgacattgcaaaagcatatcgtagcctgaacactgggttgctttacaaattgctgaagtatcaggattgcacctactaccgactgtccactttcagctggaagaaccgtgccctgcccacccgtgtctagttcttcgcctagataacctcgaaagagaaaattcaaacccgagtgaatttttaaaaaaaaagagagtgttgtggacgattgaacttgcgcggtttgctgctc

SEQ ID NO: 83820 - DNA, 809 bp, Zea Mays
tgcgctgaactttgaaggggctgtagctacctggttgccatcagttgagctcaggggcaggttcggctcttggccttttctctgcgatttagtttgtgcccgttttggtatagatcaatatcacattcgtatgaagcagatggacaatgtaaagcagactggttatattgtggaatacactgagcagttggatcacccaattatgtgttataactctgcttatgatgatgtctacattgtcacttgatttctaggtgggctcaaggaggatattcgtgctctgattgcttttcatcgtcctaaaagacctggacactgactactctctagcgttaattcaggaagaggagcttagtgctgggaagccacatagctctaagagggatacgggattgctcgagagctctggatctgttgacaaatctaagttgtcagtgaagaaggatggctaatgtaggtctgacaaatccaatgctgatgataagcggggagccttgaagggcctctgttttacttatgtggagaagtggcaaggccataatcatagatgtccctcccgaccaagactccattcatatgattcaagatctattggcgtcgttacgttccacttggatgttgagaaggacagggtttctagtgatctcgaatctgacactgtccaagttactctagttgttcaggaacaaagtccatttgaccctagtctacttcagttaagccacatcgctcatgtttctattaggtgcgctcaagacagatttagtctgctataggacattgctattatttgatacaagggatttatc

SEQ ID NO: 83821 - DNA, 753 bp, Zea Mays
tctaggacaagatcctcctcgtcatctaaatcttcaatgctatcaaatgcacttacagtggggacagaggatttgggtgtagtaggtctaacaatatgtccaatgattttggtcgaacctcgagaaatgattggcctacatgaatgaaagataaaaaaagagacatattatcaagatatctgttgccatctttttagccatgctaagcgctaaccatgttttcatgaaggatattccacgttctcaatcccgttttacggtttcctgtcaggagagggagggggcacaaaacatggcataaatgccataatgaattgcctacttcagaactgtgtcaattttttttgttgctgaaaaattcctatgtagccactggccagggcttacatacatgatcaggataaactaactccacctagctcaaaacaaggagggctgctcagtaaacattgaacaaatcaaactatggcgcacattttttgtaagcacttgacgctcgatttccgcataacgcatcgatcacattaccgtgactatggggatggtgcgtagctaggaaccaaaacgtgagaaatcaaaatgaaagaaagcagtaaaaggagcggaggcgcactaccctctcgactgctgtggagcggcgtcagatctggcaggatggacattggacagggtgcgacaatcttggtcagcgctggatggttgtattctccgttctccagttcgtcaccgtcagggaggaggcagctacggcgg

SEQ ID NO: 83822 - DNA, 1107 bp, Zea Mays
cctctactcgccgtgattcaacccaactaggagtgttgtaggcggagcggggaaaagcagaaatggccgtcatggttgattccctcttcagcaactagtccggcctcggtaacctgtttgggaggaagggatgagctggtgggttgtggtcatggccctgctttgcggagaggagcctcgggttgagggcaatttctcaacggtgcttagatgccaccgtggagctcctacgcaccgtgaacagaagctatcacaacgcaattcaaggtaaggtatttgccctatcgttcatcatactcccttgcgtgttctgcacttgtgttggagcgggtcgtggtgttgggtaatgtggtggtgccttgccgcggttgagtgccgccgtggcaccacgcggtgtcgtagtcaggaatttgatcttgatgttaggatttgtgcggtaggccatgtgattcggggtggtcatggcttcgttgaccctaggtctagagtgagattagaacctggagtcgcctatccatgtgctccggctgggtttgcggcagtgctctggctcactatcgtggtgtatggagggaagaagaagacgagacttggattgttgatcggatgatgggcagaccagatcagtggagctcaacactttggccaggtgcaatggtgttcgtagatcatctagtgagagaacgagattaaaaaggaagaaaacgattcaggtacatgaatcgtggttgtcgatctatgatcctacgggcacagttgcataccggttcagtggatggatctgtgccgttgattgaacaatgcgtggtcaagatcataacagagacgacgttgacctgagtgctccagcaacgtagatcccagatcttgtgaccaatagcgcataccgcttcgatgtggcgccagatctaatctaggccctcggttttgatcgaacggctctggcacgaagatagccattcgcacggctcaattgcagatggaacccttgtgttttataaaatcaacctgccatcccatgtatgttatgaagcctttaatttcggtccctaggtttttataaagtgcaccctaaactcttcggaaatagtgggcccaacccagaag

SEQ ID NO: 83823 - DNA, 565 bp, Zea Mays
agaaattgaagatgtcatcacctggaaattcaccgcgtatcaacgctacactgtcaaatcggcataccaggctcaatttttgggttttgtttgcacgaactaagacctcatcatctcgaagaattaggcgcccacaaaatgcgagttgccatgttttttagttggttagcaattcaaaaccgcatttggactatcgctcatttagttgtcaagaattggacccatgaactgacttgcaccttatgtcatgccaccctagaattgggactacaccttttcgtggaatgctggttcaccaaaagaatttaagagtaagttgttgtttgggtggctattgaggatatgaaactgtccgtctgggagcaatccccctcatcgtgccattggtgggagaaactagctatgctactaagatgcaataggaaagtccttagatcacgattggttcttgtaaactggaaaatttgatgagaaagaaatgcgagaatttgtgattgccggttctcgagtagctagcaaaccatagccaaaaccaagtgtgaagcggctgtctggaaaatggtcg

SEQ ID NO: 83824 - DNA, 767 bp, Zea Mays
aactttgataagctcctcgatccatttccctttgcgtaatccaaccaaagactttgtgattcctagcaaaattattttgttttctctttccaccaacccattagactctaggtgcctaactgacgcaaggctcactttttgcaaatcactcgtgtccttgacaacgttaggggatcatcattcttatgcagaggtgaccatggttggcagtgaatctgtgggatctagaggtgctaatgctagggatcataagctaggatggaactatggtagccaattccatccctggatgtagagaagtggtaggtgggggcacacctttcttagcatgtgcgttggtgagatcacgattatgagggcaatggtcgtggagacggttgttggtatcttttatgccaattagatatgatccacaagtgcatagataacatgttgtagcctttaacccaagagtattctagggtatcaaatttcacaagggacaagaagagaagtaatatagaataactagaaccgaatggtaaagtaaaaccagattatgaaatgtaaatcgggtacaacaggttttctatttcaattgtgcacacttaacttcctaagcatactagtattgaggtagtcaaaattacttggacatcgaggctatcaaaccacttctaggcatcagagtgttgataacccagatgagaaaggaaggtactatggagactcagctatatcagcatcataaactatctaaatgatggggtcgagatacacatgacaca

SEQ ID NO: 83825 - DNA, 321 bp, Zea Mays
cggtatgccactggtccacattgctcaagtatagggaatggaccaatataccggggtgcaagctttcctttaaccccgaaacgtgatactcctttcattggtgaaacctttaagtagacttagtctccctcaaggaaatataagggcattcgccgtttgtctgcataactcttctgacgagcttgagctttcttcaaattatgaattattttctgaaccttttcttcagtctctttcaccatatcagacctaaagaagtacctttcaccaggttcagaccaatttagcggagtacgacatcgtcgtccatataaagcttca

SEQ ID NO: 83826 - DNA, 276 bp, Zea Mays
ggatgaggccgtacgtcagaagggagaaaactgtatgcttaattaaattatccggcacaaggatacaatacaagctgcttgcattgtcatcttgccatacccctgccgggctgatcgatctcgctttgttcgtttcccctgatcggcgacgtccatgccagccaagagcatcactcctttttctcctccggccggggtcttactgattctcgctttcattcgtccccatctagcaccgcatccaccagaccaccactagctacctagtatatgtag

SEQ ID NO: 83827 - DNA, 589 bp, Zea Mays
ggatcagattcagctgtgaaacgatataatacaatattaggttggtcaaatccttatgctaaaccttcgttaaaatcaaatgcattctttcttaagtttggttgttttcaaggaacttgcaaaaaaaaatacagattcaaacaaatacaagggcaggcccaatggttagtaaaaaaacagtggtaagagatatgcaaatctcattaaatactaggactaaacctacctaagcattttgcaaagcacctacatcaatgacataatgtttttgtaagaattttttatggctagagcataaatggacgcgcctcaactctccgcacatttttcttagttgaagcatacccttcctaagaaaaagtgtaaatagccccaactctaaaagctagccattacaaacttttctaagagcgtcgggccaagagatgagtatcagaccattaatgtcgactataaggtgcttctgttcaatttagtgagtgtgagactctgagaatgagcgccagaccattaattaggaagcgaatggacgacgcctttcttgtgatcgctccctccgcctctcatgctctgcgtcatccggcacggc

SEQ ID NO: 83828 - DNA, 578 bp, Zea Mays
gtttggagtgccggaattgctcgtcgtagtctgcgcgccaccgtggaccgcaagacttcgtggccagcactctgcgcttcacggctgactctaggtactccctcggaccactcgattctacttaagttgcgtctagcggtcttcagggcggagatagtggacgagggtcaccagggggccatgcaccggcgggaccaacgccatggactcgtgctccatcgtctcgcgatactaggaggtgggagagccttggtatatcgtccgataatcatcgtgcggccaggatagaacatgggggatacctctttggattttatcgtgggtcgttggatgcgatcggacggacccgaaccgacctcagttctttaaattcacgccgttggataccgatccgtgggtcacggatgaataccggttcacggatccgggatctaatctgcccctttaatctcagatcggacagccgatatcgcttcttaccctttcggccggctgatcttgcaaataaacccctctgtgttaggaaaaataacccgccgtccacgccagggactttttgagtcttaggaatatttgca

SEQ ID NO: 83829 - DNA, 433 bp, Zea Mays
cccatgacgtgcgtggaggagaaatctcatgtggagcccacatgcatgcgttgcctccgtgaattatccagtctgcagatctgcatgtagtcagaatctaaaaaactactccccattctcctcgcctagaaccccgcatgcctcttggagatcgagccacgccgagcacctcgccagaactgacgcagcgcctcgccattgtgcccaagaatcatcgccgatcctcacacatgtgagttctctgccttccgcctttcttcctgctgttggtcgccggcccacaggtgagaatggatgcccgaaatccccactgtcgtgtgcttctcctgcgtgcaacgctaggcgccccatcccctaccatcgatccggaatgacatggttgcagccaaactgctgttgctgccatggccggtgcagccagcacctcttcccc

SEQ ID NO: 83830 - DNA, 1267 bp, Zea Mays
cgggggctaggtcgtgacttacgccacccacccgagccgaaccatccccggcaacaccctcgggggctgggtgagcgttaacaccatccctgagggtcaagctctctacggcagccacctctaaggctgaaggcccctcagttacttccatgagagcaagacaaacaaagtcagtttcctggccctcaagaccgcgctctaaggtcgacgaggcgcgggacgctgcccgggatgaccccaacccggcgtcgagcacatcagcacaaacctccatcacaccatcatccgctggctctgataacaggtcttctggaaccatatcttcaagagtctgatcaaagtttgccagggacaactcctgcagaccgacgagggctgacagagcaggagaaggaactccactactctccccactagcaatatactgccaactgttcttccgagtcaaagggacctcattttcttcctccccgtcattttcatcaacaacacacccattggggtcagcggcagttggatcacacccattggggtcagcgtcagtaaattcaggcacgggaacttcttcagcagcaggaaccgagggaccagcgccccgatccaaactagatacttgccgaagacgtctctttttccttttctgctcatcagcagaaggatcaagttgattggctcggcgagggcgtctcgggcgaacactgacaggtctttgaacatccaaggttgtaccagcttctaggagaggcgccaccgccaatgtcccagcaggagcaacatcagaagaatcttcggccagcatatcaagcatagcacttatttctacatcattaggatccaaaggcacctcaaagtggacttgtcgttcatcatcgggaatttctccaattgaaacaaccaaagcactaacttcttcagcagagggtcgcactctaaggcccaaactgccatcagcgacaggtggattcgacacaaaatgagtaaaagccttggaaggaggcaagttccaggccgagtatgcgactggggcaccaacatttgataccttgcctctaagaatcatctgaagtcggttcaccaagtctacagagggaatccttctgtcggtaacccgagtcgggtcagctaggcctctgtacagataagccgggtaagccctgtccttcaacggttgaatgttcttgaaaacaaaatcagcaaccacagcctctgcagtcagacccctctccttcaacagtccaactttagctagcaaagccccagcctcagc

SEQ ID NO: 83831 - DNA, 1106 bp, Zea Mays
gcgggtttgggaaaattgccttgaataaaacacctacatggtcctacagcattaagttgctccgcctcaggcagagagacatgatgtgaacaaggccagcaatgctttgttgtcatacctcttggtcattgagtttgacaaagtgagacatcttgatacgactcatgagacttgggctaccatggtgaaattccaatagcatattttcatgtgaaaactagactctttgagatcaatcgacgagagtatgagaactttgttcaattgactggagggaccatcgattatatggttcttgcttttagttgattatgaaaaagatgcgcgtaaataaggtgcagttgccatacgacgattataagagagcactcaagttactatatgctctgctctaggggtttgggaggtgaaggtctcgacaatcatatagtcatcgaactatgagaccctcgcagtggataagcatttcagcaagctcaagtctattgaaattgaccacaagactcacgccaagattaagaaccctagtgctcccaccatgacccttgtcttagaatgtggtccttccttagctaactcttcgcatgctttgttccctttgtcctctttgctatctattttagaggagtgggttgagtgccttgaggatgaagagttagcgcttgtggccaatcggttagcgcggctcgacaacaatctcatgaaccgatgacgtggcgtgggaagggtgtctgcttaaattgtgagacactgaccactttatcgccatgtgccccaagatgaagggtgccagtttgagaagttttggacttgtcattatccattttgtgatcgatttgtttcattggactggtgtatgccttaggaacattgttcaacacatgcagtcgctagttggttgagaacatccagccactagttgacgattgaagtaaagtggtcaatttcatgatttaagaaggtttttctcgcaaacacatttctagccgatttaagggtttgattgtgttccgcagtcattatcgagaacatcggccagtcactagttgacacttacgcatctctttttttgtgtcttggagttttgtgtgcagcgttggatgcac

SEQ ID NO: 83832 - DNA, 655 bp, Zea Mays
agagtgtcgccgcgagctgaggagtgagctgagggcggccgacgtcagtcaactcttgactccatcattggagggccttggttgtggagtttgggtgctgtgttgggcattgagagtgtgttggtggccttggcgggggtcgtggtgcatcgagaatgggtgaattcctcgccgtcgtcgcgtcgccgtcgcgggtccgcccttcaccgtaggccgttgacctcctacgctcacctcggtgagaatggccatcatcgcttcgtactgttatcctctacgtgtagcatgggtcggattaggcgatggctgtggaaatcaccggatcgcgtggtccggccatggcgccgccgcgggggatgagcctcgacggtcggagttaggtggatgtgaccgagagcgcgcttgccgtggtatctttaatctacgacttgggttcgatcgggggtagtcacgagatttgactcatctgggccgacgatggtgtagtgagcgacacatattagatctgagtgttttaaatcatgactgctaggcacggatcagacggatcccattacgtgccgatacggcagggagctgatctaatttggagcacacattttgatccgatggccagggacccttcatacctcttcggtcgagcgccattgcaaaa

SEQ ID NO: 83833 - DNA, 299 bp, Zea Mays
caaagtcaagaaaggacgtccaaaggttggcaggaaggcttgcatctctcaacatattcatttcaaggtctgcagagtggaacctaacattctttaaagtattaaagtcagccaaaatgtttcaatgggtaccagcacaacagcaggccttcaaagatttgaagcagtaccttatccacttgacaactctatcaccaccttcaccaggggctccactcctcttatacgtatctgcatcccattctgcagtcagtgcatcaccagttcaagacaaagtcaaaggggaaatcaagaagcag

SEQ ID NO: 83834 - DNA, 657 bp, Zea Mays
cttttggactcacgtcgagtgattaaattgtatagtgggtgctcggacatgtcgatcaggctctattatgaatcaactgagttatgacatcggctatgcattggctgcgctctggcaacacgccgcagtatttatgtcgtacgaacttggctgcgtcatgtgattgctatgtagcactctcgtttatttggacagcccccgttgagttgaaccgccatcactgagtcacgtatttttcgcatgccctgtaggcattgtgtgtctgccatgattattgagccacaattgcgcctgttgtgcacgttgtgtggacttatcgtgtaccccgattatcgagccataattgtgcctgttgtgcttattacgaaggcttgttgtgttgtcgtagccctgatggccgcacacgcgttgacaccagacgctagagctagtactcacgtggattgtggtgggttattcaagcccctaaagtcacattatgtgcaacctttgtaaacaattttgtttggctctatatcttatttgactgtgttgtgtggcattatatatttatatatcgacaagtgaccataacaactatatcgagctctatagtgcttggaaatttaggaaattaaattgaaatacaataaaacacagataagttttttggctctc

SEQ ID NO: 83835 - DNA, 486 bp, Zea Mays
gtagtgtttagcttcaaaattttcttcatcagataatcttttcccgaagcgtgtcgaataatataatcaagaacttcggaaggcgcttcaggagtaggagtggcagctttttcaggcagaatctgttctatagcttcttcttccgctgccttttctccagtttccaaggatttctccttggcgggctctgaaggcccagcttcggcgtcgacctggctcattgtaccttcggcttcggtcagctttgtctcggtttcaatctgcgctttcgaagccttggcaattttccctggagtagagcttgaagcttttattgtctccagcacatctagtacactagccatcctttttctcttgggggtcgctgctagacctttctgtgtcttcgacacctccactcctgccgaagggcttagaacttctaatatgtttgccccttcgattctcgattcttcaattttgtcaatcttcggcattgcagccggc

SEQ ID NO: 83836 - DNA, 687 bp, Zea Mays
gtcgttgatctaataactcatcatcaatgggtcaatttggttgaggggaggagtcgtcgtgtcatttttcccccacctcacagtcaagtactacgcggatgatcgccatggccctccgctctccctccctttcaccttttatatattcggcccgatcgaattcaatggcgacactgttctccgagctgcttgatcggcaacgacagatcgatgcgcacgtcgatggcgaatgaagaacgtacccttgcagggcaggacaggcggcctagctgcatcagctagcggcagtgtcgtattcaccgcaacaaagacccttaggtacggtcgtaccacagtccacaggccgctagctagctagctccgatccatatgatcctggattcctggtatgtactccatgacaaatgaaaagctagctgatacgtctaatcgaaattcgcactctcgatctcgctctctgtgctcggcgatgttctctgtcggtggaatggcggctgtggatagctgccacgattatatgcgatgttctggtccctttgccgagtattaaggtcataacactcgtcaaataaagaatatttagacactgataaagcttctttgttaagtgctgtagacttgactctcgacgaagaagcaagctttggcaagtgttttctaattcactcgtgacaaaggggtccaccg

SEQ ID NO: 83837 - DNA, 550 bp, Zea Mays
gaactgggggctgagggtaaccctcttcttccttgggtgcgagcttgggtagctgtcttttggtgttggatcagctagggtggtggtggtagaagttgtagcctttcaggatggttatgtaggagttggtagttttgctggtactgttggtatgggtggtagatatcttgataaggatgatggaattgtggttggaaagtatgggttatggccttcagtagttgctctaggtggcccctcgttgtcctcttagcctcaagtctctctttggcttctttggtggtgcggcaatctctagttggatggtcaacgtcctcgccgtgaaaacgcagtaggacctatgttcacgcatggggtcgcggtcacgtcccctgcctctaggtgctctaccacctctactcagttgttgattgtggttgtagttgtgagggggtcctcaaattgttgctgttggttgatgttgtggacttgctggtttggaagtggaggcagctaacctcgggaccatggtttcgagtttattgtgtgtgagggctccattggtttgcat

SEQ ID NO: 83838 - DNA, 577 bp, Zea Mays
cccaggtgtcgtaagtcgaagtttttacttttcgaagagacttcttcagtattcttcacttttgacgctgaagtttcggcagcaatcacctcctcagcgttcctctcaggtaccacaccagtgataatcctatcaatttctgtaatggaagcagcaattcttttctatattactagtgggggagtatcgaggatgaccatcattacagtcatcatacaccatttcttctagacattcccccctgggcgccaaaggaccctttccagtttccgcttcattgacttttctagcacttttctcctttgggtgtaataagctggtcagctcggatcctagaggacttagcatagcgaaaggaaaaggttcagttattacctctaggatttctgttatgccaatagaagatgtcgaaggggttttggtgatatgcttcggcagggcagactcttcttccttggcacggcttgatcccacggtcttctgcttcttgagttccgaaggcttcggtttcagcttagaaattttagtccctcccgaaaccttcggtctttttggtatttttttctttttatcctcc

SEQ ID NO: 83839 - DNA, 995 bp, Zea Mays
ccataatttctagttaattcattgtgatctttggatgtctcctgtcatgtaatatcccaattttcaacatttgaataaaggtcattttaaaataattaattgccaaattaacttagttttacgacatcaagattacgcaaatcatgtctttcatctgctatctctcgtttttttcttctagcaacctcgagctctagccgagcttgtctctcgccgtggtaaatttcaccctaacaagttgctgatacccccaccataactcacgcccagacggaaggagcagataaccatccatagcaagaacatgcgtgtagaaaccgcaagcctgcctctgacctccttggcgaccgggtactccagcaagcccccacctacacccattgccataaagcaaccttgtcgtgcccaacgagctattgagttaaagtgttgtattgcagaccttgaaatgatgcctcagtgcatagagctactactctggtaagaccacgtgcacccacctgagcacacgctagccatgcaccgcagtcatcgccgaacgtgtgccccaccatgagccaagttgccctgccaacctcgagaggttgtgactacattgtgataactgataacgtcgtccgccgcttacagtacaccgattgagattttgtcctctattgtgaaccgtcattcctcagcctataaatcgaccctgatgaccataccataaagcctcacacctgcttaagccatcaacatatccatcaaattgttgttgctcccccgcagcccaaacatcacttgccttactcttcaaattggagaggaagccatcttcaacgagagttatcaccaccgatcttagctgcaggtgagcgcacccatgatctctgacttcttgctctctctcgaagccattcctaaactctagaatctatgaccatgacgctcgtcgggacaacctttcccatggccatgtccttgacccggttattaaaatatgcaagaaaaatttc

SEQ ID NO: 83840 - DNA, 754 bp, Zea Mays
tgggcttccatccatggctacccgtgcgccccgctctccctttccttgcgcgagatggatcgatgagattgcacacaacccctgctgcatattcaaccactgatcccctacatccgcggcctcgaaaggtgtgttttatatttttaaatctcttcaattatatgtttgatgacccgtggggattgagctcatatgaatttgacttggatccaagttttgtagtagtcaattcattagatctggtttagctacatgttcacttaatgaagaagcatctagattaagcattttgtgctttagactctattgaatcctgtttgttcgacactgttgtatgcgcacaacttagactctactgatccattcacaaccactctattgaatcctgtttgttcaattcaagccatggttattggtttcaaaataaatctcacacttgatcatccttgtgcggcctcattctagaatgtgttgatttgcaattacggtttatttgcaatatttgagcagagctgttagttttcagaaatggtcttatcagtatagaaatggcaaaagctacattctccacaggttgtattcctttctgtctccataattgaataatggaacttgtaactgtatccagtgacaactaatttgtagcttatgaggccataataattgcacatcagaacctgcaaaatcccaagatacaaaaattgatagaaccaatatctcgccgtgcctccagacctgtggtgaaacactgagc

SEQ ID NO: 83841 - DNA, 332 bp, Zea Mays
tgtgcagatgcgaaaggaggttccattcaaccgagggcaggaaaggagcccatccgtggcccgtggtagaatctatccatacaggttctaagtctcacataacctaattaaataaaggcaacgtatcctgtgtaaaaggttctcgtgtgtaaacatgctaaaacgtcttaacaacctttggatccagaatcaaaggctaatcttaatcccacctgataatcttgtgtttttttctaaagaaccccctcctggtaatctggtgcggtggcggttaggtgggattaaaattagcctttgattctggatccaaaggttgttaaggcgttttagca

SEQ ID NO: 83842 - DNA, 1229 bp, Zea Mays
tttcttcggacgctattttctgttgtttcggttccttcattgcatcatgtgtgttagctcatagtgtatgttgctcttgtagatctgctacgtaccaaaagggcagacacacacacgtcctcaggctgtcctctcggtctcttctgcagctattcgaggtgagccactccttccaccattgctctcttttaaatgttgctttgccatggatagattgtctgcatttttccagattaggtgcacatcagtttcttacaactctgcttttttgggggagaaacagggtggtgtcgtgattcgttttttcctacacattttaccgctactttctcttctgcttgcatgcgtagatagttttttcacatttcactgagcaagaactggacatgaggttcacttcacctgcttcctgcaactgcaaaggatcataagatatgtaaaagggctaacaaacagttgtactgagcgaaactgtaattttgaagctagaaagtagaaaccagtgaagaaatacagcatgccttccaggcttattatcaggacataaaaagaaaacaaactgacatggcatagtggtaccattgagtaacaaatatggaactgcaggcatatgatttatgacaatctatttagctgccaagaaacaataaattccaattttctgtctttacatggaagataaaaagtaaaagagtgcaataattcaccatttggctgggagatttaatgaagttaatatgacactcaagaaggtgattctgttgggcttaatctctgctcttctcatctctgcaaacagctcaagtgcctcaactgacagcccatgcattgcgaaaccagaaattattgatgtccatgaagaacagccttttctgaatcttcaacagataactgctccccctttcttcagtcagccctttctccataatttgattaagaacagggcgatcaccagtaacagagcttgtcattagaaaatgagcgcttttacacgcctctggccccaaaaatagaaacagcccaggtcgtacagcaccattgtaaccaatttctaagaaatgtttcaaaatctgattctaaattgaatctgtgtccagccaaacaaaatttcgattttgtgttcagggtgccatttggaagtttgccctaagtgataatatctaaacaagcagaagagtagaagcagcaggaagcagggtagcaaccatggcaccagttgtgccattgtg

SEQ ID NO: 83843 - DNA, 298 bp, Zea Mays
gtttccccaagttgctgagagcatgcatagtttgccttggaatcaggagccagccagagtatgatggtcatgaattcgtagagcatggcacagagaagtttgtcgtgactgtatacattggatccagtccgcaccatgtggaatggagtgtcactgctgctgggcacagattcaaagacacctgccaagttgtcgcttgcaaggcattgagggccctgtgtcaaatttatgaagaagaagtggccgacaccccgctcagattctttccgccctttcagagaaaccgtccagtttggat

SEQ ID NO: 83844 - DNA, 925 bp, Zea Mays
tggagtagggtcccttgatcgacgctagaattcatgaaaaaattgttccatgtatggcgtcacctcttcaaggttggtcaatacatatagcatgatatgtcgccactcttcatgtgtcagggtcttggtggtcgagccacttgcgcttccgagttggcctcgaaatatgctaaggttcaattcattgccgccatcattgtaacgaggggtggattatgcacgctcggcagtttgtctccataataagttgttgtgaagtttgacacctcctctagaatgtatgcctctgcaatggaagcctcgattttgcatttatttctacatttctttcgaatagtctttagacatctctcgattggatagcaccaacatccctgcacgggccccccattcgtgcctcataggggagatgaagaatcaaatgctgcattggattgaagaagccgggtggaaatatcttctcaagcatacatagtaacacaagtgtcaatctttccatgtctacaaccacggtccgatataactcttttgcacaaagctgatggaagaaatagctcaactctgaaagcgctagccagacatgctcagggacataacctcgaaccatcacaagaagaatccattcaatccatatgtggaagtcatgactcttcatctctaagactcgcatagtagataagttcaccccctactcaggttagctgcatacccatcagggaacatcaacatcttgatccactgaagtacttcctctgggccctgcttaggatgaaatcggccttaggccttctccatgtctttccaccacttggcggcttcatctcttggtttggtctatcacataacgctgccagatccacttttgcctttatgttatcctttgacttatcaggaatgtccataattgttgcccacagtgcctcgg

SEQ ID NO: 83845 - DNA, 913 bp, Zea Mays
cgaagcctgccagaagttctctccccgttcaggcaacccctcgcaattcacaaagctgatcgcccacgcatggccacttcaacgctgggggctagacattgtcgggccactacccacggctcaagggaacctcaagttcaccttcgtcatcgtcgaatattttaccaagtggatcgaggcaagaacagtatccacaataacgtcgaagactgcccagaaatttttctggcaaaacattatctgccgattcggagtcccgtctgagctcacagtcaacaatggcaaacagtttgacagccaggacttcagggacttctgcttctccattggcaccaagctagccttcgcctcagtatatcacccacaatccaacggcgtcgtggagcacgccaacgatacgatttccactgccatcaagaaaatgcttctcgacgacaagaaggataaatgggccgacctactacctgaagcagtctgggcgctgaacacgaccaaatgccgggcgactgggttcactccttttcgcctgctatacggatcggaggccatgacctcgcaggaaatcaaacatgggtcaccacggacaagagcttcagccgtccccgacgtagacgaaccaacctccaaagaccacatcgacggagaccgtgtcttcgccctgcaggctctcaacaaataccaagctcaaacgaaggcctgacgcgaccacgcagtcgtcccaagagaattcgatgaaggggacctcgtactcgtccagacaactcagacagagtcacggggcaagttggagccaaagtgggagggtcctttcatcgtcaagacgaaggcgtcccccagcgtgtacaggctaaccatgccatccggcgaggacctagagcattcctggaatatcgataatctccgcaaatttttt

SEQ ID NO: 83846 - DNA, 1182 bp, Zea Mays
ccatacccaaaataacatcaaatgactctagggaaatcatcacgagattagctaaaaagacctcatcagcaagaacgacggaacaacccgggcagactgaacaactactaatggagcccttggcagaactatccacaattgggtgactcatgctctgctccaaaagaccagcacgcaacacaaaattctccgaaacgaacgaaaaactagcgccagagtcaaaaagagcatgagcatcaaacgaatcaactgaaaccgtacctgtcaccatgtctccctgatctctgccatccgtagagggtagcacataagctctagaaacaccctaaaaaaaagaagctcccagagtaaaattaatagaagaaccccatggagtcgcaggatgaggcagacatggagctccaaactcagagggtacaagagtggtcggtgcagaagtgagcgcgaccaggtactgagagaaacctggcataggcaagaaccgaggagtcccaggcatatagaactgctactgagggggcggtacaaattttttttgctcagcgcttgtcatcatgttgacagtgccctgcgaagaggaagaagtcactggctcccatttaagtttcccatttgggattcctcctacacaccacatccttgtgatcctgtctgcagatagagcacctgccactccactgacactcggcacggcgatgcgcttcaccacaatggaaacacaccaaccccaacccaggcttaggaacagcccgatacgtatgattactccctcctgaagtacccgattcagagggcttgccacgataggggtggtggtgctggtgttgtgactttcccctcttgtgggctggacccccagtgttgcccctcctcgcgtcctggccacgaggctaatcaacacttgaagacttctgagattccattgtgtactgatgctgcatctccacgcccaatgcctgctccactatagtacaaaaatacaccagcggaaaggcacccagagcatgcttgatagagggtttcaggccctgacggaactggctcgcctttgtaacaccccaggtgttactcaggattttccctccacacccacatttgtgaacattatcacatgtgaattaagttgagcaaaagacaccaaacttgaaatgctaaatcaaaatcaagtcttttcatcccaag

SEQ ID NO: 83847 - DNA, 645 bp, Zea Mays
tcggtctccaacttcgggaatccaacactcttggatagggtcccgactatctttgccccagtgcgttcgcgaatgcattctaagatttcctcataaaccccgccaaagagcatggaccccggttggtaaccacaagatacaacaaattcttttaattctaacttatcctcctcagaaagttcttggccgcccaggtgccgaagatcaaaatctttttcgtccgaaggagtattatcaattctcttttctttatctagcactgcggccatgttttcctctgcaaccacatctacaaccacatctgcaaccacatctgatattagcctgtcaacttccaacattgtggctgcaagttcttcagttttggctttggcagcatcttcggcattcgcagtaattggtgctttcgtcgccgaagctgaaggcggcgtttgctcaattgcttgcattacattcacaatttgccatttcttttgcccttaaatcttctcttatgtagccgaaggcgtttccgtcctctataaaagttttgtcagttccaatctaagaggacttagcagcttgaatggcggagattcagtcattaccttcaaaattttgaccacttcggcagcaaacgacgacagaggggttttctctgcttct

SEQ ID NO: 83848 - DNA, 942 bp, Zea Mays
caaacatcgagaagggccagaagaatgtgaaaaatcagcactgaaaactcgaccaaaaggggaaatctggcaaataagatccccacgggcatccaaaactcgagacaagccctttttaaagcgcacttcatagtcatcctcaagaagttgcaaaactgaaagcagattgaattgcagattcaaaaccaaagcaacatccttgagaataaagctcccgttcacccggatggtgccacgagaaacaaccttacctcttgacttatccccaaatgtgatgtattccttaccaatcatggggtcgaggctagagaaccattttgagcttccggtcatgtgatgcaaactaccagaatccatgagccacgtgttctcgtggcctccgccctgcatcaatagtaagatacggggtgagcaaatggcatagcactggggcaagtaaattgtgaagaataccagtgctacggtatttgcccctaaaaagtgttagggaaacaccaaacatccctagttccgaagggaagcgatcaccacaagaaggaaattgtggtccaccagggaagtatgaaccaaagcctctgtcacatggtccttggccatatggcacatgaccagcatcccatcgggcacgaccaccatgtggtatcactatctgaggcctagcggcaagaggcaaaacacctctaggcctcacaggacgtctctgaacaggctgagcatgaacaccatgagagggcgattcatgtcctttctgctcgactcagaaacccgctgctcatctctcttcctcctaaagcaaaaagaagttagatgcctatccctctcacaatactcacaatggtacctcacctctctcttgggtggattttgtttgtgggagggggctttctttttggatggctgaggagctctaggaaggggatcactagagatgtcggaaaaggt

SEQ ID NO: 83849 - DNA, 320 bp, Zea Mays
tatcattcccgcgcagccaccgctccacttgtaaggaagatacttcctgcaccacctgttgttgctgatgatttcccaccaactagacctcaacccctttgtccacaaaactgatcaccttaccttcccagtcacattgcataggactgtgtctcctcaaccaatcatagcccaaaatagcatcgtaggcccccagccctagcaccctcatatcactctggtatgtatgtccattggcccaccactccagtgatcgcaccatcgtgtcactatacataatctctccatttgccaccctcactttacatgaagcacaaggg

SEQ ID NO: 83850 - DNA, 1426 bp, Zea Mays
gagaaatctggggataatcatgctcaaaatctggctgtcacgctgttaaggtctgaattttcagactaacagtggactgacatcaacttcaagctcaattctgagcatgatccagtgctcaactaagtttaatccctatagtcgaattgcagatggtatatagctctacaactttgctataggtcactggatgtgttgccatttgaaaatcagagaaaatgtgacctaaacttgctctgtcagttcttctgaatggaacttgccatggtacagtagtctgatatagatcagatcgccagcgtgacgacctcaccgccggtgacctccctgcacgaagattcgtgccatcgtcgccgtgattcgcgacctgatcgcctggagaacatctaaaggtcaccgccgtggataactccgaccattaaataactccggccaccgtaccatggttaccgcggcggaatcggataagaacgtcggtgatcaccgtcgcacggccttgtgccgcgtgtccgagtccttccaccatgtcgccataactccctatagttgtcccatcgtcgccggggagcttgccacgacggtggacacgaattcacctcgcccaggttcttcttcatctccggccgccagcacggctcggccaaattgatcaccaccgctcgctccttctataaattgagcccgcggccagctccaccacattatcacgaaccacaccgtctagtatcgctcccaatcttgcaaccgtgagctccaatttcaagtttcccctaaatcagttctccgccacccggaaacgaacctcaccgcggccagccctttcccggtcagttcatcccccgctctccctcgtttgagcactcttttagctctgtgatgctcgccgaaccaaaaatttgtacagaatagctttaaatcaccgggaacacgtaccaattgtcctcatcgtccgcggttcacgtggacagagcttgatagcttaccgattgtgaaattaatttaggggaatcattcggggagggttcaatccgatgtatgtcgctcgagagcaccggtcgtagcgtaaatccgccagtacaacttcgccggagttcatcctccgcactgccgccgtcgtggacttcaccctgcgaagaattagaaaccggagggtctttctgtaatgtgtcagcgactcactaaaacagtggaagaacctgtctctagttagcctgaaacccgagggcccctgtgcaaagccgccagagcgcgcgggtgcgggcgcgcttctgcttagatctgggccgtgtgggtcaaaatcagcccattactgttgatgcctttttccttttctttttacttcagaaccaaataacttgtagaaaattgtagaaaaatcctaaaattgtgaaaccaattttcctaggcttcttattttccctagaat

SEQ ID NO: 83851 - DNA, 289 bp, Zea Mays
cgaggacaacaattctcgtttaccaacccggtctactcggagacggccacgctccatccccatacgacggcgcctgccactccgtgaaaattcatccacactatgttttcccaccacccttcgccgcctacacccagtactcgcactaggaagatctccggcaccctccacacgcggcgaagtcttcgccgcagccacatccaacgcaacaaaataatccaagccttcatccgaggactcctccgtccaaggaaatgaactcccagattcactatcggactcaaaacac

SEQ ID NO: 83852 - DNA, 579 bp, Zea Mays
ggcagtacagattcgaggccgtgtcgtcgtcgtcgtcatccccatcgcatgatgaaccagcgcgcatcgacacacgcagggaccgtgcctcctcctcgcagtccggaaactggtttcagatgaccacaccgttgctgtttcccatgtggatgtggccctgtgatccgcaccaatttgggtaatgaacagcagcgtcaggtccagatgccgagctcaaagctagctgtcagccagatggaccttggtttgatttcgcaagtcagagccgcgagcatgcccgaaatgcttggtttacgtacgaagaaaccttacgggtcaatgcaccgtcagtatccgtctatacgacgataggaatacgaatcatatggtagcttcgtctggagctttataccatttcccttccccggcaccatgccgtagagcatacgcaacacatgtctgtctgtctgtctgtctgtctgtctgtctgtgtggcaggttgcaccgcgccatctggtaaaaaggagcagcagtcgtctcgtcgtcagaaagatcgcagagtcgatgcattgcaggttgctccgctctatcgtcggaatg

SEQ ID NO: 83853 - DNA, 512 bp, Zea Mays
acgccagacgcacaagagcgatggacccacacctaatatgcccaaacggaacaaaagtagagaagcagagggggagacactcaccggcaagtggggcggcgatccataccccaccctatagcgatttggccgtaaactctggactccgaaggtaccccgctcgccatgacatcgatacgcttcgacgagcaccgatgtaccattctgagtaccgacaagacttgccaagatcctgtgcgaaccggtgaactcccaagcttgcatcgctctccgatcccaatggccacgaaggcgagtgaaaactacggtggcaagggtgtggcaggcgccgatggatgtgcatgtgctcggtgatgcggcgtccaattttatacgggcaagcaaaatagactcggcggaatccgcgtggggaaaatcgggtcggcgaaggcagcggcgagaatctcgtgatttgttggcacccgcggaaccatagtagaatacgggagggagaagaagaccttggctttctg

SEQ ID NO: 83854 - DNA, 455 bp, Zea Mays
tgcaagactaaaccctgatttggtggtagctagcctcaaacactcgaggctacctccctaagggccaaagtactaggggcggtggaaggaaatgagaaagtcctcccagatgtcaagtggcaaaacttatgatgttgcatacacttgaaccagagcaaacaaataataagcaactaagtctcaatagcatttttgacttgttcttaagtacattacattcataaaaataaaaactactgatgctgctatgatggcccgataggtcccttgcctccttgcaagtccagctctttggcatccacagggtcgcgccggaagcgagcagcaacgatctcgatgaccgcttggacgctctcctaggttgtgtcctctgcttctactaccaaatcctcgacaactggtgccaaggagatagagtggtcgtggatctagaagcaggtaagagtgtggtccac

SEQ ID NO: 83855 - DNA, 762 bp, Zea Mays
cgcaggttccgacgtttgggcctgcgcaagcaaccgctgctggcgatactgattttgtggcagcctcaaccatagtgtgtgccgatgatagtttatttggctctgtatctgagtgttttgagtctaaaggtgaatctgggagttcgttttcctggacggaggagtcctcggatgaaggcctagattattttgctgcgttagacgtggctgcagcggagtccacgcccgtgtggagggtgctggggatcttcctagtgcgagtactgggtataggcggcgaagggtggtgtagaaacacagtgtgggtgatttttcgcgaagtggtatgcgtcgtcgtatggggatggagcgtggccgtctccgagtagaccgggttggtaaacgagaattgttgtcctcgccgattggggcgagcataggcgagggggatcttcggaatctttttgagggtgaggaattgaggataatgttgttcaattacagggagatgggtatcatcgcgaaggttgagacgatgtaatatgtgatgccctcgccgtgtgtatgtaactgtaatttgtatggtaatgtggcctgttggctgtattcgtatgcctatgttgatccggctgcgcccgtgggcgactttgcacggagtgtctttttaatgagagattttgattaacgcacttgttgtggtactccggctgcacccttaggcaacttttgcacggagtgtcttttaaataaaagacttcgattcacgcacttgttgtgctattc

SEQ ID NO: 83856 - DNA, 695 bp, Zea Mays
cttgaagacaaggctttgggaacttttttctaaggggtgtatttgttagggtagtttttggagagatgattttgctcatttttgtctctttctaaaggaactagtttagcttttagagttatcggtgtgctttcatctttttctttgttcattggctagtggtgtgtaagtctttttctacctcttattgagggttagtcattttttcttattcgtcgtccatgtctttgggaaccaaacattgctcattttcgatggctttgatttgacttttatctaccgtcttatgattttgagtgagttttttcgttcttccttttgagtgagttattttgttcttcccgctcccttctttcttctacgctaaatctttgtgtttatgcgatcaaggggaatattgcgaacacaaggttgcgaagtgctcttatggttcagtttgtgatgagtgcttgttaatgtagtagaatcttggtttgagtcgtgtagaatagttagtgctgaaaggatcacgatgcccaagagggggggtgaattgggcttttctaaaaatcaacactaattaaaacctaagcaagagcccaacttcaccccaacaactagcaataagataataatactagaaatacaatagtgctaagataatacttcaaaaacttgctaaacaaatacacaatgtaaagtgcttgaattaagtg

SEQ ID NO: 83857 - DNA, 543 bp, Zea Mays
gctctataggcatagcccaaaacattcttcccaagattgttacttctattctatgactcatatatgttgcccttttaggtgtaatgactatcatagatctactcatggcaaggtaaggtagactatttgcatgaacataacgagcagatatgaatgaatgcgaagctctagaataaaaaattataatagctagcacgaaattaatgaagaatgtaccaatgacgatgttaggaccatcctcagtagcttcaacattaatttgattaaccctggcgatgctataaccatagttgctacctagagtctgtgtctacttgccctaagaattaccacgagccagtgtgttggggttcctctttagacaaacattagcatagtgaccaacctcactacacttgaagcatgtggtgtctttaccagtgccctggccagtaggtctcgccagggtgccaatgggggtagcctgacgagtatgtgaagtctgctgagcaggtcgtttgtaagactagtgccctcctctaaaatgagttggtttaccctggg

SEQ ID NO: 83858 - DNA, 864 bp, Zea Mays
gatgatgttgcggaagcttgtcagaaggcatttggtactgtctgcttcttcattggtacgagagatttaattcaagagcatatagccttcagagtatggccacttgtagagaactgggacatgccgaaggagactgtcaccaagtctagcgaaggtgacctggtccggctgaagtatacattcagatatggggataaatttgatgaaccaaacgacgactggctgaaatgtatcgaagctacaagtgatgaactacttggatcatattctaaagcagaagataatgcattatccacagccttcggaggccggggaaaaaagagattgaacagagtttttgatgccattggctttgtttaccccaactatcgctatccgctgcgaggacagggaaagaagagaaaaactgctacttcggccactccagacgagcctgtgccgaagggcaaaaagttaaaggttcttacccaccggccacgctatattgaaccggctgtggtgcctgagtttggcggggaggcttcttcagctgctgaaccaagagaacctgttcctcctgcgcagaaggctgaagagtcggctataatgctgaaggcaccttcggttaagccagttgaaaccaaggttgacaaagataaggctgaaaggtcaaaaactgatgaagtaacaaagttgccagggattttaagtccttcaacagaagcaacagcgctgaaggcagaaaagagttctgccataactcctaagagaaggaggatggtaaatgtatttgatattttagaaacaaccgactccataagtcctgctcccacagggagggttgccgaagctgacaaaacgcaacccaaagctgatactaagcaa

SEQ ID NO: 83859 - DNA, 895 bp, Zea Mays
cactaacaaaaggatatcttgggtgctctaccacaaaaaaccctattcttattagttggcgattatgtgttttctttcttcaaggtcgttgcatacaatgctcatcaggaaagaacaaattgagtaggtagtgggctttgaacaagaaatgcattaagtggatggagtttaccatggtgctttgaactccgactggtcatggggacagaatcatagccgatttgggaatggatgcggcctatgtagagtcgacgttatctagtatttgccataagaattattcgttgaagaccttgtccggatgaaagaacgggggcagcaagcggctgctgccccgccatgaatgacaacacgagcccttggaagatgtgtagggaacaatttgaggttaggttaagacatagatctaggttttggagaggtcaacacggggcctagaaattgaagaggtagatgtagagagcttacatggagtctgaatccacattgacttgcccgctcgccgctggcgatgatgcggaggatgggcgacgaagaggaaggtgagcccgggggcgctaggcggcgagcggaaaggcacaaagcaaggctgagcagtgtagtggagtcgtggtcgggttcggagcaagcgttggtttctaggcgagcggagttcgtcctcgcgtgtagtggagatcgtgggagtctggagacaggggacgcgccgtgtctgggcgagcgatgtagtagagatgagttgtagaaccacggaaatggtaaagggagattgagagtgttacttctaacaaagaaacaaaggtggtgatttggtttgaaggggtgagttaagtgagtggtctggggttcaatcccttggtcggatatctttttttattgcgcgtgggcatggttggat

SEQ ID NO: 83860 - DNA, 510 bp, Zea Mays
aggggattgaagagaaaaagggttgtgagtgtgttaacaaggcaagcatagaggtcagttgaagtaggcaagaataagaaattaacaaagaaaccgaagctggcataaaaaccttcggcaccaaagaaaagaaaggttacaagttccgagcacggagatgaagagggaccttctccaccgaagcatttagagaagaccccttcggcaacttcggttggggtaacataattttttgaggtaatgactgcacccttacctttcccaatgctgagtcctctaggatccgatctaacaagcttgttacagccacaaaagaaaattgttgagggaagtgccgatgcagaggcgggtaaagacccttcggcgcctagcagagggaacattcagaagaagcatcgaatgatgaatgtgatgagggccatccttgacacccctcctccagtgattcaaaatgaaattactcctgctataactgacgaaggtccccaacaagctgagaatagtggcggt

SEQ ID NO: 83861 - DNA, 421 bp, Zea Mays
ggttatgtttgtcgccttcggcgtgccttatatggatgtcaagaagcaacttggaaaattgttcatgatgactggtttgggctctctaaggcctaagctattttcttggcattgaagtagtgcactccaccaaaggttactacctctcacaacacaaatatattcaagatcttcttgcacggtctggtattactgatacttggacaactaccaccctatggatcttcacttacagctctgtccatctaatggaacacctgttgcggatccttctcggtacttacgaggaacatccactaggtgtattttttatgctcaaaacagtccgcttcagctttatgcttattctgatgcaacatgggcaagtgatgtgaatgatcgctgctctgtcacgggctattgcatttttcttggctcctct

SEQ ID NO: 83862 - DNA, 753 bp, Zea Mays
caaagacaaaacttgatcagggacaggggcgccacaagatttcaactaggccaacacagagttgagtacattctgcaagctcaaaagttagcaagggaacctgtttgccaacataaataatgcaaggcaaggatcagctcacctggaggttagaaaggaataagggaaatcccagagccggaggcatcgatgcactgtctgatgatggagtgttgacagagacaatgtttagagcatcactcagggagatctcagttccaacagcaggtggcagattcccagcatccgggtcattggcctctaaggtgatcggatcgacaagagcagtaggcgggctcatcaccacaggttcctcagatggaaccggtggcgatccgacatgaacatccatggaagcagccgaagaggaaccaagctcggcacccatgggggctgggtcatcctcagcaccacccttaggggctgggttatcctcagcagcaccttcggaagctgaagcaccctcggtcgtacccacagaagctgggtgaccctggcctgcaacgtcaagaaccagtgtgtccccgcgagctagaccaccctccaaggtcaaaaaagcgtgagaaactatctgggttatttcttgcccaacaggattaccagccaaagggatgtcatccgggacctctgtagggacgacagaactttcagtttcaggagtctccaataaaaggtctttaggaataatttcctctagtgcatggtcaatggtag

SEQ ID NO: 83863 - DNA, 482 bp, Zea Mays
gagaagagcaagaactcaaacaagtgcaaactcaaatcagatttgaattgaacttcaaaagcaccatgtgccaagtgtggatgcggtcacactttctcacattctcaagtacatagatgcagattatgaaacacatgtggatctccgcgctaaaactctagcaacctaggagtgaaaactaagtgctatgaaacaagtgccaaaagatatgggtgaaacaactagccctcccacctattttatagggggttataaaccacctctagatacatagagcctatccactcagtcaggggcaaaatgaaccaactcctaggttttccattcgacggccacgagctcttcacgaagttgccacccctcggcacacccttcgtgatgacaccatgtgccgccctcgattcccgccggaaccgtaccaccaagttttgaggcccaacgaaccagccctctgtaacgttggggtggttttgacgatcaac

SEQ ID NO: 83864 - DNA, 662 bp, Zea Mays
tgtcgcgccgccattaaagcctagaatcggaactgcgagccgccacacgaccatcccctgaccgcgacagaaaccggtgtgataggatcgtctagtgtttgtcgtatcatcccgagggcgccggtaggatttcttgggtcggagcgttgactgggaccaaggaaattctcgccggaattcatcactgtcgcgactccgccttgcatcgtgggggcgtgtccctgcgactcaaccgctggtaaagtttcccttgccttgcacgccatcattctctgtgtgtgtagcacccgttagctcgtgaattagggaatccatgcgtcgggtcgtgtatctcggtgaggacaccgctgtggggaatgatttccaccgcactcggttgtcaggggtagatgatgaaatctgggccatgggatctacggtcgatggcggggatggaatctggggagtgatggtcccctagggcgtgagatggtgatcggaaggatccagggagatctcggcttcattaaatccttacccttgatcttagatccaagggtctctgctgcgtaccatttcgatgctaggataacctaacctgggcggtctgtctttgatcggacggcgctagatccccgataccccttcggctacgtagttttgcataagagacctcagagttt

SEQ ID NO: 83865 - DNA, 395 bp, Zea Mays
gcagtttcctcttaactcatctcacagcaagcaagtaatcacaagagtacggcacaaccaacgatcaccagaatttcctaccccgcccgccacacacagacggtacaggaagttagcattatctctggagcgcgtcgtaatgcatagtcaaagagccagcagtaatcatcaaagcaacgccccggctactgtgtgccctgcccagcgtaaaacgaaaagggttgcgtcaaaattgatgggtctcgcctctcgtccgtggacgatgcgcgcagcttgcctgtaaaacaatccgccgattgcaatttaaaacaggtgtcatccctttgagtcgcatcaaacatgatgctagcagtcctcctttcgaacctcattgtggatgttatagcaaccacctg

SEQ ID NO: 83866 - DNA, 498 bp, Zea Mays
cttgaatttgttgcaagtggtcagctaatgtgatgaaagagctcggtgcatatgagacatgacatggtatcatgtggctatacgaagaagaccaagagacatgttttggttgtgttggaccgagttgcaagtgtgaaggacaagtcaaagactttggagcgatggatcgcgtggcgatgaagtttgagcaagcgttggcgccgatgaaccaagccaatgatgaagagcatgcaaagttgcagtcgttgaaccagtaaaaccacatggcaacatgaaagtgaatcttatcattcatggagaacgatggaggaacttcatgatatgggcaatgatcaaagattgtgtggttggctacatctatggatgatcgttgctcatcgtttgatgaagatggaatggatgtgcaaggcaaatgtaagatttatgtgtgtgggtgtggcatctatgtacccgtcaaccgatggttgcccacttaccccgcgtcgtcctacattgggg

SEQ ID NO: 83867 - DNA, 329 bp, Zea Mays
cttttttagatattatttatgtgagaaatgaagccatttgttttacaatttggtttcgtgtaggatgatctgttatgttctatctgaatcagtgcgtttgaccaccttgcatagttcagtttctttgttttggctgccgtgttatgacttatggggttggaatcagggagcattactgcatctttgcactgcaccaagctccaataaggagatacaaacaatcactgtttggatggtgtgtatcctttgtttatcaaattttagtatgattgtcatgctctgatgacatgaacatgtgaaagacagtaaagttggcttaggttccgtat

SEQ ID NO: 83868 - DNA, 351 bp, Zea Mays
gttctgaaaagtgaggaggtgatcatttccaaacaaggtaggcatttcataagttgtctcgacacgggggagaatatcgatagtgagcttgggagcttgatccgggcctgtgttcagataattgattttgaacttaaactcattcataaggcactgtaaactactatgcagttcaggaatggccgcactcagccaggtaacctcaacgtttgggacaatgttgctattatgaaagcttgtgatgggagtcagcacggtgttttctcggtggtgttgattgagctgcacctcttgggtaccttggttgactaactgagcttgctctgcaacagagttgggctgcatctctcg

SEQ ID NO: 83869 - DNA, 563 bp, Zea Mays
cgagccccaaggtgcggccaggaggccatttgtggcgcgcaggcgagcccggccctccccaggcgcagtctccatggccggcgagatttcctgctggccggtttcatctccttccgtccgtctctgtgttcgtctgtggaagaagaaaaggcagttgttcgttcgtgcaaaaaccagggaaaaaaggaaaccgcccgtgggccctacccacatgcatgcacctttgcctccgtgattcctgtgatcgcatgcgaccaagccagtaggcctaggaatggctaccctcatgcagagaaaacgtggtcacgtgttagcatgcctttggcatttttaatttgcgtgatcttctgtgatcacaaccgtgcgaccctctgtgaggcttatttttttcggctaatagaaatgtgttgtatcacagtaatccgtgagatactaaatattcaacatattttgtgtctcgaatccgttttaatccgttccaatcacgtttgcttcgtaataatatcgtctatatgttagaaacactattttgtcgcaacacatgtcttcgttatttatttatt

SEQ ID NO: 83870 - DNA, 1043 bp, Zea Mays
atcaaaattacaaaggagacgatgcatcttattttggggttaccaaatgctggtggaggaacgacattaggcattgatgaaagctgttgctacaaacaatttaacggctgaacttggtttatcaaaaagaagaatttggtgttgcagctcttcaagatcgtctgaggaaagggtttgacgatgatctaagcatcagatccttcttcctgatactattcaataggttgttgttccctactgccagctggggaataactaaccatgaggttcttttaactgaggaaatggatcgtttccacgagatggactggtgccagctaatattcaatgatttatgccaagctgccaagaagtggcatactaggagcgttacaaatgtttctacaaccatttacggatgttccatcgtcattcttgtaagcatatcactttttttgtttgttatatgtagccatattttttatgcaaaattcatatacatttagattatgctttgttatgtctcacaacgattcatgttatacttttgcagctgtattatttggatcatcttcatgactcagctgcacctcagaataaacgtggaacaccacgcatcaaatattttgataggaatattattcaagcattgacaagagctgacaagggcaagatacgccaaggacaagaaccatttggacattgttcggtatttttttatgtgtctatcatattttttatcaattttatttgccttatatatggtacatggatagaagcagtgtcgtttatatttacaaatgaaactccactttatatgtgtgtataagttcacgccttttttagttccgaagcaccacagagacccgctacatgctgtaccacctgctgaagcacaatttaaggcaagattatatttatatattttttgtcataaaatttcaacataatattcagttatacactgtatatttacttaataattttcattttacaacagcataagaacatgacaaacacttttgatgtaccgcgtccagacccatctagacagcacaccattc

SEQ ID NO: 83871 - DNA, 521 bp, Zea Mays
atgctttctatgaggccttcagtcatattcatgaactacatttctagacgaaggtgacaagaggcctccataacaattttggttgttacaactttgcatatcgaataggttcagtgttcctggccctagcctatcgaagcaagtgaccaaatgagtgggcaaaggaatgattttatatgaagaacggcttgaccgcgcgggctgacatatcaggcatcattcaatcttctatcgtcacaagtttttgatataagaagcccacatgttatgttaattttgaaacccaatctaccatagttgccttcaaagctgctagcacctatattgggacgagttatcttgttcaagagttcttagcctttaaaacatggcgactatcagttgagtgggacatgcctaaggtgtgtgaaggagatgcttcggatgctgagcctggctggttaggatttggtataagtatagatttcaagatgagtttggagaacccagtgatggttgactatattatgttgaagtgaggt

SEQ ID NO: 83872 - DNA, 515 bp, Zea Mays
agttcgggattctagaatgtgtaacaccctacttcctgtcaaggctgagtatttaagtttcactagtgtacatgggttatagatgaactatgggtggtggagggtgagttcttctactgatctagtggtggcatggttattatgagaaggttgattagctatgaggtggtgatgggatgtgatgagatgagatgctttcataggggtacccctcgaccttatatagatgactagagggctatccctttacaagtcatgatcactatctaaatcaacctgaatcctcttttaacatgacatgcgttccttcttatccaaagtttggtcgctcttcatccaagttatccccgagtatctagctcttcaggtgtgcgcaacctccctgcgcggggcttcagcgctcctgctgcgcataactcgattgtccagtcttcgtcattctggatcaagctcatccggcctagttgtgaccgagggcatgtcttgataggaaaaccatcgggagtcccatcagg

SEQ ID NO: 83873 - DNA, 345 bp, Zea Mays
cgcatccgcatctagactgcattgaagttatttgatttggcttcgatttcatccacacatgcaagtctcgtttgtcctgtacaatccactaaacacagaccaatgatttggactccaccaactgaccattgtctatacgagttcaaacatacattccacaaatttaatacaaaagaacagtacaccatgcaataaaatatcataaataaaaagacgcttggtgcagggctcacacctacgactaagcgagaaagagagagcaacggtcgagggtacggtcgaggagcgatcacgttacgcgattataaatcaaagtactcgtctaaacagaatagtattaatttg

SEQ ID NO: 83874 - DNA, 563 bp, Zea Mays
ctacgtttaggtgtttctcgcgggggagaagggttgctcgaactccagggtggggttcgccgttgagggcgccgccgcggcgaggacctaccgccggttgatatgtgcgatggaagaagaaggggcgccaactgttggatgagctatgggcgtccaagattagatctccgcgtaatgtgttagcaccgttagatttgaatccaatagatctcgtgacgtaccggtttgcgggagatggggatcagatctggtccgtgcgatcttgatccggtgtatgtggatcgatttcagctacttaaaacctgggtcatagatcttagatccatgagctagcagcgcttgcagattcagatctactctgatctgttgatttagaatctaacggcccatattgggcgatacctctttgctagggcagtttagcataagagcccctctgttagttcataatgaacccgcggtccacagggactattcacagagtcttagaaacttttgcatcgttgcccatgtcttttatagaatttgatgcgcagtccagagatttataaaattcagtaaaa

SEQ ID NO: 83875 - DNA, 382 bp, Zea Mays
gaagccggatcgtctgtgtgacatctccaccaaatcgatagttatcttcacctgacggaagatcgggcacccccattcctattaagtggtattcaaagactcaggtattaccgtcaggcttaacctagtttagtttaggttttttcatcctataactccagataattgccatacataaaaaaattccactgtccgataaccctgtttagccttgcaatttcgtttcagattgctttgttgaatttgtgtccgtgttcgagtcttgttgctggtttaggtcgtgtcgtaatcgtagttcaaccgctccgtcgttgttatttttttccgccgctatcccatccaccttacccagattacaagtcgaaacaccacattactcgat

SEQ ID NO: 83876 - DNA, 308 bp, Zea Mays
gtttctgaaaaattcggtagagtttccctattttgaacacacataattttgaaagtaaattcataaaattttaaaaattttggcagggttcccctgtttttgtatgctctcaacaaaaatatttcacataaacaaattgtatcaagcaaacatatgcagctacaggaatatatttcatagaactccatacaagttgatacaagtccataacagtccatagccatacaaatccgtttagttcatacaagtccataacataaataattatacaagtccataacatcatattccatatccatggaactcca

SEQ ID NO: 83877 - DNA, 370 bp, Zea Mays
aaaaaatttaggtgaacttgatttctccagcaatatgatttctggtgaaattccgatatctatcggcgagtgccaaagcttggaatatctcaacatatctggaaacctgctccaagggaccattccactttcactaggaaatctaaagggtctcttggtgcttgatctttcctacaataatctatctgggaccatccctgaaatccttggcaacctgaaaggcctttcttccttgaacctctcatttaacaaattccaaggtggtcttccaacagatggggtatttctcaatgcgtctgtcatcacagttactggaaacgatgacctgtgcggtggtatccctcaattgaaattaccaccctgctcaaac

SEQ ID NO: 83878 - DNA, 312 bp, Zea Mays
aaagttctatttgcccgaaaacaagatctggatgtcgtctagagagggtgaataggcgaataaaaatttaactcgaaaacttagaaatcttactctattcgaagactagatcacaacggaataaagatcacttcgagtaggtagtagacctttgtgtgcaatgatgaaattatttaatcacctaagtaacggtgaaaaagctccaaaaccatttataagggaatgcaggatctggcttttaggggtgaaattttctgctcagtgtagtagtgatcgctatatgtagaaatcccaaatagaattgtagagaag

SEQ ID NO: 83879 - DNA, 521 bp, Zea Mays
tgatgatctaaataatattgttcagtggattttagtgagtagcgggagcgcgttatccagcgatctgaatcgttggtttgaatgtttatttgatggtgtgttaactctgggtgcaatttgtttggtgaatttagtggaggttatgacttatgagtctgaaagtgattttgttaggtagattttgtaaagtttaaactggtggtatatatacccaatgttttttatgatttggttccagttgcactttttatgcttgtggtatctagcccgtacattcatatgacgatgtttgcatgtgctatattttccttgtcattatcgtgggcatgcatagcgatcctagaaatatctccccttttcgtttggcttggatggccgcaaagcatacgacgagcctcatgcctagctagggtatacattttttatcggtttttttggctgaaaacgaaaaatagagtgaaattcgctgattccgaatggaaaggatttttaatttaaaaaatgaaattcataaattttag

SEQ ID NO: 83880 - DNA, 823 bp, Zea Mays
gaggattcctgcgcctgctccttgcagttttggcgagccatcgaaatacattcgccatactttaatagcctccgggttgttaggaacttgttgctcggtccactctgatacaaaattaaccaattcttgagtctttattgttgtgtgaggtcgaaactctatgttgtgagctcctagctcgcaggcccacttgactattcttccgatggcttctttgctgtgaagaatatcccctattggaaacttggtgactattatgactttatggtcatcaaagtagtgacggagtttgtgagcagttagaagtactgcgtacaatagtttttgaacatggggatacttctttttggagggtcccagaacttcactaatgaagtagaccggatgttgtactggatatgtgtgtccttcttctgcctgctcgactaccgacacagtgctcaccacgtgactcgtgcaggagatgtataacaacagatcttctgctggctgatctggtgtggctcggtgtggtggctttagtactggtggcgtggtcaagaacttcttcaatgcatcgagagcttcctgtgcttctgcggtccactagatcttgtccaccttcttgagcaatttgtagaatggtaagcctttttcgcctagtcttgatatgaacctgctcaaggctgccatgcatccagtaagcctttgcacttctttctgtgatcgtggtgcttccattctcatgatagccttgattttttctaggttagcttcaattcctcggtggctgacaatgaatccgagcaacttccctgctggtactctaaagacacattttcct

SEQ ID NO: 83881 - DNA, 986 bp, Zea Mays
aaattcttgtcgctggagacctagttatcattggctaaagaccatatggcaattgactacgccatcaatagcctcgcattggacatctatacagtcattgtataagggaccccgcacctccctccaagagttgtattagctctttaaaaaaacacgcaaggtcggaggagttgaattactgcaagctagaaacatagtgaaagcctaagaagacttcgcactctagcaacaagccttgggccagaggcaaacagaaaaaaacgtcagcacgatcgctagccgcaaccagcaagtccacaacattagaaaccagcaacaataggttgaagccccctcgcaaccaaagtcaccctcagcagccaggcgagggggaggatcaacaaaggtcgcatacgtgactgaggccccacacaggatcgcaaattgtattgtgtcttccatgacaaagacgtcgtgcactccaccaagaattgcccaatcacaaaagaagtcaaagaaagaatggcatgaatagtgtcaaatcagccagcgaaggcagggacccacacctatcaacaacaattcccccttgctatcaagacattcaaccaccacctccaatgcccacaaaataaccacccctaactccctcatcaagaaaggttgccccttccaccaccgccacatataatactctctgttcaacaactccctcctccaccacccaacggcgaagacgatttccaccagccaccaataaactgcataataaagttgatctctggagggtctactatatacttcaaaaaaagatagagaaaagaatattaccgaagggtcaatcaagtcgtcgtcactagacccgtcgttaaaatgaagcggtcacacatcccctgacatttgatgcaaagtatgtggacctgcagaatgcattgcacaccgatgtaatggtaataaactgtaacatagtcagctaggagttgcataaggcccttgctgacaacggc

SEQ ID NO: 83882 - DNA, 381 bp, Zea Mays
cttctattggcgcttctgggggctttttaacaatctggaaaggctctcactttgatgctgaggtgattgatcaaaactctttcggtcacacgatttgtttccgtacaaagttgactaatcaaacctggtggctcgccaacatttacgccccttgtacccctcacagaagagaggaatttctctcttggttctccagtcttgagattaatgatgacaaactatggatcttccttggcgattttaatatgatcagatctcctaaaaaccacaataaacctggaggggaccacctcagaatgattaattttaacttggcaatcagtcagttggggcttctggaaattcctctcaaaggacaagctttcacttggtcaaatatgc

SEQ ID NO: 83883 - DNA, 554 bp, Zea Mays
caaatcacttgtagttgacgacaaggctgaaattgtgtgcaagtaatagtccatccatcaatgtaacactcttgtgtttcttcttggggctgggcatccttgtgatgtttcctttttggaatactttgtaattcatcaattgacagtgcattaggtatgagagaatctgctattagttgttcttggggagacatttgtttgtttttgccagaaaataaaatccgattcttttgttttgtagtttcactttcgtttgcattgatttggcgataagggattccatagtactcacaacaacaacatgttccaaggtcacttgtttgttggtttagttgtgcatccttttgtgtcttgaatgtctgttcatcaactgtttgatttatagtgttgttttgacttgccaacgcacaacattctttgcatttagtgacatcacttgtagttgacattcaaaggtctgacatctgtatgggtatggaagaatggaagggacgaaagggttgagtaaagacagattgtagggagcagagaaaacccatctatctaagatttta

SEQ ID NO: 83884 - DNA, 394 bp, Zea Mays
gtaaaactcctaaaaataggaaaatacctattaagaagaaaggccagtcagatggtcaggcccctatttgttcagaatgattggtgtgatttggaattgtcaggggcttggcaaaagtgtgaaaagtgagttccttcgtgatattatcatgaaagagaaggttaacttcattggtcttcaagaaaccaataagaaagactttgaagaatcttggctgaattttattagtggtaatagaaattttgtttgggtttggtctcctcctaatggtaggtcaggtggtttgttggttggttttgattcgaaaatgtttgatgttagagaaaaagagttgggggaatttatgattaggttgttggtgattcataaagattcaggttttatttggaatttt

SEQ ID NO: 83885 - DNA, 497 bp, Zea Mays
cgtacaagggtgctgagccccgacatgtgggcccaggaatataatggatgtaatacttggagttgctggagcaatcttcttgcaccctgacatctgcgatctgcgtggtattggcgtgtaggggaagcttccctggcaacgcataagtgatgatggacacagtgcaccttgcagcacgggcgtactatttggcaatggactggacaggcacgccgcctgcaggatggcctggacgccgcctgccagctgagtggacatgtcacaataaatgctgaggcggcacatcgcctgtcagcagggtggacaggcggcgcatcctctccgcaataaatgcagagtccgcgtggcccagaggccttacgtcaggctccgcccgctggcttatgtcacgggcaacaagccacgtggtagcatcgggtctccgcctgagcggggagcgcaagcgcacaggataaagcctggacacgtgtcagtaccggacccttgcttagaccagg

SEQ ID NO: 83886 - DNA, 602 bp, Zea Mays
cgaggagggcatgatcgaacctgtggagagctggccacggcgagctcacacattgcggtgttcttgacagatttgggggaaatcccaaattagagctctctagtggacaatccgagacacaagtgggtgcactggatgcgtgactacctagcatgcttaatttatagggcccgagggcgatggctcttgaatttggaatggcgcgctggcggccggagagaggggagagcattggagcaaaggattcgtggctttcaccgtggcaagttcaccggcgatgaccggacacgctttagtggtttactacgacgtggtaacgtcctaaggcacgtggtgcacgatcgataggtggccaactccggcgaggacccttttgcccgaccgcaacccatgtgggtacagcgagctcaccgtcaaccgggtccgagcctatccggtgccaagatttttaccctaccgtgattatctcctcgccaaagagcacgaatcgtggtgatggcttggatcatggcacgagggtcaccggcggtgaggggggctgaacctgtgatatgattcagttactgtaccatcagaatgtcattcagagcatctgacagaac

SEQ ID NO: 83887 - DNA, 455 bp, Zea Mays
gcttggggcccagaacaagccgttgccttcgagtctctgaagcaatatctatacgacctagcaacattaacaagtccagagccagcactacccctactactatacatcgcagcctcgcccaacgcagtcagcgcaacattagtccatgaaaaggcaaaagacggcaacactcactaatgcctagtatattttgtctctgaagtcctcacaaccttaaagtgcaacatgacagctcaaaaaaatagcatacccagtcatcatggcttcgcgcaagctaagacattactttgaggcacacaaggtatgagtcacttccgataggggtctcggggagttgctcaggaatccggaggcgtccgctagaatagcaaagtggcgacggaactctcagggtacaacatcaccttcgagcctaggacaacaatcacatcacaggtcctggctgatttcatcgt

SEQ ID NO: 83888 - DNA, 757 bp, Zea Mays
ggagcaggagcggcaactttttcaggcaaagtctgttctatagcctcttcctctgctgcattttcttcaatttccgagggttttttctcagcaggctctgaaggtccagcttcggcactagcctggctcactgcagcttcaacttcggccggttttgtttcagcttcgatttgcatttttgaagcctcgacaattttcactgaaggagtagagcttgaagcctttactgattctagcacatctagtacacttgccatcctttttcttttgggagttgccgcaagacctttttgtgccttcggcactgtcacttctgccgaagggcttaaaacttctaatatttttgttccttcgatttttggctcgtcagttttaccagtctttggctcagctaactcggctgagggtaccttcggcattacattcaaatctttagccttctgtgtaggggagatgggctcctttggtttagcagttgaagaagtttctccgccaaattcaggcaccacggccgattcaatataccgtggccggtgggtaaggactttcagttttttactcttcggagcagacttgtctggagcggccgaagcggcaacctttccagaagttgtaccctttcttttctgccctcgtggcgggtagcgatagtcagggtatacaaatccaatagcatcaaaaccctatttaatcttttcttttttcggctcctgaaggccgcagatagtgcattgtcctctgtcttggaatatgctcc

SEQ ID NO: 83889 - DNA, 1308 bp, Zea Mays
acatttagatcacaacaaacaattcgcagtgattacgagcataaccaagtcatgtaacaagtctgctagctagagcaacaacacagcccgctagacaacatacacgtcggcttgcctattattatcacaattcgagacacaacatatatataacaatcacttaacgcaatcgactcctacttaacatgagttggctaacgacgtgactatttcccaattaccaacctacaccacctttcgccatttttggataacctgcgcgacatacagctagtgtaatacatctcaagttcattcaacccatcaagcacatttcagaaaatttcctgagactacaacgacaatcgatcttatcatgcacataaaagcatcacaagcatatttacggaacctatcggttaactcgatcgacacactacacatgttcttcgcccttcaaaatttatcgcacaactgaaatcatcccacttgccaatgacaccaacaatacctactgatatattattcacatcacgagcacagttacatgccgcatactagtttctaacataatcctcatacaactcataattcaaactaatcactaacaataaatcacgcacgacagatttcgcctcaaccggttaatttatttggaacaccgcctagcgtaccactagtaccccgcattttgactcgacttataaacatagaggaagcgatgactacttcggcatgtcactacctctctattcaagcaaagaaaatttccacctacaacgaccgaacctacccatcgagcacaccttatattttcccgtctcgcatacaaccatgtggcggcgtgcgctcgagacatttccgtttaatttaacgcaatcactactacaacgcatctcggcacacacaatcacccacaggctcgcccttcgtatacgatcggccaacatttttaatttttgtcaccacatcagacgagcacaactcgacgaccctcaaattttcctacgcgaccatgccaccttttcactgtaacaccctaaatctcattttgagaatatagtaaaaaaaattcaaagaacttgaattagatttttttttccttctcccttggaattcccataacatttgaattcacatctccttagataaaagttctataacaaaaatgcaataaaatgattcttatatgaactagccattattgaagttcataagtattaatgtgagaacattttttttgagatcatacaatataaactatttctcttaaaataattgcatgtgtgctacatattcaaaagcaattatttatgtagaataatgaat

SEQ ID NO: 83890 - DNA, 413 bp, Zea Mays
ggagaaggtggatcccttgctggtggcgtagacagtggatctccaagacgatgaggatgacaaggtggtggagccctaaatagcgatgcttgtggcggagacggtgggtcagaaacaggatgaggagtagcatgtgaagattgatgaggtgatgatgaatgtacaataggaactaaagtttgaggaggcggaaatggttggggatgcaatgacgatggtggtggtggatcaaccaattcgagatcccttcgaggccaaaggatgacatttttgatggcttgtccaagtgtctcgatacctttgggcccagggatgtctagcatgtcgtcctcggatccttggacgaccgtcgtcacttctaccctacaataatcatctggaatgttgcttccatgaaacctgcctcctaggat

SEQ ID NO: 83891 - DNA, 569 bp, Zea Mays
cacacttaagggaaaagaagcctaaatcggataggatccgaattagactaggtttagggttgttgatgggcctcggagttagaagcccacctgaacgctatataatgaggggtgggcgcggttaaggttaacctaattctcccaccagcaaactagcagtcatgcccctctcaccctcgtcaagctaccatcgctaacctatcagttcagtatgcgacacttcctccctgtacatgtcgatacctctgaggtgctacatctggagcactagaatgaactgagtgaggacgtgaaggacaccagcgactgcacgacactgctagacgtgttcatctacatcgcgacggcttctgttgtcctacacgtctagtggtaatcccgtgacctataacagtagtagatcttgtttttatggggtcaaaaaatttgttttgctctagtgtagcctccccataatccttcaccctttcctctcgtgtagtgtatatagaagcaacaacatcaccaaagttaggctcacaaaattgagtcagtttatctcatcgatcttttttacaactctctaagaa

SEQ ID NO: 83892 - DNA, 580 bp, Zea Mays
ctaatcggtttcccctatgtctttgctacgtgctgcgcacctcgaaacggggtttggtgcagggaggcgggataacgttgtcgccagccatggctccgtcgtgccttcgcgttctgttgtcggtcgggcgccgtggtgagagagaggggattggggggagaatggtgaagggcttgggctgttggatcatacacggacggccccgatctaaccgcgcatacccttcgctcaatagaatttgaaccgtagatcacgaattgggcggctcagatcggatctcgtgctccaacctgcggatcgattgtgggccgtggatcttagatccaatggccgttggcgcgtaccggttcacttcacctgagatctaatctgggccgatcagtggcgatcggacggttagatctctccgatacccctttgatcacccatttgacacataagccctcaggaaatttggaaaacaacccgtcgtccaatgcgtgggaaacctgtgtctgggctattttgcgccagagtccctgcccttttacaaatttgaggcccagtccagtgctattttaaactgaataaatgaattgga

SEQ ID NO: 83893 - DNA, 320 bp, Zea Mays
attacctatgcctcataaaaattccagtcccaaattatatagtttcatatggtgctaaaatgacacccattttataattataacaagaattagtgacaaattagaagtaaataaaagcgtgcatgtttattgaaatgtttaagtgtcttcatataaattaaaacttgataactaaatcacaatggtttaaacttgagaatttggcactatcccttcatgattttgtttggtgcttgagttaagtgctattatgaccgcaagctgaatttcctgcgtgtacagttttagttgtgcgattaatctagctaagtaaagtatgt

SEQ ID NO: 83894 - DNA, 421 bp, Zea Mays
ggattgacatggtctcaaaagcgaaaattgcagcgcttgagagcaaaggagagcaaggaagaagaagaagaagaaatatttaacgacacacatttgcagtacccaccaccaaaaaaagtagaggccaaaggccatcgaagcaaatcaaacatccacaaagacagagaacaagatagcagctgcacaactctctataggtatggcggacagtccggctataaaactcggaccgtccgcagatgccgcgcattgtcctaccctcgagtctcgatcgttcgctctgcgccagaacaccttcaatgacgcaccaacacttatgaaggaggacgacctactgggagaggacttggtcaacacctagaaaattaggaaagcaagatgacgaactagacaagaccaatatgacgcttaccagtgttgg

SEQ ID NO: 83895 - DNA, 980 bp, Zea Mays
aggaggaggaaagcaacaagcggtagggctggctcgccttgttcctgtttgctagctagctcttcgttcctcgcgcaaatccctcggcgttttctcggcgttcatcatcttgctgcgcttttctaatcgaatcctgccggccggccggtgtcacgccgattattccctgcgtagctcttgttgtttccgagcgtttgtttgggggacggagcgagagccgcatcaccatctgctcgctccggttcaaagcgcaactactactactagctagactactgcctttcccccaatcattctctctctctctctctatgctgtgtatcagtccggttcctcgtctgagccatttctttcctctccggcagcttctcgcatgcgcgcgcgggtgggtttgatttcttggtttcttgcgggggtgagtgcagcctgtttgtcatcatctctcccttgctttgtttgtttgctcaagggaatggatggatgatggctgtgtggcctgttgtggcgcacatatgcccagatttatccatccaatccttgcccttgcttctttgctagtatctatctagctcgctcgctgctgaatcttggtcgtcatatttattatctccttctcacacgctgctctcttgtgtgtctgtgtgtgttttcttttatttcttgctccgaccctctttgtcctgtagatcgtcatcagatctctcacacaagacgccggagtccaggcagatagatacacaccgcgccgcctgccgccatgtcgcctctctgctgtgactcggactggtcgtcggtcacctgagagcaagctaaacgacgacggacggacggagctagctgctggctgctgccagtcacgcctcctgctcatcgaccaagtgcgccaaataaaggatcggaggctgctagcttgttactaataagctgcggcggccggtccgcgtttttctttgcttccgatccgatggcggccgcctcgt

SEQ ID NO: 83896 - DNA, 571 bp, Zea Mays
atctctctacaatgttttagtgaaagaacaaaaagcctttctgatcattcaaatgataaaataatttctgttattttggtaacttagtaagaatgtacagttctggcataaatttggcacaataaatacaattatatcacagcaccataccttgacttggttttgtccttctcgtgtcatagattctgcacttctgcagaataccatgatttgccacattttcaagtacattgcattgtgtcttcagtcattacgaaatgaagccatccttgatcagctgctctaaaaggtttacatttcaagtcacagccttcagcgtctctgattcctacttgataaaaatgactgatacaaatttcttcatggttttacagcctgacactgcatatggaggcatccagcataatgatctcgtctcctttatagcaaaagaccaaacttaagtcagttgtagatacagatgctcaaggatgctgtaaatctcatcggaattagggtggctggactctcccatcaagaactcatgaacaacattttccacttcaagccaactgcaccctgctgttttctc

SEQ ID NO: 83897 - DNA, 689 bp, Zea Mays
cttgcggatcagtgggactgcttcttcttcttccccttcgtcttcgttaaacatgcagctagtagcctgtgcaggatcacaacccttagcaccaacctcaggaatggcctctgccgggacatcatcgggaaccggtacagaagggcctgcatcctgatccaagcacgacagtcgctgcagtcgcctcttcttccttttctccttgacaagtgcagtcgggcggttcactcggcgtggacgctttgggcgggcaccttcgggtttccgaatttccacctcttcatcaaatgcttgcccagttgtgatggccattggctcggtgcgggtagagtcggatgattccccagccagcaggctaagaacaacatctatctcagcgtcatcagtgcaagctggcatctcaaagtgagtctgtctttcatcctcgggaagactccgaagtggagcaatcaaagcctcaatgtcctcagaagagggtcgcactctaagacccaggctaccgtcacaagaaggagggttggacacaaacttagataatggcctaagtggtggcaggttccatgcagaataggccacacgagcaccagcatttgaaaccctgcccctcaagatcatttccagtcgactcagcagatctttagtgggaattattctgttcgtgacccaggtagaatcgttgacaccgctat

SEQ ID NO: 83898 - DNA, 2235 bp, Zea Mays
tggtacatacatatttgttggcatcaagcaagcgtaacaaataatcgctagaaagcttttggattgtgacccccctgcagacaactcaatcactgttcaaatgttctagtgtattctatatgttaaactgatagtacttccattcctttttgaatgtggtaggatagacctgaaaatttcaattatctacttcggaaacttcaccttattggtgctcttaaaaagaagaacgctttgtctccatgcaatctgctagatagcttgattgtgaatatacagaatgccataagcacgggctaccaattagacaggaaaaggcttctgggagttcctgttagcatacagccttgcagttcagctatttacagtatattcgtaactggaaagggatcttgttggattccttttgatatgtttatggagaatgcaatggatgggagacatcttcatactatatcatcagttgaatatctgacaggtgcataaatgcataaagctgttaattcttgcctttccactttctgtaaaacattttctaacatgaaacagttggttgacagaactatccaaaacacttcaagtgttgaatcgggcaacttggcaagagacctttcaggctttatggatttcggctttgcggctagtacagcgagtgagatgacttcaaccacagtctatatgtattatttttaaataaagaataaggaaaaagaaaaatagtatatacttttgttgtcatttgacatatgctggaaacacatactattaatatttaatccttgctaaaaaatgtgcttagtagggcccagatgcttcggaaggaccatttcctcatcttgattcacggatgtgcatgttgttggctattatccccttgtccattgcaactattgtgaaggaagaggcgggcaatctgaaaggggaaacaacctctgttataagaggacaattagtgtcttcacttcagattctgagacaattttttggtcttctttcaccacctccagcaactgtgcacttggcaaatgctgcagctagaaaagcagcagttgttctgtctaacctgaaaactgggagtgagaacatgtacagttctttcaaagacagttcctctattaaagcaggttacctatgaactgatatatatttttaacatttagtatcctttggttttcttgttccttttgcaattatgaattctctaaatgatagttacgcttcaaaactgtagttggaaatatgctacatcttatcgtggaagcctgtatcgcaaggaacttaatagatgcatctgcttatttctggcctggctatgtggttccacttaaagaatcctctccagttcaggcatctccatggtcatctttagtagaagggtctccacttatagaacttaaggatgcccttatggtcacacctgcttcgaggtgataaatcataggaatatactaattttagagtttttttggttgtatgtctgttgactagcctgattcataatctcattcttattttggtttcttaattcttagtgtagaagagttggagaaattgtactcttttgcagtaagtgggtcaccggaggaaaagttggcagcttcgaagattttgtgtggtgcatcacttcttcgtggttggaacattcaggtatcattcagtttaaaagaaccatattgtagtaatgttctacagaagaatgtaacatgtttgcatgcaatttgtttttctgcttaggaacatgttgttcaaatggtgcttaagttgttatcgacattcctccctttggattctggatcagaagggcgatatgtacagcatatgcctatgctgcatgctcttgtatcaggaatttcttctattgacactgttcatattctctcactgtatggtctggtaagaaacatagctagtttaatagttcaggtctattcgttttgacttagtcatggataacatggagttctgacgaagtttcagatgaaatcaagaataacctagaattatgtgtgttccttgaagcagaatgaaaatattttttgaactaatcttgtgttaaacatatttctcaggcatggatttatatgaaataagtattgacaactttcagtccatgtgcatctttcatattgacaaaacttctagtccatgtgcatctttcacattttcatatgtgaatgacttgtgtttacttgtggttttcaattacggatagtatctctttaagttattgctgca

SEQ ID NO: 83899 - DNA, 1648 bp, Zea Mays
aaaacggcggagccccaggcaggccactcaacccacaccggcaatccgcccagctccaggattatctgaccatggatggacgacggtggagtccaagaagggtagaagtcgccggctgaaggctctgtggctcccgggccgggtcccggctgatcttgttgggcgttgcttcaactgcttgggctgcgatcaccgggctgcagactgcggcagcgaacctcggtgtttcctctgttctgcgcttggccacaagtcctcatcctgccccaaggcttcggtgtggaggaggctcgggtgtcctagacctgtgaagtcggtctgggagcggctttcaccggcggtacagggaagggtccaacgaccggcagggcgtcgtccggtttggcagcgtattgctccaccagaagccattccggtcgtcccttctgtcccggtgggcaacatgctgggcgtctcggctgcacagggtaatggcggccctgccagctccaggcgcaaacggtggaggaagaagaagcgcaaggagcgtgaagataagccggctttggagatttcggctccacctcctcccgagcagacgcttccggcgagtgatgagactgcttgtgttattgattggtcggttcagatgtctattgcggaagataatctcaagacggctgtggtgatcacagtggttagctctagagacgtcagcgctgacgagatcgcgttggttttggccccacggctggaaatggaggtgggaggattggttctccgtcagttctcccagtccagcttcttggctgtcttacccaaccatgtgcagctcgacacgctggtggatcgcttccatatcatcagagaagaaaacttcatgctctcctctaggcgttggacgaggttcgggggtgctgttggtaattccttgaagcatctcgtggaacttgagatcagaggtctgccgttgcacgcgtgggagacttcggtggtgcaacatttgatcaacccccatgcttgcatttcccaggttctgcccgacacgctggaaatcaggaatctggaagtctttcgatgccttgcttggtgttgtgatcctgaacatatcccatctaagaaggacctctggatcactgaaccagaccaggcttctgctgctgaagggaagaaggctctggtgtatccggtgcaaattcgttggggccctgttgatttgaatctcatacctggcgctccacagccgccagttggtgctggtgatcaggacaaacctgatacccccccttcacttagaagatgtggtgacaaccctccacccactcaacatgctgcagcctttgaagaccccgacataatgacccacaatcagcggcggccggtgcatgaccgattgggacctttgaggcgctcggattcccccagggaattgagccagccttgggttctggttgatacagaggcccggagcagccagccctgtgacctgcttgatgcagtggtgtgcagcagagtagggattcctccggctcctgcgccggatggggctctctgtctagcggctggggatgtgctgctgcggcgcgaggggggctgcgatgaagtaatccccatgaccccgttggccgcttccagcacgtgccattccaccggagggagacgcagactg

SEQ ID NO: 83900 - DNA, 362 bp, Zea Mays
tgcgaagacaacaatgggagtacagtatacacagaaaattgaatgaaactgtaccagttgccctgggtcatccaggccttgtcacagacaacccccgtagcagtacagcaatgggcaggttgccacatgccaaccatgcatctgcgccgttcgcctagcatgctcctgcagtcctccgtccattattgccaacttcaggtctagtccttagtcctggcgctggaaatggtggttccatggcatttaggtttggagagttcaggcaacgcaaccactagatccaaaaatgcacacccagcaccagaatggacaaggccgaccactactcgaccagtttggtatctgttcgactgttcctccca

SEQ ID NO: 83901 - DNA, 1276 bp, Zea Mays
aaagatactctcttaccataacagattcatcttatcttgaaaagattttatcctatcctaatagatctatctaacctaaactagtctaatctagatcatatctaatctaatatgttctaatcaagtgtgagttagctaatgccggtacaaaagataaggccatactcctaattcacttacgcttaagttggtgatgtagatcaactcggccatgtacaaccacttgacctacataataggttacataacttatccaaccaatctagaagcaaacaaccaaactaaattggactaatcccctttaactcttagccacctactaaactagcggctctacctatttgtcacctacaaatctgccttaactacatgtccctaatttggataacaacttcaagaacaaatatcgaagatgatcgccctcatcaaaacaaggaaggataagattcaagccagatcttcaaaggaatcaagatccacaatcttgggtgtagtccttccttactcctactcattcttacccaaacctacccatactttggagacatcttttatcctacgtgataaagtagctacatatatacccatgctttcctaatcacctgataatttgtgatatagacaaaaaaagttttggtattaaaatcaattagaaactaacccatagactgcaaacaattacttctgtatctattttcttacaaatctcgaggacgagatttctgttaaggggggtaggatttgtaacacctcaaaaatctggtcttaagaatttaatgaaactctccaaatttttttgagaaaatcctctaagaaaagaagtttgttacccttgaagttatatcctttaaaaataatattatgaaatggaaggttttcaataaaatttattttcttataaataagtaataaaatatggaatgtttgaatgtattttttttacacatctaaaataatattctcttgaaataaatgatgtgtgtgtgcattttgtgacataatataaaaaaatcatgtgaaaagaaatatatcaaaacccaaaaaatagaatttaagacctaaaggaaaattcaagaatttagaaaagaagagaaggagaaaaatattatatgagtgaaaatgaatataaaataaaatataatattggaatgggtacatctaacttaaaggaaactcctaaaaaggtctcaaattcaaatttggaattcaaaataaaaaggagacataatagggaaatgaaaatataaaaagaaaaggtgaaatcccactgttgggc

SEQ ID NO: 83902 - DNA, 1266 bp, Zea Mays
attgagcataaaacaagttagaggacaaggttacgatggagctagcaatatgaggggtgaattcaatggtttaagagctttaatattgagggaaaatagctctgcatattacatccactgctttgctcaccaactccagttagttattgttgcggtagcaaaaaaaaatgatgatattagtgatttctttgatatggtatccttattaataaatgttgctggagcttcttgcaaaagaaaggatatgattcgagaatgtcagcaagaaagagttagcaaagccatatgtagtggacaacttagaagcggaacggggttaaatcaagaacaatcacttcaaagagccggtgacactcgttggtcgtctcattttaaaacccttcagaggttaagcagtttgttccctgatgtaattgaagttctccaatacgttgaaaaagaaggtccaaatgatgccaagagacgccaagcacgtggtctcatggactatttgatggattttgactttgtgtttcacttgcagttaatgttgcttattttgggccatgcaaatgctttgtcattgtcattacaaaggaaagataaagacattttagaggccatggtagaggtgaagttaacaaagcagagatttcagcaaattagggatgatggttgggattctctattagaggatgtgttatccttttgtgaaaaacatggtattccgaagttggacatggatcatgagtacattaatcgccacaagcctaggcaaagaaccaaccgaactaactatcaacactatagatatgattgcttgaaccctgttattgacttacagcttatagagttcaatgatcgtttcaatgaggtgaattctgaattgcttacccacatggctgcttttagtcccaataattcttttggtgcctttaaacatgagagtttgatggaattggctaaggcataccctgatgatttcagcccagtggaactagatgatctcagtagtgaacttcattgttacattgataatgtgagagctgatgcaagatttgctcaattgggtactatttctgagcacggtaaactaatggtggatacaaaaaaacatcttgctttttcattggtctatcggcttctcaaacttgtgctagttctccctattgcaactgcatcagtagagagatcattttcagcaatgaaaattgtgaagacggtcctacgaaaccggatcggtgatgactttatgaatgattgtgtcattagcttcatggaacaaga

SEQ ID NO: 83903 - DNA, 1855 bp, Zea Mays
tttcttctgaactgcgcatctatcctcgtgggatagtagcctctatttatatcagagttacaggaatggattgggatcaattgatccggtttacatggatcaagcgtggactgagctgctagacgcacggagccagtcaacagctaccagtaaactagcgaacctctaacagaatacatacacatactcttaacagtccccctcaatcacaacagagggtgcctatgttgaggttgtcacagttcttgatgaatggtgctcttgacagtggcttcgtcagaacatctgcaagttgatctttggatgatattattcggacttccatggctttgcgtgccacttgctctcggacaaagtggaaatccacttccatgtgcttggttcttccgtgaaacactggattactggttaagtaagttgccccaatgttatcgcaccataaccttggagccttgtgcagaaacactcccaattctttcatcaatgactgtatccagattagttcagcagtaacattggcaatggctttgtactccgcttcagtgcttgagcgtgagacagtcacctgcttccttgagctccaggacactagattgcctccgaggaatactgcaaagccactagttgatcgtcgatcatcggggcagccgacccaatcagcatccgagaagcctgaaatcattgttgatgttgatctctgaatctgaaggccatggtccagtgtccccttgatataccgtagaattcggttcactgctgaccaatgtgcatcagttggattctgaatgaactgacatactttgttcactgcaaatgacagatcaggtcttgtcaaggttaggtattgcaatcccccaaccacacttctatatctgaattgttcttcttcattgagtattgttccctgatgcttggacaatttttcagtggctgacattggagttgagataggcttgcaattgtccatctttgcccttttcagtaaatcaagagcatacctcctttgagacaataagattccagtcttcatgttcttgacttcaatacctagaaaatactcaagattgcctaaatctttaactgcaaactcatttgtcaacttttggatcagtttctcagtagcagagtccgatgagctgacaattatgatgtcatccacatatattagcatgtacattgtaatatcagcttgcctgaacacaaatagggaggtgtctgcaatagatggactgaacccaagctcaattagtttccctgtcagcctagagtgccaggctcttggggcctgctttagaccatagagggctttctgcagcttgcaaatataattatctggcttagttgagtcagtgtacccaggtggttgcctcatgtagacttcctcctggagtactccatgtaagaaggcattttgaatgtcaatttgcctcatattccaaccttgactcactgctagagataggacaattcgaatggtggctggtttgattactgggcaaaatgtatcaaggtaatcaatgccatacctttgtttaaaccctttagccaccaacctggccttaagcctttcaactgcaccatcaggcttcttcttcactttaaatacccatttgctatcaatgatattgattcccttcctgggtggaacaagtgtccaggtttgattctttaacaatgctgaatattcagtgtccattgcctccttccatcctggatctgatagagcttgttcaagatcatgtggttctgttacctcaggaccagatttgacttgagcaacaaaacctcttgccttgtgagaatacttgatagtgccatccttgaactccttgggctgcacaatattattcttgag

SEQ ID NO: 83904 - DNA, 625 bp, Zea Mays
tttggaatcaaattgtgctcaatccagtgaattcttgaccaagatctctgtaacaaaattggagctagtatataggggaacaactttgctatagtcaacttggtagtttgttgaatgaaaatcgaagaaaaattactctcaatttgctctgttaggcactctgaattcagtatgacatgaacagtaaactgaacaagatcgagttcagtgcatccgccaccgacgttccttcgccgtgattcgagctcgcgccacgattggtgtcgttcagacatggatcaatgaagtggtaaaagatctcgagttcggattcggtgaacgagttaccattctagccacagacaccacgtgtcctcaccgtgcttcattcaccaccgccgtagcaagccaccggatgctccggccatccacgcggctggttggagtccctcgtgttgaaccaccgtaaagggtctgcggtaagtctgccatgttattggcctgaggacactgtaaaggctaacgtggagctcctcgggctatcgccgccaccgtgattcctcggtcaaattgaccaccgtcgtggtgactgcctttaaattgagcgtgccctcagtctggcctctccgttacacacccaatccac

SEQ ID NO: 83905 - DNA, 1403 bp, Zea Mays
ctattacaaaacattctagataagtgaagcctgattaaaccttcacctaattttaaaatgactcccaaaaccaaacaacacctctaaaatttgaatctgaatagaacaagacacctaacttcagacgctgatatctccctttatactcatccaaaaatgtaaataaatacttgttggaatggttaaaagatcctctacatcttattccattgtaacttacctagaatcggaatataaagagcccaaaaatgccctagagtacaactgcatgcactagaacagaacacccaataacaacagctgggttaatccacaccaacaaaatgataggggagtgattaggagcttgtataacggtattaccttgggaaaaacgaactcaattccctccactcctagttggacgatgacctgctcctagatgggtggcggcaacatacatcaatggtggagatggtggtggctgctgtgctccaagtgatgggaaaagtgggtgatggcagcggttgctgctccctttgctgctgccgtagggaggaaaaagaatgaaagaaaagagaagggattggtagctaaaaaccctaattatttaggatccaaaggcccagattagacaacacattctagacttgtccgtacctcaaatcatgtgtatgagtaataaaaaaatgcatctcgacgagatctacacaaccacggctcccgatcggtcatcagagcaatgaatcaaaaagtcattttttggtcaactccaagcattttagaaaacaaaacacagttaatgtttttatttggggtgttacactctacccctcaaaagaattcgtcatcgaattgtgtcgcttctacaaatcaaaacattcaccaattgtaaaacttagtcaaactctaaataggctcatataatagactagttgtcttgacgtgatcttctttcatgagaaaacctctaactcagattattttatcatagaaaacgacacaccttaacaacaataaaaacaatataaaatgaaacccaaggcattgtcaggtgcaatcaacactaggatttcccactaccaaatttggatgcaactccacaaagtctttaaacaactgttcaccaaataggttagaacactaagcacaacaaccaacaaattcaataacctcgtttgttaatgccactaaggtcaaacatccatatatcgtaaatgtatgacacacctgacataccactctcaagcaatataaaacatggttgttattacaatagaatccaactactagagacctccaaaactattctattgacatgaagcaaatggtggtcatgtcatataaagtctttttctcctctcaaaagagataaaatttgcaacactcgtaaagcaatgaagggataacaacaagaaaaacta

SEQ ID NO: 83906 - DNA, 344 bp, Zea Mays
ttcgatccaaccatgcgaaaaatgatagccagcactgtattaggagtatggtagaaccgcgtggttagcgagtgcacctccacatatgttgcatcttacctgttttttccactcgctggttcatttaagattcagaagccaaattacactaattggtcttgcagattgtagcctcctttctatttttcagaatcaattgctctcatgattaaaaaagagataagtttggctaattagaaactaaaaagaggcacacatttactatatgaacaattgaattataagtagcatagatctttctagtaatttatcatccccctccttgtgaccgtataattcagaat

SEQ ID NO: 83907 - DNA, 1376 bp, Zea Mays
ctggaatggatcaaaaaggagttcaaatgagtttaatatggattaaacaagtttatggaattgtttttgtactaagaatcatttttaaatgttatttctctatttactaacagcccatgtactgcgaacacaatatccagaaaggtcagggtctaaactgcgaaatacaggacctatatgcaattacttttgaactagcgtggatggcgggttgaataatagaaaccagagggtctatttattaatttgcgcatggctgaaggggtacgaggcactgtgatccgtccgattcaaaaccagtggcccagattagaagttgtctaaatcgaaccggtattcaatccgggccgcccgatcagggatcaacggttaacatttaacaaatgggcccatctattgtactccgtccgatcgaggctcgatggtcaggatcggacgggcgaagagctaaagcacgatcggatcctggtcactggatccgcgatcaaccgcagtcgccctctacatcgcactatccccaaaaggcggcgctatacagggccacggcggaggccatcgccggccgttcccaatccacgatcccgagcgtcgtgcttcaatccaaagggcgatacatggaaaagggacgccagctaaccatatgagaaacttctcacctcgactctggcagcaacgggacttggcgacgtggaggagcagcgcgacggatctcaagaagcacggtgaggaattgcggctgttcagagcatgaatccacccaagcgaggttacgacggtattcctagaggcatgatgaggcccatgggtccaattccgaagacccgcccttgccattagctcaaatcacccacagcagcatcacacgttttctctctcgtgacggtgaccatctacatggtggagttacccagcggtgccaatcgttccatggtgcagaggtggggaagaaggcgctcgcgtcacaattttatagcttcagcggaggtcggttcacggtggttgtaacggaacccggcgactctgcgcggaaacaatggcggcgacaaagtctcacatggttcgtgacaaaggatgagaggagggatgtggcacagttttataacctgggagaaagggagccgagcccgggcaggtagcattccacgaatttcggcttcggtttcggtaggcgtatgcgcgagctcggaatccccgggcagcaccacggttctgttgcgccgacgcggggaaagagatgaagatggcactgaccgatgggtcccgcgtggaagtgactaggagttgcatgaggtgggctggcgggtgaaggcacgagctgggctgcagaggagccggcccagacagtcccccatttcccttttgtttttttattttcc

SEQ ID NO: 83908 - DNA, 1101 bp, Zea Mays
gccatctgaaattcaggagtttctgttgttatattcataatccgtagttgcacaatgtgatgaaatgaataagtagcgagatttgcaaagttccaaatctacctcgcttttcacgactggtaccaacaagataaaatttgattcacatttttaaaacttaaaaccattcatcttccatttctcccaaaagaagtttctaggggttacatcaggttcgaaggactcaactctctagcctagtacatccggagtgcaaaagctaagccatttgaggagtgctacttcctaacacttctaccctaaccctgaaacctaatgagcaaaagaggcaacgctagactcgagggaaggtggtcctccagagtgagttgagcctgtagtgtccaggctagaagaaggctctgcctcttcctctccctcgatgtctacgtcctcgtcggccccatctacctccatggcctctatctcctgatggtgcatgtccaagtgctggttcgcctcctcgagctgctgctgggtggtctggagctggtcctccagaacctcgatggtgttatcctgggcttccacttgctcctcgagctcacggatgtggttagccatttgctcaaattggagatctttctccactagcttagaagacaagtctacgacaaggacctccctattatcgagggtgatctttgtagactccaccaggcccattagctgggacatcgcctcgccccgaaaggcctgcagatgatatagggcactcatgcaccaaaccgtcaagcgagcggtatgtccagggtagagtgaccacatgtccttggcgtgatcaacccgatccttccacatcgggtcatcctcctcggcggggaacaagccgatggggtgggtcgacatttccagggggtgaaacccacagaaagtcgtcagcacgtgcatggctgtggcctctgtagtgtcatcagcccggaaaccaaaggattcaaagtctagtgaacgccaccccggctgcaggggatgaggctccagagtcatcctcaccctacaacgagatacccagtgttccttgaacagctagaccgtgtactggggaggtgtagtgtaacctgc

SEQ ID NO: 83909 - DNA, 779 bp, Zea Mays
ttgatatgtaggatactcatatgaggagctgtctgaagtatctccagatcacaggttcattgcatacacaatgtatgacaaagataaggactccttcactttaatggttagggacctagtaacaggcacacttcatgataaaccctgtgctgaccgggtgtcaaatatttcatgggctatggatgggaaagcattggtttatattgttacaaatgaggaaagaagaccatataggtcagtgatttttctttataaatctgcttatctatgtttttttcaccgcataataactgtatcttttttcttatgttttggttaggttgttttgtagcatgattggatccaacaaggatgccattctcatgttggaagaacctgatgagaatatttttctaaatatcagacatacgaaggattttcgatatataacgttaaatgtcttttcagatactcactcaaaggtactgtttcttgtataccttatctatgctcttattatttgatcttttgtttgctgctcatgcttattggttcttttccaggtgtatttaataaatgcttctaatcccctttcccaaatgacgcttgtatgggaaggggaatcccaagttcattgcattgttgaacatcatcgtggtcacctttatttgtttacagatgctgcaagagaaggtgtccctgttgattcacattatataatgcagtctgttgtggaatcttctgggccaaacagttggaaggttcaaattattcatctcctatgctatgttgattttttt

SEQ ID NO: 83910 - DNA, 479 bp, Zea Mays
caaaaactgctaatgtcccaaactacactaggtgtgttgtgcagacatgatctgggacatacatacatgaatagccatgtggaatgtggttaggcagatcgttgaagatttggcaatcttcaggaccaccacccgtcttgtaaacaacatacgctagcgaggtaggcggatgtgcctctagggcgacaactaaatatggcaatggtggcctaatctagaatggaatttccactttgtgacttcctagagctaggcctatcgaagagtattaatgcttcatgatctcttcaatgacgtggatggccacgcatttgaaggcattcatcaagctctcagagtggtgatgcaacgaatgagccactatgtagttgacttcctggcatagagccctagtgcgctcctccatggcaccgaaagatccacttcatcgagggcaccttccggtgagaaccccttccaccggttgtcgtggttacaag

SEQ ID NO: 83911 - DNA, 554 bp, Zea Mays
ctgcctaacctcaccccttgcgaggaaaatagtgcgagcccgactggaataatgtctgaaggtgttacaaaggcgcgaaggccttaggatttgttgccttagacataaaattttctcaggttgtctatattccacgaatgctcgaggtcttcaccggattgtgttgtgagcctatagctatttggggacgttttcttcttgacaatgaagggcccttcccattttggcttgactttgcctcgggactctgttctgctggttctgattaggatgtggtcgccttcgtcgaactccttagggatgatattgctgtttcgccatgccttcgtttgcgcttggtatcttttcaatgtttcgagggcgagaacacgatctccgtcgagaaggcccttggtagttgagtcatcgacatcttgtgtagctgtggcatttgttcgcggtgatccatgcttcagctcttgcggagtcattgcttgggatccgtacattaaacggaaaggggtaaacccggtagctctagattctgttgtgttttgtgcccaaatgacttcaag

SEQ ID NO: 83912 - DNA, 1138 bp, Zea Mays
aagttcacaaggcaacatatcattcaagcatccaaatccaatatcagtcacatgtgttttttgctatggtgtcaactcaagaccagcaatcttatgtggtaagcatcagtgtctacatttcttggacatctttactcagagaagaaaaatggatactactgttcaaacaaatggatattattaaatactaataagaaaaaactggtcagtgacatattagagctctaatgagtcatcttcttgttcactaatttggaatccaggaatagcacagagtaaaaaacataaggactagcaataaagtaggtttagagttgtttgggctgcaggagaaaaagcaagatatcatacttagtgacacccaagtgatcaggttttgcccaaggaaatatgctacacctgtagtactctttctgtcaccttgatcacctgcatggtcgctgtcattgtagcctgtcaagttcaggttcaggcctgaacctttgatgtatctgcaaccatagccgatggttccagctaggtacctcaagatcctttttactcccagccaatgtttctcttgtggtgcctcatatgtctgctcattactcccactgaataggtttaccgggttcgactacctcctactactggcatgtgattactactattcaaactcgatcgacacggccaacaacgaccgggccttaaacgactcaggcggagctactcctcaatctccgaccggtcaccatttttcttttctttccttctaaaaaacctttcataaaacataacttctcgcgagtgacaggaaatcactcgacttctgtcgaaccttattagcatggcggtactaatgacctacacatactagtattgcaaaggtattcctatggatcatgcaatttctagggttccattcaattcctaaacttaatgcacaaacaaggtgatatcatttttaaaaccagggatatgcaccagggcttgcttacaaactgcgaagcgagcgcggggtcttctaggcctgggggcgagtcttgctggtactcagcctggtgctcctgggcctctaactctggctcaacgacggacaactcgtgcacggcaacggcgtcgacggaatctatatgcaatgcacacaagataagcgaca

SEQ ID NO: 83913 - DNA, 919 bp, Zea Mays
cagggggctcggggtaataatccgcagactcaggacatagtgccagaggatggcgggttgatattctgaaacttcaggggctctttaataaaacaccagggctgaaggggtacggggccacacggccgtccgattagaattctagggccaggatccaatcggcttgaatcgaaacggtatacaactaaggccactggatctagaatccacggcaatcgctcgctccacacatcattaaatcccggccgactaactcgagatcgacggtcccagacaaacgcgcccgaaccgatacttggttttcaatcagagtcgcgcatagagcatccaacggtccacggtgcatcttccctagccctcgccgagtaacagcggtgcccgagctcccacggcggagagccaccggaagaacatcaatccgatgcaccgagcaccaattcctccaatctagataatctacacgttgtcatgaatggcccgagcacgtggacagaacccaactaaagtaaagcgtgcgcgcgagccctggccacggcgcacggcggttccaccactccggcgagcaatcgccaggtgacgcgtgccttttattgaacgattctagttgcaaccagagtaggaggtacgagcgtatgtccttaggagtactcacagctagcggagcggcggaggtagccttccttctccagccgacggcggcgaagccccccctgtgacgatggcgtatggcagcggagaggagatccagtgcgcgaggtcgcgccagagggtagaagaggcaaccagttgtggctaggttaacggcgtggggacccggcttccttatatgcgcgcggaagcctagtcgcacaggtctgccatgccgaagaactcggcatccgttgcgcgagttaggtgcaggggacgcatctgaccagct

SEQ ID NO: 83914 - DNA, 626 bp, Zea Mays
caacggcgcggatttatccgagcgaaggggtaagctggacctaatcacagccgttcactacgaatccaacggcacgaaggcaaccttcccccttcctagcagagccgcgcggtggcgctaccctgatacacggtgagccttgcgccggcgacagtcttcgccacccaccggagctcaactcaatccccacctaatgctacgtgaaggggaaactagggcgagcacagatgcggcccaaaatcggtaaacccgtgagttgccgttgctatccacggtagtacccggagccaccgtggatggttaatccggtgagaaattcccagtgctcaattaccccaactcaaatcctagtgcgctaattgcgattaccgtgatgagatgaacagatgacgaggacacataccggtgccaaagctctagaagcgattgtccacggcggcgctgtttttctcctccccttcggattctccccaatggcggcgaggctactggtgtgtgcaaaggcgaaatggagaagaggaccgcggccagggctcccatatatagaccggggggggggttcggttggctcggcccgcagtcgccggagggatccgccgcgcgatccgcgcaagctgttgcgcacg

SEQ ID NO: 83915 - DNA, 582 bp, Zea Mays
cttatttcagtcatgtagtgggggactcctccctccccattttttctcttctctttttcttcagcacacttggggttggcatgggaatgaattttcggtgtatgcactccagggccctgttttatattctaactatctcctcatcgtgctcttattcggtgggggcgatatttgagttttggcggcaagcctctcgtggtgctggggtgacctcgccaagcagcctgtctatgtgccttgaaaggaatgataacattgaattgggaagaagcggggaatgaccatagtgctataagggcatctttctgctctgagttcgccgtgttgttgtttgcgtggggacgtattcctgggttgtttggtccccccattccttccatatgtgaagcaatcccctgatctccctatttgtcacagcggatctgtctgggggcgccccatctttttttctactcctccccgcgcattctgtctgccacaaaaggggatggtgaaccgtaccatgcttccctcaatggtcgagttcatggcgctcggtgagctccaaatgggtgatcttgaatgaggccctagtgccttttg

SEQ ID NO: 83916 - DNA, 355 bp, Zea Mays
ttgcgctcataccctggcttcggagagccaaaataaaaacactgagcctaacaatagcattgggtgtcaattgttgaaggtatatctcaaagttttttaaaacttcccctatcatgtcatttaaggggaaccgaagtcctgctctgaagaagctcttgaaaacgacaacttcatcctcttttggctccggaattatttcctccccagcaaattggacaagcttgcttttagcctccccaaaataactaagtttcttcatcataaccatgtcatcctccgttatagtagatttcccaaactcaacatggctaaactttgttgggctcagaatgttgtaatcttcttctgatgcgtc

SEQ ID NO: 83917 - DNA, 772 bp, Zea Mays
cacaaaaacactatctctccccttctttgttctaggcagtcctaaaacaaagtccattgaaatatcctcccatggtgcattaggaacaggtagaggcacatagaaaccatgaggattaaggcgtgacttagctttttggcatgttgtgcagtgagcaacaaatctctccacatccctccacatcttgggccaaaagaaatgatcagcaaggatgtcttttgtcttcttcacaccaaagtgtcccatcaaccctcctccatgtgcttcctacagtaataacaaacgcatggagctagctggaatgcatagcatgttagctctaaaaacaaacccatcagttaggacaaatttgttccaagttttcccctccttacagttcagcaacacatccttaaaatcatcatcatgagcatattgtaacttaatcgtttccaagccgaaaattttgcaatcaagttgggacagcatagtgtaacgcctagacaaagcatcagcaatgacattctcctttcctttcatgtgtttgatgacataagggaaagattcaatgaattcaacccatttagcatgcctacgattcagttttgcttgacttcgaatgtgctttaaggactcatgatccgaatgtataacaaactcttcgggccacaaatagtgctgctaagtttccaaagtttgaactaaagcaggcaattccttatcgtaagtagaatagttcaagctcggtccactcaatttctcactaaaatatgctacaggcttaccatcttgc

SEQ ID NO: 83918 - DNA, 519 bp, Zea Mays
ttcggaccgtcacactcggcgcctttctaagcatggcatctattctagcaagtctgcctatgacgccttcttcgctgggtccataacctttgccccttggaggcgagtatggaaggcctgggcaccttcgaattgcaaagttttcatttggttggcaatcaagaacagagtgtggacaaccgatagacttgctaaaagagggctgcctcatcctattgcatgccctctttgtgatcagtccgacgagaccattcaacatatcctcatctcttgtgtttttgcccgtgaagtctggacttcgatcctcagcaagtttggtctgctccccattgcccctttgctggactgcacgcatttctcaaactggtggagccaaagcatcaagagtgttggaaaggacatgaggaaaggactcaattccctaatcatcctagtggcctggcaggtttggaatcatcgtaattcttgtgtctttgagggttctaggccttgtgttcaaaacgtggtgttagcggtggt

SEQ ID NO: 83919 - DNA, 845 bp, Zea Mays
gaagcttgaagaaaggcagtgccctctcagccaaccttgaaatgaagcggctaagggcagccagagatcccgcaagcttctggatgtccttgacacgggcgggaggcctcattatctcgatagccttgatcttttctgggttagcttcaatgccccggtatgaaaccaggaaacccagcagcttccctgcggagacgccgaagatgcatttctccgggttcagtttggtgtgggttgcccacagcttgtcgaaaaccagggtcagatcctccactacggtcaacccccttctagtcttgaccacgatgtcatcgatgtaaacctccaccttgtcccggatcagatccccgaaggtcttactcattgcccgaacaaatgttggcagggcgtttttcagaccataaggcatcacaacataacagtatagcccatctaccgttacaaaagcgatgtgcttcctgtcctccctggacatccagatttgatgaaaaccggagtaggcatccaggaaagacaaaaagtcgcaccctgaggtagagtccacgatctgatctatacgtggaagtggatatgggtccttggggcatgccttattcaggctggtgtagtcgatgcacattcggagcttctcgttcacttttggcacgatgaccgggttggccagccacacggggtgatggacctcttcgatgaagtcggcgtgcaacagcttccgaacctcctcacggatgaagtcctactgctccacagactgcctccgaggcttctggcttaccggcttggcgtccggatagatcttcagatggtgctcaatcaccttcctagggatcccaggcatctgcgac

SEQ ID NO: 83920 - DNA, 489 bp, Zea Mays
ttggtggtggcgcctctcccagaagctagtacaactttggatattcagaagcctgccagtgctcgcccgagacgcccttgccgagccaatcaacttgatccttctgctgatgagcagaaaaagaaaaagagacatcttcgacaagtatctagtttggatcggggcgctggtccttcggttcctgctgatgaggaggttcccgtgcctgattttactgacgccaaccccaatgggtgtactccatctgtcgctgatcccaatgggggtgttgcctgtgttgctgatgaagacgacagggggaagaaaatgaggtccctctgactcagaagaacagtcggcagcatattgtcagtggggaaagtagcggggttccttctcctgctctgtcagctctcgttggtctacagaagttatctctggcaaactttgatcagactctagaagatatggttccagaggacctattatcagagccagtggatggtgacg

SEQ ID NO: 83921 - DNA, 938 bp, Zea Mays
ggagttgggtcccttgatcgacgtcagaattcatgaagaaattgttccatgtatggcgtcacctcttcaaggttggtcaatacatatagcatgatatgccgccactcttcatgtgtcagggtcttggtggtcgagccacttgcgctttcgagttggcctcgaaatatgctgaggttcaattcattgtcgccatcattgtaacgagggggtggattatgcacgctccacagtttgtcaccatagtaagttgttgtgaagtttgacacctcctctagaatgtatgcctctgcaatggaagcctctattttgcatttatttctacatttctttcgaatagtctttagacatctctcggttgaatagcaccaacgtccctacatgcccccccattcgtgcctcataggggagatgaagaatcaaatgctgcattggattgaagaagccgggtggaaataccttctcaagattacacagtaacacgggtgccaatctttccaagtctgcaaccacagttcgagataactcttttgcacaaagctgacggaagaaatagctcaactctgaaagcgctagccagacatgctcagggacatagcctcgaaccattgcaggaagaatctgttcaatccatatgtggaagtcatgactcttcatccctaagactcgcagagtagataagttcaccccctactcaggttagctgcatacccattagggaacatcaacatcttgatccactgaagtacttccttcctttgggccctgcttaggacgaaatcggcctcaggccttctccatgtctttccaccgcttggcggcttcatctcttggtttgatctatgaaatgacgttgccagatcgactcttgcctttacgttatcctttgacttatcaggaatgtccataattgttgcccaaagtgtctcggcgacatttct

SEQ ID NO: 83922 - DNA, 311 bp, Zea Mays
cgctgccacacttggtattcgcgtggagaagaagtactgtggccgtcgatcttgaaatccacggtcgcggttgatgtgcacgtactcctttcctgagattattccgtgccgtcgatcgacccatggatgaatcagatgagatcatggtgtggggtgctcctggacgtttgatcaaaatcggacggctggaactgcataccggttcggtagggtttgaaactaatcggatccgctcgatcgtaatccaacgacccatattaatcgatacctcttcgcaggctacattttgttaaagagaccctggattcttt

SEQ ID NO: 83923 - DNA, 552 bp, Zea Mays
cgtgattagcttcaatatttttcctcaccctatcccatatcttcctcccaccaccgtttctcgtcgcgccctccgcttccattgcccctgcctcatctggacctcggtcgccctgcatctccttgccatcttgcctcgtcccgccgctgttagctctgatccgacactagacacgaatcgaatacgaatcatgataaatagtcagtaacctcccccgacgtttgaacagttctatcgtcgtcgcatagcttcgcagctctggtatccggcagcgcggacacaccattttggtattatacagctcggccgttctccagttcggacaacgctacccaaatagtaatataaccagaacactccggtaattccaattccagttcatgagtacaggaaggacgaggggcggactcatttgaaatgagaaggccacttccaccacgattcctaccgcagcatccatccaatatgtggagcaaggaagaaaaaaaaaagacactgatgttagtttgtgatatgaagaaatgacagtacagtgaactgaggaaatgcttc

SEQ ID NO: 83924 - DNA, 791 bp, Zea Mays
gcttcgtcgtgggagcgggtctctgcaccaccatcgggggtaataacccatccattctcttcgtttcgcgttgtgcttcgtgtagcgtgtctccaatccgagattagctcactaggcgatgatcggggcgtcagaggaaggtctccgccatggggttatgcgctgctgcccggggtctggtcagaggttgaagacacgcctttgaccgttcgattcggtgggcggtcgggatttgacgaagggttggtctgtgtgcgccgttgattttggagtgagcggtagagattagaaattagcataccctttcggcgctttatcatccgaccgtcgaagttgaatcggatggtcgcgcgagaggttgtagatgtggccgaactctaaccctagatctttgatccggtggcggctactgctcagggctgcggctgctgctttaggtctaatctggaccgcttgtgctcgatccaacggccgagggatcaaggtaccctttcgtcgtgaccattttgcataagcgcccctctgttttagggaaacaaacccgcgatccacaggagcagtgctatgggtcttaggaattcttgcgcagaagcccttgcagttctctgaattattgcgcgcagcccagggaacagtaaactgaatgaaagaattatataaatgagtttttgctattaaaataaggcctagaactcatttaattcatagaaaacccattttgaatcctttttaattaattccagttgcaataattttatattaatattttctatcacttagtaaccttgttt

SEQ ID NO: 83925 - DNA, 545 bp, Zea Mays
atttgtcagaatattttggccgctcagagccgtcagaagagttatgctgatgtgaggaggcgggatttggaatttgcagtgggtgaccaagtccttctcagggtatcacccactaaaggagttgttcggttcggtgtctccgaaaagcttagcccgagatatattggaccgttcactatcttggcccgggtgggcagcttggcttatcgcttgcaattgtcggattccatggtaggggtacacccagtttttcatgtctctatgctgaggaagttcttgcgggattcggaccatcagattgagatggaaccaattgcggtgcagcaggatctgaccttggagtgtcattcggtgcgtatcttggaatcctcagagcgtgttttgaggaagagatcaattaagtatgtcaaggtcttatggactaatcagtctgagcgcgaggctacgtgggaacttgaggagctgatgcggcacaaatatccggaactttttattgtgggtaagtgttgttgattcattaatttttttccttttgtcgttccgtt

SEQ ID NO: 83926 - DNA, 441 bp, Zea Mays
ggtgattaaggattatcattaagaaatccactatcacccagggaaagccaatgtggtggcagatgcactaagtcgcaaggcttcctgccattgtcttaaagtaagaactccggacaccacattatgtcaagaaatggagaaattaaacctgggaatgatacaacatagaactttgacccaattgaagcttgagtcaattcttctgcaaaagattattgatgcccaaagaagtgacaagggtatgaaacatattcatgagaaaatagaagctggcaaagcgaattttttttagaaaggatgatcaaggcattgtatggtttaataatagcatagttgtccctaaggatgcgggagtccgccagcaaattttggatgaagctcatcttagtcgatattccattcatcccggaagcactaatatgtatcaagagttaaagcaac

SEQ ID NO: 83927 - DNA, 423 bp, Zea Mays
gctatctgtacctccaaaatggctacaagatcgatccggtgcctcacgtgatatgtgagatgacgacacgtggagatgcaggcgatcgacttcacggagccagccactctgggtaaaattaaattctgaagaaagcttaagaaaaaaggtcaaaccgaatacgtagtatccgaagtttacacaggtagatcttcccagctgtagcgtctctcctgaatcctgatgcagccgtgtcagcaaattaagatgctccgtgcatggcacgatccttgaggtaattaagatgctccgtgcgcgcgcgcggagatccgcgcacgctgcaaaatgtcaacgttattagggtagcaggaaatgatatctagcaatggacggctactgtcagcttataagattctgtttatttggtcatagacgtggacaagt

SEQ ID NO: 83928 - DNA, 504 bp, Zea Mays
gtttgagcacttctggacttgatctcttaaaaatgactttaatgaacctgtgctcatactcacatcaagatagttgatgtggtgtgttagacacttaatcaccaaaacaggtagcaatggccctatggcatatttctctttcaccagtacgtaccccaagtacaacaatagcgcaaacccctcttagtacataatgagttatcaggttgccatcacatcctctacgggacaacaatgcaatggctaaatcattcatcattgccctcgagggtctagccttaacttggtactcaaggttgtccccctctcaatcaactcctggagggctctttgcgacaacttccaactaaatttccaaggatacaacctaagaccgacgtcctcgtagagctctcccactacagacaacacgagaaagagaccctccatgattattacaaaaagttcctcctgctcaaatcccagttgccgattgtcgaagaccaaatcacaatccactatgcc

SEQ ID NO: 83929 - DNA, 756 bp, Zea Mays
gattaatgatacagtaataagttagaatgagaacccaagttgttgctagtttgagggctgaaccacacttttatttgaagttgatcaatgccttagaatattgttgctagccctctagcttggttgggagcattgacaacaagcatttttatcactagatacccttgatgaggaagctccatattttgtgaacataatgtcatcgtggaataaagattgaggtgagtcttgcctatgtggaaaatggcttattcatcttgactagagcttttgtcattagttcaagaccttgatctagagagacttggtttctaggaccatatgcttgatgttgtttaattccatatatactataattattgagccataagggatcaatgcccatcgactgtacaaacacatagaggcaagaaaacaaaactttccacatatatgcatgagctagactaaacacaaccctcactagaattagtaaattacaacaatgtaccattacaataatcctattgcacaatctcacatgcccactccatgtcctgaatcctctcgcatgttcactctcctccctcctaaactctgttagtctctaaaatgtaaggttcctccacccactatagcaaacttgggccactagaagacgaaggaatcgtgccacatcgatggaaatttaaaacatcatctcttatcctacttactggtgctactccattctctcatgaagtctcctaccttctaaacccttagggtgacactacc

SEQ ID NO: 83930 - DNA, 535 bp, Zea Mays
cgagatccccgaccgtggacggcggagcagcggctccggcgagcctgtgccagccggaaacgcaacgaccggtgctccggtgtggctgacacccaattctacccctaatgaccattttccctcaattaattgcaatgttctagctcacaatcgtactgcccacgacaacggtgaaaaccgagaacacttagacgtgttcaaggtgatccagagcggtctagttcaattgaatgattctgtgagcaacaggggacatgagggaagctagaacatcaatcaaagaggctcgagctaacctgcagaaggctggccacgatgcggtagttcacggtgtgcggaaaaccaatttgggggaaaagagaaattggagctctctggtggctaatcggaggtaggagcgggtgcactggcttcgtgattacctaatggagcttatggcacgcttaatttatagggcccgagggcgatggctcttgaatttggaatggcgcgctggcggctggagaaaggggtggtcactggcgcagggttaccg

SEQ ID NO: 83931 - DNA, 382 bp, Zea Mays
gtaaggcacatatgtattgtatgcagcctgaagattttggtcggatgtgcctgtcaatctaccaatttcgtcataaatggacacagatgcaacatgtatgcagccatcacttcgtttggtaacgctagcacccatatcacagatgtttgcaaaacatgataggatgcaaatcttacttattatggaatgataagagagaattagttcagcatcaaataaagcaaggcacttcttcccattaaacttcacatggaatggagaccccattaccaagcaacactagagctagaaatttaactagaacttaggtcaatcgcaggcgacacatcactacacacttgcaaaacggcaaaagtcaacatccacaaccacagtgtatagc

SEQ ID NO: 83932 - DNA, 524 bp, Zea Mays
ccagcgtttctattcgtgcccagtccaaactttagtatgtgcgtcacctctggtaggcctgtgaagctttcccaagcttcaatttggtcgttcacgccgtcggttggtcagaatgcttccatccatatgaccatccgccctgtcaccgtggaccggttgattaatagtcccaatggtgaaattgattgaggggaagtgttcggtaggggttcaattgtgtccctgtcgcccgggagctccagccgtggcgtcatctggccggaataggctcgccggagtgcggcgagggttgttcctcgtcgtgggctttggtctgcgaaagaatagaacgtggaggttctttttgtaaaccgtcagtgactcaccttaatagtgtgtcggccttgcttctagatattcaaaaaggcggggatctcggtgcaaagttggcatgggcacgggcgcgggcacgggtacgcttctgctgtagttgggccatcctgggctggaatcggcccagtactgttcaaatcttttcccttttc

SEQ ID NO: 83933 - DNA, 375 bp, Zea Mays
gtttgaacatgtagatgttagaaatatttttctaaaaaacttgatcaaaaccagagaagtttgacttaggtcagataaaatggcctatagtttggagcaaagggttcagctgcaaggtagtcattattgaactataatgcagagcattggagatgtctgcatgaacttatgttcagaatcggaaatgtttctgagtgcagaggaaccaaattctctattttgtgctgtgactggactgccaattatgctgaaacaaaatttgcttagtaaatcggcttttggttgatattgtagactaccttaaacttgttaaactattttccctgctgttaagaagggctgtgttcacgaatcttttgtactcttggcatgtct

SEQ ID NO: 83934 - DNA, 466 bp, Zea Mays
gtcgggtgactcttaggaaggtgtggagttgtccaaggaacgacaattgcatgattatcgtcgggctcatggtttatgttttacttgtggtgacaagtttgatgttgtacatgctgctaaatgtggaaaacgagacccggtcgtgctttgtgttttgactatggatgacatggctttggaattatcagatgaagtcttacagcagttggatcaggaggatcattatgtggtaaacttgtgtagcttatctgttcatgcagtttctaggactgagggagtggatagcattcacttgtgtgctttggttaaaaaccaggtgttcttattgttggtggattccggtagttcagcaactttcatcaattcaacgtttgtccaacaaccagggttgttgccccaacctgtttccactattcgagttaagactgctagtgggcaagaactggttagcactgctatggtgaag

SEQ ID NO: 83935 - DNA, 364 bp, Zea Mays
tggttctaaagtgacatccaccacatcgatggttcgatcaggaatccgaaggcacttctttaattgggatacatggaacacgttatgtaccgcaaataatgattcaggcagttgaagtctgtatgctactggtctgcattgctcaacaatgggaaatgggccaatatatcggggtgtcaactttccttttacctcgaacctattaacacccttcatcggtgacactttcaagtatacataatccttggcttgaaagaccaaaggtcggcgtcgtttatccgcatagcttttctgccgagcttgagcttctttcaagtggtgtcttatccattgaactttttcttctgtctctttgaccaagtca

SEQ ID NO: 83936 - DNA, 538 bp, Zea Mays
gattgtaaagcaatcaagatcctccaagcgtgtggagagccttgaacccattaaaaaagagagaggactcaagtttgatctttggaatcacatgagagggttgaaagagacctggacctttgggactcctcaacagatacattggtttcgttgggaaatcgaactctggcaaaacaaattgccatgtctttgtgtttgattgtttgcaatttgttttctttcttcccctaagttctattgtatttatcttcactcaaatctcttagtgttgcttccaagtacattccacacattaaaaagagcaacacattgcaatatttaacttgtctcttcatccgattaacttacatcttgttctaaccactaattgggatcaagtatttgtttttaagtgataaattttaggtttcgcctattcacatcctccagacgacttttacaaatactggttcaagtatggtagttgttattataatcacataacttgtttgtccataccatttagaatcaccattgaggcaagggatcacttcacttt

SEQ ID NO: 83937 - DNA, 572 bp, Zea Mays
gaagaagatgaggtccctttgactcagaagaacagtcggcagtatgtcgccagtggggaaagtagtggagttccttctcctgctttgtctgccctcattggtctacaagaattgtccctggcaaactttgatcagactcttgaagatatggttccagaagacctattatcagagccagcggatgatggtgtgatggaggtttgtgctgatgtgctcgacgccgggttgggatcgtcccgggcagcgtcccgcgcctcatcgaccttagagcgcggtcttgagggtcaggaaactgacttggatcgtcttgctcccatggaagtaattgagggaccctcagccttggaggtggctactgcagaaaacttggtcctcaaggatggtgctgacacttgcccagcctccgaggatgttgccggggatgactcggctcgggtgggagacgcaagccactgcccagcccccgagggtactgccggagatgatccggctcaagcgggtagcgcaaactatagcccagcccccgagggtgtccaagcggggtctccctcttgtacttccatggatgttcg

SEQ ID NO: 83938 - DNA, 974 bp, Zea Mays
gactaactcggcggcatcactcttcgtcgttggctagtagaagccagacctgaaaacttttccaaatagagttctggatgctgcgtgtactccacactgtccggcatggatttcatccaatagccgcttcctagtagtcgaggatatgcacttcatgaagactcccgtcgcaccccttctgtatagtgtgccccctatgagggtgtagtgggccgactgtcttgcaatgcgttacgctgcagccttatcatccgatttttcttcattctttatgtacctgatgataggctctctccagtcattagtgtccgattctggttggttcaaggtgttgcattcttatgtctgatctgagagaatactcggacgtgatactttctgggcgaagattccgggtgggacctaggcccgactggatcccaactttgacaacgcgtcagctgctgtgttgcggtctctttccacatgatggaattccaacccttaaaacttgtcttctattttctggacgacagcacagtacttgcccaaagaatcagtcgagcaatcccagtctttatttatctagcttatgaccactagtgaatctccgtataccaacaacctcttaacgcccagtgacacgacgatgttcaacccgtggatcagtgcctcatattctgctgcattatttaatgctgggaataatagctgaagcgcatacttgggttgttcacctctaggggcaatgaagaggatccctgcgcctgctccctgcagtttcagcgagccatcgaaatacattcgccatacttcagtagcctctgggttgtcaggaacttgttgttcagtccattctgatacgaagtcaactagtgcttgagtctttactactgagcgaggccgaaactctatgtcatgagctcccagctcgcaggcccacttggctattcttccgatggcttctttgttgtgaaggatatcccctattggaa

SEQ ID NO: 83939 - DNA, 476 bp, Zea Mays
acatcaacttaagcaacaagttaaagaagtaggagatcgatctaacaacatttaggacttatttgattattctcattctttgtggattggagtggacgtgaattaggagggattaaagtggattttgacttatatgaatttaaaccgactcaatctcatctaatatttgtgaattaatttcaaaacaaacaagttcttaaaaaggacaatccaaggtcagtaactgttgctatctatggtgtcgcttccttcctgataaggaacctgtcacccacacaaagatctcggcacacggagctctcgctcgcccgcccgacaaatagagcccatccgcccgttacctctcatcggacacggagccgcacctttctaccgtcaccttgctttggtttggatttcacgggagccatcagatgagcataaggtgaggcgtcccttcttgaactggtacattagaaaaggtgagagtattttta

SEQ ID NO: 83940 - DNA, 458 bp, Zea Mays
tcgagattaggaaggactaggaaagaggtgggtaaaatctactcgcagttcttcttctctttcccaagtagcttcatcctcaccatggtgactccattgcactttgcacattttgatcattttactcctcgtgacacaagtcagagtaccaagaatcttgataggatactccgtataagtcagatcatcttgaacactaagatcttccataggtagctggtcctcgggtaccctgaggcacttctttagttgagacacatggaacacatcatgtacatccgcaagatgatcgggtagttccagttggtaggccacttctcccactcgctttaggatcaagaagggtccaataaagcgaggggacaacttccctttaacttcaaatcttcacataccccggattggtgacaccttcagatacacgtgatcaccctccataaactctagcagtattctcc

SEQ ID NO: 83941 - DNA, 541 bp, Zea Mays
atttctcagaaacactctgtttgtctagagttatcggtgttgtttccgaaggtctagcttcggcaggtacttctgaaggtccagcttcagcaagagtgtgggccatgctggcgtcgtcattttccttgaatctttagcctgcatgctaagagcttcggcaaaggcaggagctgatgtttttaatgttctgccgtcttctctagtttcggctctttggtcagatttgcacgagcctcgactggcatagcatgacctggttctgtggcaggaacaatcccttcacttagttttggcacatcgagcgtctcaatgcgcctgggtcgacgcgtcaagactttaaccttcttcgacctcgacacactagaagatgccgagctagcagctttccttttcttcccttgttttcgcgtgggatagtagtagtctgggtacacaaacccgataacatcaaacaccctgttcaatctcttcttgtcccgagcaccgaagccagttgtcatagcttcatcttcggccttcgagtacgctccaagaagctcat

SEQ ID NO: 83942 - DNA, 521 bp, Zea Mays
ggcaatgggaaaggaacaatatcataacaattttggtttttattgtttcgtataacgctctgatgcgagacgccctgtcccaacatttcagaagaaaaggccaggatcttggacgaggcaatggttttatgttaagaatgatttggttgagagggaggatataaaatatataattcaatgtctgattcagtcatgcttcgacatccgaaggccttcgatcgtgaatagtgatagggctcaagcttgcctggtagccttcaacaccgtgtgcagcaacattagcactagggacttggtccaagagcacatagctttcaaagtatgctcccttgttaatgaatgggaaatgccaaaggagaccactgacagttcaagcgaaggtggtctggtttatttgaaatatacataccgctattgaagtcagttcggggagccagatgacaaatagctataaaagtcagtttggggagccagatgacgaatggctcgaggctattgaggcgaccgctgatgacttgttg

SEQ ID NO: 83943 - DNA, 988 bp, Zea Mays
ccggaattggcccaagccggcccaacaacaggcagaagcgcgcccgcgtgcgcccgcgctatcgactttgagaataagtccctaatgatttcaataacaggaaaaagatcacagcgctattcctttgtctcactgacacctcacaaaaacaaccctgcgttttcctctcttcacaattcccagtccacgacggtgaacggcggggagccgagctccggcgagcgcataccggtcgaattactcaatgactggtgctcttctttggtctaaacctaattccagccttaatgagtgtttcccctcaactaatttcatcaatggggctttaacacggtctgtccacggtgacagcgggtaagacggacagtcaaccgcgttcccgacgatctaagatagcttagctcaatcgagttggtcggggagtatcaggggcacacaataacgctaaaacgagagggcagagggtatgagcggacctgagacgcgctggccacggcgaggtcaaaccgagcgatgttcttgagtgatttgggggaaatgagcgattcgtggtctctggtggacaattgaagacaatcatgggtgctatggatgggtgattacccgatggagctcgcaatgcgctcaatttataatgggcttaggcggtggcaggatatttggatgaagacgcgcggcgaccgtgtttccacggtgtgatatttactgacctcgggcgctatccaactgatctgagcgcgaatcatgacggcgatagcacgaatccacgcgtggctcgtcggcagcgagggggctgaacttggaattctgtctgttactgtaccatgggaagcatttgacagagcgcctgacagaccactttgcagggcttagatcttaggtttttacataataacatgttgaactgccagtagcaaagttgttgttcgatgatcccgctataattttgttataacaatcatagccaaataatgactagatcatgatc

SEQ ID NO: 83944 - DNA, 1393 bp, Zea Mays
cgccaaccagcggacgaagacggagcaggttggggttttggtgaggtgacacccaaagaaagtgtcagggactgaaggggtgtcgattcggattttttaatacctcccaggcgaactcctcgaagcaactaaatttgggcggtccaccgttcagagacaccacaggggtgcgaaaccaggaattgtgatcaggagaattttggtttcccaccaagatggcccgactcccaaaggcagggaacgaagccagaggagaaccgaaggaagttttcttattgggacaaaataaatccaagtgtccccggcctttacagaaatgatagcttaaggtcggcgggcccagcagcccaacaggcccgcgagcacgcatggggcgccattgaaggttgcgggggcgagaccagttggaattcaaattttgaaatttagaacggtcgggaattccacctccaagaactgcacaagtaggattagagcccgagaaccgaggagacccaaccctccgcctagaggaagaaggccacgttcccatagccagaaagttcagacgattgaacacagaaattctggggcgaggccgaagaagcccagcaaggggcctccaattactacgaacctgagcaggattaagggaaggagggttcaaacgattgaacaccgaaaatccggcccgagccagacgctgaacaccactaggggacttaacattgttgcgaatcggaacaacattggcaccggtgagagggagcttaacaatatccgcataggaaagattcttcctgccccggaccttcaaccaagaagccgcttcctcatccgaaaaaagcttgaattcatgcttccagttgggtccaccgtgattccaaaggttgaagaaagctctgaattccttacgctcaatgcatccagagttgtaaatatggaaacccacagccatcgaagaaaccgaaaaccgaaaaccccggtcagccagctgaagcacctcaaagcccgcggcgaacccaccaagggcagcctgaagaagatgaccaaccgagaccgaattcaacttgaagatgcatctgccaaaagagaccaccaaccagaaggacgaccgaagactggggcgagcagagcaaactgaagatgccaggagacccctgagggagtcctcgaaggccagccccggccgaaagtccaggagagagaagtccatggttgaagaacgagaagaccggggggaggaaggagcgaggagcaaaaggacctgagctaggagccgacgagggacgacgcgatcataccgcctcggaattcagctagatgcttccttcgcctctggcctccgccttcactcaagttcttggatgttatcgttgccaaggaaaacgtccatgaacatccttattatgtc

SEQ ID NO: 83945 - DNA, 610 bp, Zea Mays
attggtcattaaatgggattctctcttcctaaataaagtattgtctatcaaaatatcaaaagtattataaattctaagacttattctcccttctgattcctactaccatacctaaaacctccatgaacctccttaacttgcactttttgtacctacatgcccatagaaatctcctatgaaaagcttctcgctgataggtataactttaaccatgccatctaagtcttcctacagtctcttagcactctcattgctgcctacttgggggcatatgcactagttaacaagaccaaatggtccattatcagattgactaaaataatcttatcacattgccttttcatatccaccacaacgttcttgatgctctaatcaatcaaaactccaactccacctatttgtagttatctctacataccaaatcttgaagctagcaatgtccacctcattcaccttctaatccttccatttagtctcttggatgcataatatatttacatgcctcctagtcaatgtcacaactaactcccttaacttacctgtatgtggccatacattccaactacatacatagatcgtagttggtttgactagctttcttacccttcac

SEQ ID NO: 83946 - DNA, 275 bp, Zea Mays
catcaggcgtcttcatgaagtgcattctctcatctactgggaagcgacttctggatgaagtccatgctgggcaatgtggaatacacacagcgtccaagacactagtcgggaaggtcttcaggtcgggattctattggccaacagcgaaaagtgatgccgccgagttagttcagaggtgcgaagcttgccagtacttgtcgaagcaacaacatctactagcacagcaattgcagaccataccgttgacttgtcccttcgcatgctggggactggat

SEQ ID NO: 83947 - DNA, 374 bp, Zea Mays
atgaaatgcatctactcggccatcaggagacaactgttagatgaaattcatgctgggcagtgtggtgtgtttgctgcatcaaagactttagtgggaaaggctttcagatccggtttctactggccaactgcgaagagtgatgctgccgaattagtccagaagtgcgaggtgtgccaattcttgtcaaaacagtaggacttgcccgcgctgcagctgcagaccattcctgtaacctggtcgtttgcatgctgggggctggacatgatcagaccttttaagaaaactcagggaggctatactcatatactggttgccattgaaaaaaatcacgaagtggatagaatacaagccaattgttgcttccttgacctcag

SEQ ID NO: 83948 - DNA, 307 bp, Zea Mays
tgctgactctgaggtacacctctcatatctgcctagacttctcactctgttgactaccagcggcagatatgttgaggaatgggtccgagttttctatgctactgtatggatcgaccctgatcaccagtggatgaggttccgtttgagcaagaggatgttacacttcatgccagtcagatccgtcagctgtttggattcaacgagtcatcgactcgtcttcacagcttgtgctacggcacctctgatcctcctcgtcgccctcacgacggagttgctcctggtacagctcacgtcgcggctttgttcc

SEQ ID NO: 83949 - DNA, 536 bp, Zea Mays
gttttatctccggaatgacgacaggatgcttccgccgttttctcaacgagtggtgaccgccaccggtgataattggcactggggggccacacacgagaaccaggagaagctccagcccattctccgtgccctgtagaagttacaagccgaatgccttactgctgcgggggtcgtcgccgctatccaccgccagagggtgctcccattggcagagcgacagttgaggctttcggagatgaagccgggggttgatttggagggttcacggatgtcctcgacccccctctccacctacgacctcctcagacgggtagcgggcacggtagggaggctggacgctggcgtccttagccagcccccgatgcgtcccgaccatgggtatgtgtccctggtaagtgtccgacccttcttctgttttgcgccgtgtttcttacgtctttagttcttactgttgggattttcgttcgtccccaggggttgaggaattttaaaatctcccggccaccggtcccggaggacgtggcgggccgaaccgc

SEQ ID NO: 83950 - DNA, 546 bp, Zea Mays
tgctccgttagtagggtatagtggccaccctgagttatgcgtgagcatgtcgcaccgccttaaatcgtcgccgacttaagtcgattgctccgttagtagggtatagtggtcaccctgagttaagtaagcgtgagcatgtcacaccgccttaagtcattgctgacttaaatcgattgctctgttagtagggtatagtggtcaccctgagttaagtaagcgtgagcatgtcacaccgccttaagtcgttgccgacttaaatcgattgctccattagtagggcatagtggtcaccctgagttaagtaagcatgcaggttgacagtaaacaatttgagcgcctttgagaatgaagtctttttattgatgatatatttcccggtttacagaatacaaggccgtcccaatagcttttgaaatatagctaggggtaaaacttcctgagatgttctatattccatgagttcccaatttctgtgacgtccgtttgagtaagacgatatgatccaggtcgagtgacttctgctactatgaatggccccttccatag

SEQ ID NO: 83951 - DNA, 475 bp, Zea Mays
gttgatgtaggtatatttcaaagttcatcaaaacctctcctattatatcatacagagggaaccgaagtcctgctctgaagaagctattaaagacaacaacttcatcatccttcggctccagaatcacctcttcgttaccaaaacgaataggtttactctcggcctcccaaaatagcccaatttcttcatcataaccatatcgtctgctgtcgcagtagatttaccaaactcaatgtgactgggtttcactgggctcagaatagtgtaatcctcttcatcttcgttctcactcccttgaactgcaattttctcagcttcaacagtcaaagtaccttcggcaacaggcccctctggcacaacaagacccgactgtctcatcacttctgatattggtgatgtctcagttgcttcagcttcgtctccctcacgagacactctagcattagatcgtactctagccatttcaatgttcaca

SEQ ID NO: 83952 - DNA, 280 bp, Zea Mays
tcgccataacctggagccaacaatgtggatttttcatgtggtggcagcaagttaggagtactcacaggttagcaaccagaggagcctagatgcttggtgagggcttaatagttaatactctggttgttttgggtgcctggacactatggaagacaagaaatgatgtgatattcaatggcgttgcagccggagtagatcgggccatacttcttgcaaaggagtaggttaacctctggatgttggcaggtgcaaaagggatttgtgccctggtaccagcgac

SEQ ID NO: 83953 - DNA, 618 bp, Zea Mays
aaaaagccgaagcaatgttacctgaagctattgaaatttaaaagttaataaattgatgaggcaaacattaaaatttgtaccttaaaatttgaatagaacaaacttccagtaatatattacctcctatagttgcttagatcttattcgagcttcgggaatccgatgttcgttgataaggtgttgacaatctttgctccggcacgatcagggatgcaccctagaatttcttcgtcaacaccaccaaagagcacggatccaggcttgtagctgccagcaatagcgaattcttttagctcagagatgtcttcttcggagagttcttggccacccaagtgtcataggtccaattctttgtactctaaagaaactaattctaattctttcatctttaaaggcgaacctcttccagcagtcacttcagccatttccctctcgggaaccacatcagctataatcctgtcaatctcatgacattgtggttccaagagggcctccgctattatcaacttcaattgtagattcagcatattcggcatcagtggcggcaacaattttttctgtccacactgagggtggggtcatatggatagccctcatcataggcatcatgcgttgttt

SEQ ID NO: 83954 - DNA, 689 bp, Zea Mays
agagctcgacgataggcagctgcagcacgcacgtttagggaaaacgcaatgacaggaggagggcacgagcactgcgtcgacacagggagaaacgtgcggcatggggcaggcaaagctagcgcgctggtgctagcaccacatgtgagggcaaatcacctatatgctggacactgagaacaggctggccacgaacccggcccattgctctctctccttggttcggcgtgggcgcagacaagacaaccaatgcaagacggcaaagggcgtgcggcgaccgaggaacttatagccgaggtctggctgagacagacgcatctagcagggtggttgcaatgacccaagattccaggtgagtggttacgtgcgcgacccgaacgaactcagagagaaagaagatatgagcagcaggtagctatagctcgggccctaggatctgcatgcggttgcaactgacgagcggaatactggtgcaggtaacttgcatgcttatgtcacacatgcgtcatgatgacctcatttgcgacaagcgaataaaaaaaaatggacgatgacataggctgcaagtagagcatattgggctgcacgtgtaggagaaatactttccttctccttgtttttctcttttatgttttattcctatttctattttcattttctaacttagattcaataaagttttgaattacaaa

SEQ ID NO: 83955 - DNA, 529 bp, Zea Mays
attaagtacactttggtacccatctcatgatgggtccatcaaggttagccaataaggacttaggcacccaaatggccttggtcctagaatgtggtgaactcatcacctttctagcacaagagtcaaatttgggtctcctaattacatttgaatgtattgacaagttaggcttaggaaacttactcatgggacaatccttgcataggtgtccctttcttcggcaagtgtagcaaatctgattttttattttgcaaggctccttcttaccttgcttcttgtttgctacatggttagtgagcctctttctttctaaagttaagccactatcttttatgtagagacatgacttaatctcatgtcccttctcatgacattgataacactttctagtgcatcttctcttatttggaagagtggcttgtttgttaccttgtgtggagcatgtggaggcgtggttgaggcacttgtcatgagctttggctttcttctcttgatatttgctcatgtccttcttggaaagctttgtatt

SEQ ID NO: 83956 - DNA, 403 bp, Zea Mays
cttagaatagtagggatgccataaaagcacccctctgatcggtgagaagacgttttttacagcatgcatgcatcataaaattaagaagctaagggaaaatgcatctaagtatgaatgtaacaaacatgggtaataatgaataacgaaatgagtagatgaatctaatttaacccacctccttttaacaacccgggcacatatttttcctttccactaccatgacacttacatctaaccctctttcacatatgatttcacccacccccatcaatagaggagacacttgtttcagttttgactacctttcccacgagtgttttccctccatcttatgggaggtgctctgctccgccggttaccctacacctcctatgtacacggtgcagttgtacgaggagcatcg

SEQ ID NO: 83957 - DNA, 683 bp, Zea Mays
ctgatatcaaaaacaaatgagtacaaagacaatgatttgccaggagtattgccagaatagaaaaggccaagttacctgaagactagcgaagaacgaaggaaatcccaaatcatgagaagctaggtggtggcttgatgaaggaatatcaaccgggacaatctgaagagcatcgccagggattgattcaaccccactagcaggcatcagaactctggcgtcaggtgcgtcgacctctaaggcgactccctcatttgaagcatgcactgctattacgccactagaatgtggtggagaagacccgacgtggacatccatggaggtatgagaaggggagctcgctcggacaccctcgggggctgggttgtagctcgcactgcccatcggggccggatcatcaccggcaacaccctcgggggctgggttgcagcgtgcgctacccactcgagccgaatcattaccggcaacaccctcgggggctaggcaaccgcaagcaccacccttgaggactgagttctctgcaacagccacctctaaggctgaaggattatcaatcatctccatgggagttaagctatcttgaccaacctcttggcaccgaagaccgccttccaaggtcgacgatgcacgagatgctgcccgggacacctctaatcccacatctggagtgtcagagcatacgtcca

SEQ ID NO: 83958 - DNA, 1435 bp, Zea Mays
ttgatgttgattcatctccctcggtttctatatatccatctttctattcttttgatgcaaatattgcaaatgaatatactgaatgggaagtatcaatggataagatttttggatgacttcatatatgtgataggcgaaaaattaaaatatcgattgtcttgttgctagcttgcttccttctttggggtcgggggtgagggcttcagctggccaatgaggtcatgagcctgctcgtcaacggtaatatagatgttcgcctcccgaaagagttgttctgaattagctagagccttttggaggatagctcgaatgaaggctgagtcgttggatccgcgatagaagtcttctatcacagctgccttggctacgtcggggatgtggtttcttatagtttggaaacgctttaggaatgaccggagagtcttgtcgtttcggtgtttgagggatttgaggtcctaaggctgcactggtttgtcagaaagggcctgaaagtttgcgacaatctagtggaagaagtcagtccaatcgtcgatgcaatggtgaggaagatgtcgaagccattggagtgcgtcctgtatgagtatgatcagtaggtacaccgtcatgacatcctccattgcacctgcggcttgggcaatcgtggggtagacggccaaccaaccgccatggttttgcttgggctcgtacttgtcgacgtttgagactttaagttggacaaccattgcatcgcccaatgccgaggggagatggctgatactccgtagaaccctcagtcccatggcggtcttcctaggtgtcgtggtgcccatggtcccgccaaagcgaaggtggttgtggatccagtagcctttaccgggctagatgacccgacgttgggctgttcatcgaggcggtcgcagcgtctgctctcaaagagcaagctcacgacagtgcgccatagttctgatcgtattcttctcgtcgtcttagctcactctcatgacgacggtcgcgtgaagcgttgatgttgctctatgcatcccgctgactattgatgacatggtgcatgttgtcttctaggtaagcaggcaggagatggttggctgcttgtgtgaggatctatcggtatccctccgtgtccggagtccgaggcaagccattggcgatctgggctagaactccgccaacttcacttggcatttgcataacgtgagcaaagtcagacaggaggtttctgaaagtttcctttgtccaggaacatgatctagatgtcacctagaggggtgaataagcggataaaaattaacacttaaaaactggaaattcttactctactcgaagactagatcgcactagaatgaaagacccttctagtaggtcgcagcggaattgaagttcctgtcttaaaataccctgcacttcaaagatggcttgtacgacagataggtattaaaat

SEQ ID NO: 83959 - DNA, 466 bp, Zea Mays
acatgcctatagccccaagagggtagagtcttttgcaccattatcaacatggtaccagagccaaggatattctgactacccaccacaaatttttctcctcctcctcctctccacctccatctttccatggcttcacctgtccccatttcccaagccgtcacaatcagactgactaaggccaattatctcctatggcgtgctcaagccctcccctacctccggagctcaaagctgatggggtttcttgatggctccaaacctgcgccggctacaactgtcgtcgcatccacggttgacggcgccacgccaatacccaatccggagtacgaccgctggttcgatcaggaccagcaactactcagtggtctcctctcgacgatgactgaggatgttcttcgggatgtcgttctcgccaaaacttctaaggaggtatgggactccctccagaagaaatttgcctcatcca

SEQ ID NO: 83960 - DNA, 479 bp, Zea Mays
tgttagtagctgcaacaagacactgatatgacaattcaatcatcaattctaatatgcagttctgattatgtgttgctgtcagggagctgattggttaggagtgattgcggatgtgttctttcatgaactcaactttccaaagtctaaaatgaactctaatttccaactacaaatcaacattctcaaaggcatgaatgaatttatcatcactgaacataaatgaggaggattagaagaaggcataaggacagaaaaggcaaacctccaatacaagttgtttctgcaggctgtccacaagttgcagataggtccatctcgtcggaggtggactggatctgcaggccgtcgtcgtgggtctgcaggggcgtggacccgcactcaggctacatcgatgatatggcaaggagacaggcctccggaggagaggaacagggatgcctacgtcgaatcgctacaggcaggttgttgccgccggcgac

SEQ ID NO: 83961 - DNA, 554 bp, Zea Mays
atcacatagtatagttattataagccagagttcaatacatgaatagataacatatagaacaaaaggtcgctctcaagggccacaaaaacgtcttcttcaacttatcttttccttctagcatcttcaagcaataccatcttcaatctccaacacatttatccccatttttggcaccaagcaccaaaatgagaagagaacccaactcaccatccaccagggccgccataagaaccaggaggaggaggataagatggaaacaaagactcaacccattgatctgcaaaagacgactcacgtggagggtcttctacaggcggctgggtagaggaagaaggacattggaggaggaggcagagctaaagaagagggtcgaggatcacttagtacaacaccacgagcaggagcagactaaaaggatccatcatcaacaaattcttcctcttcatcctctagattaataaaaggcaccacatactcttgatagtgccacaaatttaagtcctctagatagactggcaaaggggcattatgctggtggggaggcatgttgtaac

SEQ ID NO: 83962 - DNA, 1480 bp, Zea Mays
ggccacataaccaacatgtcaagaggggaatagggcctccaatggacccgaccggcaaagtgcaaagatagtccacataacaaataaccggacctccagccatcaaaattaaccatttcaggcagcacagagtcattgactccaacatatttaattgtatcaaacaggaaagagacctcgattccatcagagtacgtttcagaaaaagcaaaaagcgccacatgcgcgccaacaccaaccgttaaccaacaaaatagttgccaaccagtgaaaagaaaataccaaacgacccaaaagggggaggccaaagccttacaaccccaccgaggtattgtcttcatcatcattgtcatcattgaagtgagggtcccccacctgttcatcagagaagtcggattcctcatccttgctgtcggaggaagcagccggcctctgaatggcagtaccagtggccttggatctgttcaagtcttccggatttagcttggaaggggacattttacagaattcagcacccaatttcttgatgacgtcaagatgcatagaggggggggtacattgagtgcagcatgagcaatttttcttgccaatcccagtgcaatttttgaagcccttggcctttgccctaagcctggcactccttctgactgtcgtgtcgactgagataggctgcctttttctgggagttgcctctgactggggagggagttgaggcttatcaggggaatcctgactaggtggatggggaattctgaatgaaatgatgtccatgctaggtgcgacgaatgccgagatagctccggacaaaaggaatttcctagcccaatcaaacgaatctggcctcattaaaaggcccatgaagaaagcagcccaaatctttggaatagaaactgagtccccattgtcagggaacaaaccagcccaagaggaggaacgctttctggccaggaaatcttcaagcgcagggtcagggacggtttgatccaagtgtaacattaggcccacattgatgttgtcttcaatttgcatgtcgtcctgtccctcgacattgtttccctccaaattaatgttggcaggagggaaagcaggcagggcgagaaccgcttcagccggcgccggggcttcctcctgatggagctggaccccctgagggataatgatgtcgttaaaatagcccaccgaatcgtcagaaggaagatcctcaaggcctgaaagctggtagctgaactgctcttcttcattgttcgtagcgttaacattatttggtacaacatctggcacagggggatgagcctgctcaacaggccaagggtcccagccatcatcagcattggcagcaacattttcctcagcattgattccatcttcgggaggaatattgaggtcgaattggaaatggaagtttggcatcggctgtcccataccaaaaaattcaaccgggagctggtgaccatcatgagggtatggaggcacggggtcc

SEQ ID NO: 83963 - DNA, 575 bp, Zea Mays
gtcggagtaactgccacggtagatgccacgaattcacgtgcgccagtatcttctccacctccggccgccgcgcgtccatcgtaaatttcccggccaccgcttgcacgcctataaattgagccctcccctagctgcgttagattatcgcgaacccagacacaaagaatcgttagctatcatcccccagtgagtcccaatttccaatttcccccaattcaagcttccgccaccgtgaaacgagcttcaccgtcgccagcccttttccggtcagtccccgtcccctacttcctcgtttaagctttctcacatgcatacgatgcttgctgaaccaccaatttgaactgcgggctcaccaatcaccgggaacacgatcaactgtccgccacccattcggttcacgcggacagagcttgatagctcaccatttgtgcaattaggttaggggaaacactcggggtaggtccgatgtgatgtctgccgctcgggagcgccggtcatcgccttaatcggccagtgcagatgctcgtcggagctttgccgtgcggagcgtcgtcgtggacctcggtctgcgaagg

SEQ ID NO: 83964 - DNA, 716 bp, Zea Mays
tgagtgccaaatagttgggtagttgggttctctttttctgctctctccctttaatccgtctatgcttacctcttttatctctctaccctttcctcttgtacctgctcagttggcagagtccgagttgaatcgaagaatctatgtgccaaccttgttttcttgctagtcttcccttgaaacacaataccatcaacctatccatgtcaaaatacaacaccatccttgtttcacgctagctgacacttcctttctattataaatgtctaaatgtccttttttcatatttgccctttgtatatatcatgaaccttgtgaaaccttgtctcactctcccttttcccctgcctagatgatgaatcccaatgaagataaagtggatgaggtcaacaacaagattccaacctcgacagtggtgaaaaggaaggatgagtcacatagatatctgctgaatggaatgaagaacaacaagaggaccagaaaaatgtttgggtacaagattaacccgcctcaaccgcaagcagaagcgccaaagctcgtgaatacccaaacaggataatcaaatcaagctcagctgttcaacatgcaggcaaccgatcaaccatcatctgctggcaatcaagcaaagctgacacacagagaggtcaaagtaagaggtgcttgtttctactgcaaggaagaagggcacttcatttgccaatgccccaagaagtgtctag

SEQ ID NO: 83965 - DNA, 329 bp, Zea Mays
ctccctctcacaacactgaacgatgttagaagttccagggtaccaaaccagcagctcatacggctggctatgcagtggatgggctggggttctattatataccccatacttcttctaccaagcagcccacagactccaggttggctagtataaaatttgatggagggtgcttatcagttcctcaagtggtggctgaattggagaggttagtgtcaaacaaatggaaatgggaggtacatcctgttggtgataatgagttcaaaacccaattcccctctcgtgcagacttgaatcatatgattgagtggggggtggtgcagacgaagttc

SEQ ID NO: 83966 - DNA, 680 bp, Zea Mays
aaaaaaacttcctcaagttgcttggaaatcagtctgcaggccaaaatcccagggggggtcttggagtcatcaacattgagtggcagaataaagcgctccttatgaaatgccttcataaattctttaacagagtcaacatcccatgggtgaacatcatctgggatacccattacagtaactctctgccctcatctaaattagttggctcgttttggtggaaagacattctcaaaatccaagattcttttaaggaattcgcccaaatggagattggaaatggtaaatctacgctcctgtggcatgatcgatggaatgagcaacgtttatctgaaaagttcctggagctttggtcttttgcatctgtaaaggagctcaacatttatcaagctcggttggcttccccggatgaaatattccatacccctctttctactgaagcgttcgagcaacttctctctctgcaggacacccttgataatatacagctgcttgatcacgatgatatttggcgatgtagtgcctcttccaaccggttttcttctcagaaggtctattctcacttgactggtacccatcaaacgccccctatctttgtttggctatggaaatctaaatgtcaacccaagcacaaagtgttcttctggctagtgctcaaaaatagattgaatactcggtccctc

SEQ ID NO: 83967 - DNA, 996 bp, Zea Mays
tcgatacccaatttcagaatggtatgagtaattgggtaacccatgggcaatgataaaaacgagctggactatacatctctgcatataaaaatctctgcttggcagcattggcctgatgtcgtgcactttaccaccattatatatgcgcaaattctcctatgtgcttgaaagcacaatgcaaccaatgaatgttcttgtgagcgctagacctgatgtcattgtccttgttgatctgaagtcaactacttgctccaaacgataaatggtgtgcatgagccctaaagtattttgtttttatggctaacatattgttgcgcgtatcagtctaaatcctgatgattgactgtatatttggtgataataacagtaagtttgtagaattgtaaccacaaagcgacttgttgttgcgtgtcttgctggaagttgagactaatccttcacgttgaaggacaaatatgtagtattcatgccactacatcaatctaagtctaaagctcactgcataaaacccctatctgtaatgtgcgtaagatttcccaaataaatcaccacaatagcatacattggccacaaactagatgattgtggttggggattttatatgtatgcttttagaacatctcagcattagggggaggaatgcccatatagtgtaatgcctcaatattctattaaacgcacaaaagccaaactgaacccgtcgttcggaatgtactcctgtgtatatggagtttgccagaaatcgttgaggagtaaccatattggtttgaatgcttctacctgatgtagatgtggatatacccgggattaatatcatatccacatttgacttattggcatttgatctattctcggggacgcctgcgaatatgatccatcggccttagttaaagcatatgttctgattgcagattcacgtggtctgtaataactctcctccgatgaactcgccctgctggtgatttgcctcacgaagaagttcatcttgatgatgaa

SEQ ID NO: 83968 - DNA, 501 bp, Zea Mays
cgcgagtggaagcgcgtgagtccccggcggaggcgaggaccggggagtcccaccggcgaagggtggtggcgaagcatagtgttggtggtacgtcgcgaagtaataggcgtcgtcgaatggggatggaacgaacccgccctcggctggatcaggatggccaacgagatttgttgtcttcattgacaggggcatgcattggggagggggatctgtggagtctatttgagggtgaggagttgaggatgatgctgtttaattttcgtgaagcaggccttatcctgaaggctgagccaaccctcgctcttgtattgcggtagtgagtgaaaacattgccctcccccggctcgcgataaagagggagggaaacagaatgcggtaggtatttatttgtgcaaagtggtcggtggcctaggtatttatttgtgcaaagtcgctggtgggcttttgctgtgtatgtaaactatgatattgtttgttgtgaaatgagaaggcgacttcgct

SEQ ID NO: 83969 - DNA, 530 bp, Zea Mays
ggttggatatggtcaaattaacatcctaggagtcctagagaagaggagaagaaagagggatgttgttggagcagatccagagagcagggagccgttggacacacggccttagatgaagggactcgtgaaggtccgaaagagtgtgtgaatcttatctttgggtctagatgccctcatgcctagttggatcggagtcttggacaggtgtattgcaactacgtgggacttgggagtatatagttcgttttcagacgcttacagtatgcgtggattcgatttttttgataaaaggcgagacgcagccgcacgcatgaattgtctgaacgactcgtgtgtgcaagactgctagttatatagttgtaccgacacgacagcccaggtctcttcaggcgtccggccggtgtacttagcagaatgcgcctaaccacatgcagaagcagaagcagcgggaacggctcgatcggtcgaccgacccggtttgagatatcccgttcacattcactgtcagctagcgatcccgttcagtttgc

SEQ ID NO: 83970 - DNA, 468 bp, Zea Mays
agggggatagcgtttcccgctaatctcatagtaatgggtactcagggaatagatgtcatcctagggatgaactggctagataagtatcaggcagttatcagttgtgataagaggataattaagttgatgtccccactaggagaagaagtggtagccgagttaatctcccctgagccaaggaaagcaagttgtcatcagatggctattgatagcaaggagacagattcactcgagattatcaaggttgtgtcagaatttccatatgtgtttccggaagacttaccaggtatgccaccagagcggaaagttgagtttgctatagagcttcttcctggaaccacccccatttctaaaatagcctacagagtatctggaccagagttagttgaacttaagaagcagattgatgagctgtcagagaaaggttatataaggccaagcacctcgccttgggccgcccctgtcctg

SEQ ID NO: 83971 - DNA, 292 bp, Zea Mays
gtgcacccaagccaatgtctggtgatggcgggggaaccagagataagggggtaaattgagatccaagagggcaaagaggtgagcgatgggcaaagccaaaactgtgaaggcgatggcaaagtgagtgagactatggggagagctagtgtttcctcctccatcaagtgtgttacatggttgcccttttacacatgcccatggctgtgagacttgatagggaaggtatttttgaccaaaacctagagatggcaacataaaatttcccatcaagaaatggctccccattttcatc

SEQ ID NO: 83972 - DNA, 918 bp, Zea Mays
gaatgcttttgagaatgaaatcttttattgatgacgtattttccaattacagaatataacattgctccgatagctcttgctaagggtaaaacttcctgaggtgctctatattccatgaattctctacttttgtgccatccatttgagtaagccgatatgatcctggccgagtgacctccgacactatgaatggcccctcccatagcggcgataatttgtgtcgtccttctcccattagaattcggcgaaggaccaactctcccactatgaaggatcgatgtcgtatagtcttatcatgatagcgcctcagggtctgctgatatctagctaactgaattactgtattcaatcgctcttcttccagtacatcaatatcttctagcctggtagcttctgcttcagctatgttttcgaataccagcctcggtgccccaaacctgaggtcagcaggtagcactgcctccgaaccatagaccatgaagaagggggtgtttccatggagagctcgactgggttgagttctcaagctccaaaccacataaggtaattctctgatccacttccctgcgaacttttcattcttgtcgaagactttcttcctaagtgcttccagtatcattccattagccctttccacctgaccgttggctcttggatgtgctactgacgcatatttgatctggatgctctgttgttcacagaaatcaaagaattcagagctagtgaaattggatcctaggtcggttatgatgctattcggtatcccaaacctgaatattatatcttgtatgaattccactgccttggctgaagttagagaagcgatgggtttgtattctatcattttagtgaatttgtcaatggcgaccaacacatgagagttagcctccttgagctttcttgaagggtccaatcatg

SEQ ID NO: 83973 - DNA, 308 bp, Zea Mays
agacgatggtggcatgggcaacagatgaatgggtaggcatggtgccaccagggcgctgatacgcggcatgccataagatatcaacgacagtggctgctgctgcggaggaagaaatgcggctgaatagtgccgcgcggctgaatagtgacaatcttaaaaaccgtcaatcaatagaagcagtcaccttagggcatcattatccataattcaattttcagaggcaaatatcttaagatgtttatctttgcaaatcactattaataaaggcaccataaatattgtcttaaggttatagattttaaaaactg

SEQ ID NO: 83974 - DNA, 750 bp, Zea Mays
ggtggatggcgggttcattcaaatgaaattcgagggctcatttgtgaataacacgagtctgcgcaggtgggatcgccctgagccatccgatcgagatccaaagggcagaactcaaccggaacttaagaaaccggtacgagacttgatccgtccgatgcaaaatcgacggcccagatattatgaagatcgcccaaatcctacttcatcaccccaaatcggacggcccagatggccccaggctgaaacagtgctgcgccatgatcctggccgatccctagagatctaacggtgcaagcctatcctcctttcgaccccacacccagctcacggcaacgacggaggaacgccccccccacggcggcgtgcagctcgccggtgaagagtgtcccagtggtcggataccctatcctaggcgagaacaggtgcataacgtggtacaagcgctggcgaactagatagggtttagttaccatcgaatcatgcagctcaaccctcccgccatggcaccctgcggccccgtgacggcagatccgccatagcgatcaattgccgcagcaccgagccatctccgcgcttgacgaggctccacgaaagtctaccgtactcatgtgaagcgccatgctccatttcttgacgctaatccttagtttaggcggcggcgaggtcacgtgggttagcccctgggtctgcgcaacctatggtggatagagggtaccaatggcaacccgcctcatatacaaccgatcggac

SEQ ID NO: 83975 - DNA, 412 bp, Zea Mays
gtgcgtcgttaaaataaaataaaacaatataacttggcctgcccaagactttgagcacctgtgtgtacgggaagcaagtgtcatgttttcgaaagaaaactactgcggttgttactggccattttttacagacgattcgtttgttgatttctctgccccttgcatgcgtacttgatttagtttgcaaagtatcagcacgtagcaacatgcatgtacgcttcgtgtgatgctggaaatacagtgtgggattttgtgatccgggagaatcaaatcaattggcagctcaaatgttagttaatgaatagtataaataatatgtataaaaacatctcactgtagtgccacggtttattttattttaacgacgcgccacgttttaacgaccttgtagtatcaaagctatccaacaaaa

SEQ ID NO: 83976 - DNA, 1807 bp, Zea Mays
ccaaaccctaaacatcaaaccctaaaccctatataccgaatgcttatacctatggattttttaccattaaatggtctccactaaaaacccaagaatgtgatttgtgtccaacccatattaaaatgtaaaccaagtaatactaaaatccaaagatcataaagatttaagggcaaacaatagtaaaattgtagagatagtactatttatccaaacattaataaatgtataaagacagaaaaatttgcccaaagccttaatctttaaccctatgcactaaacgctgaaccccaaaccttgaactcgaaaccctaaacgccaaaccctaaaccctatgtatcgaaggataactcatatggctttttgaccattatggtctccactaaagaaccaagattgtgatttgtgtccaacgtaaacatcaaaccctaaaccctatgtatcgaatgcttacacctatggattttttaccattaaatggtttccaccaaaaacccaagaatgagatttgtgtccaaccaatattaaaatataaaccaagtaatagtaaaatacaaagaccataaacaaaataagtgtaaaccatagtaaaattttagagatagtacaatttatccaaaccttaataaatgtctagagacagaaaaaaattggccaaaccataaatcctgaaccctaaacactcaaagccaaacccttaactcgaaactctaagccccaaaccccaaaccctaaaccctttgtatcgaaggataactcataaggctttttgacaattatggtctccactaaagaaccaagattgtgatttgtgtccaaacactaaacacttaatcataaccctcaaccctaaacactaaacaccagacccaaaacacttaaccctaaaccctaacgccaaccctaaacattataaccttgaccctatgtatcgaatgcttacacctatgcattttttaacattaaatggtttccacaaaaaacccaagaatgcgaattgtgtccaaccaatattaaaatgtaatccaagtaatagtaaaatacaaagatcataaaaaattaagtgcaaaccattgtaaaattttagagatagtacaatgtatccaaaccttaataaatgtctagagacaaaaaaaatttgcccatacactaaacactaaacactaaaacacaaacccttaactcgaaactctaaaccccaaaccctaaaccctgtgtatcgaaggataactcgtatggctttttgaccattatggtttccactaaagaaccaagattgtgatttgtgtccaacctatagtaaaatttaaccaaaagagtagcaaaatctagaaatcgaaaaattttaggccgaaccatagtaagattgaagagatagtacaattttatctaggccataataaatgtctagagatagataaaattttcccaaaccctaaacacttaaccataaccctcaaccctaaacactaaacactggaccccgaaccattataggattgaagagatagtacaatttatctaggccatattaaatggctcgagttagataaaatttgcccaaaccctaaatacttaaccataaccctcaaccctaaacactaaacaccagaccccaaacacttaaccctaaaccgtaacacccaacctaaacatcaaaccctaaaccctatctatcgaatgcttacacctatggatttttgaccattaaatgggtttccaccaaaaacccaagaatgtgatttgtgtcccaccaatattaaatataaaacaagtaatagaaaaatacagagaccataaacaaactaag

SEQ ID NO: 83977 - DNA, 477 bp, Zea Mays
cagggattctctttattgctcctggaggtgaacaacttaagtacgcactccagctattatttccggcatcaaataatgcagcagaatatgaagcactgatccactgattaaacatcgttgtatcactcagcatcaagaagttgatggtatatggagattcgctagtggtcatatgccagataaacaaagactaggattgctcaactgattccatgggcaagtactgtgcagccgtccgaaaattggaggacaaattcgaaggattggagttccatcaagtggaaagagaccgcaatgcggcagcagacacgttgtagaagttgggatctagtcgggcccaggctccacccgggatcttcgtccaagaaatatcacaaccaagtatcctctcagatcagatggaagagtgcaacaccttgagccaaccagagtcggaccctaatgactagagaaagcctatcatcaggtacataaaaa

SEQ ID NO: 83978 - DNA, 367 bp, Zea Mays
gggagctcggccatggaagcttctgccctgcgcaaggtaagctagggaggagggcgccatggatgggagagcgcagagttgttgctcggcaggaggaggaagagggcgcagggagggtgctgggcggccatggagctgtacgtcggctgaaaggagggagaaaggttgttggcggctttggtttctctaggggtgggagtgcaaaaatgcctccacttgcaaggagaggcctcatatttatagacatgtgagggctagggtttttagtgggctggcatgggcttggcccaaaacacgtaatcgggctgcgctagatattttctggaataaaaatgctcccgcggaattcgtttgtacgcaaaacagc

SEQ ID NO: 83979 - DNA, 537 bp, Zea Mays
tttacgctaaaattcatactcatttacgctatttcggttcatgttttacaccaaaatttgcttgagccagaacccgtgcacgatcgtacgctcgcgactttcacgccataattttcgggccccattcgccgttaggaaacagatctacgatttacgctaaaattcatactcatttacgctgtttcggttcatgttttacgccaaaatctgcctgagctagaacccgcgcacgatcgtacgctcgcgattttcacgccgtaattttcgagcctcattcgccgttatgaaacagatctacgatttacgctaaagtttgtactcaattacgctgttttatatacatatttatgtctcgcgtttctgcttacgtgcatgcatgcaatattttcgggaaccttcagttatggttcgtgattttatcgcgtataccttttacgctaaaatacaaacgcgtttacgttttgttggcttatgatttacgctgtggttcgaccagaccaggaaaccgacgagcaaacctacgcgctacccgggtcc

SEQ ID NO: 83980 - DNA, 581 bp, Zea Mays
attccttgtaactcgagtcaatgtatcaagaatcttgatggggtactccgtgtaagtcagatcaccctgaacacagagctcttccattggtaactgttccttagggtcacggagacgcttcttaagttgagatacgtggaacacattatgcacatccgatagactagcaggtagctcgagttggtatgccatctccccaactcgcctaaaggttatgaatggtccaatatagcgaggggacaatttgcccttaactttgaatctcctcattccacgaagtagtgataccttgagatacacataatctccttcttcgaattccagtggtcttcttctattatcagcataactcttttgcctggtttgagccaccctcaaattctctcggattatacgaacttgttcttctgcttcttgaatcagtccaggcccaaagaactgtctcactccagtctgatcccaatatagaggagtcctgcacttcctgccatataaagcttcaaaaggtgatatcttcagactggcctgatagctattgttatatgaagttcagcataaggtaaacttttatcccaacttcc

SEQ ID NO: 83981 - DNA, 695 bp, Zea Mays
gtttaagcatgtcaaatttaaccaaatttatgatatcaaataactattattagattatttatcgattagatttttgtactatatctatcaacgttcgagtaagatcatatctctataagtaagatcatatctctatatatcgtcaagacatgctcaaaggtcctacatcagagacgagcttcgagacccaccataacaggaccacttctaccgagcctcaagccttggggattgctcatggcttggttaaatggaggccccgacaacattataaggggcagttgtcagtctttggtacccacggcgtactatggtgtataccacacatgctttttggatgacgacgaagtcgatcgtagctcgatggttcgtgccaggaatgacagaagacaacgtgctacaaatggttgccgaatgtagaagataaaagcgacctatgagtctagcaggatctaacctttttgtagggatatctctttagccttatatagccgactgaagagaacacccgtacaatctcggcgcacaactcccgccaactgacttccgttagaaacacgccacatcttccaacgatcagttggttctcacggggcttgcgcgcggctacatgtgtgggacgtgcttttggagatctccttgactcgacatgtgactccttcgatcgtcctcgactacatctagttgaggcccac

SEQ ID NO: 83982 - DNA, 840 bp, Zea Mays
gcaggagccacggacaccatcgccgcaccacgacgaagcccacggatccaacttcaggaccgcaacgatgctaaacttgccaagcccaaatggcgaccaactccacctcacgattcggttcctgatttgatttggggctagatacaatttggaggagagatggggtaaacgcgccccaatttatacaccgccagacggaacacaactacctggcaaaatccacgggattcacgcggagtccgatctggtgctacgcgcgcacagaggatgtttgttcagcgccgcgaggaagacggacccgcccgtaggccccatcagtcagtgaaagctcaaccaggcgcgctgcgcgcacacgcccatgcaacagaaaagatgaccgacggggtgccccacatgtcaacgactcggcaatagtggagcacgacggtggaaatgggccagctgatgaaattcggcccaattggccggttcgccatttcttttcttttccatattttcatttttacttttctatttccctcaagcttaaatatggtttaaatcaaaattttaaacctaggtttccagttttcaattcaaattactatgcacagtatagactccagcataaaaaggttttgtattatacttatatcagtatttattgaagtaaacgctccctaacataatcccacatgcacccatattatttctctttagaaaattaaattattactagtatgtgaatataacttttattgtttacaatgtcaatatttattcttctccttgttatttatttcatgggaggtataaatggttttcttaaaagaaaaattcctttctttttattcatttttt

SEQ ID NO: 83983 - DNA, 323 bp, Zea Mays
agaaggcgtacatgagaatcccgatgtcatggcacacccagctgatatagatgcatggaatgcactagattccattaattctagctttgctgacaaattgcggaatgtccgcttcagtttggtaacagatggtttctcgcctttcaatctaactgcaccgtcttactcttgttggcacgtctttgctattccatacaacctactgccagctctttgtatgaaatatgaatttatttccttgtgtcttgtaatacctggtccagaccatcctggaacaaagatcgatgtgatgatgagacctctgattgaagaattgaaaattt

SEQ ID NO: 83984 - DNA, 588 bp, Zea Mays
gcgggttgatttctaaattagatagggactcatatgaaactttgctcagccaaaagggtatgtataaactggaccatcggatccatcccaacgttcaggattaggtccgccagaaactgaatcggtacggagtggtggccgcaggatggaggatcgacggttccgatctagcctgcaaagcggtacgcgatgattctaatcttagccctctgctcaaatccgacggccgcgcgacgtcttcaacctcccaacgctagaccgagctggcgttcacccaagcgacggatgcacaccgagccggccaaccggcattcgcccaagaccttacggagatatcccgatggttcgccggccacccagaaccaccccaaccatgtcatcaacacccgcccagaacaccgatgcatacccagatattgcagaggaagagtggctcaccagcgagggcgtcctgcgctgaccatcgacgtcgagcgatgacccaccgcccgcacagatcccgacgaaagagccacgcccttgcggtccgctggttcctccattgaagtacttcggccgcccatctgactccagccacaagaatgatgc

SEQ ID NO: 83985 - DNA, 781 bp, Zea Mays
cgtggacgagccaacttcaaaagatcttattgacggagaccgggtcttcgccctacaggccctaaacaaataccaggcccagaccaaagcatggcgcgaccacgcagtcatcccgagagagttcagcgaaggggacctcgtactcgtccgaacagctcggacggagtccaggggaaagctggagcccaagtgggagggccccttcatagtcaagacaaaagcatcccccagcgcctacaggctcacaacgccaaacggcgaggacctggagcactcctggaacatcgacaacctccgcaaattttttgtctgactaatcggggctgatttcgcccttgtaattcgccaaaaaacaatcttgtaccggcccgcactcttttcctcccggggggtgaggtttttaacgaggcggagccatgtaatatatgtgcgaaaaatcccccgcaaaaacatgcgtcgaaaacagaccgcgacgacggccttcgatattcgaccaatccgaggtcaccgcgaggctaagcgctagccaccctcgcgtgcgacaaatccgcacagaagtcgcctaagggtgcagccggactaagcacaacaagtgcgaaaaaaaaatctgatgtctatcgcgaagactatccgcgcagaagtcgcctaagggtgcagccggactaagcacagcaagtgcgagaaaacccgaagtctgtcgcaaagactccgcgcagaagccgcctaagggcgcagccgaaccagtacaacaaaagcagaaacgacagcatcaaccttagaa

SEQ ID NO: 83986 - DNA, 332 bp, Zea Mays
aatgaatgatgtatctagcatcactaggtttggttagatccagcttggtaatagttagcaactaagaattaggcagagtgaaccacaagataccaatgcataaaggtgtgctacccgtattaggcatgtggcttaccttcttcttgtggacctttctgacttctgtgcctccttatgttcaccatcaaggtcgtctgcgatgacccaaatccagcgatggttagggtttaggggttggcgagagaaatgtggatggggcgtgttaggtggaaggggcgagagaaatgcggatgtcaatgagatagagcgggatgcggcgagtgaagtcggcg

SEQ ID NO: 83987 - DNA, 839 bp, Zea Mays
ggcgtcgtttctgttcccgccgacgccggaaaacgggagttgttggcccctgtccgaagacaccggttgcccaaagtacaacctccatcgtcgcatttcatcgaagctcttgttgccggattgcagctcggccgcggctagtatcgcatttcatctctgttgcagtcatcctcaatcgtcgggtggtaggttgtcggccgcgttcatcgttttcatttatccccaccggatgtgagttcatcgtttagggtttagtctctgttgtgcacactattttgcaacatcagccatttagtgtttggaacaagtactaaattcggatttgcttgatttatcttacatgtcgactgtttgctagggatttgccatatttatcttacatgtcgacttctaattcggataggcaacgacgacatgtacgacatgtccgacgaagatgaggagacacatgtccatagaggttcagttgtcggtcgtcgtgttattaaccgggacaggggatccggttatctgagactaatgcaagattatttctccgacaacccggtctacaatgacgacatattcagacgacggtagcgccgactacaatattaacccatcgtttgatcagtgatgtcaattgtaccatttacttcatataccaatgatattggtcttttccaggtttcggatgacgaagcctatgttccacaacatctgtcaggctctcgaagcggcgaacccatatttcaggcaatcgtataatgctgccaacgtgccaggatttcacaccatacagaaggtaactgctgcaattcgtatgctagcctacggagggccagccgatagcctcgacg

SEQ ID NO: 83988 - DNA, 430 bp, Zea Mays
caaatataggtggaatataaagctatagaatcttacaacctcaccactcttaccaaccaaagctcttatgaggtccctgcgggttgcaagaaaaaatgtgtggtggtaacaagaaagtgatggttaagcgaatacaagaccagatatctgattacgatggcttgtatgtgaagcttggtgggaataaacaaggaatgcaatctgaatcctagttgttgtagagttaaataaccatccaactagaagttccctacctagtgctgaccacaagatacgagtgatgcaagtagatcaaacacacatgcaaacaaatttcatatttgatgcaaacaaggaatatgattggaatgcaaatgttgcgatcagacccaaccaaaattttgcaccaaaagacaatagcaaactagttgaacaacctgatgaaactttc

SEQ ID NO: 83989 - DNA, 477 bp, Zea Mays
gcggaaggccgttggctatctgcgccagcactcctccaactccactcggcgtgttcaatgctcgagcgaagtcggggtataggtttcgagcgagaggagggttctcccgccggagtctaacatcttgttcaactagttctcgctctcgctcctaagcctgtcggcgatcgcagtggtgggagttgtgtttttctcggtgtactcgttcatcagaagtttcccccacttccgaggctttgtgatgtcgtcgcacattctggcgtctgtttctccgtcgtcgggcatcacgctggggagattcctccccctgcatggtaggctcatcgtcagagatgggcgatgactccaatctcccctgaatgaagagtacgtcagggtagaaaggagcaggtatgatggtgttcttcttcccatcctcctttgagggcgaaggtaccgggaggatggatcggtgtattttccttccccggtatggga

SEQ ID NO: 83990 - DNA, 408 bp, Zea Mays
ctgggatccgctttccccgccacactgcgcagctgcacggcgtgcctgattattcggcagaccatgcgacatgcacggcatgcaacggcgtggcgagaatagcgcttgacgcggtcacagcgcagctgggtgcattcgccagccacctgtaattctacgcgtacggatactaaacgtgctcaagtacaacttgtctaatgcatctatatgctggatacaggattgacatgattacataatgctgttatgcaacattctcccctctaatcttgtcaatcttcagtcttccactctgatgattccgagttgccttctcagttcaatgaaccgaattctcccaagaggcttagtcagcatatctgctaactgatcttcagagctgacatgttcaattttcagtaccccatt

SEQ ID NO: 83991 - DNA, 829 bp, Zea Mays
gtgggatggggctaaattggacgtgccatatctttgaattcacttggttttgacccaagtatcatatagtaagtttgaaggctgttgtttagtgaacaaactttatcaatgaagtttgctctgttcttaacaagaatcaagagaataagtgggtggaagggggtcggttcagataaacattgaagatctagtgcactgaaatatttgaaacaaagatctgggcactgttgaatcggatgagttcggatgaatcggtgggggaatcgatcgcgggggaaggataacctcagacgtggcaccaccccgcgtacttagccgggcgtggccagagatattcaccggcggtcaccgtgactcagtgattttccgccgcggtgtcacccatgccttgctcctccctcactttgtctcttccctacgtggtaaacatgcgctaacgatgttatccgtggctgtggatagttagccagaccgccgtgcctataaatagtgccatgaaccccggcgagacactcacaacttcaccagtgagtttgattgaagcccaaaattcgcactgcctctgccacctcttcccaaattgagtgtgcacggtgaatcgatagcactttgcgaccgtgtagctccaatctcacctcccaatttcaccagagctcgtcgcagcgacgttttcccccttctcggtctccggcaagtggaagttctccgcgctccgtggccgaaccgttctggtatggttctacgcttcttgcatattgttttagtagctctgcgtacccatgatgctcatcgtggcaaccatttgaccaattcgggcgtgattgaatgg

SEQ ID NO: 83992 - DNA, 648 bp, Zea Mays
gtttgtttaagtcatatgaatgttcttaatattagtacaattgattgtaagaagctatgaagaaaagtatcaaacttcatctgttctgggtcgcaccggacgagtctggtggcacaccaaaccttctttttttccagaggtggctgcagtacgcttgagtggcctggtgcattggatcagttcaatggtgcatcggaccactttaccaaagaaacatcgcgggagcacagttgaggcctggcgcaccggtggcatgccatacctcttttccagagaggaatgcagatgaagcccaaagcatacaccggaccagttcgatgtggactggaccaattggatccaatatgaagttctagagttcaacggttggcttcaacagctaactaatgtggccgaacacatggcggggtctggtggtgcaccagaccggaatagtgagtccacgggaggcagggccaaaggaaatctcgttgattgaggttaccgttggaggtccggtgcctccaaggaaagagcaaattttgtagatttctaacaacgaatatttgggggtttgggggctataaatatgcccaaccagcctactcgagttaacaatcacctctagagttcaacaacgttcccatacacttgtgtaacacatccacg

SEQ ID NO: 83993 - DNA, 432 bp, Zea Mays
ggtgtgcacctcctcgtgggctctcttctcccagcgtttgtctggttgttggtttgtgtcccttcgtggtgcaggcgatgcaggttttgtgcctccaatgaggtcctgagcccgctcatccgcgataatgtagacgtccgcctccctgaacagttgttcagaggtggcaggtactttttgaagtatggctcagacaaagggtgggtcgttggatccccgatagaagtcttcaattactgtcgcctcagtgactttggggatacggttcctcatcgtttgaaatcttttgaggaacgaacgaagagtttcatcattctgtcgcctaatggatttgaggtcccatggctgcgccggtttatcagaaagaaactagaaattcttgataaatcgtcggctgaagtcaccccaatcgtcgatgcagtgtcatggcag

SEQ ID NO: 83994 - DNA, 291 bp, Zea Mays
gaaatttggagaaaaacccaatcaaagtttgactgtcaggctagttcattctgaaattcagcctttcagtgtaacagggtcaactttgagtatgaattccaccttgatccagtagtcaaataagcttaatccctatagtcgagttgtagctggtatatagcactacaactttgatgcagagacttggacctgttgtcacatgaaattgaaagaaaactcccttgccaatcgccctgtcagttgctctgaatgggggttcaccatggtacagtagcctggattggatcaggc

SEQ ID NO: 83995 - DNA, 532 bp, Zea Mays
cgtgcctgttaaaccctcgtgagtcgctgacatgtgggccggcatgtcaggctacgatttcggtcacctccgtgtggggccgcgctgtctggtgctttccccttcccccgctcgctcggctttgacccaatctcaacagctcacgcctaaaatcgccgataatctcgccggattgttgtgtcaactcggcatcttccaccgtgcctggcgtgtataaatggacccccctcggcggcaatcaccatccccactatccgagcacccaacatcaactcgtggcggaaaaccaaagaaataggtgtcgggccgccgccggcgtgtaggcgatttgacaccccctgggcctcgacgtgttgctcgggcgcttctctcggtcgtgggtgagctagtcgtgacttcacacggaaggatgggatccatgggtagcctggattgctccgtgggaaacaacatcgccgcctagccatagggctgcgtggcctgcttgctcgatgtcgcgaacccagggataaggtctacatctcgattcgcc

SEQ ID NO: 83996 - DNA, 336 bp, Zea Mays
ttctcccaattttgtgtggtgactaagctagctctctgtaccaaaattatagcctgacaaaccagctacaactttgtcacaacaatcttgatcaaattctcaacaattcaagcatgaattcacacacaaagctggctctgtttcactgaaaatctgaatttcagaatggaccagcctgacagccaaacttgaggcttaattatctctgactttttcttaataactatgctcacaaccttaagcaaagttgttctcctttgtttgctctataactttgatgtggtgacctagggcaaaaacccttttgtttagaagttacaaggtcacaaagatgag

SEQ ID NO: 83997 - DNA, 429 bp, Zea Mays
caaaaggcttctgttgcaactcccaagaggaggagaatggccaacgtgctggatattgtgctggaaactacgaagattttaagccctgctgcttcaaagaaagttgctgaaattacaaaaacacaggccgaaactaaaactaggaaaacagaaactaaagttgcgccagctcaaactaaggccgaagctgggcctttagtgcccaccgagatggagcctgctgatcctaaggaaacaacgacagcgcagattgcatttgaaaagatctaaactcctgctcccgaagcttcgaacaaaaacattgactacattatttgtcatgcttcgggaaaggaactatcccaagaagaaatgctagaagcatgacactacgcccaaaaattgaaatatccgaagggggcgttagtgttcaatggtagtgacgaagaa

SEQ ID NO: 83998 - DNA, 470 bp, Zea Mays
cgagagggagcttaggcgtgaacgccttaggttgtataataatacaccaaagcagaaagggtcaaagatagagtacataagaaaacgtagaacactgttggctgacacattgagtcaggagtccatcgccatggagtccccaacatatacccctgaggttgtacaccctacaacagatgcaattgaacctgatggatccgcagttaccccctgcgactgggttatccctgatatcgccagtaacccgttcctaccagcttcaacacagactgaggatgccgattcactgtgtatgtctactagaccactaagacgtaaacaacatgtgccacgtggtgaaagacaagctatcttagcccgtcgaaaccggcaatttgaagcatccatttcaaggaacatggctactgtgactgaggatactattagtgatatcgtggcagcaaatgagagtgcaagtatgaccgaacaag

SEQ ID NO: 83999 - DNA, 278 bp, Zea Mays
taaccacttgcaacacggtcacagtggtgtcgtcatgcactttttcctctgacgtgtgaagaagcttataaaactcctgcacttcctctggtatagcctgttccaaggccaatgttggatactctctactaatatcagccaccaagtcatccatctgatcctcctcctcatcatcaattctttctgactctgtgatattctgctctacttctccatgtgagcgcacacaagatagttaggcataaacccattcttgcaaaggtgatgctccagttctt

SEQ ID NO: 84000 - DNA, 1383 bp, Zea Mays
ctaatatataataaaatcctacctacgtcgtgttgtaatttaaagaccgtgtcgtaccagttattgagaaccattattgagaatgaggtcaccggattacaagttgtagtctaccacctagagtttgtggtgctactatggatagaacttctagagctgctcgattttccatgagttccctactagagtaccatccatctaggttagccggtatgatccgggccgagttacttctgtaatcatgaaaggtccttcccatggtggtgacaacttgtgtcgtccctcttctgactgtatgcgaccaagcaccaggtctccgactatgaacgcccggtgtcgtacaactttttcatgatagcgcctaagggtttggtgatatatgtctgactgcaatgttcaaacgttcttcttctagtacatcgtttcctcaagtcaggttgcttctgcctcagcaatgcttttgaaggttaatgtgggtgccccgaaggccaagtctgctggcaatactgcctcgaatccatacaccataaagaaaggtgtaattccatgtaaggatcagttgagctgagttcgcaagctccagaccacataaggtagtttcctgatccatttctctgcaagcttttcatttttgtcaaagactttatttctgagtacttctaataccatcccattttctctatccacttgcccattagctctagggcgcactactgactcatatttgagctggatacatttatgctcacagaagtcaaaaaaatttgcgctagtgaagtttgatcccaggtctgtgatgatgctattgggtatcccaaatctaaagatgatttcttggatgaactttactgctttggctgaggtcaggttgcaatcggcttgtattctatccattttgtaaatttatcgatggctaccaacacatgcgtgtttccaacctcagctttcttgaacgacccgatcatgtctagaccccagcatgtgaagggctaggtgactgaaatagtttacaattgttgtgttggcaggtgctgctgttggtcaaaaattggcatgccaaacatctttggactagatcggctgcatctttctttggtattggccaataaaaaccggctctgaaagccttccccacaagtgtcctagatgctacatgtactccacattgccctgcatgaatttattccaacaaagcctcccaatgcttgaatcgatgcatttcatgaagactccagcgacccctctcttatacagtacttcccctatgactacataatggcccgactgccttgcaatacactcagtagcagccttgtcatctggttcttcctcattcttgatatatctgatgatcggtaccctctagtcatttgggtctggatc

SEQ ID NO: 84001 - DNA, 455 bp, Zea Mays
gtttgtgctcttttggacttgattctcctcaatttgctttggatgaaactatgatccaactcatatgaagatagttagtcctttgtggtgtgttgagtacttaatcaccaaaacaactagaaatcgctcaaggggacgtttcccttttaggtggtttgtggcgtcattgcgaagggtgcgtcaagacaaagcaactttgtgtggagcgcgtggtcgttagatgaaaaacctaggagttggtccattttaccctggttaagtggatgagctctatgtatctaggggtagtttagactagtaaaataacctcctataattaggtgggagggttgttgtgtgcagccatctttttgagcattggaggacttgcactttcatctcttagtgttgtattagctctagttttgagatcctcatgcattttttatttgtggaacttgtgtcttgtgattttg

SEQ ID NO: 84002 - DNA, 290 bp, Zea Mays
gtcgcctttcatccaaacgtcagagtagaatttcccacacatcagagtagcctcaaccgagggatccttcgtgttctctatagtgaagacagcctccatctgggttgcaactttaacatgttcacagccagatttttctaaaattgctacaacccctctagcaccggcaaaagcgcagaaatcaccacggtcgcaaaggatctcgtcaaaggcttcagcttcttcgctgatccatttgatgattcctttgggatcgcctctaataaatttttgctcagatgagtaagcac

SEQ ID NO: 84003 - DNA, 1040 bp, Zea Mays
aaaccagcccttatggaattattaagccaagtggagagttttatcaatcaaaagtttaatagggtgggtctgagaaaataccccatcatttttacaaaggctgcatcgaacctaggaccattggctcactagaaaaactgtcaggcctgtacttagacctctccttcatcagatttatctaaatatttcagaagcctcatacgcacaaaaactttttagccaaatgaaaacacctcaatcacctaacaacgattaagcaggacaaattttagcaccccatcctcatcacgccaagtactgagtgaggactccttcaaagaggaatattacaggaatcagcacgtgcatcgtaatggtagacatgtgccacgaccccaagacatgcacatacactcgtgtgcatgcccacaagaagacatagtgctcgcaggcacacatcccactaagaatctaacacagatcaaccagataagcagagagtttatattttttttatttgctgccaaattatttttgcagctgtggagctgctactaatatgaatatcataagtcaatgtttgaagccaagtgcggcttcactaaaagcaagatcattgacctggcctgagagagcagtattggtgctgcaccatgcatgggcaaagtcattaataccttcgacatgaagataagtttgtctgccataaacgggccataacagatccacacacatacacacaaaaaaaggttgtgcacgacctatggaagaggctccaacaggctaggtgggtaaccactaggtgaggtttatatacctaggatagcacatgtaagcacagctgcacagatatgtggtatccacgaatgtactaatctttcttttataatccgaaaagactgaacgtcatgggtatgatcccaccacatttcattcacggatatgttcattcaagttcaactgcagctcaaaattggactaaaaaactcgacatgagggtaagaccgtcctcacggcattacacacaggtctagaggacttagacctatgctttgacatga

SEQ ID NO: 84004 - DNA, 320 bp, Zea Mays
taaatgtagaagaatcatatccaatttaagcaataaaacatacaacatacattattggattgattttccttgccatggtggattacgcatttccatagagaaaattatctctacaagtgagactacttaaattatttagataaaaacattagtcttacttttctagctatagagagaatttttccttttataagtgtcctgagaatttgaatttcttacatgacaccttattcttttaagaacatgaaatatctttctatatctagaacatggcaataatagaataattaatgtagaaacatgccatgagaacttgcaat

SEQ ID NO: 84005 - DNA, 365 bp, Zea Mays
gaagtagtactcgtccccattatgcttcatcacaaggtaccccaactcgtggcagtcccagacaacagtctcaatcggtccaatctactctcaaggaagcaccccagtgggaccagttgctcctaatgcatccacaaacatgtcatgctttaaatgtgggcatgctggccattatgccaactactgccccaaaaggttgcttacactactccagctccgatgaagcaaggtcaaatctcaggaggtaaaagctaggacttatccgtcaaacgcaagcaagttaactaggtgcaagcagaagctaaaccagaagaacgcaaagacatgggagaggtgccaggagaagctcgtgaagccgatgaaga

SEQ ID NO: 84006 - DNA, 1169 bp, Zea Mays
ccgacttaagccgattgctccgttagtagggtatagtggtcaccctgagttaagtaagcgtgagcatatcgcaccgccttaagtcactgccgacctaaaccgattgctccattagtagggcatagtggtcacctcgagttaagtaagcgtgagcatgttgcaccgtcttaagtcattgccgacttaagccgattgctccattagtagggtatagtggtcaccctgagttaagtaagcgtgagcatgtcgcacctccttaagtcattgccgacctaagccgattgctccgttagtagggcatagtggtcaccccgagttaagtaagcatgcaggttgacagtgaacaattcgagtgcctttgaagtctttttattgatgatatatttcccagtttacggagtacattatcgtcccaatagcttttgagatacacctaggggtaaaacttcctgagatgttctatgttccatgagttcccaatttccgtgccgtccatttgagtgagacaatatgatccaggccgagcgacttctgctactatgaatggtccttcccatagaggcgacagtttgtgccgtccctcccccattagaattcggcgaaggacgaggtctcctactgcgaaggatcgatgccttatggccttgtcatgatagcgcctcagagtttgctgatatcgggccgactgaatcaccgtattcaatcgttcttcttctagtacatcgacatcctccagcctagtagcctcagcttctgctatgttttcaaagattaaccttggtgccccaaacttgagatcagcaggtagcactgcttccgaaccatagaccataaagaaaggtgtgtttccatgtagagctcgactaggttgagttctcaggctccaaacaacatacggcagctctctgatccactttcctgcgaacttttcattcttgtcgaagactttctttctgagcgcttccaatatcatcacgttggctctttctacctaactgttggctcttgggtgcgccaccgaggcatatttgatctgaatgctcctttgcccacagaaatcgaagaactctggacttgtgaagttggatcccaggtcggttatgatgctattcagtattccaaacctgaatattatgtcttgtatgaattccactgccttagctgaagtt

SEQ ID NO: 84007 - DNA, 653 bp, Zea Mays
gcggctttgacgccacgacgaactccgtgctcggggtggtgtcggtggaggagataatatgtgatctcccataaacatgctttgtggcatgtttgttcctacaatgtgtatggtcgttgggccccttggaccctggttggtactaaactctatcacggtctgaggggcgctataagtgcgactttttcccattcaccatactcgtgcgaggcgagcccccgagcctctgctcgatgcagagatccatctaggcgtcatctcgtattttttttgttttactctcccccgcgcatcccttccacagcgatgaggggaggtgacccgaaccacacttaccttgatggtcaagcaatggtgcgtagtgagctgcaaatgggtaatccaagtgaggccctaagacctttcgtaggatccaagcgcgaggttcgctaggggaccgtcctcatactcctagtcaccgaatcatatagttgctgactctgttcgaccggactcgacggctcgttgcgtatcttcgtgataaatcatgagtcacacattccaaggactcaaacacaagttggtgatgcccttcgcgctttgcgcatcagggtcctggtcgctagtgtgctcgtcacttgcttgcccctcactctagttttcgctgaggtgac

SEQ ID NO: 84008 - DNA, 651 bp, Zea Mays
tagcagggtcgagctgcgtgcaacgcctgaagatcagagggatgaatcagaagatgatgatgatgcggggcctcgccccccagctgggatgtaaggcttcgccttcttccttgggtcagctagtctttactgtgcttcggatggcgataacttttggggttatcatgtataccaacaaaacttctctttatggtggtgggcttgtcgtgccctttttgtctgcctcaacatacttggctccagattatgacttttgggtggttggcacgaatattcatattatgcgattatttcgtgccttgttcttatggtccttctgagaaatttcgtgtttgaatttctgggggagatttcgcatgcaacctttcattttcattgggttttctgaatttatatgtccccgtcataatttatgcttgggtctctgccgacatatgctaggcgtacttgtgccttctagtgaaattactttggtttccaatgaataatccctctcataatatgcatcggtccctgaaaattttgtctcacaatatcagaggcatcaactccgacaccaagtggaactcactgcggaataatattttggaatccaactccgacattgtttgtattcaaaaaacaaaaaaggagtccttcaatgactcatat

SEQ ID NO: 84009 - DNA, 594 bp, Zea Mays
tcttatgagagtgatcatctatgggatagattttcgcttttcatcttattcagtgatggttcaatttttgtgctctgtccagttgttctatttggaagtgactatagcaagaaacatattcaagaaatatatgaagatgttaatgcatttggattgaaatcttcaaatccaaatgttgtcactaattcatatttggtcaaaagctaatgcatatgcatcattagatgattctctgacattataggggcctctttgtagagtttgtgaggacaataatgaatctgaaggcaagagcagcagttgtgaaggaaaaatgtaggttttatacagttctactggcaaagattcagttcttgtaactgcctagggtagtgggctgcttcaggttgatgctcttgcagatgaaattcaaccacagtggaacattagggttccttctcgccttaatgttgatttaaatggacaaaagcttctagaaattttgatctctgtaacttcggggagggagaaactaaggttaacctttccatgggacccagacggtcatagttcaagctgtctaaacatccaaagttacaacaatgttagcttgag

SEQ ID NO: 84010 - DNA, 918 bp, Zea Mays
cacacactcacacaactcttgtgacttgtgagagggttttgagggcgcaaacaaaaccatgtagaacgcgtgagcatacttcttgccgctgtgttgcctgtactgtcctgcgccatatctaaacgcgtctatccacgcccacgtacaagtagttttctctcgttatctctctgtacatatgatttttactattattccagataactggcatatatgtttacagtgaacaacggtctttttcagttcatgaacgttaaagccgagacgactaaacgttgcgacaataatacacacaaattactcaaagaatgttagtgcatatataatggttacacgaaaacaaacaacacataaaaatgaatcgtcgagtaaatcgcacagaacgctaaccatcttcaataaaggttgagaacagcagtggcggcagacccttcgtaaaagcaacaaaaggaaaaaaatatgtatactacttgtacttggcagatacgagcttgtccaaagtccggagagccataaccaacacccatagccttgatcttcttccagatccaggatgatatatatggacgtgttttgcagtgtaatagggagtgacatagacggtaggatagggaaactgctagagataaccttatatgtgtctacgatctaggactcaaattggatgcatattatagtgcccacctagctactttcttcacactacaccaaactatttaacttcctgagcctaagtcgtaggaagttagtcgtaaactttcgaaagttagcgaaaccatcagaagttaagctatcccgtcggaagttaagctctcaaaaaatatggtcgaaagttagcttaacttcctagagccctcttagctaacttcctagagccaactgtgcctttcggaagttagcgtgttcacgccgtttggg

SEQ ID NO: 84011 - DNA, 380 bp, Zea Mays
cacagattagttcaccggcgatggctgcccgttggtcacctgccacgtgctaaagtgttagatcacgtcgctgtaagtcgtgtctcacatgcacggtgatcgccagagggagcaccacggtgaaaaccactaaacgcttgcgccagtgcccctctcctcctccgaccgccgcgcgtctcgcccaaattcatcagccgccgcttaacaatcctataaagtgatggtcggggctgttgcaccatgtaatcacgaagccaacgcaccagctattgcttcaaatcactcaccagagaccacgaattccttacttcccccaaaccggttcatcccaccacaagaacacccttgccgtggctagcgcgatttaggttagttcttac

SEQ ID NO: 84012 - DNA, 755 bp, Zea Mays
ctaaaccttataggtttctgccatcagggctttagaggataccgtaatttcacatctagtggaaattaccatgagtaaaactcatggaatgcacatgtgtttattcggtgaacttcaagccctttggtaccttatcttattcctttttgggtttgtatgagtctttatccctttattggggttatcaaactttggtattgaacacagactttgtttcatcttagaaggttccatttgggaactataatctcaactaggagatattctctctacactggagagtggtcattcatcaggaatgcattatccggtatgagatttatatgttgcatatttataaatcaaagatatgaatcctcataggatctcatgatggatcttcagaatcctattaactgtatattttaatttatgccatttgccagatgtattacatagcagaacaatgtttattcaacacatatgtggggtgggtctctcacaagaccacttgaaccatcgcattcaccacacattatttcaatagtgcccataaatgtccgaacttcaagctcacgactttcattttgcgattattgattcagccttgattgcatttatcaatgacccgataagagagcttcaagcactcatgcctataactttgttttggatccctttgcaatttagagaggcaagataggtgtcgacacatttatctcccacatttaataatgatctttgtcatttcccaaaaacgaaagattcatttttcc

SEQ ID NO: 84013 - DNA, 511 bp, Zea Mays
acggcggtggtaagccactaggcatcgatgaagcagtggcgggcaataacctgagggctgaacttggtttgtctaaagatgagttcgttgttgcatcacttcaggaccgtttgagaaaaggagacgacgatgatctctccattagatgattctttttgatattattcaataggttgttgttccccacgtccagctggggcatatctaaccatgaggtgttactgatggaagaaatggatcgcttccatgagacagactggtgccattgaattttcaacgacctttccgaagctgctcataagtggcatacaagaagcactactaacgtgtccacgacgatatatggatgttcaattgtcatactagtaagtaaataatattggactgttcattttttggtaattcgcatggaatctaatttacggtatactcattaaaatgttatgttactttctttagttacacagttaccacccatgattgtttaaattcatttttgatttttgtagtt

SEQ ID NO: 84014 - DNA, 1180 bp, Zea Mays
aacgatgcctcaagaggcatgccaccaccctcagacagtgccttaaccagctcatcatcgccatcaagcaaaagacggaggaagcctcaccctcaacgtttgtggccgtcatcgaccaccagcaaacttttgtcctcgacctattttaggacgacctaagccacagtcgatggaggagcttgactctgacgtcgctgaggcgatgggaagggcttgcttcgtggcaacaccgtcgcagaacgagaatgctgggggacaaggaaaccccaaccaagaggaggagtaccagcgccagtgccatgcatagattctcacccacgaggctagcctccgatagctagaggaggagcttgacaccctcgtttgaaaactcgatagagtttatggcgacatcgagcgtcggcgccttgaggctgaaaggcctcaggcaaggaaggtctacgatcagctcggtgaggggagcgatggcgcccagtacttcctcaacaccaggcaaaacatagccacaacggtcatgatgctttgatccatcctcgagccagacgagccatatgtactagaacctctgtaacatggtggagaatgctgtcgtgcagaaagccaaaattgattgacacacacccaccggcacggacagcttcgacactcgctcagcctcgtcctggagcaaggggcatagccctcccaatccacaaggtcacgtgttctgctgaagaaccacctcggggatatctgtgatgctcgccacatcctcaacaaccagtggcaggagcaagaaaaactagaacagttgcatgcacccaagaggagatgcgagtgtagtccttgtcgacctaggccaagaccacacgcctttggacgtgcgatccagaaggagcagtttcccgtaaaagcgcatgtaccagcaaacatgaacaagtacgacaggaccaccaatcccagcatctggttggaagactaccgccttgccagccacatggcaggactcaaggatgatcacctaatcatctagtttttccgtatccacctcgcggagggggcgagggcctagctcatgcacttgccgagcgacactatccacgactagaccgaccttaaaaaggtcttcgtgggtaatttctagggtacctgcaaattccctaggacttcttggggccttaagcaatgcgtttaaaagagc

SEQ ID NO: 84015 - DNA, 638 bp, Zea Mays
atctatttaatcccttaaagagatcgttataatctagaacatcatcggaatcctcatcgctagaagtgtacttgtgagtatctcgtgtatttaccttcttctccttagccatgaagcatgtatgtcgttcgttgggaagagggaggacttgtggagacggaggcagcaagtccttcgtcattggagtcggacgaagagcggtccgagcctcattccttaccaatatgcgcctcgccttcctgtatttctttttcttttctttcatccgtttcttttcttgtttctggtcattttcattatagtgacattgtgcaatataatgaccagatttaccacatttaaaacatgaacatttttcccttgatttgttcttgcaattagagcagtagaacggctgaattgcagcgcatgtgctctgtacctaccaacacgaagtgatgagaaacctccaggtttcttctgattggccgtggtcacgataagcgaagtgcatgacttgtgcttgtgctgcgccgccgcgccgggcactccgcattgctgcaactgcaataaaagaccttttaagttaaaaaaaaagaaaccttttgcacgcatcttcgttcccgggccgcgcgcgggaaaccgagcccacgggaata

SEQ ID NO: 84016 - DNA, 489 bp, Zea Mays
gccaaccgcaaccgcaaccgcctggaatggaaacctctcccctgtcgaggaactgcgggagtgtcgtgcggacgaactagtgttgtgtgatgacagagcgtttgctctagagaaatattatgcgcggagatttttctggaaacaatggtgaaagtagttagtggggtggctctgtggtttatcgattctggtgagcgcctgtgctttcctttttaaatcatcgctggtgcctggtgtggtgatggactgaagggatccgggacccgcggccgtagccggagccggattggtggcggggaccctgatatgctttggcaaagctgtgggctggttctgcgtgctcgcgcccaccacagtcgtttcgtgcctcccagcaaaatcggcgtctcgcggttttttttaaggttgagcttctagagtgagcgacacaggaaccagagggtgacgtggcagctgcagcggagcgttgtccattgtgctgactcggaa

SEQ ID NO: 84017 - DNA, 517 bp, Zea Mays
gagctaggcgtcgggcgccaccatggctgtgtaggcgagcagctgatcgtacgcacgggatgggtgcaagagcttcgtacctggatgacagctgtaatcacgtcctctctctttccgacgaacacggtgatacgaacggaagctggaacatggtgtttgcatggaaagactatggcagctaccggacgggaggggcctcggttcctatttgtagcccagagacggtgggctagcgtccggctgctgtgctatggaggccgatggtgaatgcacggatcgacaggactcctcgtggccgcactcttcggcgccggtgagagcaggaccacaggttcgtcttccacctcgggtgttgagcgacgttgctgccggtcgcatcctcggcgccgccagtggaggacggggcggccaacgagaacggtttggaaggagaggtgcctgcgatttggttttatagcccccagcgaagcctggcatcgggttgtttgttggcgtgcacaacggcaacagactccgc

SEQ ID NO: 84018 - DNA, 527 bp, Zea Mays
ggagattatccatgttgcctgctttccacttaagggatgtctacatgcacctttcatcatgaagatgattgaagtggtgacgcagttccgctatgagaaaggtactagacatcaatcttatacccccttctgaattgatccaaacaatccagcaggccgtttgaggaaagccccttccagttcccgtgcacatacttctgctggtcctgctgctgctactgctgccggtgcctcgcgtccctcccctggccacggatctcccacgccacgtggtcgtggtcgtggttgaggtcgtggccgagggatgggtgcccgcctggcccatgggattgcagcattcttttctatgtgccggaatatttatgcagatgtgcatgagctggcaaggcgtcagcgggagactgacgacaatcttcgtcgtcaagcttcctctatgggtatgccttttgcccctcgctcgcctgacgtgcctctccatccgcctcctccagaaatcaatgagtggcaccagcaggcctacggggtgc

SEQ ID NO: 84019 - DNA, 506 bp, Zea Mays
ggatcatcggagaagaggagatgggtttggacacggacgggcgcgacgttgccagcgcccggcccgccgctggtttcagtacgttgaaggcttgcggatcggaagcggccaaccggagctaattaactacgctgttgtcccttgtgcttgcatgcgatctttggtggttaatgctgggagtattcgcggcgtctgtgtttattgttttccataattccatatctcgtggatttgatgctagctggcacgacgacttgatatggaatataatgtatgattgcttcagtagatcaatacttatcttctaccaaattaaatgttttgcaacagtaatatatatgacatgcgcctttgttattattagcagtaaaatctttctggattgcctctgagtctctgacgacattaatatctccctctagctcgtcgtcctctgtctgatccgacgcaacccatcgtcgttaatttgtgcatgcaaacacatgcactgttcgttcagaatccgc

SEQ ID NO: 84020 - DNA, 908 bp, Zea Mays
gctggtgccctaactcggctaacaccaaatcctaccccaggcgaccctaatccctcaactaattgcacgaatccgggccggaacctctctgtccacgacaatggcaaaaatcagagacaatccgaagtgttcatgatgatttgttgtggtctagcttaatcaaatgggtctacagcaacaggaggcttgagggaggctagaacactaatcaaagaagcttgaactgacctacagagggctggccacggcgaagtgtttacggtggcgtggaaaacagatttggggggaatgcgaaattgggaggctctggtggatgatcagaggtgcaagctggtgcaatgagtgcataataacctagcggagctcactagggcagcaatttatagactccatcggcagtggcatccaatttgaagaaggcgcgctggcggccgaagagagaggaagtgcactggcacgggttatcatggctttcaccgtgacaaagcctccggcgatggacagacttactactacggttcactgcgacgtgttaaagctcctaggaacgtggcgcatggacggtaagcggccaacgccggcaaggatcatctcgaccgaccgcagaccaagtgggtacggtgaactatctagtgattgggtccgagccaatccgagcgccaagatcttttactcccctcggttatccactttgtgctgagcacgaattgcggcgatcggcgcgaatccaggcgcggggtcaccggcggcgagttcaatgaactcggattcttcttcaggttactgtaccatcagaactccattcagagcgcctgacagagcatgtttgagagcgatttactccaaaaatcgttcagcgcctggtcaagcttggtataacaaagttgttcactaatgttagagcttca

SEQ ID NO: 84021 - DNA, 685 bp, Zea Mays
cgacaatacaagcccaacagggtggtgtatgggccagactggacttagtagtggagtgtatttagtcccttcgtcagcttcgttagggttaggcgaggatagagttggctggaagagaacggcttggccagctgcttccggacctggagagtgttgagaggcttttcatttctgtttgctaccattgatctctgtaacctgagaacttagtgagagggagagtaccgggagcggtgctcatcgtcacaaaatccttggtgtgattacaattggtatcagagcccacattgtcgctgctgcctgggagagctttgggcctcttagggggtgggatgtgagagaccggtatgcacgacctgggttagtacaacatcgccaagccaagggggtcatgatgcccttataagggcgggcctccctcctctctcagcctaggttttgagagcgaggtgcccgtttgaataggctatcacgagcgcatgaacgcccgacgctggcgatggtgggctttgggcggactagcccaggggtgcgttacacttggtatcgaagcgttaccaccctaactccacctccggtcaaaggtacttccaaaatctcaccaccggatgcttttcatactcttattgttcatacgatggatccttattgggcatcatatcaatcttgcttagctgctacatta

SEQ ID NO: 84022 - DNA, 1095 bp, Zea Mays
ggaggaattcctcatcgtcgtcacgcggtaccacgtggccgtcgtgcggcgtggctagtccatctgccaccacgtcatcaggtaaacaacaggccattaggttcgcaatgtgctatatttcatgtaggaccgttcggtactcgagtttgtgtgtgggtaagccaaggggttgtccatcggcgtggacttcgccgtagaagagggcgacagcgcgtctgctaccggctgcggggtgaagaagacgagctgttgaccgccggatctcaacgggcggacgagattagtctgggcatacctcttcgatctatcgtttatgcgccatcggatctgtatcgtgcggttctggttagaagccgcgtagcggttcctccatgggcaatctcagccatagatccgagtttggatggatggtcaacatgtggggcatggcgtgtctagatcccttgatctgttgatcaacggccccagtcaaggatagatctctgtcgtgtgcgttttactaaagaaaccctggggaaaggcgaaaccaacccgcgatccctcactggttgaaaactattacggttaggtcctcggaatttacaaaacagcccctgatagttataaagtatttctggaaattgttttttgctaggaaaataaatctagaattttagaaaatccatattccttcatttttactcgtaactgatccattccaattgcattagactcaggataataatgtctatcatttagtaacattattttactatgtaacttagttataaaaataacattccttttgttttatgtttaacacctaaattattcagaaaatcgtaacttttacaccttaactctgatttgatcagttcgagtcacgttagctttgtataaatatttactacgcagtaacaacattaattataccatgtcgcacacttttatggttagatatttatttatcctatgtctactagattaacttttctaaaccaaagctaacctatccataattataatttgattaaaataggatctatagtcaggttataattaagattaaggttgggttaattattatagaatattctctcatatgttgaatactaa

SEQ ID NO: 84023 - DNA, 913 bp, Zea Mays
gatcggaattctgttgtgttgagtgcccaaatggcttctagtagttgttcggccaacttgccctttttgtcgtctaaaagtctcttctttatggcgctaaattttttttctgttggcacgctctactaccccgttggattgtggatggtagacagacgtgaacactgccttcgtgccgatggagtcacaaaattctctgaagtcctgattgtcgaattgttttccgttgtttactatcaactcagaggggactccaaagcggcagacaatgttctgccagatgaatttctgtgttgtctttgctgttattgttgacacaaccttggcttcgatccacttagtgaagtattcgactgtgacaaaagtaaatttgaggttgccttacacggtgggcaatggtccgacgatatcgagacctcagcgctgaagtggccaggtgtgggtgatgagttttgtaaattgcgagggggcacctgttcgaggtgagaatttttggcatgcttccacgagctgaccactctgttggctgcgcacacaatggctgaccagtagaaaccttgacgcgtgactttagctgcgagggccctaggtcccaagtgtgaccctcatgttcctctgtggatctcgcgaaggagttctatgccttcgacggttgtgatacatttgagcatcatttggcttattcccttcttgtatagttgtccatctatcacaacgaagtcatagcttttgtgcttcaaccttttggcttcgctttggtcagagggtgataatgaccttgaaggtataagatgatgggtgcacgccagtcttcgatcattatcagttgtacgattcgcggccgtcggagtcttgtgttatatgtaggccttcggggtttcttacaactagtgtgccgattgtgtggaagaac

SEQ ID NO: 84024 - DNA, 2006 bp, Zea Mays
atcatgattagtcggacgacttgacgaataatcacgacctgtccaaaccgacttggactcggggtccatgaattttagcagcatcaatagcaaagaatgttttccttccacaaacatgcatgcgatctgcacgcttattgaactggtagaggggcagaaaaatttccccatgcactgccacaggttatggccgttaatgtataatatcatgaattcttatatgcatgagtttttgcatagatgtaaaaatcacctggttcatcttttgcagtgaagttccaggactgaatgtcagagaaggttaatgtaatgacccacccattttcaaatttttggtctatttcttttttgaactgcaaaatacaacatacaggatgtagctggaaactcgcggtctgagttttttagtggcctgacacatgtgatggtgaaactaggatttgtcagttaaaatattgagagcatcaatgctaaatggaagaaattgttgggcttggatgtgtagcttaggcagcttacttattatatatatggcttaaaggctaactggataaattgatttgtaaacctctgcatgagtaagttttgtggaactgaatatgtatttaccttttgctcctggtttaagcttttatacctctgttaatttaagggtaggtgctaatctatacaggcatataatactatttcgtttaaaaaaatatttttatgctatattgattacagttcaaccggggaaccagtgctatgcaacactatgttgcaatacgaccaatgtttattgatgtggaaatcatgaacactgatattcaagttgttctgggtgatgaggggttgcaagctgattgcgacagtattgcagatggtctctctacattgtataaggaaattgcaggtatttatgagctgcactctttgcaatttttgtttctaaactatactttgatgattttcaattttggcactctgatatatcatacttgtcttcagatactgtgaggaaagaggcagctacaataacggctgtctttccttctccgaatgaggtcatggcaattcttgtccaggtatgttttttcaatggcactcaagggtctctgcggtcactgtttttacaaaatagattgactattgcactttgcttctcagcgagtgctagaacaaagggtaacgaccattcttgacagaattatagtaaagccctctcttgctagtttgcctcctctcgaaggaggccttctacaagtaagttttgtgctctatagtatttccatgtagatttttgccaacctaccatgcaaatctggtgtcatgctgatgtcaaagtataatggcagtacctaagaattctggcagttgcatatgacaaaacaaaagaactggctaaggatttgcagtctattggttgtggggatttggatattgaaggtatctcctgtgtttaatataattttctttttttcttctgttgttacaatcatgcaacttttgatcattgtagtatagttgtcattctattttgtctatttttttcttaaaagggacacacgaccatgctctgtttgtataatgatctaataataggggatccattagataatatggcatgtagcattactatgatatcaaaactttaattcacatttgtcattttgttaacaatttggattacttttgacacattgtttatttggtttggatggtctattggttcatcaacttagcagttcacttcatagctctatgtgttagcacattgtgtttgtgtgtcttaccctataatggcccttggcccatgcccatgtattgactatatatcaacttatcccatgcccaattagggttagggtttcactttccaacatggtatcaagcctctctcctctttccttcctcctcccaccctctctcttagctgcaacaatcgttgaccttcttcgccacatggtcgggccttcttgggcggccatcaccgccgacgcccatgcaccaggcgcggttgcgtg

SEQ ID NO: 84025 - DNA, 571 bp, Zea Mays
ctcgtcttcctccacagctggagacgtgcgacggtgctgagcacccacggccggactctcaccggagggaggcggcgcagcgactaaatatgccaaattacaaaccgaaggatgctacacggagcagagacaagggcgagatcggaggagaggttctcactgatgatggcggcgcagaaaatccggcccacggtggtatgcggttccacggtgaagcaccaaatccggcgagaaattagaagcgctccaacccccaatcgagcacgacgataagccagacaggttagaaagacaccggtgatcacatccatggcctctgcaaggcatatgctcccttcctcctcgaattccactgcgacggcttcctttctctctctctctctgcgctcacaagacagcggcgccgctcacagccaccgtgccgaacccatcggaatcctatggtccgcggcccagtgccctaatcctgagtcaaaccggtgctaatcgaagattggggaagcggcgaaatgcatcgagggccttaccaggtgtccggtgtggccgagagctccagccaacaaccaatccc

SEQ ID NO: 84026 - DNA, 518 bp, Zea Mays
accaagtgtaattttttcctttgaggggaatttcctgcaggcctaccgaactaataatttcattgaatgtgaacacatctgtcatattaccaccctccctgtttctattttctgttgaacggtacatgttgaagtcacctactatcatccaatcttgatcatctgcgatatgaaggttgtatagccagtcaataaaattttgtttctcctgcccttggcacggtccataaaccgtagtgagattccattgattagcattgtgcatcgacgtgaaaccaagagtgatttggaagtttgaggagctaaggacctgcccggtgaagatggaggcattccagctgatcagaatacctccagaagcaccacaggaaggaacaaaagcgaactgattgaaacgcttaggtgccatttttttgaacattgtcatatcaatgttgctcattttagtttcttgaatacagaatatagagcaatcactttcctcaattttgtttcggattgctgtttgcttgtcatcg

SEQ ID NO: 84027 - DNA, 729 bp, Zea Mays
gactcagtggggttcttctgttaacttcactccgggagcttcctcttatgcgagtatttctggagcatatgtgctaccctctgcggatggcagagagcagggagacgtggtgacaggtacgatctcagttgattcgtttgtggcccatgctctttttgactctggcgctagctattcgtttgtttcgaagaattttgtgtcgcgggctggtctttcggtgcagaggttgggtcacccaattatggttagttctgctaatggctccattagtagttgttcagtttgtcagggttgttccgccattcttgctgatgaggtcttttcagctaatcttattgtgatttccttgggggcatttgatgttatcttgggtatggattggttatctcagtatcgcgcagttatatcctgtttttggaagacaatgttattgcaggcgtcgtcgggtagggaggtggtatttttgggaagttctccaaagttcacgtgatccttgttgtcgcaattgctcccggatcatcggtccaggatgttgggaattttttctctatggtggtggtgagtgaggctgctttgcgggtgcaagacatccatgtggtgtgtgactttgccgatgtgtttccagcagagcttccaggcattccatcggagcacgatgcagctttgaaaatcaaactgattccgagtacgcaacctattcataaggccccatatcggatggctccaaag

SEQ ID NO: 84028 - DNA, 1199 bp, Zea Mays
ctgaagtcttcgtagcaactgccccatagtattttccaaggtgcaacattagcaataagtctatcgatttctgatatggttgtaccgaggggaccaccactattttcagcttgttggggaccttcgtcagttatagcaggagcaatctcctttcgaatcgctggaggaggggtgtcaaggatagccctcatcacattcatcatctgacgcttcttttgagcgttccctctgccgggtgctgaagggtccttatctgcctcttcttcggcacttctctcaacatttttcttctatggctgtaataagcttgttagatctgatcctagaggacttagcattaggaaaggtaagggtgcagtcattacctctagaatttatgtcacactaatggaaaccgccgaaggtgtcttttctaaatgctttggcggagaaggtctctcttcttctccacggtcagatgacatagcctttcttttctttggtgtcgaaggctctggtgtcagcttcaggttctttgtcaaccttttcttcttgcccgcttcaatagacctctgcgcttgccttgtcaacacacttacaaccctttttcttttcaaccccccggcttcttcgtcaagtgtttcatagtcagggaattcgaagcccagggcatccatcaccctatttagtctccatttctctcacgtgccaaaggcggttgtcatcaatcgatcttccttcttcgtataattccaagaatttcattgcacatcttctctattagttccaaccactcggcacacggcttgccgaaacttttttgaaatttgaagtggtagggatgtcgtacaagttcatatttattcccttcttttctctttgacattccccacccaccagacgttggaaaagttttattggccaggaattcttgcaccaaatcccgagtactaatatgctctgcaacaaccctaaactccactttaactaactggtagggggagccgagcagtgtattgcacaatggtcgtgtcatcccgaagcttaatctcaagggactcaccaccatagtcataagcttctccctcttcttcttgtcagctttcatgtaaaaccattcatttgtccagcaagtcggccacttggtgttataaccaatcacaggagctttggtatctttttggtacacaaaattgtaacatccgaagttcttatgtagc

SEQ ID NO: 84029 - DNA, 582 bp, Zea Mays
ctcgaccctatgaggagatcgcctgtgaaaacatgattgatgagggagggatgatccaaataagctagatcgttagatttgagcaggtaagagaaataagagatttagattgatctcgttccttggtttcaaaggtgggatggttataggagcatttgtttgtttggatgctgtaaagttttgaagtggtgctttatatagtaaaacagatttgtgattattgtatcagctcgatacaacatttatggattagcaaagttcttccttttataagaaaaaaacacttcaccgacatggtcagaccactgtttgcggtcaatggctccctccccctttctcttggaacgggtgtctgtgtaggggtttgcagtctatatatgtgtaaggctgtccgcagcggtgtcccctaaattcccccctaaatgttactatgcagccacgtcagcaagattctctgccctatattcactcatcccacaaccgtcctccctataaattcccctatgtatccctctacacattaaatatacatttccacataactaacttcattttctattttctttttttattttcactcgt

SEQ ID NO: 84030 - DNA, 465 bp, Zea Mays
agatactggtggaaggggatgaagaaagaaatagctcagtatgtggcccgatgtgacatctgccaacgaacaaaagccgaacaccaaaaacccgctggcctattacaacccctcccgataactgaatggaagtgggaagaaataggcatggatttcgtaaccggactaccccggacgcaaaaagggaatgattccatctgggtaataatagaccgcctcaccaaggtagcccatttcattccagtgaaaactacctttggaggagccacccttgcccggatctacctcaaagagatagtcagactccacggcatcccaaggaagatagtgttagacagaggaacccagttcacatccaaattctggacaggcctgcagaaagctatgggcaccaagctagatttcagcaccgcgtaccaccctcaaacagatgggcagacagaaagggtcaacaaagtccttgaa

SEQ ID NO: 84031 - DNA, 382 bp, Zea Mays
ctttgcttgtatttcgtcagacacttgtaagagtttggtaagatacattagagtgtgttcctatgttccacctgagaggagcgtgtagtgagattattagggataaccatcatcgtttgtttcctgtttttgtgtttcgatggcaggcgacgacgaggaagcaaggatccctacagacttcaatgaatgtgttagccgccaagatcttgaggcaaacaacaagctcctgaaggagcaaatggaggagacggtccacaagtcagtgcatgatgccttcattgacatgaaccttggcaagacttacgagaggttggatcgacgattgtcccagattgtcgacagacttgatgtgttggagacacaacaacaagcaccgccgcca

SEQ ID NO: 84032 - DNA, 484 bp, Zea Mays
tgctcgtgctcgtttcgtgtttgggttgtagggggcatgtgctgcaagtatatatgagcatgtcccatttaagaagttagtctattttcttaggttatttataccctatcatgtgagccctcctcccctgcgaccctataactctaattcatttcccctacactcacctcaaccacaactcctcattttctcgtctctcgtcttcaccttctctcttctgtctcgaaacttgctcgtcttggtgagatggacgtcagtgagccaccatcgacggtcgacactaccacatcatggcctccaatgctccactgatcctcttccatatcccattccccctctatcctaaattatatccctctctcgctttatctccataaccctagctctaatcctcgatctggtcaagatccacgttaaggttgctctattgtttctgcattggtgaatctggtgctcccgctgcacaagtgaacctccctttctt

SEQ ID NO: 84033 - DNA, 374 bp, Zea Mays
aattttcatacctgctccatttgccgtgtgaacttgttccgcgccatggtacttgtcacgaacaaccaatttgtcaagttctcctgttatatgatcagtagctcccgagtccatataccagtttgtgtcgacattgtatgagtttgtggcagctgcagcaacatgcttctgatctggagtgaaattttcgtcgaatctatgccagcaacgatcggccgtgtgtccaattttgccacagacttggcattgtgggcgattggtgacactacgaccattagaccgagggttattattgtggaaggaccctcgaccactttgtgtcgagctgttgaacgcccgaccaccaccacgtccgcgactgaagccgctacgtg

SEQ ID NO: 84034 - DNA, 475 bp, Zea Mays
taaatatggacaaaacttacatatatactcatatgatgacttagctagtgagtggaaataagaacctaaaggctctaaactcaggtgccaggatctgaatgtagttgccaagatttgaacacacgtgacggtgtttttctatgttggtccacgcttcccttttatagcataaggaatgagattgttgcatctatgcttggacaaccacacaacaccgaaattgtagtgccacccaacatatgtccaactacttctatcttctcgtagttgttgtgttatacgcagtgtacgcctcttgtgtgccacagtggcaagcgtgatttgtcacaataaatgtatgagatcccacgccatcgagtacaacgagttggtagcccatgtagctgcacgcactgtatagttttcgtgggtatgcttgtgaccttaggcttagctgtagtgacatcccatgtcagctagtctggcatacatggta

SEQ ID NO: 84035 - DNA, 301 bp, Zea Mays
gtcactatttgatcccatttgaagggttcagagcatcgtccccattgtatccttgaccggacatcaactcctcctcctgcaccaatgccaaggaacaagcagtatccaaagtagaaggtctttgcaccataattacagatttgatgtcctctgtaaccggtcaacaaagcgcatggtatagtatagggggtccgcattggattcatatgccgatagatgatcgactaaattggaaaaccgttcgacatactcgaacacggaactggttcgaattagcgacccatgttgctcacgaccgaaa

SEQ ID NO: 84036 - DNA, 1058 bp, Zea Mays
ctgtagcctatccttggatgctagccaagcaaaaaatcactctcgtgggagctttgttcttctagatgaaggcagatagggggcttccttgctttgggttttgagtaacttgtacatgaggcctatttcacagcatccatgacgtagttgaggtggttgtcaaggaccatgttgatgagcataaggcgtcctatgggattgaggaggctcgtttgtcaacctgtcaagtaaaaatgtatgattaatgtgtcgttttccaaaataccaacataaaaatgcataaactcacaaaaatagtagaatttttctgtgtgtgatggttgtaactactctggcggttcagtaaaaaacatatggaaaattacgtataaggagatttacacacggacagagaaactcaattggccacaaggatttggcattgacaccgttgttttggccttcacatcctcgttttgatgttcacacgatcccaagaaaagaaaatatctttaaaataaaaaacaatgaaatcctaaccctaacctaccggcccatgcccctaacacccactcatggctagtttgaaaactcaaatcccttgaggattgcaagagattgacatggaaatgaactaactttcccctcaacccccttcaatctccaagtggatttgagtttccaaactagccctcacaatatcacgcactccaccccaacaccacacatgcttggatcgactcacgcacgcgtcagtcgttgctccatgctggtaacctcacccaggtcgatcgcctctagattcacgcaccctacgctccctgagtcctcgttggtctccgctcctgaatcaatgttcttcccgttcctggctcgctggtgaccacacccccttttgtgctctgcctaggttaatggacctctggttgctggccaaggtccacgcctgtcgatgctctagggcacatcccccacaccctccatcggtcatactaggcacaataccttcccctctggtgttcgtcttagagcgaagaacctcctttcccagttggtctccctttccttagatctttcat

SEQ ID NO: 84037 - DNA, 787 bp, Zea Mays
cagccatctacccccatcaactaccttgcgtcgcctcatcgcgcaacatgccgtgcgtcatcggtgcaaccatctcctcacaccctctgctatatatttgcacacccatgcacctgctaccatcatcgtcggtgctactgtgaacttcaccctctcttattccctgcgctcagtctcctccctaccctcgtcgcgtcgtgcgttgcaaccacgcctcactagttgctctgtgctgtcatgaccatgcacgacctcgctaccttcgcgcttgatgtcagtaccgcgcctgtctcactgtaccgtggaccccacttgccagtggctcaccagcgcccacgtcatagctgtttaaccatggcgaggggcccactcgtcatccctcatgtgggaactgctagttccgcttgaactgaccacgatgcaacatgcccgacaattgcccaccccattgctcgtttataagtctctagcacctattctcccctccctcaatcccatatagcgatgtccatctcgctgcgtagcaactgcagcacagcccatagcggtcgtcgttgtgtggaggagcactgtcgttcttctcaggcgtcgctcactgcagcagctaccgcaccttctccgcctcgccactccaacgatctacgtcgtcctctttggtgaggcccttcttccccgacgagtcccctcctttcttgttgtttacagctggtcgtcgttttcctcttcacgacgcgcgccttggttgcctccatggctgcgcctaccagcgagcagacgtgtgcatcgc

SEQ ID NO: 84038 - DNA, 373 bp, Zea Mays
cttcctgtgtgttttcttgggtgtgtgcttgcattaggatattgtgaataatggtagaacccgattaagtgattattcccttttaactaagtttgtctatacagaagccaaggaaaattgatgtgtacttaactagtataataataaaggaacaaatgaaagattagagcgaatgcaagaaatgcttgcacgtgtgatgtcgtgttgcgctggttcattctagaaagtatttgtcgtctttctaatggtattgattatgtatgccccatgacgtgtagataactaatgctagtgtgtggttgtttacggtgtcttacgatttaatgtttagttcgctatcgtgtgccttggagtgtcttgtgctattttccat

SEQ ID NO: 84039 - DNA, 1164 bp, Zea Mays
aatttgtacccgagggtgtgattcaatttctatacatttatggaccaaaatgtaaatatcaaagtggtagaacataaaaactaagcacctatgtgggtaactctgaatttcagtgagattaagccaactttggagccttgtatttcttaattcatgagaattttgccctaggtgaatacatcaatcttgtagagctatgataggagtacaacttttattaagtgactaagcattggtgctgcacaaaaattggggataaatggacttaaagtctggctgtcagtcagccctgaaactgaatctagactgatagtgaactgggacagactttgggagcaatttcgagtaggatctagtgagtatttgattatggttgctatagcaaaaatcaaagctggattatagagcaacaacattgctacagatggatgattaagttaccacacaaaaattgaagaaccaagcactacaagtcgctctgtcaaaacaaccgaggaaaggcacgatggtacagtaactgaatcagatcgcctggttcagtgcaccgccgccggtgatcccgcgccgtgatcctcaccggcgctgtgattcgtgcctaatggcgcgtagataatgacttagggtgaaaagatcttgcccagggatgaggtcggggcactgttactgcccagtcgccgtacccacttgcgtcgcgacgtggccggacgatcatcgtcgtggaaatcgtcgttcaccgtgattgcgctatgccatagtcgattcaccacgttgttgcaagccgcaaggactcagtagtaaccatcgtagctcgttaatcagtgaccaccacggtagctcgcgccagtgactcaccccctctctccggtcgctagcgtttcccttccaaattcggagccactgctcaaagcttctataaattgatgccccattctgcttcgcctagttgttacgaacctaggacaccaactctcatctccgattagccaccatagccagagaatttgggttttccccctaattggtcgtctgcaccgccgtgaatcaccctgtcgtggtcagccacctccaggtccgctctcgccctcctcaccctcgtttcagcacccttgcacgctaagaatgcttgtcggctcgaccaattgaactagacagtgcttaattgcc

SEQ ID NO: 84040 - DNA, 740 bp, Zea Mays
gcctcctcaagctgttgttgggtagtctgcagctggttctctagaacttcaatggtgtggttccgttcttccacttgctcttcaagctcatggattcgggtaccatctgctcagtctggagatccttctccaccaactcagtcgatagatctaccacaagatcttccctatccatgatgatgacttttgcatcctaagctaggcccatcaagtgtgacatttccttgcgttgtagggccggcaggcagtatagtgcactcatgcaccaaactgtcagtcgagagatggctccagggtagattgctagatgtccttggcatggtcaacccggtccctccacatcgggtcatcctccttctcagtggggaatagaccgatggggtgaattgccatctccagtaggtgaaatccacaaaagatcgttagtgcgtgcatggctgtggcctctagggtgtcgtgggctcggaaaccaagggtcttagagtacaaagaacgccaccctgactgcaaggggtggggctccaaggctagccacaccttatagcaaggcactgcatgttccttgaacagctgcacggtgtactgtggaggtgtatggtatcctgccttttgcagtacctcccacagaatgaggtgaaagccctcctgtgtaaggctatcagtgtggaaaggtgcctctcctcccttagtgggtaaggccatctgtgtgaaggtgagtgtaagtaagggggaaagaagaa

SEQ ID NO: 84041 - DNA, 373 bp, Zea Mays
tgaaaccaaacttggagaattttgaagagaacaaagggagagactttgtgggaagtgaaatttgttttttctcaagagcattcatgatctgggaaaaatgatctcaaaggagttttcaaaagaattgaacttggctcgtttcacaacttacttaaccgtcgcggatccctcttaattgtacggcgattcctatgactcaagaattataaacttagcactgccgttgtttcagagcacttggagcacgccatttgatgtggaattttaaatctgctgtgctttatacttttatgctcgtaggatctgtgcttcccctgtctgtagaaatactgtgtacatactaggagcaaacttgttagaatcttagtttgtt

SEQ ID NO: 84042 - DNA, 583 bp, Zea Mays
tgctatcatgttcgtcggcgaagatctgcattaggacagcgacggtcggggaagcgagtttgatgccggcggtggacttcccattaccgacagccttcctctagatcggtctaagtataaggtggggaataattgagactgtagctactgaacctcgtgctgattactttcccggcagtgagggatgtggttagagaataccttgtggagcatagacggcttggggtgcgcgatatccagcggtcgcacctgggtcaggttttggttcagtttagcagcgtgcttgaaagagacaatcttgttctgctcggtccgcaacagtacctcgatgcttccttcactgctcagcggcataatgatgcttggaatcatagagcccttttctttaatcgggaatgctggcttatgttgttgggattccctctggattaccgttcatcagaatacttgcaggcagctattggctcttttggcagattgattttgtgggaagaggacagacgcaatgtttacaggactttgctcagggtgcgggtcacgtctctggaggaggtccctcagttcattgttttttcagaagctg

SEQ ID NO: 84043 - DNA, 511 bp, Zea Mays
ccgccactagctgatgtggtttgtactaactctcatcagctagcccaccagctaaagggagttagttaactcatatcggtcaccaactcaggtcgaaggggtttaactaactcccgtcggctaccgtcggctaagggattggccgacaggggttactaaattatacgagccatgctagccctcgtgacctctccttccacacgctcaatgctcttttttcccatgctcacttagccaccgtcctcacaccacccgcatgcgcttagccatcgctaccgttctcatgagattggtctgctcggaccgccgctgcaccgtcctctgctccgcatggaccaccctgcacagtcatcctattctccctaccacaacgttgcactgccatgcacccggtcacgatgccacacccccgatgccgccctgcaccgtcgtccccagccaagccactaccaagccccgagccctgacgacaccgaacgctaccccatttttggttgcttggaggtatgga

SEQ ID NO: 84044 - DNA, 642 bp, Zea Mays
caaaggtcgatgagtggacatttgacttttatttggatgagtatttgccacttgcttcccggcttgacaagagctacacaatttgttcttctcaaacttcacatcttttaagccacgaactaagtcatgcttggttaactgattgagttgcttcattccaacatgaccaagtcttctatgccataaccaacctagtgaagctctcgagaataagcaagttgtgagctttgcctcattagatgagaaatcaacaagataaagattttcatgtctaaaacctttaaacttaagattgctaccatcaacattagagataataacatcttcaaccgtgaaattgcaactaaatcctaaatcacataattgagctacggatagtaaattaaaattcaaagactcaaccaagagcacatttgatatagaatgatcatttgaaatagcaattttacccaatcctttaacctttcctttgcaactatctccaaatgtgatactatcataatttgagcaatctttctcactcatttgggtgaacattttcatatctcctgtcatgtgttgagtgcatccactatctaacacccaatgattccctcccgccttgtagttcacctacaaaaggaaatcaatctcttttaggta

SEQ ID NO: 84045 - DNA, 375 bp, Zea Mays
agcacatgatgaatttcatctgactggagctcttaagattcttcttatgataattaagagcgtatgtgacagaatccaaagttaggcctaggaatttcaaagattctgatgccattgccaactgaagactactcaaatagtaagtttgaaacgtgggccacagtagcaggggtggcacataatgcacatatgcttggagcggtagcaattttaccgcctgtgattggagcacttcagacttcacatcgtttggaaaatcacatatggctgtaatagacttgtagaaagttgggccggggtatttcacaggttctgatcatgaattcctgaatgcagagaaataaactgaggactagaacaaattagcaggtaagg

SEQ ID NO: 84046 - DNA, 502 bp, Zea Mays
ggggacgccacatgcacggtccgtggtcgtgtcgagtacagtagtgtacagccgggtaatggacgtgccgatcgagctggatgatgcgtgtagcagcagatcgagcctcctgattgattgatcgatcgacgaaacaagctgtatgctgctgtaccttttctcgcgagcgtgccagcagcattattgttgttcctctcgtcattacccatctgtggctgtctgcagggggttttaaaatccgatccccgccgttttgcctttagattccgtagcacacatatgagtttgtttgttttaagatttttttttcttttgctgtggtatacatttatctgctgatgacgtaattattggtttttacgttattggtatacattttttcttggctgtccccttttttttgctgttttgtttctattgctgctatctatttcctttccttgctgtttttcgtttaaccacaagtcacggcattgcttttggcgtgtgatgtgatttgtga

SEQ ID NO: 84047 - DNA, 348 bp, Zea Mays
aggtgaacttgacgcaccgtaccattgtgttgctactaacttcggttgatctctatggcttagcgctcagtcaaggaatgaccctgatgccgccatgtattttgacagggcacaacaacctattggtcatggccctttgtcacatcgcgtgaaataaaagacacgacgaatgctaataaactctaagcatagggtacaaagacaactctaggcatagggtactagacactacaactgcatgcaatgaccagatggatactttgagctctgatcatcgccatcctagtcactgaaaccactgatttcttgagttgtgcacccgatgcagaaatgctattgtcaattctg

SEQ ID NO: 84048 - DNA, 447 bp, Zea Mays
aaactttgttgagactctagtttcatactatcttactgacaagctcatcgatctcacgagtgtaaaaaaaattaaaaaaaaaacagttttacctttgcaaccttagagtaaaaaacaaatcttactttctgtagcctttctgaagccatgccagcagaaactgtgttttagttagtcacacaaggatgatagttccgtgattgcagcacttgggtggagctctggaagatgctttcaccacaacagatcttgtagctagatgcgtccatgcatccttgctcagttgctcagacaaaaaagtgttcgcctttaaaattatgaaccctatcactaggctacccatatggtaggctcaggatacacatattctctgccattgaatagtctttgctagcaaatcctgcaaaatgtgaacgaacagtacagaagtttgttttggggtttcta

SEQ ID NO: 84049 - DNA, 469 bp, Zea Mays
cgacatgatgacacattccatgtgacactagacagggtgagggcagtggagagtacatgggccgatggcgtatatatcgactaagcgtgagtaagatgtagtagcgccacttgttaagtaggagaacacgagatcaagggcgatggggactgatgccttgatgttctagactgtgggcacttgcgcatgtaggtgggtgatcatagtaacctcatagtcaacattttggtcctcatgatgattgtcacgatcaaggggtggaagggcacaacatgcacgagcagggcctcttgttcgagattatgctcgcgctggagagcacattagcctcatgcatgcactctatgtagatgcggcagtggtgatcgcaacatcatctttggtggtgcggatggtggcatcgatgcatacctatgcatcaaccaaggctgcgaactccacttcttacttttgggcttcttgagagtca

SEQ ID NO: 84050 - DNA, 481 bp, Zea Mays
ggccgatataaaagaataaattggtagcaataaaataaccaaagatggcatgcacgaaaatgatgatctaactgaagatcatgagtgccacaatcatttgcagcctcacttaatgggatcatattgggggcagattgagcatcaggcacagttggcacgacctcgacaccacgatcatagttttcctctttagggcgagagacaactaacaaacaccataccaccacctcaatgacttgcttttgggtcttcatagttgatttaacataatcatcccactctcgctgacactcaattggtatgataagtctttgcacgttgggtggaggacctacatttagcaccccatcaacgatgatgtcatcaacaacatgccaaccgatcttctccttagccctagcaaccacctcactaaaggagggtttatcatcgaatatcacagccatacgttgcatgtcaacgaactcaacatttccataac

SEQ ID NO: 84051 - DNA, 640 bp, Zea Mays
aaaaaacaggagaagggataaccacatatcaccatggtggagatggatcaaagaagcgagtagccagattcatagcaaagttttcctccccagggttagcaggaggagtgtcaccagatggatcctgggggagggtaagaggaggggcccttgatcaccttggtaaggaggagggacaaactgatctgcatcatcaataaagaattcttcctcaacttcttcatcatcagcagacatgaatgggacaccatatgcctgttggtgccattcatttatatcaggaggtggtgcatgaaggggcacatcgggagatcgaggagcaaatgggtgacccatggagactgactagcgacacagattgtcattcgtctcccactggcgcctagccagctcatgcacatcagcagagatatcccggcacatagagaaaaaggctgcaatcccatgagccaaccgagctccaagaccacgaccacgacctcgaccatgacctcgtccacgtggagtgggagtaccatgagcggaggaaggatgggtgggaccagctgaagtctgctcacgagaactggcaggagcctttttcatcctgcctgtgggattattgggatctatccaaaaaggggtgtaaggaagatgtctg

SEQ ID NO: 84052 - DNA, 330 bp, Zea Mays
tccatcttatcttaaaggataccctcttaccttaatagattcatctcatcttgaaaagatgttatcttatcctaatagatctaactaacctcatatcttaaacgctctaatctagatcccatctaatctaatacaatccaatctaaagtgagttatctaacatgttagttaatcttggtgaaatagattagactctacttctatagtcatgttttaacctaaaattggtgccctatactaacttggtcgtatacaaccaacctgacctacatgttgggttgcataacctacctaacccgacctagaagcaaaacagcaagacagattctg

SEQ ID NO: 84053 - DNA, 350 bp, Zea Mays
tgaatggtagcattagtaagaaattccttacttggggcaaaatattagagaatttgtcttcacatttggaaggtttaactagtgctataacaaaacagtttcgtgtcaatataatgttagaaacttacatagctcagctggatgctgctaggcccaactctaatgcgggaaagcttctaggtcaactagagctaaccctaaaaagaagtttaaatgatgtcattactaggggtggtaggtctacttaggacccccacattcttgtactttagggaagcagtgggacaagacacctaggaaagagaataataaggaggtaagcgacgagagacaatcgccgccgagggagg

SEQ ID NO: 84054 - DNA, 1379 bp, Zea Mays
ctcgatcagaaacaatggacttgggcaccacgtgaagcctgattacttccttcatatacaagggaaccagctctaaagatgaattggtggtcttcatgggaataaagtgcgtagacttgatcaagcgatccactaccacccatatagcatccctgcctcgaggagaacgaggtaagcccaccacaaaatccatggtgatatgctcccacttccactccggaatttccaatggcttcagtaaacctacaggcctcttatgctcggccttcacgcgctgacatacttcacaggcggccacatacttagaaacgtcaaccttcatccgcttccaccagaagttttgcttcaaatctctatacattttggtttcgctagggtgaacggtgtaaggcgttttatgagcttctctcaagatatccatcttcacctctgatttctgaggcacacaaagatggcccctgaaacaaaccaaatcattctcattaatggtgaactcctagggtttaccatcgccaaccctctttcgagcttccagcaataaacgatcctgctgctgagccacacgcactctctccatgagggaggattgaataagcattcgagtctcctcactagcggtgccaacataacacaaagcgatccccaaatggtccagatcaaggcaaggccacttttggaaccccagacctgctaagggcatcagccaccacatttgccttccccgggtgataatgaatggacaaatcataatatttaatcaattcgagccaccgacgctgcctcaaattcagctccttctgagtgaaaatatacttgagacttttatgatcggtgtaaatgtcacaagactcaccataaagataatgcctccacgattttagagcaaagaccaccacgaccaattcgagatcatgagttggataattcccctcatgctttctcaactgccttgagccataagcaatcactttgccttcctgcatcaacatacagccaagaccaattcgagaagcatccatataaaccgtgaaacgcttaccactctcaggcaaagctaggataggggcgtccaccaacttgttcttcaatgtctgataactgacctcgcaagcgctggaccagacgaaaagaacacccttctccaagagtctagtcaatggcttagcaatgctagaaaaatttggtacgaagcgtcgataatatccggcaagccccaagaaacttcgaatttcagagacactagaaggtctcttccactccaccacaaccgcgacattcttgggatcaaccgcaatgccctgctgattaatcacatgacccaggaaagccacttcggacagccaaaaggcacacttcttcaatttgccataaaactgatt

SEQ ID NO: 84055 - DNA, 803 bp, Zea Mays
ctcctccaagtctccaactcacgttatgccaggttagacaaagattttgatttttgactcacgtttgcatctcatgcttatatcatatatcctttagtattttaattttgttcaatgttcacgaatttgatagggaaccaaagtttgatggaacggtttttgaaaagaaaattgcctccagctagtgactctaatgatcctggtgccgatggagagacatcaagaaggggagcaaatgcatcaaacactaaccttgaccgtacagcgagtcatcgtcctttgcgagtttcacgaaaccaggtaaactttgatgagcttccttacgatccagcagatagaagaagcatatctgattacataggacaaaagctccaagatgaaattagaaagaagtatttgatcagaggtccttttagaccacctgttggctttaaatatccacagaagatcatagcaggtcatgcacgtcggtttcaacctgaatggttcacaaaatatgattggttagagtacagtataaaagtagataaatgtttttgcctgcaatgctacttattcagagatagcaatgagggccaaggtggtaatgatgcatttgtaaaagatggttgggatggctttaacaaattgaaaaggctccaagatcatgtaggcaccggacctgacagttttcataacacggcagtaaaaagatgcgacaatttgatgaagcctaatcagtccattgatagtgctattggcaagcaacagaatatcactaaggagcagtatcttattagattaaatacttctattgatgccgt

SEQ ID NO: 84056 - DNA, 319 bp, Zea Mays
tgtaagattgcaaaggtaatagtattttacaagccaatccttcattctttccattacattaatttatctacctaaatacattttttacaaaagttacaagaattttcctaagactacatcaaaatttcacagcttcacttcttcactcttcaccgacatcagcctgaaaaatttattataaaaagtgttttagcagtttgaaacagagaaaaacagaggtcgaaagctaagaacgttatttcatacttcttcaagaagagctcgagcttcgtttccggctagttttcggtcgcccttcgcccagatccgggtaataaat

SEQ ID NO: 84057 - DNA, 3366 bp, Zea Mays
ctaccacgaagaaggtttctcctagtttccagatccttgatcaaaaaatgagttggaaaatattctagatttttcttggcttggggaacatggaggatattattgagatgcaaggatttagcaggggtatcaataacagcattaccaatattgctaatgttcatacctgccccactggctgcgaggatctgatctggtcctttgtatgcgttttagactgtcagcttatccagttctgaggtgatgtgatctgttgcagcagtatcagtgtaccagtttgtatcaacgccataacctgtgggtagcagctgcaccagtcttgctgttggacgagtagttctcatcaaatctccaccagcaatcaagagcaatatgtccagtcttctcacaaacctgacatatgatgtcagactttctttctggcatctgatgacaccattctttgggcactacgaccatgacctcctctgccacgaccagaaccattacggccatgaacacaaggtccatatctaggtccagatctaccacggccacggcgagcagcattgaccgaggcttgtatccctccgtgaagcagttccatcctgttctcgaagctgagaagctgagaatggacatccccgactgagacaggttccacacgagcaacaatggctgatacaactggattgaattcttcatctaatcccgccaaaatacacgagactagttcatcatcaatagcctgcttggcagatcccatctcatctgcaagagatttcatcttggaggtatactcagaaacaatcatgttacctttccgagtagtagctagagcaattcgcgtgttgacagttcatgtgcgagactgtgatgcgtaggtttgctctaggagagaccacacatctttgggtgtggtacaggaggcaacctgacacatgacttctggagtcatggtcgtcatgaggaagccaaggacctgctgctcaagcgcggtccaccggataaattccggattgatctcttctgtggtcttgccatcagacttgttgggaatcttctcctcaggcgcggcaagggaaccatcaaggtatccctgcagttgaacgcctctaatgatgggtagtagaacctgcgctctccatagcacatagttcgtcttgctgagttttatagcaacaatttgccctagaaggggtgttggcacaacggtttgggagctggacgccattgctggaattggtgatagatggcggctagggttaggatagaggagaggctccaattaccatgtgagaatagcaaccacgattggttaagcgtttctacttgcagagcagaccgcattgatctatttatataggcagaggattgccgaggataacatcctaaggggataactctgcctaacagaatctgctatattttaggctaatctatagcagagttatcccctgaatatctacgtggttatcttatcagataagctacgtttacacagcagaggcctacgaccagattagaagctattcaatctaacacaccttacagtgttcagtaaagaaaatgtagaaatgtgtccattacaacaccaaaaagactaccaccctacaacccaggaattggggctgttaggagagagaggctcttggcccctgccatcgcccacaactccctctcttccgcagcccttcttatggatgcatctacatttggggtgatcttgtcgctgttcctatggttccagatggtccagaaacccaggattattaaggagttaagccccttttcagctatgccttgcacctgctcgctcgcccttctccaccattccatagccttcccttcccttggctgaggagcatttccttgaaggttgacctgcccaagcaatttgcaccaaaattcccttgcaaagacacaaccaacctataagtggtctattgattcctcatcttcgtcacaaagtgggcatcttttaggatgttgccgccctctttttttcagtcgatctgctgtccagcacctttgaagggcagctagccaaaggaagaacttgcatttcgggagagcccatgattgccatatctttccactatgttcaaactaaattgaacaaatgaagaggctctcataagcagccttggctgagtatttgccatcttgagcaaatctgaaaatgtgtttgtcctccctttccgggtgcagctgaacggtgcttaaagtattccaaagggtgagataatcagccaatacacctactgttaaggcgcccttgatgtctgctatccatctcatgtccatgagggcatctcgcacagttctactgctagctgtgcgtttagggacagcagccagaactctgggagcaagatcctcaatactttttccatgcaaccagcaatcctgccagaatagagttgaagtgccactgctaatttcagccagcaaggctgtagagaacaaacacttaaccttttcggggaacttcatgggcaagaaggaccaaggtttcctgtgatctattttggatagccacaaccatctcattcgaagggcccaacccatttccttgaggctaaaaattcctaatcccccaagctcaattggtctacaaaccttaccccatgccactactcctttgatttccttcctgccccaccaaaggaaaccctttcctgatcttgtcaatggcctttaaggcccaagggggtagctcaacttccatagcaaggtaaataagcatacctgtcaacacaaactgaacttgcactcttcgaccagccctcgacatcagctcaactttccatccaggtaactgatttagcgattctatccacaatagtctgcacttgactccttgttaacttttttaaggcagtgtttatcctatttactgtggtgaagatgagattgctattattcgggaacaactcccttgtgaagtttccttaccctttttcctgtggtgaagatgagattgctatgatacaaggttctcctacgtgtttgataaaaaaaatcctaagtaaccatatatatctaggcagttaaagaaaacaatcctaaacattgtatatacgagattaatacagcatggggtcaaaagtgcatgtgtcgaatttgctcctacaatgtattcttcgcatctgttctttaaaacaaaatacaaagtttaaggctttagtgcatgtttttttggaaagcgcgggagagctgcgtttcattgattaaagaaagaaagaatgagagaagggaacacacacctctaggacaatagaaagaaaaaaacacacctgacccgaacctaaccaggaactaattagttccacaaatgcctaaggcttggagatttttggctctagccaggcaccataggctgtg

SEQ ID NO: 84058 - DNA, 725 bp, Zea Mays
aacaagtacgcagatcaaaaatacattggaatgccttcctagcaacagtgtcacgccgtcgatcactcattatccaagtcgatacaaggacgtcatatgggatgcatcggatgttcaacttctgctggaataaattgatagatattattacacaatggatagatataattacaaaagctgagaatataattgtagtaataacaattattggaggtttgtaaataactatagtgtaacaacagtatcaaacaagcataccaaatcatattatagaatgtaacaattgtgtattacatagcagtgattatgcacccctaataaaagctaaacaaagtaaatatatggattgtacctgagatcttctgggtgtcctctgcttaggtgaacttgttttcataatgttctttgtcttcaaatcaatagcagactttggactgcttgacttaattggaacttgtggtggtgggttgtccatgaatgatactcgagacttttatttgggttagttgctgaactggaaggtttagctgatttgaaagagcgcttcaatgttggagcaagcataaaatcgttgttagacgatgcggctggtgttgtaggctgactttttttcacacggcatgctagcgccttcctacggaaacgaggaattggtaatggctgtggatctagctactgcttggtctgggtatcatcagcatgtttggagcagctgctagatcttg

SEQ ID NO: 84059 - DNA, 970 bp, Zea Mays
cgaatccaatggtcacaatacaacgcgcgaaggggtacgtaaggatctaatctcatccactggtggttgatccgacgactcacgcgcatcatcactcccacggccgaaccggtatgccaggagcgatcccagccgcctactatggatctagcggtcgtgacatcatcttcctcccgacggcgcaacagccactagagcttagcggggcgcggcggcgcgccatcggtgaagcaccgccaggcgtacatgagtgccaaaccaaaaaccaccatgtgcaacgcaacactgggaacacgtgtgactacatggagagcatcttaccgccattgaattggtgaagcatcccagccacgacatgaggcggccgacagcgaagggtttgctccgttgaggaatttcggggtcattagccattcatccaccctgtcacggccacgagcaccacccccgagatccccagtcgtcaccaggctagaccatgtgccccgaacggcaacgcaggcaagatcccacggcggcagcttcctttctctcactggtcctctctctctccgcctccgacgaggtgcacacgatatgggattagctcttgtgcttgagcgaggtgcggtgatatttataccctgaagtcctagtacgaaccacccgcgagattcccggcactggcagccatggttagctccgaccgacaagcgttctgttaccggagaaatcggggaaggttcgatgcaacccattcagtcacgataagacgtttccaagtaaaggggggaaatatatcaggcgcctggactcttgcggtaaggaaaccacccgaggctgagaagcagtccaaggctagcggcttcaggtgtgcgcttcgctgcgctgtgaggaaagggacgaacccgacaagcggagcccacctagcggcgtttgaaggtggaggcgagactggtacgtgggtcctattgccaaagacagccgaggg

SEQ ID NO: 84060 - DNA, 371 bp, Zea Mays
cttggacttgcagaattttatcgtcgttttatgaaggatttcagcaccttcgctgccccattacatgagttgaccaagaagggtgtttcatttaattgggggcagtcacaagaggattcttttgctctttaaaagagaagcttactcacgcgccactactccaacttcctgactttggtaagacttttgaactcgaatgtgatgcaagtggagttggcattggtgctgttttgatgcaaggaggtaaacccattgcatattttagtgaaaaattgaatggtcctgttcttcattattctacttatgataaagaattatatgctctcatacgatctttgcaaacatggaaacattatttgtggtctaaggaa

SEQ ID NO: 84061 - DNA, 438 bp, Zea Mays
tacaattcaagaatcgccgcgttctagagacttgaattatcctaacacttcaccatttgttagagttaaatcaataaaggaggactaacaagtagactcactaatttttatataagttaattcacacgcgagaactaacatacacatttaattaacgcattcaccacacgaacacagtttctcgccgcacactagtttctaacatgcttttcacataactcgtaattcaactattcactaacaataaatcatccacgacaacttccacagcaaccgatttatttatttggaacaccgcctgcctagcgtaccactagttcccacattttgatttaagctaaaaaatatagcctttattcgattatacaacagcgacctaagcgtcacgttacccaaggcatacatccttcctcgttgcgagtataaccatatcacggc

SEQ ID NO: 84062 - DNA, 697 bp, Zea Mays
gttaagtaccagcaacacgctatgggggtggccgtgtagcgattttctgaggaagtcaatgacgaccgcaactcgatggtacatgcagagcatgtcggagacataagggattgcttaggttcgagccgcactgtggcgtaataccctacgtcctatgttttctgtttgtgtgtggttgagttctctctatattaaaagggatgtctagagaaagaagatgagttcgttgggtgtctatatcgtttttgcagggtcccctctttagcctattggcaattgagttggggttacagagaaactaccatgagtccacgatctccatgttccgcttgttctgcctctcatcgcgctgggctatggtcaaacgagtcatccgccagtttctgcacgttgcatgtacatgacatgactgacttctaacctacgagcacctgcgtcttcctcggactccaatggctcccttctgaccgaggcccatcaggtagctttcggacagcccataaagggccttttggatggcccacaaaacatctccgggtcgtggtgtcccgtgggatatctattccccacaatgatgctggagcctaggcgggtacggtgttcagagtcatcgggctgtaggtcaaccactaggcatggtccttctagagacgacttacaactacgtacgcatcatgttagcttgtttctctagtac

SEQ ID NO: 84063 - DNA, 498 bp, Zea Mays
gcaagggtcctcggtcgtttgaaaaactggctaatagtcccgcgcactatttcaatgggtcactgacatttacaccgagaccctccactttctaattcttcacatcgcgcaatccctagcggtgaatggccacggaccgagctccagcgagctcgtactggctggaaagggcaacaactagggctctagcttggcggacacttaatttaactcctaaccatcattttccctcaactaatttcaagattcaaggccttattttccctgcccacggtgacagcgcgatcaacggataacaagaagtgttcccagcgatcttatgggtcctagcttaattggatgggttagggagtatcaagagcacctaaggatactgaaacgaggaaccagacgacatgaacggacctgtagcacgctggccacgacgaggtcacttcgcgcggtgctctggaccgatttgggggaagtttcaaattggcgagctctggtggatgattt

SEQ ID NO: 84064 - DNA, 471 bp, Zea Mays
cagaaacttcttgactcccgagacaacttggacaagttgtaccgggatgccagtagctccctcaccaccttggagaggagccatcgcttcaccatgacagagttggagtgcaagagggatgagttgaaagagtccaaggatgaggtgtcgaaactcagcaagtccttttctttgaaggattccattatcaaggagtcgtatgcctcgaagaaactggtgtcacaagagctggaggctgctcgtcgcgacacggaagccgcctgtcgtgatatcaaggtcttggaggacgaccgttttatcatgaaggcatggtgtgacaaggtgatggataaggcgattcgggctggtcgggtattgatgaagaggcctggcgtcgtggtgcctgatgatattgcagctgatgtactcactgtatcgggtgcttcaaattatctatctgcttctggtggacctgtagacaatgttcctcgc

SEQ ID NO: 84065 - DNA, 757 bp, Zea Mays
acaacgtggtacccagaatcaactagtggaatataaaaatcatcgcttgctgatgtcatagagagacagatttctgttatccgccgctaccatatagctagctagctagctgtatattaggtctagctaggcggttgggtgctctcagcaattacttactagtcagacgaacttctttttagtatattaattgttgaaaggtttttattatgtactaattcctttcttattagttgtctgtgatattcttggtaattcacggacctgaacacccggtatagtagttgactgcgccacttcctatcatgcatttgtttgtctattctccctgcttttcttttgccttccttaacttgcttgctagctagctagctttctgatgttaacttcattgacaactcaaaccccgctttgggtacgtaggggtgcagtggtattttcttcgcccacttgtgttgtaagcagtgactttgcaaatttttcgtactagcagtaataaactacaactagttaatatagtcaacttgcttgccgctgtagcacaaccgtaccccgccccacatgggatctatatgttgttcatgtacaaactgagatgagaatatgagtatttgtaatttctatttctacgagttaattaggtttaataaaggctataaaacctaaaaaaattctactaaaaaataacatgccagtcctttaacatgggagatgggacagcagtatacccatgctgaattgaaggtggcaacaagct

SEQ ID NO: 84066 - DNA, 430 bp, Zea Mays
gtggtggctaacacctaggacactaataggcacgaggggatggtggagcagatcgtgtcctcgatgcggttgtggaccggcgggaaatgtgtctaggacatggggactcgtatggagtacactacccgtgggtgtttcaatggttgagtctcaaaaccaccatgtgcaacaattcgtagatttcactatgcttgggcctcaaaacctggtagcaaggttctggagggaatcgaaagcggtatgtagtgtcatcatgaaggatgcgtcaaggtgatctagcttcgtgaagattgccatgttcctcatcaaagaagagttcttgagcaaagcctctgatgtgtatgcattcttgtgtactatactgaccatgcaaataatatatgtattttccctccatgatgttttagaacttgttgaagccttccttctg

SEQ ID NO: 84067 - DNA, 406 bp, Zea Mays
tttgggtgaacatcctcatatccccggtcatgtgttgagtgcacccactatccaacactcaatgattccctcacgccttgcagttcacctacaaaaaggaaatcaatctcttttaggtacccaaacttgtttggacccttggatgttagtgactaaggtatttgacacccaaatggctttctttttattgccaacaattgaggtaccaacaaatttagcatcccatttgcattatgagtaaggacatagcaatgatcaagatgcatggaggatacattcttggacttatgacaatttttcttgatatgtcccttcttgtggcgcttgtgacacattttgtcacattccttcataaatatggaattttgctttgcaacatcattcttaccctttttaggaacataac

SEQ ID NO: 84068 - DNA, 460 bp, Zea Mays
gggagcataggtatccagctacttattatgtgggataagagatggataggttagggcaagaatagattatggcaggaaaaaggctttatccaaaatgtttaagtcttgattcatctcgagattcgctttgattgttatatccttccttgtcgatgttgatcttttcttcttcggtcttggtctcattgattcgaggttaatgtatatcatcggggttggggaatatggttaagataaatacgggtgagctagactacatgacgtaggtcaaaaatttgtttgatgttaggtagggatagacagattatgcaagctatcatgactcttttggttgggttaactctttttgctcacggttgagttggtttaatgcactaatttaggtttaagtgcatgaggggagaacaaggtttataggagtaggatctagtttatttcactagtgttaacttgttaagtg

SEQ ID NO: 84069 - DNA, 386 bp, Zea Mays
tggtgcagcaccaaatcaaacttatttaaggaaacttgttcactaacttatgatctccaatgtttctatataattcatagtttaaaacctaatggaatggccacacaagtgctctaaacagggcaccaatcgctgaaattcagttgtctgttaactgaacaaaattcagtccatgtaaactgacaacccacttttgagtaacttttactccttttctgggtcagatcaagcctaactcacacaactaaagttgttcactgacatatgctcttcaactctcccatagcaaccatggtccaaaactgcctagaacaggcaacacacaaccccaaaatggtactaaaaacactgatttcaaacttaggcaactattcaaaatctgaaaa

SEQ ID NO: 84070 - DNA, 888 bp, Zea Mays
cccggacctaaaagcctttcctaccagagtccttgacgctgcatgtacgctacaatcctcggcatgaatctcatctaacagctattttctagttgccgagtagatgcacttcatgaggacccctcctgcacctcttctatacagcaggccccctataatggtatagtgggctgactgtcttgcaatgcgctccgccgcagctttgttatctggttcttccttgttttttaagtatttgatgattggctctctctctagacattgggatctgcctctacctgactcaggacatggcattcctccatctgatctatggcaacactcggttgctgtatttcttggacaaaaaccccaggtggaacttgagcccgactggaccccagctttgacagtgcgttagccgctgcattgcgatccctttccacatggtggaattctaatccttcgaacttgtcctccagcttccacaccgctgcataatatttgcttattgagtcggtcgagcaatcccgatctttgtttactttgacttatgaccaccagtgagtcgtcgtacaccattaatttcttgatgccgagtgaaacagcgatgcttagcccgtggaccagtgcttggtactctactgcattattggatgctagaaacaagagctggagtgcatacttggagttgttctcctccaggagcgataaagagaatccctgctccttccagtctcagcgagccattgaagtacatcctccatatttcagtgacctctagggttttcaggacctggtgttcagtccactatgatatgaagtcgaccagtgcctgagtttttatcgccgtgcggggtcggaactctatatcatgagctctaagctcgcacgcccacttggctattc

SEQ ID NO: 84071 - DNA, 320 bp, Zea Mays
gtgtgacagaagtggtatcagaggtatgctgaccctaggccgttagattagttagaaatggaaagcctagtttgttcaaaacttgctaatttcatccttataaaattattttatcagccttacctctttaaaattcaactgagttgacatttctcttgtagatggttcgtactctccaaactacccgggtcaacaccaactacgcccctccgccccggcaaatccctgtctacccagtggtagtcgaggaagttccggtggatctccctcacattcgagtggagaatggagtcatcctggaggacagctcggaggaacat

SEQ ID NO: 84072 - DNA, 378 bp, Zea Mays
cccccactaggtgctctcatctgccccgcgcgaccactctggtcggcgcaagggaaagcgagagtacaccttcggcaagcacaagtacaatggaggattcgacaagcagatgctcaagaagaagtaactctagaaggccaaggtcaaggagtgtgtcttcctcgcctccctcagcgacctcgaccacgactccgacgacgcagcgtcttcctcgagcgatgaggagaccgataggtgagtcaaggacaagctaaatggactttgctttctcgccgacacaatagacagtctttgcaccatggcgcttggtgatgatgcagtgggcagcgacagttatgacattggcgacggctctgcttctgaggtatctcattccgc

SEQ ID NO: 84073 - DNA, 768 bp, Zea Mays
ccgcgtttgaagctttatatggcagaaagtgcaggactcctctatattgggatcaaactggcgaaagacaattctttgggccggaaattatacaataggcagaagaacaagtacggttgatttgggacaacttgagaactgcgcagtcaaggcagaaaagctatgcagatacccggagaaggcagttagagtttaaggagggtgatcacgtgtatctgaaggtgtcaccgatccggggtatgaagagatttaaagttaaagggaagttgtcccctcgctttattggacccttcatgatcctaaagcgagtgggtgaagttgcctaccaactgaaactacccgaccatcttatggatgtacatgatgtcttccatgtatcccagttgaagaagtgtctcagggtacccaaagagcaattgcatatagaggaattaagtgtttaggatgatctgacttatactgagtatcctatcaagatccttgatactttgactcgtgttacaaggagtaaagtgatcaaaatgtgcaaagtgcgatggagtcatcatggagaagatgaagctacttgggagagggaagaagagttgcgaatagaattcccctatctctttcctatgtcatcctaatctcgagatcgacattcttttcaagggggtagaatttgtaatacccaatttgtaaataataagaacagagtggatctcattatatgtttttccctgtactcattataaacatgggaacaaccatgtctaaagtgaacaaata

SEQ ID NO: 84074 - DNA, 484 bp, Zea Mays
ttgtctttggccttccatcgaaaccatagccatcttagtcttaaagccctcgcaaaacgattcaggtctagaatgcccaatccccctttgcactttggcaagcaagtagtagaccagttgatcagacagtggcccccgttgcatgattcaggattacttcctttccagaggaaacttcgtcttatcttatcaatttttttcaatagccatttttgagccgggaagaccgtcagatgataaataggttacgcggataacacagatttaactaatgtctctctacctgcctttgagagaagccttcctttccatcctgcgagtcttttaatgattttatcaactaaaggttgtagctcaattcttttagcggttctgaagtgaagggggagacccaggtatttcctgggtaacttagcgactttactggggaagacttctacaagatttggccacagctcctccgggtaacggatcggaaaaattt

SEQ ID NO: 84075 - DNA, 482 bp, Zea Mays
gtttccaactcagagagatcatgtcgtagctcctctcttcagtatccaaactcaggagtccttctaccgcacccagctgacagctcagatcgccttgagggctcaccgtcgattaacctgacagctttccattcagtagctggtacagaggttgagggccacatcacatacctaccagttctgtactcattgctgacttttggtcgatacaaagaggagtaggccagagtattttatgctattgtttagattgactccggccatcagtggatgaagtttcgcttcgagcatgagtacgtcactatccatactactcaaatcttagagctctttggattccctaagtcgtcgacgaggctccacagtctttgttatggtaactcagaccctcctcatcgccctcacggtggagttgctcctaataccgctcacgtcgcaacactcttcaggccacccttcatagataactcacggtgctctcc

SEQ ID NO: 84076 - DNA, 606 bp, Zea Mays
aaggaggacataagaattttatactggttcaggcagaatgtatgtatgtctagttgggtgacttgtgttaccctgcactaaataagtatgtaaagggggggttacaaactaggcaagagagggacgaactccaaagtctttggtgattcgattgaggagtgaagtcctctgtgtgttacaagtgtacactgctacttgtgttcatttttctttggtcgtggtactgcccttcctatcatagatcaaggagaggggtgaccgtgttacataaatctagggttgggtgagatggacgatggtcgggtcttgtcatgttgctccttatcctccatgattcttaccaaccgaaggactcctgtgaatgacttctccttctttcgttagaacactatggcgatgccagggtcgctgttaggtgttgtcttgtcttcatataggttgtcccactatgttcagttgacctactaagagggagttgttgagtttgtaccacgaaatgccctatgatgagtgaggtctatacattgacataccaacccctatgtcgtttttgaaccgcacgcctctgttagaacctgacctatgcgtacccgtatctagaactgt

SEQ ID NO: 84077 - DNA, 326 bp, Zea Mays
tttagatcctcaatctctgtttggttctaagagcaagtccaagcaggtaaccttgcttgtatgctgatgtggcacactgacatgagcttaacctctctcctcttttccctgagctccaagtctgctctctcccaagctgaaccacgggtgccggcggctccaccacagctcctcagcttgaggttgctcagaggccacgtgtcggcgaggcttcagtgggcacacatcatgcatgccaatatggtgtgggctgctctggcaggggaaatgtgctggagtcaccctcgctgagtgggttgtgcccctggctgcacgcctgaatcaaa

SEQ ID NO: 84078 - DNA, 519 bp, Zea Mays
gtgctgctccaggtggcagggccgaggtgcctcttccagtcagtggtctttctctgatgaagtggatgtgcatgaagtaggattcttttgatggcagtggtactccggtcgaggcggcagattggctaacttacgtggaggataagatgaatgtcttcgagattgtgtatggacatcgggtttgctttagcacacagctactgaagggagaggctcaaatttggtggagaggcgtgcaggcagcgcactcctcctcactaggagtcctatcttgggatgtcttcatgaggcagtttgaaaggagattctacttggtcaccttcctggagaaaatgaagattgatttgcagtcctacaagcaggagaagaagtctgtcacagagtatgaagtgggcttcaacaagatggtccgctttgcccctcatgtggcttataatgagatggagaaggcgagtcagttccgtcagggcctgaaaccttccaccaggcatgccctgggagcctgtccgttggtggact

SEQ ID NO: 84079 - DNA, 667 bp, Zea Mays
attttttcttaaaattccgcgttcacgcccctgataagactactatggtatgtaggttgatatcgcatatgttacaaagctagacgcaataagatattgcgccgagctattacgtcacaaattgtatgaacgtcaccttagcattaatcttgatatcacggtttatgatgtcgagctctaattcaaatgaccttagcatgttccttgacttggcagatctcatttgtttctatgatacaatcagatagaagtaagtaatgcaacaaaagttaaagtgtggatattaggtcgtcgacagttttattaagctccacaaataggagctacatcgtcaagcacaagaactagtctactccacctgatacatctaggcacaaatgagtggcatgtttgtaagatgtaaaggcaataggttgccaagcaaaatgcagaggcagagagggaaaaggaggtggaaaaggttcaaatgcacctcatgaaggaccttgttgctagattgcctagtgagtgattggattatagttgtttcgttgccctatttttatttacatattacatacatggctaatttattgcacttctccttgcagtaaaaggaacaagccactaaggaagcatgcgctgggtttgaaggaaggagaagtagaaaaggaaaagcccaagttca

SEQ ID NO: 84080 - DNA, 586 bp, Zea Mays
gaattttctacaaattttaaaattttctagcatttattttctcattaaaagttattttctaattacttttactggattttctaattctctggactgggcgcataaatatcagaaactacaggggctaactagcaatttttctcaagactcaggattccccacagtgtggactgcgggttgtttataggattttacagggtctctttagcaaatcttacatcgcgaaggggtaccggtgcagatcgactgttggatcagaatctaaaggccaggattatatcatgaagcggtacgccactcatttaatctgaaccatgattcaccaaatcgagggcgcggatttaaaataccttggatcgcgctggatccgttcgatcatgatctgatggttcggatcacatacaccaaagaggtattatggtcaaaataacagtcgttcgctaactatgcaatggcccaaggcctttcttctacctatccctcggctaccgtagcaacgtcggccagaacacggatgcgccatgacagtgccacgcaatcccccactcacagcgcataaactccaaaccagaagcggaaatccata

SEQ ID NO: 84081 - DNA, 662 bp, Zea Mays
gcgccggtgcccggtgggtctgtccgtgctctcgtgacgtgcagagcaaccccgaatcggggggaattcctcaccggagtgcgcgacagggcggaaattcctcctctccgtggtcggctcgcttgcgcggacaatcctcggtaagaaccactcgcccggacccgctttcatacccatagcatgtagtcggattgaatttgggtttcgtgcctgaaatccggagattagctctgccggcgtgtggccttgctgcggtggcgttagtgccgtggtctggtttgcccaagggaggaggacgaggtgactgttgttgatccagtggtgtgcagccacgattagacctcgggtaccccttcgagttttttagatctgaatcgtcgatgaaataacgagcgatgcatattagatctgggcttcattaaatcgtgggcgtaggatctagatcctgtggatatcgtggcgtgccgattcagtgtaatttggctctaatctggagcgtagatcttagatcgagcggtcgtggtgcgatcataccccttcggtctggcattttagcacatgaaaccctaggtttccttggaatagaacccgccatccactggagatgtgctctgtgtctacatattcttaccccaagccccctggatttctctggttttgtg

SEQ ID NO: 84082 - DNA, 434 bp, Zea Mays
caagtctacaccaagaaactatccgcgcacagaccagctacaggcgcaaccagaccaacataataaatgcgcccgaccaagcgcacaacgtccctatagacatagccggatgcgcgaaggcacacggcctcatcatacaaactatagtaacatacttacagcgagggcatcacaccttacatcggttcaaccttcggaatgattcccatctccctatagttaaataacattatcctaagctcctcaccctcaaaaagacctcgcaactccccctcacctacactcgccccagccggcgaggacaacaattcctgcttgccagccctgcccacacgaagccgaccgccatccacctcactcactctacgctttgccactgcccttcaccgcctacgcccagcactcggaccaggcacaacttcagcatccgcaac

SEQ ID NO: 84083 - DNA, 452 bp, Zea Mays
gaatggacctataacgcgctggccacagtgggagtctttcacggcggcggaaaaccgatttggggaaagtgagcaatttggaggctctagtaaactattggaggcaagtgctggtgctttggatgggtaattaccctacagagctcatggcacacttaatttatagagtcagtgagcggtggtgtccaattcgtaaggattgcgctggcggccagagagggaaagagttactggcgcaagcaaatcgtggctgttaccgtggagagctcaccggcgatcactggacatgtgtaattcgagctactgcgacgtggtaagacaccaaggcacgaggcgcatggctgataggtggctaactccggtgaggataatcctgtccagccactgtcgtagtgggtacggcaggcacaacggtgagcgaacccgagctaatccgagcgccaagattttta

SEQ ID NO: 84084 - DNA, 547 bp, Zea Mays
gctccaaggatcaccagcgagttgaatccctttctgtgagggccatccacaagatcaaccgaagtcaccaaactgctccaccaatcatccagtttgtcatctgaagggcctggaaaaagggcagccaagccaaaccggtgcaagagatgaaaccaaaactgcctcgagaagacacttggtcaaaagatggtttatgtttttggcctcttggtgacaaagtggacaagcagccaggtgggggagtcccctcctctccaggcgatctgcagtccaacaactatcttgcaaaaccaaccaaatgaagaatttgcacttggcaggcggccaagacttacataccctctcaaagggcctaaacatagtggacccaaaaaaggtaacctcataagctgacttagcggaatattcctttggactggagaaacgccaaaaatgtttatcagaaaaaccaggccacagtagcacactggaagtggcatcacatagctgtaggacctcaacaataagctccggggtaaccaagcctctcaagtcactgacccaacac

SEQ ID NO: 84085 - DNA, 457 bp, Zea Mays
agctgactcgtggtgacccgggggatgtctatcccccacagccaaaccatccataactctgaccaggaagaggaagggtccgaaattggattgtccctggattgtcgtgtggaccgtctggtcaataggtgcggaccgtcgcatgtgtccaaaactcggttgagcagggattatatgatttcctaagtttggcttgcggactattcgtggtctagccacgtatagtactgacttccgggtcgactgttcggccgtggtctgcggactgtcgctagttcaaaagccaagtgaggcagagctcgggggtcgtagatagtctgacaagggtcgacaaaccattcgcacatgccttttctgatagctctaacatgcttttcaaatggaaagtagtcattatagtgtacgacataccatctagccctgggcgtagaccgttcgcgagtgcacagaaaggggg

SEQ ID NO: 84086 - DNA, 406 bp, Zea Mays
tgcctatatccacggagatgcggctcaatggtgtatctgatgagacaggttgtagtgagcccggtgctagagctagacgacaatggatgttgtggttcctggacgagttcgacgatgactcgtgttctgcgcatcaatagcgcgtcaatcgtgaacaaatataggttcatttggagtcttggtagaatcactaaaattgttgccgccacacaagagaagacaaacaatcactattcccctatatgggtcggttcgtttcctccggaatggtttcattaaaaccgttccacctagaatgataagtttattgtactaatattgattaactacaaaagttcttggcctcaatccaatatatctaaacatggcctaactctagttctatttccaaggattataaaatggc

SEQ ID NO: 84087 - DNA, 356 bp, Zea Mays
cagctttgatatttgtacacgtgctgtattgactggattcacgacggtttgcacgaatgctacaacagaaaattcccgatcccctgtctgaacgtttgcatcatcgtcatcgcgcatccactaaattcttctatcgtcgtcctcccttaatcagccgattgtgtttgatccacctagcccacgtgaatttcatcagcgagtagatcaagctatcgattgtgttttacctttagcatcgccccctacaatgggagcagatcaagctatccatcccatacatgtatgtgagctaacatcactgcaacagagaacagcagagaagggagaaaggaccagtgaacatttatatatcccca

SEQ ID NO: 84088 - DNA, 796 bp, Zea Mays
tctttgattatccagactattcgtacatgtttcaccgaattcggagttattcagtctgatagaaggccaaatttggaacctgttaaaactttttattctcgatgcgaacgcaaactcgaaaatcattctctacttataaacctcatccgaagctcatttaatcagacgctcgacatttgctagtcaagctatgtccgaatccaatttctcgatgttcgatctgtgtccaaaaattaatccgagtccgtgctctcaaacggaatactccacgtgttggcacctatttaattttatccaactcggcttaaaatctttgtgtcccatcttcattctaaagccaacctcggcaatgatttttattaatccgacccattttattttgatgccgaatccgaagccgatcaatctcgattcattttatttctacttatgcgcgagaatttaatttccaagcgacacccaaataaaatgtcttggttcattttattctatggcctctcgttcatccttacgttaattcgctccgtttcctgcgtcagtgtcctgataattgtcactgccttaataaacaactcataccggagctcttgtctcagagaaatcaaataaaaaaattaattagctcctaaacaatcagccatttttctctttaaataatcaaccagcggccaccatctccctgtcttcttctccagccgacagcgccagtctgccactgcctgcccctggccaatagctggtagccgttctctgcgccaatagctgcagccggccagtagatggctgccgcccacgg

SEQ ID NO: 84089 - DNA, 338 bp, Zea Mays
cagagatctgaccagggtctagtggtttgtctttggtttagtaatagaaaagttcttgtatgttcggttccagccacggtaaaaatgccagttccttgtttttgtacttgtactgtatcgttctattttggagctttgctctctcttaatataacgatgctttcaaaaagtaaaatttgcacgtgcttccttgtagaagatcgaggctggacggaggttagtagagcgtcccactgcaatgtcttcaccaatctgtatccagtatgatcttgtagatgccatggtcatcgtcgccacaaatagcatgataatttgaagactggtcgcttctttcaaaa

SEQ ID NO: 84090 - DNA, 469 bp, Zea Mays
gttcagaaacattcaaatcaggagcattcagcactcccatttgggccaagctttagtgcggttcagatttacgtttgatagagataatttggtggcaatgggtccgcaacaagctcttgggtttacttttactattataagacataatgaagcttggaatcagcgtgccctgacttttaaccatgaatgttggctccttctccttggttttcctctggatttctggactcatgaacatattcaaaatgttgtcggctcctttggaagggttctcatgtgggatcctgacccttaaaatgtgactaggctacttgttcgtgctagagtcacgtccctccaacaatttccccaatttatagttttttcagatgctgagggtttccaaggagtttcttggactgttcaatgtgatattgtgcagcaatatatgcttggagctctccctcaagatgaagaccctgttccacct

SEQ ID NO: 84091 - DNA, 814 bp, Zea Mays
aacagggggcataagaagtcttacagttgtttgagcagtggcatagcccatagttcttctggaactgttccatccaggttgttgctgctcagatctagcacttctagagcagacagccctccaaattctctggggatttgcccgcggaagttgttctttggaagtaaactagacagcataaggagtaagaaaaatatcatcccacaacgaggatttgcggtacatagtacattgcacgagagctaagaaatgacttgaatgtggagatgggtgtagaagagccagctcacagggattttagacctcggaggctcccgatctcgggtgcgagagttccagccaattgccggcctgttaagttcctgtgcatgagaaaagaaataagaatccaatgtgcatgatttgtgtaaaacgtgaagacacaaataaacaatagcagcaaatcaaatcggcacagcagctctgtaaaaagttcatgctaactacaagaaaggaacaacataaattggttctttcaattccttcctctgttgtcctcttaatggacagaggtagcaaactattagaaacggaagttcaaaaatcatcaagagatcattagcgagctattaaaatggaacttcaagaatcatcaggaggctgttcatggcatcaatctggatggaaataaatgaaaaccacacttacagaatctctactttatcgtcaaagcatcgcacgccagaccagctgcatgggctgctgtccatggggtcccaatcctggaatacgccatggggatcagcttccaccctcaccttcagttccagcaacg

SEQ ID NO: 84092 - DNA, 508 bp, Zea Mays
attataatttttttttcttatacagattttgggccttacaattgtgcatgtagagatagacctgttggacaacatacgtagtgttggtcctagtaaatgtgagatactaaagagatttgacaagattatggttgatagtggggttactgatagggacagtgttgctggagagcttggcttatgtgtccaccgagaccacacaaggggcttgcattagcacactagacgatatccagggtgtaccatcgttgttggagaaagagtcaaagaggccacctggacctaggcaacgctcaacaacattccctagaaaatagtcaagaggaaccaaatctttcatggcaaactcatgctgaagagcgatgatgatctggtgtaggaggcccgaagaagagacagtgagcataatgccatcaacatagaggaggtacacaatgtcaccgccatgccgacagatgaataatgatgtgtctgacttagcctcaacaaagccaaggaagagcatata

SEQ ID NO: 84093 - DNA, 301 bp, Zea Mays
accggcaagtttcttcctaagaccacccagaccactgcaatatatgagaaacagccactggtgaatagttgacaacaccacaatagagagaaagaaagtggaactttctgtcaggggccggactgtccgcgccaacctggcagacggttcgcaaccgaccaggggcgattttctagaaccctagccaccccatccatctaatcaacgattcgacagaaaataaccatccaaactcgttcaaatttttgcacaacattcacaatgagtaacactagcaattccaccaatcatatttgtaaat

SEQ ID NO: 84094 - DNA, 720 bp, Zea Mays
gggagaccccgctcggacaccctcgggggctgggccatagtttgcgctacccacttgagccggatcatctccggcaataccctcgggggctgggccatggcttgcgcttcccacccgagccgaatcatccccggcaacaccctcgggggctgggtaagtgtcaacaccatccttgaagaccaagttctctgcagtagccgcctctaaggctgaaggtccctcagttacttccatgggaacaggacgatccaagtcagtttcctgaccctcaagaccgcgctccaaggtcgatgaggcgcgggatgctgcccgggatgaccccaacccagcgtcgagcacatcagcacaaacatccgtcgcaccaccatccgctggctctaataacagatcctcgggaaccatatcttcaagagtctgatcaaagttcgtcagagacaattcttgtagaccaatgagggcagacagagcaggagaaggaactccactactttccccactggcgacatattgccgactgttcttccgagtcaaagggatctcatcttcttcctccccgtcgttttcatcagcaacacagacaacacccccattggggtcagcagcagatggagcacacccattgggttcagcgacagatggatcacacccattggggtcagcgtcagtaaaatcaggcacaggcacttcctcagcagcgggaaccgaaggaccaacatcccg

SEQ ID NO: 84095 - DNA, 535 bp, Zea Mays
gttctgtggatttagccttcgtctgcacaaggagaggagaggacgaagtcgttgagtgaagggtggcgtgtttgccttcgccccaacaagtaccatccaactttctagctcttgagtttgcctcccaccacatacatggtggagcctcttagttatttctgttgtcactggatgaagaccggtgatttagaaatgtttggtgacttcttatccctttgtattatgggcttctctaaaggcaaaagaggaataacatcacactatgaattgagaaaaaatgcatcatgtttttatagaaattacaaaatattttttcttgtcacctgggtgcataaatgtattatagaaacttatttcccactcaacagatttatgttgttacatatccatatggctatttcacgtggaattgcatcataacaaaaatgtttgattaaatagagatctggattgagtggtttgctccacagattttagatttagttccattttggactgaaacatgagaaacttgacctctatcttcccatcctaa

SEQ ID NO: 84096 - DNA, 930 bp, Zea Mays
gatgccgagcgctatggtggcattggcgaagtatgtttgggcggtttcgtcgtatggcggagagctgtttgttgaggtcttccttaagcattattgcttgcatggcaaaagaaaaatataagtggattgattgcgcaatttgggtcctgcatgttcgcgccgaggaccaagaagactttggctttagtgattgagattgttccttgtgcaaagaataagtggggcaactggtgggacttttggttttatgtggcaccgggggtgtcgaagggttgcctaccttgcctccggccattttgtgctcgcattgttatgtggccttcccgcaatttaaagtgaagaaggggatcagaacgaggaggccctacgcaacgcaacccagttgagtagcgcccgagatctagtggaagaattcgttgcctgtggagtatggctgctggagcacgggtgggatctgggtgaggtcaggcctcgcccgatgtcatctttaggggatcagatggtgcggaggccagccttcgctattgatttgcggggacgggatgcggctgccttcgtgcgagaggtggagtcggaggtagttaagattgttggaaaatatgtgctgaggactgagatgttgaggagccgagatatccgcggttccaacgtcaggttgaaccgtgtttttgaactaaatatcttgccctacggtccttacccagaggggactctgctgacgtcggggacgatcgaggaaaacaagtgaaaacccgatctgaagagggcacctcaaagggaaaggctatggttgcaggtactcaaaaaggaaaatagatgtgcaaggtacagaggggaaaagatgggaccgaaggcctctaggttttttgctgaggagttgacggagacgtgcgctgggaccgaggaggttatgacttcgctcgagctcta

SEQ ID NO: 84097 - DNA, 344 bp, Zea Mays
tttggtgggcaaatttttcagcaatccaaccagctgggcatcagattacatgggaggaattcaagctagcattctgggagcattatgttccagagggagtgctccatatgaaacaagaagagtttatccggttaaagcaagggggaaatactataatgcagtatctcaataaattcaaccatctctcccagtatgccattgaccaggtgaatacagatctgaaaaagaagaattgttttatgaggggactcaatgacaggcttcagcggaagatggcaacatgcttggaccttacctacagtagggctgtcagtacaacactagcagtggaagccaaaaatgca

SEQ ID NO: 84098 - DNA, 522 bp, Zea Mays
ttggggtcggttgtgggttgttttgcttggcacgtgcttgattcgtatctagtgcctggtagtgtcacgacggtgtacacaagatagggcatgaagactctccttttatgtttacccttcatgtttcacaaccagtagctcttgtcatatgtcaagtcgtcgcttgcccttcatgattgcttagtactttgaagactctccttttatgtttaccatctcacgccatggagtcacgtcttgaatcaaccattaaacacaataaatataccaatttcatctatattgttgtcttcgctattacgaatgtcaatcttcattttggttgatcaagattcaagagtgacaccattctgcatgcaaactcccatatcttatttgtaaacgatgaacataagcttgtcaattcattctttcaagatggtttgggctagtttctcatctgtatgccatttgctacatctgaacccaaattaattcaactcacatggaaccagacacctacaatcccatagaacacattag

SEQ ID NO: 84099 - DNA, 379 bp, Zea Mays
tggatgtgccgttacaaccttcacgcgagatccgggagctggaccgggtctgccacgtcgtggggataagaccccccagactcttcgtagttctcccctgcgcgacccgtgtgctgaagctctgcgccgctctaatcaccaagtatcgatatcgccatccgagagggagagccgagaaggaattcgccgccgccactgcgattcgccctggttctcaccgcgggggctcccgccaaggcatgtgtgaattcgactaggtgccggctttgcgtgcgtggcttctgcgggcaaaggcgcgactcagggactcaccaattactcgctgtcgtcatcgcgccaccgcacttccgtctatcaccgcggccaaaaaacccctacg

SEQ ID NO: 84100 - DNA, 437 bp, Zea Mays
cgggacggtcacgggggatgtccagatgtttctcctctctcctccatgcaccctcctgcctccctctcactttttcgtcctcaattgcggtccctgtcggttataggttgaagttggagcatatgctgaggaccgtgagggcatcagttacggattggagttgcatcgtatgatgaggacatctaccatgggggttgtttctcatccctctcctgtgccccctccctcagaccctcacgcttcttcgtacttaggttgcagcccctgctggtgatggacgcccccaagttcctccatagaagacgacgaaaggccgctcccctcccgctttcagatgcaacaatgcaaaaggggattcaccctttaattttctgctcctctccccaaacccaacccgcctaccccactatccagttgcagtccaacttccctgtctt

SEQ ID NO: 84101 - DNA, 780 bp, Zea Mays
cccagatggtgttctatagatgaaataggaagagtttgttcgcttaaagcaaggaggagactcggtgatgcaatacctcgccaaattcaaccatctctcccagtatggtattgagcaagtggacacggacctgaaaaagaaaaatctttcatgagaggtctgaatgatcgactacaatgaaagatggccatttgcctagatctcacttacagcagggatgtgagcacaacactttcagtggaggccaataattcggggcagggaaagacaaaaagatttgggcgtgaagggggtgaaggatcctctcaatgatccgagaagcggtcttagttggtaattcatccttttaacccaaatcgctctttttctcgtccacccacctatcctttcaagcaaccagttttcatccttcccacaccttcccttgctcaaaacaatcagctaaatgcccctagtactcgtttccccgccttacccagttcatctaacagttgcttcaactgtgggaagtctagacatttcatcaaggactatccctatccaaagcaaaataaatccaatttccaaaaggcttctcgaagcacatctcaaggcaagggaaatgtggcaagcactcaggtaggtaaaaatgcaaggaaaactaggcgagtctactatactcaagtggctaccaccccagaaggagagccgatgatgatgagtacgtttttcgttgccaatcatcctgttgtcattctttttgattatggtgcatcacatactttcatgagcaagactttt

SEQ ID NO: 84102 - DNA, 601 bp, Zea Mays
tttattccagcagaaattgaatatccgttgcatcccgtatgatgtcattgtgtcaacttggataatgagtgatcgacatcgtgacactgttgctaggttgagatttcaaagtatatttgatttgcgtaccaatgcattagagagcatgtctctcataaggtggttgatggataagcttgatccagacgacatgacaatacgctcaggggctggtaaagaactcaagatcacaaaagagacggttcttctcatattgggtttgccaagcgctggaagtggcagggatttcactgattggtatggtcaagttgatgctgcttcaaaactgagacgagatctcaacatttgtaaagaagagtttgatgtcgttaagctacaggacaagctagttattgagaatgatgatgagttatccatcagatgtttttttctgattttattcaatcggcttctattcccatctgcttcatggggtattacgaacaacgaggtcctaatgacaacaaacatggaccggatggctgagattgattggtgtcaattagtatatactgatctgtgtgatgctgcgagtcgttggcacaacatgaacagaacaaac

SEQ ID NO: 84103 - DNA, 909 bp, Zea Mays
tgctggattttgcaagttatcagcaaaaaagaaaaggaaaaccccataaacagaactaggccgaaaccggcccgagtcggccgaaacccatgcatatcgcgtgcgcgcccatgcccgagtactactttgcattgagccctctgggtatttgaataaccagaaactgatcctatgcactgttctctaagtcactcacacttacaaagaaaccctccctttctttcttcttcacacgatcgggtcctcgaccacagacggcggcgcaaatgccccgacaaacccgtttaggccaccacacaccataacccgagctagaaactgtttttacacctaattcgactctcggtgctaatctatggatcaaggatcgggcatgatttctattctaggtctcggtccatgagcaccagcggaaccgaagctccagtgagcttgtttccgcgagcacactgcagtagcattcaaattgaaggcgcagtgagcctaagcaactcactgagactcaagaacagtggtcgggaagacgagcaaaggtacaaagcagtgggtcgacatgtaggcggtctacgacagcgtctagtgatggcaagacaacgttcactgggatctactgtggtagagttcaaatggggtgtttggtgagcttcactggcaccaggggatactaaaacacgagacagatatgatcaagctcacctgaggagttcaaaccacggtggagcaccccacggcggcaatgacggccgatttcagggaattgcgaagtttgcaagctattgtggatgataagagatagttggtgataggaacgggggtgcctgatcttccgtcaggtgaaggtaactatcgatttggtggagatgtcacacagacgatccgacttccaatcaacatgactagaaccccgca

SEQ ID NO: 84104 - DNA, 1313 bp, Zea Mays
ggaaggatcacttgtccaaagttaaaattgcactgaacccaaagaggttttcataccaaatcctacgctaacagcatcgggattggtgcatataccaactttggttctcatgccgtgtagtgaggccggagactcccatgcacaacccacctctacaacatctctagaactcacatgctcgagtttaaccctctatacttttacacaaactatcgtagccacatctgaaaattgactggccagcaacaaatacttaaactaccgtagccacatctgaaaattgagtggccagaaacaaatcagcagttacatcgccacttgactgcttgtcttggcccaaacgaaatcagcaccttgagcagtagcatttcggcatctgaattggagaaacgtgaggtgctaggcagagagacaagtactactagttgagacttgagaattgagaatcttggcgaaagaggtcagcctgccccgcacccctagtaggcgtggctgatggctacccgcttacccgtaccggatgaggggggatcgatgtcgcagtccgtagcttttattcgaaagcggaggagcgaggaattcaagagatattgtggaagatttcagcaaagtcagctgtgaggacggtagagtagcattgtaggttatttgttgcttgggtgcactgccttggattgaatgctgattctctgcattcgagaggaatggagtgacgaggtcgccagaacgggtagtaggatcattggacggcccgccggggaggaatctcggcacacggcactagccaagtgatcaccgccatgaaggtcgttattagggatagggattggaaagccaagatgcgcgtggaaagccaagtgatcattggacggctcgcatgtgcggagaacggggacagagccgtggggagagaaacagatttgatttgggtgcaagttgggctgtgccggcgccgaccttccttccggtcgttagcgagtcgtgtgctgaccagtgatcaactgcatcgcgacggcccatgcgtgtcatcaagatgcggcccacacgcacgcgtacctaaagagagcagcccataatcattaattcagatttgcttttggttctttaattttttttgctctttttatttcctttatcattttgttttgtgtttcctctttttatttaaccacaatttattattgtcgtcattttaacgtcttatgcttttttgtctcctatatttttcatgacgcacataatgtccgtgccgtatacacacgtgatgttctagcatatttttggttgtttatatagtataaatgagatatttc

SEQ ID NO: 84105 - DNA, 637 bp, Zea Mays
ggccggcctgcagacgaacgaacgagagagagcaaacgttacaagctggcagcagcctttacgagcatctatcatcgctccctgttttcgtggaggctgctagctagccgtgtcgttccgtcgtttcctgcagtttctttctccatgcatggtctaggacgaccggaaccggaagcaggatcagcacaggcagcagtgtcgtacgtccgatccgccgcgcgcgagcgcagcattttttttctctcgtcccgcgtaaataaaaatagtgcaaataataggcagacgacgcgacatatatacactgttttttgtacatgtatgtatatatacaaagagagcaacgtcgtgcagtggctatagaccgaccgaatgcttgagtcgtcgttaattatattagctactagtagctttatttattacttgcgtgattcgtcagcagctgttttaatttgagtgtgccatgagctagctcatgcatgcatcgaccacgcgatctagctcgcgtgaccacgcgtctctgcaggtcttgcttgatgacgagcccacgccatatagtaggcggcgagtagcagcgagcgagagattaccgttgacgcgcgcggttgcttgtcgacacagtgctcacgaaacgttttcc

SEQ ID NO: 84106 - DNA, 469 bp, Zea Mays
gaagaggagtggcccctccctggtcgcgcttctgctgtgctacagatggatccaaagggcaggaaccctagctgggagcgttggggcaaaaggatgcccccagggctctcagtcatgggggaaaataggaatctcagctggagattgaaaccaaccactggaaaacccaagaacaaggaagacatcatgacttcttcttcgggtgatggcggccaatcaggtattctcaagtcccccctgcccattttgaaaaaagagaatgaaattgtttgtcgttttttctgtcaaaagtgtggcgcggaggggcatcatgccacggattgcttcaaatctttatggtgcgacatatgtcgtaaagaaactcataacactgctagatgtgtcctccccaagcaaaacaaaccttgtatgcctattgttggtatggcggtggatgggttagggttttactcgtctcacttttccaaac

SEQ ID NO: 84107 - DNA, 468 bp, Zea Mays
ggttgtcttgcatcaaggcacaacccagtccagtgccagaggcatcacaatacacatcaaagggcttgctgttgtcgggttgcgctaacaccggtgctgtggttagatgttgcctcaatgcatggaaggcatcttcgcacttctgaccccaaacaaacttggcttctttcttcaacaattcagttatgggcttcgcaattcgagagaaatccggaatgaatcttcaataataatcaactaatcccagaaaacttcgaatctaacggacagtcgttggcggcttccagttcatcacctcttgcaccttattaggatcaacaagtatgcctacctgagagatagtgtgacccaataatttgatttcctttagccaaaaatcacattttgacaatttggcataaagacggtgctctcgcatacgttgaagcactacatgcaaatgaccggcatgttcttcttcgttctttg

SEQ ID NO: 84108 - DNA, 467 bp, Zea Mays
gcgaagcgtagagtgagtgaggtggatggtggtcggcttcgtgtggacagggctggcaagcgggaattgttgtcctctccggttggggcgagtgtaggtgagggggagttgcgaagtctttttgagggtgaggagcttaggataatgttgtttaactatagggagatgggtatcatcccgaaggttgaaccaatgtaaggtgtgatgccctcgctgtacgtatgtaactataatttgtatgatccggccgtgtccataggggacttgtgcacttggtctagcacatttattatgtcggttcggctgcacctatagtcggtttttgcgcggatagtttttcgacgaagatttttgcacggatgtaacgtgccttcgattttgcgcactcgttgtgctagtccggctgcacccttaggcgacttttgcacggatagtcttttgaggaagacttcgattttacgcacttg

SEQ ID NO: 84109 - DNA, 515 bp, Zea Mays
caccgaaccattgttgtacacctcattcgctgcgtgctcggagttcaggaccaaaacaaaatcttctggggaaggacggtgactaagaaggagtcttcaggcaaaccaaacccagccacaacctctgttgcgaaaacttccaaagtcacctgaggccgcgatttggtgaccactacaaacaaggcacaacgctacaacctgaactcctctctgtcaagcgcaaccgatcgctccagcacgcaaccacgagggacggacacatcatcttcaacctgggacagaagggaggcttggtcctcagcgggcatcaaagcttgaggatcctgaatagatgactcaggcaccaatggggtgggttagaccttctgcccctcgagcggtggtgtcgcctttttgcaccttcttgcgcctgaaccggcgccccagcaccctcgaccgtcccgccacgagaggggacctccctccaaaccttaaccgaacgaggcttggcttcgatcagcaacggaccgagacga

SEQ ID NO: 84110 - DNA, 757 bp, Zea Mays
aaaagaaaagaataaacccaactttaacctagatggtcgtttttgtttaatgccgtcattgaaggcctgaacctccatgaactggagataacgggccggcagttcacctgggcgaatgcactagctaatccgactttcgaaaagctggatcgtattcttatgtccatggagtgggagctgcatttcccgcgtgccaccacggtggcatgtaatagagacctgtcggaccacacccctctcttgctggacacgggtgatggtaggggctcctcgtgacagcaagaattcaagtttgagcttggatggttgttgagagcaggcttcacggagatggtaacggaggtttgggaaaatgagaatggtggaagtaattctcttgaaaggtggcaggcccgtgttaggagagtgcgccaattcctgaggggctaggctaaaaatgtgggggccataataagaaggagaaacaagctatccttgatagattagatgctctggataagaaggcagagcacactcttctatcccagtcgaagatggattataaaaacgtcttaaagaaaagactggtggatatgctccgggaggaggaactgaagtggtaccagagagctaaagcgaaaaatctacttcagggagacgcaaatactcaatacttccacctcctggctaatgggagacataggaaaactagaatttttaagcttcaggatggtaacaatgttatcgagggagatgaaaatcttaagcgacatatcac

SEQ ID NO: 84111 - DNA, 478 bp, Zea Mays
aaaatccatttaaaatttaatttccctgattttatactattctggactaggcctcaatttcgtaaaagggcagggactctagcgcaaataacttccagacacagacaaccctgccataggactgcgggttttatttccaataaagctagggtcccatgtataaaaaggccagctaaggggtatcgccaagatcagactgcccaatctgaaacggacgcgccagattagatccctaactctataaaacggtaaccagcgcgagccattagatccacgatcgacgggcgtgatctaatgtaccccaactgaatccaatgcgccagatcccaatcggacggctcagatctatccatgaaacggtacagagcgaatctaatcctggccgctgcacagaaaatcaacggccagcgtgacttcgccccaaatccaactcaaccctgcaaactccggccacggcgcacggcggtggctcaccgga

SEQ ID NO: 84112 - DNA, 570 bp, Zea Mays
aagaaacatacccatcataaccggctctccctccggtgtagtggccacttgtgtatagtagattcgcccagtcttcttcatattcttgcccgctgcattatttgtcgtgtttcccctaccttggcttgaacttcccgggttctgctgattattggacttgttctgcttcagatatgggcagtctttgatgaaatgtccagacttcccacaattgaagcagtcggttgaagatctcgggagggcggggaaacgagaaccaggggcactcggcagagttgttgaagtgggggcagtggcagggcagatgaatataggctgtttgaaggggtaggatggtggatgaggcaaagaacggttttgattgaaaggtcggattaccaacctttgtcgcttttcaggcccctggttggacctatcacctccaattccctttgatttgcctgggtctgcatacttagcttcaactgctagcactgtactgacagccctgctgtaggagagatcaagacaggtggccatcttttgttgtagccggtcattgaggcctctcataaaacgattcctcttttt

SEQ ID NO: 84113 - DNA, 734 bp, Zea Mays
agagcatgtttcctctacaacatgtaacctctttattagtactagtcgaagtcaccgatcgattattatagaaatcaattaacaccagactaaacacataggcctaaaaactattatctttaatcttgattacatagtatcggttgaaaatgtgatgctatagccgatccttttaatcgatactattgaagactatttgtgcagtagttgaccgagggctcggtcgttttggtgtcgctcttcttctactgccaacggtgttcgttgttcccttcgcgcggctcttgtatttctcgcccgttgctcctcgtcccagccgggagccatactcctcgcctcctcctaataatctctgtccagagctgaagatcgaagcccgaggaccgaggtaattaagctactcattctctctctttctctgtcatggttgtagcaagttcatttgtgtgcgtctctctttctcgctccgcagcaagttcgctcgcctcgatcaatcccatccgtgcccgacgaagtgcttgcttattttcttgatcctttcttgttgattttggtgacaaccaagctcttcaatcacgtttccaagagacctctgcaaaaacaagctcttaaactcatacacttccatttttttctcctttttgccattcacgaaccattgaacaggtcttgatctaagagccaacagcacacagacacacacacactctggaataatcgtccgtagaattccc

SEQ ID NO: 84114 - DNA, 559 bp, Zea Mays
gatgatatgtaaggatctgtggcaaataagaaactgatatatgacgctgaatttaatacatgtggggaccattgttcctcttattagttcactagtttaccttgtttaagacaaactcatcaatcaatgtagcaggcagggcagaaaaagcgagctgagaagaatctcaatgtggattcagaccattataataagaagctgaagattaaaggtggtcagacgcctagatctagtatgcatggcagtgccaagaaagagttgactgaagaggcagattcccttgaggagagaaccactggtaaccaattgcaaaccagtcgtgcagagactacaataactggtgaaaacagttgtactttacttgaaagtcaagacccttgcacctctgagaccccaacagtcatgtgtcctaaagttttagggtccaaccgtcacaatggtaatgtgtccctataagattactctcatatctgttttatgaacagtgcagccgggtatccgattttcaagactttagtgcttttctttttggactcccacaattattcacatgtctttt

SEQ ID NO: 84115 - DNA, 613 bp, Zea Mays
attttgcaggggtgtggccaatggaatgtttgttgtccagttcattcttatctcaatcctagcacacaagtatttcctttgttcccatactgcagacatcaaacataactaataattactcactgctcactaattcacaacagtccaaactagatatttttagaggagaaaagctcctagcacacgaattatgcacttcctccatatctccatcactctctcaatctctaccaccagatgaaactcagcatggagagaagatattttctgcaccccagtctgttccagattcagttatctgaaccattcacaccactacctctaaatcagtacaaccttgatatttcctgtagggagttgaggtctctaaaacttggttatgtacttcatccatgtcttcatcccaacacacaagcaaagcacagggagagaggtgatcttcttcagtgatcccattaaacactgaaaccaacttcatatgtcctgctgcttcattcctctcctccatattcattccctggcatctcacaattcccctcacaacagacctaccatgcttagtagaaattattctctaaacatagctctaccaacttgggatagcaacccataa

SEQ ID NO: 84116 - DNA, 450 bp, Zea Mays
agtgcctaagtcaaggtgtgcatctgtttggagtaaaactggcatgccttacatattttcactagctttgtggcatcctcgagggctgtaggctagtagaagtgtgacgataccacccaatctagaagagcaagagtaccaaaaacatttgcttccacagttgtctaaacatacttgagcccatatagacccggtagaacgccgagcatcccaaaggaactcagtaaatcaactcacaaccaagatcggagattaaggaaatacacaatcacatactagagtttttggcagtgggaataatattacaataagtttacaaataagagatgggagtaagtacaaaacttgatttcaaagaatataactttgtacaagatagacgtaaccacatttttgaaatacatgctagctcagtgacaatcttccaaaaacaacatgacgagaactata

SEQ ID NO: 84117 - DNA, 505 bp, Zea Mays
agtacatgcatgggctgggtagaagcgagtcgagtgcgagaagtgcaggcaccgaagggatatcggcacgcacgcacgcacgacgccaaggccaaagagacaagaaccttttgagacgctaacggagagcatggacaggggaagaaacggctggatctacctagcagcgacaataacttctgcatggtggtgatggtgcccgggcactaacagaaaaacgaaagccgactgaggctgttccgcttgcgaacatgcatccattccagtttccagacaggcggagatgcgccagtgctggtctgctatgcagctagagacaaaattaggtgggcatgctcccaaagattgatgacgcagcgaaacccccttgtctggtactacatgatttacgtacgatcggatctaccccccgaactatcatccaggagccggataaggtccacacattgtaatgtcatctcacgtctcaagatactcagctcttgaggagaatatggggtttttt

SEQ ID NO: 84118 - DNA, 591 bp, Zea Mays
aagagttaatgagacagactgcataagaggcttgcatgacattaagataaagagctaacacaacattttgatttccaagataagattagttaaggatgattttcgattttgcctagcttcatcatactacaagagtgtataagtgttataacccttaacagagatcttttgaactttatagattccagagcatgatatccaaatcatctttctgatccaagagtatttctttgagcacaaattgagagaaagacttgagcgggacttttaggacaatagagtatcacattgtttgcatatagcagatgacaccataatttattctctttataaagaggcaaaacacaataggtgcgagagattctccaaattcatatatcacttagcacaattacaaatcttgaaaggggcaacaccttgacattctttttcttcgtgagacatactccttctagctaaatgatatattattcttcctcgtcagatgtaccaatcttcagggctggaggttgattgtcttcaactactattctttctccagatggggtttccaaacacatggttctctcagtatattggattaatgcctta

SEQ ID NO: 84119 - DNA, 975 bp, Zea Mays
tcactaggcaaaaatttcaaacaagttgtattgttttagtgttttgcaaatagaaccctggatagggaacttaaccctaaatagggattaaaggggtaaaacctaacccaagttgagaaaacctaaaaactttaggggaaaagtcataaaatgaccccaagaataaacttaaattacctttatacccctaaggtaccaaaaaaccctaattgaaaccctggaaaaccctaagtccaaaccctagggacctatgtgcaaaattagtccacttttgggttaaagtgcaaaaaccaagttaaataagtatattaggtcatttgggtcaatcatatgtgaatttgcaatccaaaacttgagatttggacttaagtgcaaaagagccatacttaaccctttttggttaagtctgcatttcagtgtgattgcctcaacttgaagcccttgtaactttcaaattatggggtttgtgccctaggtcaccacatcaaaattatagcccaattataggacaacaagtttgcttaagagtgcaagccatgttcttgtgaaaggttgggagataattgagcctgaagttggactgtcagactgcttgatgtctgaaattcagattaacagtgggatgacatgaacttagggtttgattttaagcaagatccagtgactttttgtgggagcacattgtagtaaagttataaatggattgtagatctacaactttgctacagatcattgggtatgttgccatgaaaatttgtgagaaaatcgagcctaaactatgactgtcaggcgtcataaactgaatgtcccatggtacagtaaagggtaactgaagaagatcctatccctctgctcgtcgtcggtggtccgtcaccgttgatcaccgctcgccgtgattcgtgcgtcgtggccatcggataaacatagctcggtaaagatcctcaccgccggtgagctggacaccactccgacggc

SEQ ID NO: 84120 - DNA, 710 bp, Zea Mays
ctttgctcttggcggatctatcgtggggttactatcctgacagaggatacccatgagtccgttatttacattccttttctcatccgcggccttgctcttcctatttctcctttctttcgcggtctccttgatttctaccatctaaatctgactcatctgaatcccaactctattctacaagtttctgtttttgttcacttgtgcgaagcctaccttggaattttgtttcattttggcttgtggaaatacttatatcattgtcggcctggaatggccgggggcaacaccagctcgtgggtggtgcgagtttgaagatgcaccgtgggaggaagacagaatacctcgacatcccactcaaggacagcatcaaaggatggcgcttggagtggtttattgtagaaaatcatggcaagtccctcccccctcggtcagggagacagccggatgttcgcgctccaagttggactgaatcccccacatacttggagataacagaggccagggttctgcttgctgaaattggcttgttgaaggagagaggtctgactgctgaagctgtagttgcagactttgtttttaagaatattcaaccactaaaggatagagcgtacccagcttatttgtatagtggtgtcactgattcaacctgggttaccaataagaggattcctgctgtggatttggtaagccaactggagatgattcttaga

SEQ ID NO: 84121 - DNA, 618 bp, Zea Mays
tagtattaatatgactcattttaatatgaaccagttgtcagacactgatagatctttcctgacggctcctttttcagttgatgagattaagaaagtgatttttgagatgaaacataatagtgcccttggtcccgatggtttccctgccgaattctttcaaaatttttgggatacaattcaaatggatattgttcatttattcaatgatttttatgatggaaatcttaagatagaaaggttgaattatgggatggttactttattaccaaaagtggataatgcggctgatatgaagaattttagacctatctgtcttttgaatgtgtgttacaaaattatttccaaagttctgaataacaggcttgcgggttgtatcacaaaagtgataagtgattctcaatatggtttcattaaaaacagatacattatggatggggtcatatctctcaatgaaattcttcatgaggttaagaggaaaaatcaaagtggagtggttttaaaaattgattttgaaaaagcttatgacaaagtaaattggcatttcctctatactatgatggagaaaaaaggttttgggaacacttggtgtgattgggttatgaggattgtgcggggtgg

SEQ ID NO: 84122 - DNA, 689 bp, Zea Mays
gtcggcatcaaagatctatccagtatcgccatcgcgtttgtcgttgaggtcaacaagctcgcccctaaagttggtatttggcatagtacccacacacccattgaaccatacgacgtgacgcgaagatgcggttaatacgcgcggcatggcctcttcttcctctatccgtggcgtgctagaggaaatgactgacgtcaaataccactctagggtcgtcgatgtgttcatcgtcaaggttgagaagctcgcccaaggctggtacttggagcagtatccacgcatccatccatccatcctaagattgcatcttttttttgagacccatagatagcagattcagaatgaatggaacaagggagtatgagactaccgaagtttcccaaccaaacaagcagtcggtgttgctcatctctgcataaaatatgattggcttgtggaccttaaagctcatgcattattttggcctatattttcctagagttttgagtggatcacaggagcacatgaccaaatccagcaacaactattatcacgaatgaagaaacatgaatgctttcctcatatccatgtgccatcttcaatgtcttaataatgttaatttgattgaatgttaaagtattcgtcaatccacatgcacctcaatctcagtgtccttgaggaaaaatagtgtttagtcaatttgcctcaag

SEQ ID NO: 84123 - DNA, 496 bp, Zea Mays
cgaagtgattccttctggtgctttgtctcacatttccattgagccaactttgcaagagcagataattatggcccaacttagtgacaagggagtgcaaatcattaaggagaacctctatcagaagatagagaagtataagtgctttcactaagataggaaggggatattgtggtttgaagacagattggtggttcctaagaataaggatctcaagaagaaaatcttggatgaggctcacctctccaaattctctattcatccaggaagcaccaagatgtaccatgatctgaagcccctgtattggtggaccagaatgaagagggaaatagctcagtatgtatcggaatgtgacacgtgtcagaggataaaggcaagccacttaaaatcagctggtgccttgcaacccctatcaataccttcatggaaatgggatgacatcagcatggatttcattgtgggtctgcccaacacctctcgacatcatgattcgattcgg

SEQ ID NO: 84124 - DNA, 324 bp, Zea Mays
gcagtatttgaatggcctttatcaaacttatgatctagttccgttctgatgattgtattgtgcaattatgggcacatttggttcttcacctattcttgctgggcaaggatttgatcttctcctgctgtgtttggatgtttggctaggattgccagcatttccccttgctacctgacacccgcagagagctaaaatagctctcctggctaagcaagcttcccggggcatgtgccgataaggtgaaacaatcttgtctgggaactagctgtatatttatatcgaagggattataagtattattgcttttgcgcaaggccatgcgtg

SEQ ID NO: 84125 - DNA, 644 bp, Zea Mays
catgagttgggctgaccaacagccagaccgaacggcccaccaagtctaaaataaatgcaacagcgaacagaacccttctctcgtctgctcatcctactaccatcgtcagttcgacgccacttaaaaggagaacaggaccgtcgtcctcacgggcacatacacagacagacacaccctgccgcctcaccaccgcgaaccatgctggcgcagagaatgtcatcatcaatcttagcgacgctccactgctcctgccgtatccaccaccactgtgcagtgcttgatatcaactactacgtacaaggcttgtagcaaagaagtacggcctctgtcctatccttccataatcacgacacgagaagatcgctagtaattaacaaccaccactgtcgctgtttctctcctaatccaaccagctccctccctttctagatagaaaccggataaggccccaagcaacagtgcacgatggacctccccgcaccgcacctaacgtctgtccagtacgggcccagcgccgtcgtcccattgccattgggcatttccccacgtccgtcccggcgtactatacagcatgcttccgccccgcagaaaaacaactcgcggcgctccatcccgtccagtgtcccgtgtcctgaaggatcctg

SEQ ID NO: 84126 - DNA, 460 bp, Zea Mays
cgaagatatatacttgtagactcacttatcaggagagatggaataaaatgctaagtcatatgagatgagttgaacatgaagttctattttgtcactttcatgttatttgattacgtttctctctaaaaacctttgtaccttgttctaacacttcgaaggagtgttaaatcaagaggacgaaggtctttacatctaacttgtgttgccatgatttttgatacctttaggggaattgaaatcaagaaccaacacttaggccctctcactccctcctccctccactattcctttgcccacactggccttgtcgtccacctcgctacccatgcccgtctcttcacgcactctccccgcctcatctccctcctacttggtgctggccaccgaccccacttcaccacctccctcgacgagctcctccaccgtgtggcgttcacgctggggcctagttgtaccactc

SEQ ID NO: 84127 - DNA, 724 bp, Zea Mays
gcaatatcttgagaccgtctagtgggagttgcaccttgagaatgacgacacaggcgatgaaagtcattgatgaacgggccaacgaacatgggtgggacgaagccgtagtccacctcagaggtagggcgccagcgagggaggttccacctaattcgttgtggccgctgaggacaacgtcgccaacatgtgaggaggagctgtcaagaatgggaagttaaggttaatatacgacaccaacaacgagaaggggaagcacttgtgaggattacgtggttggttacacacgcaaaagataattggttgttagaagaaacgtgggggagaaaaatagatctacgcacgacgtcttctatgatgatgcgatggtgtgaaagaatctgaacaagtgaggcgaagacgaagaaagatataggaggatgatggagtgctcatggtggttgtatggttaattgcgcatgcaaaggaaaagaattatcttatctagttgttagacgagacgtgggaggagaaaaacagaagggtatttttgtaaaaatattggcgcatgacaactgtcgaaactggtgatttttataagagttgagattttaccattcaaacatatgtgctgtgtcggagcgtaggccaatttaaggagctgagaggtccataataagagtgtttttttacagacgaaagagatcattcctaaacgtgagctaggggattgagggatgaatattcg

SEQ ID NO: 84128 - DNA, 433 bp, Zea Mays
aagtgacgagtgcccaatgcgatttcaagtgtggtgacttgtgttgcctatgagtgctcgtagttgcctatgtcctatatcgtgatcattcccttccttttatagtccaaggtgagagaatgatatgttacataagttcgaggggtcagatggaacgagctagagtcagattatgtcacataacttcttgtcctccggggttctcgttggccgaaagacttcacgaacaacccctccttccttcattaggatggtgtagcgacgccattattgtcgtaaaacctaccattatgctatgtcttgtcttgtggtggtcttctagatgtcctttgatgacttctttgtgatagggtggttgaactggtgtttagcgccacatcctgacatgttacacctacgtcttgacacaccaactcttgtgccatcatttcag

SEQ ID NO: 84129 - DNA, 691 bp, Zea Mays
caagggaggattggtcgaagtgccgaaaccgtcggtgataatggtacaggagaaaaccaagacgaccgaagtgccgaagcgaactagtgaaactgagaaaacagctaaaaaactaaaaccaaggaggtcggtagggcaaccaaagattctgagcccgtcgcaagagacggagctgccgaagatgacaaaaattcctacagcaactccaaaaaggaggagaatggccagcgtattagacgcggtcatggaatcgacaaaggtactaactcctgcctctgcagaagtacctaacataggttaaaagaatacgaaggaaactgctgaagtcgtcatgacccagtttgaaactgaagctgagcccttagctcccacagaaacggggcctatggaggttgtcgaaaagaatattgaagcagagccttcagatgctacaaaaactaacgaagagtttgaatcccctactgctgaagcctctactgaaggatcgaaatatatagtgcgtcacgcggcatggaaaaactatcagaagagcagattgctgaagctatacattatgccaaggatttgaagtatcccctaggatccttggtgtttaatggcagtgatgaagatgatttttgtattgccttccggacaacaaggagtatttgtttgccgggagatggctgaaaatataggattcccgaagcta

SEQ ID NO: 84130 - DNA, 438 bp, Zea Mays
cttgaattttggctatgaaattttttcttttccgataacgagaccaagagtggaagaactttttattagcatcaccatctttgagccaggcaattcttgatctagtcctagccatcgagcggattaaggaggcaagagccagagagcatttcttcaagcgcccaagcagccatgtctccaaaacattaagaattctgctctcttttgccacttcaagctacagcaatatttctctggcaagctcaagttgcagtttgaagtttccaaactttttgtcactccaactttgcagcccttttgttgtcgccttgaattttagggaaagggtcttgaggggacaagaagactgctgaacagaaccccaggcattagttaccgcttccacaaatccatcaaatctgggccaaaaggattcaaaatgaaatatccatttcccag

SEQ ID NO: 84131 - DNA, 583 bp, Zea Mays
tcggggtatgggccaaaggctacttacggggtgcgtcatcgtcctggcgcgtgatgatgtcgagattccctgctacactcatcgagatcaaagcccctggttgatgcggaagtcttcccgaggcgttggccgagctgtccctcgacgtgcgctacagtcgggcggagtggctgtctgcgagattcgcgacgtagttggtggctgaggccgagaccgagggatcgtccgtacgcccgagctcccgaaggagaggtcgcccataccgtagtggttgtaacagcgctggggtatgggccaaaggctacttacggggtgcgtcatcgtcctagcgcgtgatgacgtcgagattccctgctacactcatcgagatcagagcccctggtgatgcggaagtcttcccgaggcgttggccgagctgtccctcgacgtgcgctacagtcgggcggagtggctgtctgcgagattcgcgacgtagttggtggctgaggcagagctcgagcgagccagagaattcgctcgagagctgagcttgtcgtcgggcgaggaggagaaattgcccgaaggctggacccggggtcgggcg

SEQ ID NO: 84132 - DNA, 558 bp, Zea Mays
aaaaatatttcatcttcccttatttgttagacatgtgtgtgcttgaactacttctcttattctcgtttcctatcactagacttgttgcaagcccataccctaaaatatatagccttgctcgcatatcatgtagtatctcttgttttgatcagaatgtgttataccgtacgacctatggtgatgcaccacatagtgttggaaaaagaacttcgacttagataatgtattgaataccatccccacactaatgattccattttgagggtcatttcatagtttcctaggcaactagaggccagtgccacaaacgaccttatcgatcatgctaatgtcgctatagtttggaacataaaaaaacaaccttgaccaacgtcaagtttgtcatctcggtggatacgtaaggcttcaagggcatgtactatcatgcttcaaacaatctctcccatgaattgtactcactagctaggttcatgaggatgatcaaacaaatctattactactctatactccgttgatcctgggtaactgttacgtacctctactaaggtaccttctcca

SEQ ID NO: 84133 - DNA, 300 bp, Zea Mays
cgccatgcacgctaatacgaaaaactgcactctatcctaacaaccaacacaaatataactccaggacgcacacaaacatgatctaaaaccgcatagctagccttcatggatgcatgcatgtgcgctcacgccacgccaccgtgctaaacccatacgccatgaccaggacgcaccatgtttatcttagttacaatcactaactcaactacttggctcaggagtgaagacattaactagaggttgcagatccatttattcatgagtacttgaactactacaagaagattttaggaaacaaac

SEQ ID NO: 84134 - DNA, 342 bp, Zea Mays
tagtgaatatgatgaattgtttggtgccatgaagttttccgtatatcttttcttatgctgaaagactgcagagtcagatctgatatgtgtgtgatttctatagatgtctgagaacaggcgtagaggtgcgaggcgtgctcagccgaaacaacaggcacctcaggaggatgcagcccagcagcagcagttgccaccgccacccccgatgatagttgagtagatgttcatgatgcaaactcaggtacttcaggcaattggtcagaccttagcagcgatgcagcaggtgcagcagcagccacccccacctcagcctccagtgcaagttcagatgccacaagtgcc

SEQ ID NO: 84135 - DNA, 478 bp, Zea Mays
ggggtgcaatttttttggcaggctttgcttgatcgtactacgcggttcgccgcacatacaatgtctggccagtaaaaaccttggcgcacgactttggcagcgagggctctaggacccgagtggcagctgcatgttcctttgtgtacttcacggaggaggtctacaccttcgaccgtcgtgatgcatttgagcagaggttgatagattcctttcttgtacagttgtccttctattagggtgaaaccacgacttcagtacttgagtctcttgacttcggcttggtatgtggggtgatagtgtccttgtaggtaaagggcaatgggggccctccatcctttggtcataatgagacctataattctctgcccatcggggtcccttacgatagggtcttcgactatctgaaagaaaacgtccgacgacatagggtctcctcttgtagcggccttcgcaagtgcatctgtctcttcgtttttgc

SEQ ID NO: 84136 - DNA, 335 bp, Zea Mays
cttcagagcccaccaaggagcaacctttggaaaccgaagaaaaagctacaaaggcagctttggaagccgaaaaaatgtcagagccaattttggttgaagaaactgacactgctgcccccgaagcaccttcctccatacgcgattacattgtgcgacatgcttcgaggaagaaattatctgaagaagaaatttatgaagctgatcactatgctagagaattaaaatatcagaagggggcactagtgtttaatgggacaaacgaagatgacttcctatactgcctcccggacaacaaagaattatccgtctgccgggagatggctagaagtatgggg

SEQ ID NO: 84137 - DNA, 338 bp, Zea Mays
cggacaggggaacacagttcacctcaaaattctggatgagtcttcagcaagctatgggcaccaagctagacttcagcaccgcctatcaccccagtcagatggtcagatggaaagagtcaacaaagtcctcgaggatttattgagagcttgtgtgttgacctttgacaagagctgggagtccagtttgccgtatgtagagttttcttataacaacaactaccaggccagtatcaagatgtcactgtttgaagccttgtatggacgaaagtgccagacccctctgatgtggtccaacgtaggggaaaagacactagaagggcctgctttcattaaggagg

SEQ ID NO: 84138 - DNA, 509 bp, Zea Mays
gtagaacttcgttcattaaacgcataaaggtgttgggagcattagccaatccaaatggcatcaccatccattcatataaaccaaatttcgttttaaaagccgttttccagtcatcaccgagtttcattctaatttgatggtacccgctacgcaaatcaaccttagagaaaataacggcaccactaagctcatctaacatatcatcaagacgtggaataggatatcgataacgaactgtgatgttattaatagcacgacaatctacgcacatacgccatgaccatctttatttggaacgagtaaaacaggaaccgagcaagggctaagagactcacgaatgtaacctttatcaagcaacgtctgcacctggcgctggatctccttcatctcatctggatttgtatggtacggggcgcggttcggaagagaagcgccggggatgagatcaatctgatgctcaatgccacggagcggaggaagacccggtggtatgtccgtaggaaaaacat

SEQ ID NO: 84139 - DNA, 431 bp, Zea Mays
gaatttctcctccgatccccgtcctcttttttaggcaaggcgacgccaagcgctacgaaatgtgcatcgttttcagggtaatttgtggccttgcccttgtccgttgcgggctgaaaacgctcgcctactggaaatcggtggaaagatctggccgcctgtatgcggatcgcagttcaagacgacgcaggcggcgttgcgtagaacggcgttcagatgcgcatgcaggccagattagattagattagattacatgacatgagatgcgagatgtggacgacgattcctaattagtactagtaatgtacacattttatcgtctgctgagagtctgagactatcatcatatgccttccattgtttcatggctagctgcaaaacatgctggaaggccgcgtgttttgtaacgaaaattcaagagataaacttatgat

SEQ ID NO: 84140 - DNA, 443 bp, Zea Mays
acattcgagtacaagagcttagaaatagctttgctactgagagaaaagactagagtgattgtgtgatcaacttcttggtgttgtgttgtgctcttggagttgtgttcttgctctcttgtgttttagagttatgactcccatcaatctataaaggctagcaagagactctaagtttgtggatgttttgcatcatctgaagaagaactacggggctcaagtttgatcattggggtcacttgagagggttgaaagagaccccatcctttgggacacctcaacggagacttaggttcattggaaccaaactccataaatcaaattgcatgtctctcttaatgtgtgtttgtctttatgatttgatcttacctctccctctctaagttcttgctttgatcttcacttgtgatttctctcaaactaattctacattcattaagagcaac

SEQ ID NO: 84141 - DNA, 826 bp, Zea Mays
tgactttgcaaaattttggagaatctctatcagctggaggggaacaatgtggagcagaggaaggctcagaggttcgctaaccaactgatagcaatatggttagcatgtaggagctcgacagagcgggagaggtggatcatgtgagcatagggtggcatgtgtgtgtggcacactaggaggaacaaaccagacacaatacaatgtagggcatgagtgtgagcacacgagtaggtgaatcaagtgcggtgtctctaggcggtagaggtgggtggacttgcacacagggaaaggtagaggtgcaatgacacaatggggaagaaagccccatggcatgcaagagagagttgatagaagagaatgagtgaggccccatgagtcaaatacaagaaggcaaagcttatgcctaattcagtcgttggaccacccatgtagtattgtcagacccacaggtagagtcagatgcatgcacagaaaacaccagagagctcttgtaggccattggactggtttgacgagcaacatcgggctttgtggtaggagtgtgcaggtggcatatgcgatgtacaatgacattggactagtccaatgccaatagaggtagcatcattggacggattgctagatctatgtaaaatcatagcaacaccaacaacaccattagaccgatccaatgcccagcaaaagaaagttgtgagatagatcagtgtcatcgttccatgcaaagaactaaccctagggacatcagactttcatccaatttctggtccaacattggttcgacacctataaaagtttatttctagtttcatttatttgtagtgttttc

SEQ ID NO: 84142 - DNA, 805 bp, Zea Mays
tgagccttggcccgggtataagaccagccaaaacctgcaaccccttcctctcatccacttggtaggtcgcaccgtcaagatcgactccggggaaacatgcaatcggggcagagtgaggtctgggtgtgggagattgacaccgccgcggtcgaatcaagcctatggtgacgagggtgtccacggaatcgggcctatatgcctcgccatgtcgtgcacgatacattcagagcatcgcttgggtggattcgtgcttggatggtgggggattgctcatcgatgttcaaaatttgtcgtcgaccgcccccactgtggccttatggttctgtgtcgccgcagtggaagtaaggtacgtacatggaattgttgtcttccccaaagtatttacagcctattagtttaagatttggggcatcggggtagctcgagcggaccactccggtgttgcgccatgggcggcgccaccgcgggattgttgtaatgctgtgtccggtcagctggagggaagaagatcccctgaccgtcgatttagtgtcgaacagatcggattggatgtaacataacgattcggtcgggtgtagcttgagccgtccgattcggatcaatcgggcgagatttggtcttagggtttttaaatctggaacgtcgattttggatcgatcggcttgtatcgcgtactgattgggtggggcaccgatataatctgggacgtcagcttgggatcggatggctgtagtttcaagatacctcttcgctatggcagattaacataagagacactacacataggccctagaatttatgaata

SEQ ID NO: 84143 - DNA, 673 bp, Zea Mays
agacaggaccatcccgctatcccttcagattcaggcgccctcgaaaaaacgacggtcagggacagggacatccgtaggacgagcgtcatcaacgctcgtgtgaggagcatgaggaagagagaccggcagaggatgggaggaagaagggcgcgtccggcccggtgagcttcggctccgtcctaaccctagcgtgcgcggccggccccgatgagctcgcctgcggaggcgcggggcgcgggcggaaagagataaagggaggaggaggaaaaggaagaataaaaaaaaactgacaataggccccatccgtcagtagccaaacagaaaataggtatctcgtctctcttcaggcaaaccaaaaatagtcatctcgccaccataataaacccagagacagcactatccccattccagcacttttttttatctcgggtgggtcgccctgagccatcagaaacgcttccatcacgtagatttgccctatggttgatggcaggggtaaactacgacaaggcttatccaactacatgctcccaaaaaagaatattaattcaagccatagaccgacactcttgattagcttatggtcgtccaaattattgctcccttagtcttaaattgaaattcgttttaggaaattaatggattcgaaccatacttgatgtttatactttat

SEQ ID NO: 84144 - DNA, 395 bp, Zea Mays
ataaaccagcagcatccacttcaacatcagtgggttcaacaaccaagagtagtggtattcagtgcttcaagtgtggaggtcgtggtcatgtcataaaggagtgtccaaataatcatgtgatccttgtgaatgatgatggagaatatacatcagctagtgaagaggaagctgaagcaggaaatgtagatgacactcataaaattgaggaacatactggatgtgaatttgagcatgtagtgctcttgtggttacacaaatcttgattgttcaaatgaaagaagttgaaattggacagcgacataatctttttcaaacgcgagcaaaagtgcaagacaaagtagtaaaggtgatcattgatggagggagctgccataatcttgtaagtcatgagatgg

SEQ ID NO: 84145 - DNA, 271 bp, Zea Mays
atcagatcattagccaactcatttccggcacagttttggaatgatgtccatctagattgcatgtttgtggttattgtgttcctggcattcaatatggcatcaacaagcacaagtgctgaagttttataatcgatagttacagttcaaaattaccgcgttgttttacaactgaaaacaaatggatttgcacggtttgattattatgattaagatattcagcctgtaacatagtttgacattatttgcacgagtttagttcatatgtttgcta

SEQ ID NO: 84146 - DNA, 898 bp, Zea Mays
gtttggctctgtgtctaagtgttttgagtctgatgattctgggagttcgattgcgtggacggaggagtcttcagatgaggacttggattattttgtagcattagatgtggttgcagcggagcattcaccgcgcgcgaaggattctgaggggctcccgggtgcgagtactgggtataggcggcgaagggcggtggcaaaacggagagtgagtggattgtcgcaaagtggtaggcgtcatcgtagtgagatggagagtggtcgtcttcgcgtggatgggactggtaaacgagaattgctgtcctcgccgattggggtgagtgtaggtgaaggagagctgcgaaatctttttgagggtgaggaattgaggatgatgctgttcaactacagggagatgggtatcatcccgaaggttgagccaatgtaatatatgatgccctcgctgtgtgtatgtaaccaaaatttgtatgacaaggctgcgcgccttcattgatccggccacacccgtaggcgacttctgcacggtgtcttttgtgaaagactttgccctttacgtacttattgtgctgttccggctgcacccttaggctactcttgtacggagagttttttggaaaaggcttcgattttgcgcacttattattccggctgcacccttaggcgacttttgcacggagagtcttttacaaagacttcgataatcgcacttgatgtgttgttccggctgcacccttaggcgacttttgggagagtcttttacaaagacttcgataatcgcacttgttgtgctgttccggctgcacccttaggcgacttttgcacagggtgttgcacgcgagggtagtcagcgctgcccctcgcggtgacttcggtgtggtcgaatgccgaagaccgtcggtgt

SEQ ID NO: 84147 - DNA, 471 bp, Zea Mays
aaattaattagggactaggtgtaagcctaattccctttcattttcctttatagctaatcatgcatgggtgcgggccaataggctgggtttatgggggcagaccccaccgggttggcgtacccgtatgcactacctagttacaaaagggaaaaacttcgacccctcagacctgctctatagataaaacttttagagatatttcgacactgggggaggcattccttcggtcgtagctagacagttgcccttgggtcggggtactcccattaccatgaagggtccttcccagctgggggagtgttacatagccctaatttggtctggtactctcgtaagattaggtcccgaccctgggttcctatctgcatttgacgaaggaggccccgcctttggctgtggtccctcctggatgaacctgtcagaaagttggacccgtggggaatccagatgggtttccggaggaaggcaggc

SEQ ID NO: 84148 - DNA, 612 bp, Zea Mays
ctttcagggacctaattagagacaaagtggaagtctacgtcgatgacatcgtggtcaagactaagggagggtcgactctagtggaagacttaaccctggtcttcgacaagctgcgggcaacccacacaaagctgaacccggacaaattcgtctttggtgtctccgctgggaagttgctggggttcctggtttcgtaccggggcattgaagcaaacccgaagaagatcaaagcgattgaggcaatgaggcctctggcctgtatcaaggacgtccagaagcttatggggtcattagccgcccttagccgcttcatttcaaggctggctgagagggcgctgcctttcttcaagttgttgcggaagtccgggcccttctcttggagcgaagaggtggaacaagccttccaggagttgaagcagcacctggtgtccctactaatattggtagctccagagccaggggagccgctgtatttatacatcgcggcggctgcagaagcggtaagcatggtgctagtcgtcgaaagaatgacaccagaaggccaggaaccagaggactcgggaccggctgcaggagtccggacagtccagaggccggtctactacatcagcg

SEQ ID NO: 84149 - DNA, 584 bp, Zea Mays
cacacttattgtgcatgcttggctgcacccttaggtgacttttgcttggacgtgtcttatagaaaaaacttcgcaccctgtgggtgatgtcgcacacttattgtgcttgcccggctgtacccttaggctgcttttgctcggacgtgtcttatagaaaagactttgcaccctgtgggtgatgtcgcgcacttattgtgcatgcccggctacacccttaggtggcttttgctcggacgtgtcttatagaaaagacttcgcaccctataggtgatgtcgcacacttattgtgcatgcccggctgcacccttaggcggcttttgctcggactttgcaccctatgggtgatgttgctcacttattgtgcatgcccggctgcacccttaggcggattttgcttggacatgtcgcacgcgagggcagtctaggctgcctcttgcggtgactgttttgtgcggtgaatgtcgaagaccgttgccatggtctttttcaacacccatggccatgatactggctggattgtttgtgtgggggctttttggtattatattatatggcttcgcctcgttaaaaacctcaccccccgg

SEQ ID NO: 84150 - DNA, 368 bp, Zea Mays
aagtaagcgtgagcatgtcgcaccgacttaagtcatcaccgacttaagacgattgctccgttagcagggtatagtggtcaccctaagtcaagtaagcgtgagtatgtcgcaccgacttaagttgtcgccgactcaagccgattgctccgttagcagggtatagtggtcaccctaagtcaagtaaatgtgccgatttcaagttaagcccaatcgaagtcagttgcaagttgagaatctgaatgtctttggaaaatgaaaactttattgatgatgaagtcttcagattacagagcacaatatttcttcaagagtgttttaagaccttgctaagggtagaactttctgaggtgttctatgttccacgagtt

SEQ ID NO: 84151 - DNA, 472 bp, Zea Mays
ggaaatgatcaatttaataaggtagggcttaatcttgctaccgaagattcttgtggtatacttggcaaattagggtcaagcttggttaagctaattggtaagtttcttttggtgtcttactgatttccctttaatgtcttagtgagagtttattaaagtttctagcttaatcattagagtgagatttattattccccctttttctcttttatttcctttatgcttttaaggtgggtttgaactacaagctagcttaataaatttccaaaaattctgcaaaaattacagtggctttttactggtgtataagtctatgtctcaaaatttggggtttaaaaagtgagtggttttctctgtataaaattagcaaatattagggcagagggggtgtttgaactacaactaccttctaacagagggttattctctacaacatatttttactggcatctagatgttataacatgacttt

SEQ ID NO: 84152 - DNA, 613 bp, Zea Mays
tgttggcacatgcatggctccccagggagaaatattaattcggtaaactggttacgtgtgcaattttagttttctttagtagctgtcaactacttggaatataatgacagcgctacttcttcttttgttcaattgcaaatacaaaatgttttgtcgcttctttaatttctcggtagatgtatatgctgaaccgttgttgatttttcataaagggtgtctctttggaccattttctggtagattaaaattatctattgcctctatcgataaattctgattgcgtaaaattttcataggcacggtctgcgtgtgtgtgtgctggggccgtctgagaagagaaggccgtcgtctaatcatgcatactaagcagcggctagcatgggtttggttgtacttgtactttaccggtggaaaaagaagaagaagaaaagaagctgactggttggttgggttgggtatctatgcatggtcagagacggttggctatctaggctgctgattgcttcgtttgcgtgtgttgtggttggccgcaccgtcggggacgcgttctctgcaccgacgtctgtgtttcccttactaataaagcgggttatattaaatatataaatatcaa

SEQ ID NO: 84153 - DNA, 408 bp, Zea Mays
ctttaaaattggaacaaaataacagcatacatgtgtcacagttcgaaggaaggtgacaaaaatctagaacagtggcacccttaattgatacttccctttctaattcccttttccacataactttcatcctgaaagtgcaccatagattgcaatcccacgcctcctgggttactatatactccatgttgtttgataggacaagaagaaatttattgggggccttcatctttcaaaagtcctaaaaacacacttaactattggtcgctagtatgttcttaagtgttgcaggagcttcggtattgagtaccttcggaacaggataaggataaagaccgaaatgttagcttcatcacaacaacatatagaaatgaaggtggacaaagccaggagaagatgtccatgatttcg

SEQ ID NO: 84154 - DNA, 412 bp, Zea Mays
gacagttcatgttcagatggtcatgtttacatgttcagatgtttagatgttcagatttcagattacatgttaagtttagatgttcagtttagatgtctacatgcagtttagcatctctcagatttcaacatgaactgggcagaactctgaactgggcagaacatgaaaatgcagaactctgaactgggcagtttagcatctgaaaatgcagaacatgaactgggcagctaaagtagaatatgaactgtgcagaactctgaactgggcgctcggttacatctgaactgatagcattcagaactctaaactttagcctcctggacagaggacagttgatgattaaatataaatgcgctctgttactaatgaacaaacttgactagtgcaatggtaaccccttgctactgtgaac

SEQ ID NO: 84155 - DNA, 1030 bp, Zea Mays
aaatattccaatatgaaaaggtacatttagttatatatttttctatataccttatatactctctttttcctcaaatcctcttctcgttattattttttttcatgttattatttatttatttttattgtcacaaaatgcacaccaaataaagtccagcatgatgcacaggttatttatgtgttcttggttctaattatcctcttttaactagtgttgatcatatgtaatgaatagtagagaccacaaactattgagattatctctatcctcttctattacacttttgagtattacaaatcctaccccccttaaaaaataatctcgtcctcgagatttaagaagatctagggaaaagatggggaaaatctatacgaagctcttcttctctttcccaagttgcttcatcttcaccgtggtggctccattgcactttgcacatctttatcaccttatttcttgtaactcgagtcaaagtgtccagaatcttgacagggtactcagcataggtcagatcatcttgcacactaaggtcctccattggtagttgctcctcaggtaccctgaggcatttctttagctgagacacatgaaatacatcatgtacatctgacagatgattgggtaactccagttgatatgcaacttctcccactcgctttaagatcaagaagggtccaataaagcgaggggacaactttcctttaactttaaatctcctcataccccggagtggtgacaccttcaaatagacatgatcaccctccttaaactctagtagtcttctcctattatcagcatagctcttttgcctggattgtgcaattctcaaattttctcttatcattcaaacttgctcttctgcctcttgaatcagttcaggcccaaagaactgtctttctccagtctgatcccaatataggggagtcctgcactttctcccatataaagcttcaaaaggtgacatcttcagactggcctggtaactattattatatgagaactcatcatatggtagacttttatctcaact

SEQ ID NO: 84156 - DNA, 418 bp, Zea Mays
cctggtttttgcctcatgaaggacctcgcttacgtagtagaccgacctctggactgtccggactcctgcaactggtctcgagtcctctggttcctggccttctagtgccgttctttcgatgactagcaccatgcttaccacttctgcggccaccgcgatgtataaatacagcggctcccctggctccggagctaccagtattggcagggacaccaggtgctgcttcaactccaggaagtcttgttccgcctctttgttccaagagaagggcccggacttccgcaacagcttgaagaaaggcagcgccctctcagccagcctcgaaatgaagcggctaagggcggctaatgaccccgtaagtttctggacgttcttgatacgggccggaggcctcattgcctcaatcgctttgatcttc

SEQ ID NO: 84157 - DNA, 533 bp, Zea Mays
ggggctagattgagcatcaggaacagttggcacgtcatcgatagcacgatcaaagtcttcagggggacggtctactacaaccggacgcaccacaaccaccatgagttgcaaatgggtcttcatagccgaagtaacataattatcccaatccagttgacaatcaattgggatgactcatcttatgacatttggtggatgaccaatgttaagcactccgtcaaccgcaatgtcatcatcttcatggtaacctagcttttgtttagcctttgtaaacacatcactcaaggagggtctaccaacgaatagtaccgacacgtgtcgcatgtcaatgaacttagcatttccatacggatcttgttccacattgtctccatgatataagctcaaaaaattgtccatctatttgaaacacgaattaaacattcaatatccactatggatggttattgcctaaccacaacccactaattactagctacataactataactataaccacaacccactaaaatactaaccaccttataactaac

SEQ ID NO: 84158 - DNA, 578 bp, Zea Mays
tggctgggtgaggcggtaaccctaatgccgagtgggttttgttcctcgcacatctagggccacctaggcccatggcgaaatttccccgccgtgctaagccaagcctgcactactaggcacataggattttctcgttccagtgtacgcagaccgatgaccccccatttgcactacctaggatagcataagaggcctatgcgagcatccaaacatccatgggttgtagcaataggagctatctaggggcttgtgctacctaccatacacatcctatatgaggggattttgttttattagaagaaaattgctactcatccacctgtagaccgcatctgatatctacgtatctggtgtgagaacatccatccaactgtttgaccttgttgttgtaaatgtaaacagaacaaatataagggcctacttgtatattgttgaaatataatatggaaggatgggtgtgttgtgtaagttgacacacaccaaaatcaatatggtatacaaagctagggttggtgtcccttaccactggcactgccactagagctaagtttgcatgtgtgagagagaagaaggccatc

SEQ ID NO: 84159 - DNA, 502 bp, Zea Mays
ttcatgctaagaaacaaagagatctagtcttagggttgacgttacaaacctacacaaccggaactctaacccggagaggcagagatgaggatatgtgctagcgggagcaccaccccgatagacagtgagcagtgagattgatcaatagaaggcaagagcagttagacagggatcgagagggaaataatccaagatatgaggaggaagacagacgatatgcaagatccaacagtggaaaggtcgtcggagagaggtgggaaggaagaaaaggctatcatatagtaggacgagaggagattaacaagatccggtaatgtagacatcattagagatagagaggacgatgagagaggtgataacaatgacagataacgacaagagaggcggatggggatagggtttggaggtgggaggctagaagggagaatggccacaacggcagggttgtatcccatctcctagctagctagcgcgccttgatttgtgccacctaagactttat

SEQ ID NO: 84160 - DNA, 301 bp, Zea Mays
cggatggttctaaagaaagtgggttagctcaaatttttaattcctctttgtgttttataatgcatgcatgctggaagtaacgttgcctctcaaaagaaaatagagtgccttttagggcatccataaaaatatataagtactggcccacggggcctaagtaattagccacctaatttcccctctatgcctaaggcctttcgtcctaggtctagcggtctagtcctgacgatctgtagcagtttctaggcaagttttagattttgaaaattggtattcatggtttatcatctttctctgtggt

SEQ ID NO: 84161 - DNA, 946 bp, Zea Mays
cttattacctgccaaatgttcaaatacaaaagccaatggaaaataaagataccccagctcactccacaaactctcccccgttttggcaccaagcaccaaaaaggcaagagaaacacacctcacagtccactatagggatcaccaccaggcaacggcgtgaagatctggtcaaagacggctgtggcaaagtcctaattgcttaaaggagtatgactatgaggaggcggaggagcctgggaggacgaaggccgatctggacgcgaaggaggtggaacaaactaaccatgtccccaaacaacatcatcttcaggagtggaggaggggacaccataatgatgttggtgccactgctcgatgtcttcaaagggttgatgtagaggtacatactaggagcgaggtggcagaggctcaccagggaagactgactgacgacgaatgttgtcgtatgtctcccactggcggcgagccaactcatgcacatctccagagatgtcccgacacatcgataacatagcagtaataccattagcaagatgtgagccaagacctctgcctcgacctctaccacaactgctacgatccataggacgtgaagatgaagcagcacgagaagatgatggatgacaaggaggcataggaggaggctcatcagaagagtaatcttgcctagcagctccagcaggcgctctctttgatcttccagtgggattggtagaatctatccaatagggagtgtaggcaacatgatgaacttctttctcgacccatgtctgagaaacaacctcaattatcttcatgataaaaggcgcatgaacacaacccttagttggatagaaagaaacataaattatatcctcccaaattaggtcaaaaacattgagccgatgggtcttgttaggttgcataaagaagagcagtgtctgactgtcaccaaggacattgacct

SEQ ID NO: 84162 - DNA, 881 bp, Zea Mays
ggagcagtgaagtatgaacgccaaggcttggggactgagggactagagacaccgaagaactgattatggagataccgaaggactgattgtgggtggctaacacttaggaccattaacagttgtaagagtacatagaggagtagaccatgttgaccaagtcaagattacaatagatcaatcaagcggaggtgcaggagaacttagtgatcagttggtcgaggaccagaggtgacttatgtcgagatcacaaagtgaacatatactccaaagtggtttggtagttcaggcatcaaaatcaccagcacacaatttttgggtttgggcctcaaaacaagagtagagttctggtaagaacttgaagcggcatgtggcgtccttgtgaagtttgcattgatgcaaagcaaagtcgtgagagctcatgaccaacagatctacagatcttaagttcaactataacgctcctcagctaagtggttcgactttaattacctaggaataagttgggaatgtgtaacctcttagtcttcaccacgcgtagcaaagtcatgaagaacatctggccgttagatctatagattttgaattataacataacaccccaaaggttaagtggtttggctctaattacctatggacaagaaaaattcacacccttgagaggaaaattgagaaaaccccaacctctttaattattgtttagatcatgggagtttggatgggttctaggtgtgatactttgaaaatatcctctcaacaccctccagaacatttctataaaattttaaattgatcgaagttgatttgaaccctcaacgaatttttttccaaaaagaaatcaggagcagatcatccataccagatatgtccagtgtaaataccgg

SEQ ID NO: 84163 - DNA, 324 bp, Zea Mays
gggatttgaacaaagctcgggaggaaagtagactgcttcggctaccggggaaatgccaggggtcagaagaaacagcgaatgatgaacgtgatgcaagccatccaaaataccccgccatcggcctcggcgaaaaaaattgttctacctgctaatgccgaatataatgccgaagccgaagctaatgaagctgcgcctgaagctgagaagctcgggaccataatgttagagattgacagacttatatctgatgtggctaccgagaaggacatagctgaagtatccactgataaagcttcggctttaaaaatgaaagaattgaaaaaa

SEQ ID NO: 84164 - DNA, 837 bp, Zea Mays
gtacccacaataccatccatagagctccatgtaaatttctcacttttagatgcttgtagagaccattcaattttctgtgcatccttctcgcgatctctattgtgatgctacatagttgtcatcagccttgatgatgataacaaagacatcaaagaaatttgcttcccaatgatacttgaattaactccactaacttatctaacaacttctaaaagcatccattgtcaattgtctagcattctctgagaatttcatggataatttccaaagcatgtaacctcacttaaccaatagccatgatatcgaaaattgcaagtagaaggacgatggaagcatatacgactactataagcacttcgctttaaagtttatcataaattatcttggatctaaatgacaatcataagttgggagcatgtttaacttgtagcccaaatcccaatgtgctagttgaagatttgttaacaaaggagagctagagttaatggagatgaatgaattgggagaccttctttcttgcaaggcctttactattgtgcataggttgtcgatatatagaacatcctggttgtggatctcttcattaatttctggtaaggtggcttcggcttctatcttctactttaatggtttctctcttactctcgttcgattgtcttcgagttctttatccttagcatgtagttgatcttgtagttctttgggtctttgctctttggttttgttctggtttgaagcagtttggttgaggttttactcttcattaatttgtggtaagttattttgtttttgttgggcgttgttttctatcacacccagattttgggacaagcccag

SEQ ID NO: 84165 - DNA, 756 bp, Zea Mays
cagggtgtgaactggcagagcaacaactcttttgatggaggctagagctttgttttcttacatggttactccagatgaaagcattgtcccataagagcttattttgattggggtgatttggttcaaattcaaaccaaagttattttaatgattcctgttccgaacatcgctctagggagtcattcatttctgacatcttactggaagattacagtatgaagtggttaccaaggagatacggattaaaatgtgcttttgtgcaactcattgatggattgggaaaacagcactatgttttgattaaaactgtatatgttcatatataacctttctgggtgctgaaggataaagtgaagaccttcaaaaaactatgtgcagtcaagctcactcatgtaagcacggttctaattcataatggtggccaatctattatgatgttagctgattatcatcatatttgtgctcttatacagtatggattatcaaattctctctttcagtgctgcacgccattttacattgtcagtgggtgatgaccgaagtaatttctgacttaccttcagatggacaaaggatcatctcaatgtctatcaacttctgtatataagttgctgatggttagacacaagggtgaaatatgtggtgaaagagaacttctgaaatccataattctctattcatcagttcagtgattcatccttatagctccttccagtgtttttgctctcgtaatagagcaataaagatatgatgaaa

SEQ ID NO: 84166 - DNA, 650 bp, Zea Mays
atttatttttaccaattaaagagaggagagaaattatttaattttaaatctaaaatctcattctagaaaagaataatgataaagcagtgcattagggttgccctagtagcttttggctgaacatctgcacgccccgtgcttttctccactcagtcactgataggcggaccaacatcgttaacacctctttcccacacacgtgctctctctatgtcgctaactagtgggcccctactgtcatccctaaccacatgctcctttttatcagttcacaacgaactttttgtcatagattggctgcctttctttgctcagctccttgtcgccactagaggatgtctaggatcacacgcaccatttccatcctcttttccccacctaattccttgtgggcaccgattagcctgagcacatcttagggttgccaacgagtcctttgaatccaccaccatcatcatagcctttccatccaactagaccatgctagagtataacactgtctcactcataatccatgctcatcttgtatcaaacaccaaaccatcagaagtcctagcttaccaggcctagtgccgccaccaccattgctcgagctccggagagcgttatgccctctagagcacctcgacattcatctatggcgctgttag

SEQ ID NO: 84167 - DNA, 920 bp, Zea Mays
caccgccttaagtcactgccgacttaagccgattgctccgttagtagggtatagtggtcaccctgggttaagtaagcatgagcatgtagcaccgccttaagccattgccgacttaagccgattgctccattagtagggtatagtggtcaccccgagttaagtaagcgtgagcatgtcgcaccgccttaagtcattgccgacttaagccgattgctccgttagtagggtatagtggtcaccctgagttaagtaagcatgcaggttgacagtgaacaatttgagtgcctttgaagtctttttattgatgatatatttcccagtttacagagtacactgtcgtcccaatagcttttgagatatagctaggggtaaaacttcctgagatgttctatgtttcatgagttcccaatttccgtgccgtccatttgaatgagacgatatgatccaggctgagtgacttctgctactatgaatggtccttcccatagtggcaacagtttgtgtcgtccctcccccgttagaattcggcggaggacgaggtctcccactgcgaaggatcgatgccgtatggccttgtcatgatagcgcctcagagcttgctgatatcgggccaactgaatcaccgtattcaatcgttcttcttctagtacatcgatatcctccagcctagtagcctcagcttctgctatgttttcaaagattaaccttggtgccccaaacttgagatcagcaggtagcactgcttccgaaccatagaccataaagaaaggtgtgtttccatgcagagctcgactaggttgagttctcaggctccaaacaacatacggtagctctctgatccactttcctgcgaacttttcattcttgtcgaagactttttttctgagtgcctccaatatcaccccgttggctctttccgc

SEQ ID NO: 84168 - DNA, 1203 bp, Zea Mays
gaattccactgccatggctgaagttagagaagcaatgggtttgtactctatccatttggtgaatttatcgatggcgaccagcacgtgagtatagcctcctgagctttcttgaagggtccaatcatgtccaatccccagcatgccaatggccatgttataggtatggtctgcagctgctgtgatagtaaatgttgttgctttgataagaattggcattggcaagcttcacatctcaggactaacttggctgtgtcaccctttgctcttggccaatagaaaccagacctgaagactttccccaccagagttctgtacgctacatgtattccacactgaccgacgtggatctcatctaatagctacttcccagtaaccgaggaaatgcacttcatgaggactcctgtcgcaccccttctatacagtgcgtcccctatgagggtgtagtgggccgactgtctcgtgatgcgttctgctgcagccttatcatccggttcttcctcattctttatatacctaatgataggctctcgctagtcattagagtctgactctagctggctcaaagtgttgcactcttccacctgatctgaggaaatacttgggcatgacacttcttggacgaagactctaggtgggacttgggcccgactggatcctagcttcgacaacgcgtctaccgctgcgttgcgatctctttccacgtgatggaattccaaaccttcaaatttgtcttccaattttcggacggccgcatagtatttgcccatggaattagtcgagcaatcccaatctttatttatctggcttgtgaccactagtgaatttctgtataccatcatcctcttaatgcccagtgatatggcaatgttcaacccatggatcagagcctcatattctgctgcattatttgatgctgggaattatagctgaagagtgtacttgagttcacctccaggggcaatgaagaggattcctgcgcctactccctgcagtttcagcgagccatcgaaatacattcgccatacttcagtagcctccgggttgtcagggacttgttgctcggtccactctgatacgaagtcaaccagtgcttgagtctttattgttgtgcgaggccgaaactctatgtcgtgagctcccagctcgcaggcccacttggctattcttccgatggcttctttgttgtgaagaatatcccctatt

SEQ ID NO: 84169 - DNA, 465 bp, Zea Mays
cgggaaggagacagacttatggccgtaggatctatcgaggggcattctggattgatcgtggctagatcgatctggaccattgaagcgtcaacgcacggataggattagggcgcgcataccccttcgcgcgatcggatctggacctccagattttgatcggatggcttagaatagaacgtacccgttcggtcgaggcaagcttataaaagagtccctgggattttcaattattgatcccgccatccctgcacagtttagaacagttacagataagtccctgtgaattacaatcatacccctggagccctatttaagtgcagaataaatattaaaaataacctaaaacttgtttaacccataacttttacgtcttaactccgaattgacccgttccagttgcgttagcttcgtataaacatttacttcgcagtaacaacattaattttaccacgtcgcatgctttta

SEQ ID NO: 84170 - DNA, 394 bp, Zea Mays
tgtcttggctgcgtccagcgcgtccagcaccttgtgatcgtgtgccatttctgtaacgactcttggctacgagtcacctgctgctcacaaagctatacttaggcgacgtactgatttgtatctgtttggcttgctgctacgacatacttatatgcacatctgagtattgtccggatgtatacagtagaataattgaggaacattctagctcatgcctgtgtacaatttctatggacagtttatgtgcagcaggacacatatgatagtgcatgtccaaatctcgttcggtcaaattacacagttcgtggacggtatggaatcgggttacttgctaacttgtgtatcttttaacgttctggaatggcctatattgggagcgtaaccatgtcttttt

SEQ ID NO: 84171 - DNA, 531 bp, Zea Mays
gaggtcccacgcttttccttgtccggtgatgagaactaagttacctactattctctccaatatgatgaggataaatgtctctggtctgtacaaactaccaatccgaacaagaaatctaatccacggtgctccaatcgactggcctctgataatggagtttagagtgtttgagtttgaggacttaggtataaggatgcattttcagctacattatttctctttatggattcccactcgatttattatgcagttaacactaccactttacgattgattcctagcctaatccttaaatatcattctaatcaccgcaccttttagatctagacattagacttgtattgttggatctgttttattgtgtctcacgcaacaaaatgagatgaagatacacacgagtctgagtttaccatgtttgagttcgaggagttcgataaggatgcattttcaactatatttatgaacgtctggttttttgttaagccctctactccatgctggtcaaaatggttggccactgaatttacaact

SEQ ID NO: 84172 - DNA, 833 bp, Zea Mays
ctcatgcaaaagaccgggacgacgggttgatttctagaaagttgggggtctctttaacaaaattaccaagtgaaaggctatagggtttcctcggccatcagatctcagatcaacggccgagaacagatcccgcgggcaagcgcgtgggcgtgggcgcgtgactgacaggcaggccagggcagtcagcgactcgaggtggggcgggattgatcgatcgagcctagcgacaggagcgcatgtgaatgacgagctggacccaggggcagaggtgccaacacgaaccggtatccgaatatctgggtctttggatcagaggcaggcggttgagatcgggcgcctacaggtttaacggctttgggcggtgccactctcgctagcggtggtgaggtcgccggagacgaggcaggcccgggttccagaggatctagggtcacctaagcgggctagggccgatgaagggggcctgaagaacccggtggtagggttttggctgtgagaaggggactaggaatgggtgaatggcggatgtcactccgagcgggtcaggggtactccagcgagcaatcccaaccacgaggtgggtcgatcgagcgcaccgaggttggtgcgggcttcggtggggggttttggacatccggggcaaaagtttaggcatgggctggggctacatctgttaggtgccgtggaggcacggcggtccgactcgccacaactccgacgagctctaattcgttgtagagaagtagaattgaggccaaaggagcacggggtgtgcctccttacctcgggatggtgcttggggaggcttggcatggtgtctggaggtccgggcg

SEQ ID NO: 84173 - DNA, 342 bp, Zea Mays
ggacagtacgcccatgccgccgcgtgcaccatggccatcatgacttgtacgttgtcagagaagcttctgctgcacgccaatattacacaagtagcagatattgggacacggggagatggcataaggcgactgacattagttgctccaggtgttccatccattatgtccctgggcccacatgtcggggttcagtgtccttgtacgtgcctcccttgggctataaaagggagggcacgcaatgttgcggggggatttagacccacttagactcacacactcacaagttcatacaagtcctcacaacaatacaacacacagtggagtagggtattacgctccggc

SEQ ID NO: 84174 - DNA, 610 bp, Zea Mays
accgggaacccgtggtggtttccccttttctcaactcctctacccggttcgcgctcaacctctcccctgcgcaggttggagctcgccgccgccgcaattcttcgacgtccggctaaccggagccccctcgtgccgtgccaagctgcgccaagcgccatctctgggtaagtgacctttccccgtccctattttgcgccaattctgctttattgtgggggattttggctcgccggagtcgcccctcgtcaggtcgccacgtcttcatggcgttcgacaactgcaagtccctccccgagctcgaacttaggcctagggcacccaccctctccccggagcctatgctggccgtagagcgtcggattaacccccaccgcgatgggaattgctcactggagtaaccttgggttcgcccgacggcccccctccaccgtctgcccgtctcagtcctgttctcgccacccagaccttgccatagtgcttgtcgagtccgcaacctctctggctacctagaccaacccccagtgccctagaagccctggtttgccttgtctccgaagattgccgccgtgtccacggagaatgccgcctcgggctgaccggaggagactaa

SEQ ID NO: 84175 - DNA, 536 bp, Zea Mays
gacagatcagctgctgctctagatttcagtactggtcacggttaggtggtgtggccgtgtgggtgatgtgtgaataatcaacggtctagaggtttacgttgattcatcaggctgggtttcacaatcgctttaggctgtaatttttgggaggcagtgctgcaatcgtgcagcttatatgttgccacagctttgttactcatagtgcttcacttttgtaagggttagggaataaccagatcggaactccacagcgatggtctgctcgtatccagtgtggctgagatagaagcttggagtgtgtttgcatcccatttttccttggaaaagcatagtttaccttagtgttggattctttgctgatttccaattgagtgcatcagatgattattttaatttaaactcatgctcaccaattcaattatattttgttaaatttgagtcacatctctgtgattcgaactggtagtttctcgtccatttgtagcagcttggattagcagagaacaatgtgactaacgtccgttttaagtattcgt

SEQ ID NO: 84176 - DNA, 443 bp, Zea Mays
cttgaactctatccatttagtgaatttgtcgattgctaccaacacatgagtgtatcctgcttgagctttattgaaaggtccaatcatatccagtccccagcatgcgaagggccaagttaccggtatggtctgcagttgctgtgctggtagatgttgttgttttgacaaatactggcaagcttcgcacctctgaactaactcggctgcatcactcttcgctgttggccaatagaatcctgacctaaaaaccttcccgactagtgtcttggacgccgcatgtattccacattgcccggcatgggcctcctccagaagtcgcttcccagtagatgagagaatgcacttcatgagaacgcatgttgcaccccttctgtataatgtctctccaatgagtgtgtagtgagctgactgtctggcaatgcgctcagctgcatttttatcat

SEQ ID NO: 84177 - DNA, 509 bp, Zea Mays
ggtgtccctggctcgtgtcaggtgatgcaattcgcgagcgcaaaggccacgcaagggggcgatgggtccttaccacgaaggggaagaaccgaggaggagagggaggcactggagccgtgggcatgggagacgacgtgggagcaatgaagggagaaaaggggccagcgtgagcacaggaaggagaaggggtggcagcgtattcatcagagttaacgcacgacgacgaagatcctcacaaccgcagtgggatggaggagcagagggattttgcgagagaggaatgaacgagagcactcagcatacgattgattttggcgagcgaactcattcccaattttagcacgatacttgaatcgagagattattggagccgctctactcttcgtctctagataacccctagaaaataggaataggacgactctattcacatccgctccccaactagaataatataatccaacttatagatcatataagcacttattaacctgtgtatggattattat

SEQ ID NO: 84178 - DNA, 624 bp, Zea Mays
tggacctgatttgggctggccacggcgagcttggttttgctgcgttcttcaaccgatttggtggtaatcccaaattggggagctgtggggaatgatcggagctgagagttggtttactagacgcacgattacctagcggaacgtgctgaggcttcaatttatagaactagtgggcggtggccacgaatttgaaggaagatgcgtggcggccggaatgaaggggtgagtcactagcgcgatttactgtggcactcaccggttgaggagctacggcagttatcggtgagctggtgtggctagagacgacgtggtgaaaggctcagagcatggcacaatcgctgtgaagcacgacaactccggtgatggccataaggccacgtcgccggtgcaaagggtaggggacagcgaggccacaatagctcatacaaatccgcgacgagatcttttcatggtgagcgaaatccacacgcccgcagcacgaatcccggcaaccaacacaaatccggtcgtgcggaccgccggcggcgagattctgagctggcggcctaatccagatactgtaccatcgcggagtgtattcagttgacctgacagaccatctttgagctcgattttctcccaaat

SEQ ID NO: 84179 - DNA, 272 bp, Zea Mays
ctgccaccacattggcttttcttgggtgataatggatttccaagtcataatctttaattagctcaagccatcttcgttgtctcatattcaactctgactgggtaaaaatatatttcaaacttttatgatctatatataaatgacaagtatttcccagtagataatgacgccatattttaagggcatgaacaactgcagctagttccaaatcatgagttggatagtgctcctcatgcgggggtagttgtcttgaagcataagctatgactcgg

SEQ ID NO: 84180 - DNA, 490 bp, Zea Mays
caccgatcgcgtgagagttggtggagatccggcgctccagggtcgcccagtgacggtcctgggcgtccaggcgctcagagatttgctggagcagcctggactgagtcgccatggatttggactgtgcctccaacgccgcggccacggtggaatcagagttgccagccatctgtgcgcgatgcgcgtaggacgcaaaccttcagaaggaaccctagccgataccaattgttagataccactactgctactacgctacggagaaggaggtaacgagaggaggaagaagataggaggaatacttgtgtctttttcgttacctgctctcctggacagcatcagagttaatatcccacttacacaggcttacatggaccatatgtacgatgggtaacgagtgttgggcttgggaacacggcggcccattacggattcgccctgtagcttctcgttttccttgacttgctgttgtcttccctttcttgcaaccttg

SEQ ID NO: 84181 - DNA, 586 bp, Zea Mays
ctgtcagtacggcactggcagtagaagccaaaaatgcaggacatggaaaatcaaaggggtttggaggtgaaaggtcaaatcaagggcatgagaagagaaccaggttggtgatccgaccttttaatcaaaatcgttcttcgcctcgcccaccttcctatcccttcaagcagcctgtttttattcgtcccactagtgcccccgctcctaccaatcagtcaagtgcccctggtactcgtttccctgctctccctagttcttccactggttgcttcaattgtggaaagtccggacacttcatcaaggactgcccatacccgaagtaaaataaaaccaatttccaacagaactctgggaactccaaccaagtgaaggggaacacacttcaacgggcaagaacttcaagaaaactagacagatttatcatacccaagtggttacaacatcggagggcgagccagtaatgatgggtacgttccttgttgtcaattacctagcagttattctcttcgattctggtgcatcacacaccttcataagcaagaattttgtggaaaagcattgcattccttgcactgaatcaagggaa

SEQ ID NO: 84182 - DNA, 469 bp, Zea Mays
aacggtccggagtcatccgaacctacatccgagcctaaaacaacgtttggttactgtcacgggggcatctcgtccgtcatccactcgttccgatctaaaactaaaacctagaagctacacattccttgcaaaacaggcagactaactcattcctcccatccgaacatgcaacaagtgagtccatgctggatcacctggttctagacaggtttattccacaaaccaaacagtgtgttagtcttccctacacctctagctagaggcagacagtcccatagagagaggtcagacagccaccctaccttccacatacattacattactattgaagtgacatccactgttcgtccaccactctaataattaacaatcgacaataatatatatcactatcgattgtttaaaaacccggatagataatacatccctgcaagtctagaaccatcaatgatatttggatcaccacgac

SEQ ID NO: 84183 - DNA, 462 bp, Zea Mays
gtgatgccactcaaaggccaaagcctatgtagtaactttggatggactcgaagtccgccatggcgtgggcatcacatgtagggagaagcaggcatcgtagaccaactctgttagggtctttgggtgtactaataagtaacacttgttccatacatctcaaaacctttgggtgtactaacccgtcgacgtgcccgttgtctttggagtgcgatgagattcaagactgtcatctcactagagccagagtagaaatgtacatgaaattgctcgtctcccgtatgcttccaagatatgatgggctcgatttgtagcgatgtgtactagtcaaacgcgggtctggacagtagtagagaaaagagttgaaccttcatgtgttatgtcgatgctgctaatccaagttgagtcgtacaacaactcacatgtttgatggtgcatgtgttgtcgctaccattgaatttagaa

SEQ ID NO: 84184 - DNA, 408 bp, Zea Mays
atgcataaaaccttgcaccctcatacatccatcactttccattccactgatagcatttagagacagtttatacaattcttcaacctccttgtcttcggactccagatgctccaacataggatcagtcaacaccatgcccatgtcttccacagttaaggcgtgcaactgagtcaccaccctcttgggacacttcccttggtgacctggctcaaacttttcacctcaagtgaaacaaagttcattagctcttctaaactccctgagttgcctctcctttgttagatcacccaaaataaatcctcccttattgtcagtcttcatattactacccacagccttattagcagtaatactcctctgcatcttcaacctattcttctctaatatctcctgctgcatatgagctaa

SEQ ID NO: 84185 - DNA, 810 bp, Zea Mays
agcaacttccctagcattgaaaattagtttttatgtacaaaaaagttgagatgggagcttatttgattcacatgatcagacagcggaacatatgtggttaagcgcaatgagcctattgagatggcatagattggttttactatgtggttaagcgcaatgagcctattgagatggcatagattggttttactatgagttcaaggcaggaagcttcatcggatcaaagcatcttttgtttggtgtggtatacgagctatgactggaaacctggtttcatatttatatataggtctatggctaccatttgcatcaattttgttttgttggtgtaatctaggaggtagttgtctatcaatttggaatcaatccattttagccctttcaactgtccgcttgttcatgcggtctaattccatccctgagctatgagatgcctcgattaccaaagtgtggataaccccttcttgctgtactctgaactgaccttgtcttttcatctatttgagtgtcattcagtgttgcattttttaacaatgtatgcctgcccaaatattcaaaaccaatgttaatatagcagcactctgtttacagttcagacatgtcaaggaatccttgaaaagtaaatattcatggttggattttgcgaaggtagtaaggcatataggaagacaggaaacaaaaaggatgaaaaagagatgaattgaacagtaaaataaggggataatgatggaagcattttttagatgcagttgttgcatttctactttcattttttcttaggaattcctgctaacttatcatcgcttcttt

SEQ ID NO: 84186 - DNA, 1162 bp, Zea Mays
ataaagagacgtggtgtcgccgtgaggacaaggaatggccgaggtggccgagagtcgagagagtccgtcgtggccagggtggccaagacggcggtgccaagtggaggtaggaacaatggaggcaagggcgtagggtgtggtaacatgggcggaggaaggtgggacgaggaggcaaatggaatataatgggccggagctatcgcatcgagcaaccacaacacgagtggtggaagatcccaaatggtgagcccccagggatcgaacttcatagaacaacggtcgtcggtggtgaagcgacgaaccgagagaaggttctggatgatgttggaggcaacaagaattgttgaggtacaaggaccaggaaagaccgtgtcacctactgaggtgacaggtagagtcgacccattaccgacaatgatggaggaagggaatgtggggctaggaggatgaggtaaagagacaactctggggtcagaagtggtatggaacgagtcgttggagtcggaaatccagtcggtgggtggaggcggtggcgatgatatagggaaggatgagagagcctgcgggggcacccccacagagccaccgtgaggagtgttggggtcggcagttgtgagcatgctgacatcaatcatggatggggaagaagacaaaggcctcgatcgtcatggagacaatcatgccgctaggaaacacacacaacttggtagtgtggtggctcgcctgagggtggagctcaacgcagtcacggagaacagggtttgtgacacgatcaaaggccacaaatgttccccagagaagatggccgatgtgaaggaagacacgcacacactagggaggcacgagaaccgaggtcgcgagatggggagttgctcgcaatcgcgggcggtgggaaggcaacagtgatcagctgtggctcactagaggcgcaggagcaggggttgcacctaaggggaggagagctggccgccgacaagggcaccagtggcgggggtagtgagtccgaccatggtcgcgttttgggcggcggcgacagccagggtaggcgcgctcgagcgggaaattgtgaggtcgaagcccagcgggccctatacgtcgcgcgggcgagggggcggggtcgcgactgtccatgtcgggactgggcggcgtctagcgacatgga

SEQ ID NO: 84187 - DNA, 1024 bp, Zea Mays
ctaggtgccaatcttaatggtgaacaattttagattgagcaagtaatagtcaagttcacaattatgaaaacaacttagctcaacaatattatatcaatatgagcaaaaagagcctaagcatgccatagcattatcatgtacacaaagaacatactactaggaacagaatcacattctagcagttatacaagtgaagctcaatatgacatgcagatataatacaaaagaaagtgaaagcagaaaagaagaaaagaccaaaaagggagccctttaatcaaaaagggaaacaaacacccaattcccctcgcaaatgaacataagttttttgatcaaggagtttggtcaaaatgtctgcaagctggcgagtggtatcaatatagcgcaattcgatgtcgcctttctcataatgatcatgaagaaagtgaaagcgaacatcaatgtgcttggtccttgaatgtagcacatgattcttggcaacacttatggcactcgtgctatcacaaagcagaggcacatgatgaaaatccaagtcaaagtctcataaggtagccatcatccaaagtaactgcgaacaactagcggtagtaatatactcggcctctgtggtagacagggcaacactagactgtttttgggaagaccatgaaaccaacgaagtacccaaaaactgacaagtcctagaagtagacctgcgctccaaaaggcaacccgcaaaatcagcatcagaataaccgcacaaggacagaacggacaatgaggagtaccacaaaccaaactcgggagtgaaacgtaggtacctcataatccgtttcacagccgttctgtgagatgtgcgtggggaagcctagaaacgagcgcacaaacatactgcgaagtgtatgtccggcctcttcgcagtcaagtataggagagagccaatcatgctcctgtactccttctggtccatgggttcgccatcctcatcagtgtcaagtgtcgtcgaggtggacatgggcgtcgaaagaggattgctctcgcccatgtc

SEQ ID NO: 84188 - DNA, 1383 bp, Zea Mays
agctgatttacgcaaagcctttgataaaatgtgtcggtatggtttgaaaatgaacccacctaaatgtgcttttggggtgtcggttggtaagtttttaggatttatcatccatgaacatggcatagagatagaccctgaccgaattaagtctatttggaatgtggggcctccgacctgtaaagtcgaagtgcagaggtttctcggcaaggtgaattatttacgaaggtttatttctaacctagccgggaagattgatgccttcacccctatccttcggcttaagaatgatgccgaattcgcttggggggcagagcagcaggaagcatttgatctcattaaaaaatacttgtcttcggctcccgtattaaaagcaccacgagcaggagtaccattccgattatacattgccgctgaagataaggtcattggagctgttctgacacaagaaactgaaggaaatgagcatgtggtgacttatctaagtcggaggttgttggatgctgaaacaaggtacactcttattgagaagttatgcttatgcttgttttatgcatgcaccaagtataggtgttatttactgtctagtcattgcactgtttctggtcaagtcgatgtaattaaatacatgttgcataacccaattatgagtggtagaattggtaagtgggcttatgcacttatagaatatgacttggcctatgaacccctgaaacctatgagaggccaggtcgtagcagattttattgtagaacatcggattaatgatactcataaactagacatgtcatacctcactattactccttggactttatattttgatggatcggtttgcaatgaagggcaagggattggcattgtccttgtttcaccaagtaatgtctcctttgacttctctagccgattgaaaacttattgcactaacaatcaagccgaatatgaagcccttttgttcggtttagagcttttaaattgtatgggagtaaaacatgtaaaggcatttggtgattctcagctagtcgtccaacaggtgttagaagaatatcaatgttttgatggtactctaaatagttaccttgaaaaatgttggagcataatccattcttttgacgaattcagtattcggcatatctctagagttgagaatcatagagctaacaatttggcacaagatgcatcaggttatcggataaagagaggaaaatttcacaacactaaaaatctgataactagtgcagggccaaatccccaggtcgcggaccgtccacgtgatgacgccggaccgtccggggttaccaggaaagttttcctaatcgattcgactgataatgaagccgatgcaggagattggaggacgcccataactaattatttacgaaatcc

SEQ ID NO: 84189 - DNA, 489 bp, Zea Mays
gacagcgtcgccgccggtttctcctctgcagtgcctctttgccttctgacgatacggatgcctactgctgccgtggttgccagcctcctcttctccacactcaagtgcgcatgtctgcctcttctctattaaacagcgatagcgtcatctactctccctcttcatcgtcgtgggctaagccattaatagccgcggctgtttcttcgagtaggtaacgctgttcttcaatctgcatcaatggagtattaaatctgcccgcaaaccactctcctccctcgcctataaagcttgagccgtgcttgcttcctacctcctactcccttcagcttcctccagccgatccatttcttctctgctttgttgcctgtgcgcgtgcctgctctttctcctacccgtaaagtgctctcccgtctgctcaatttcatactagtggaggacaggtgaaccataaggcatgcggcacccaaatcgcctcctctccaacgccag

SEQ ID NO: 84190 - DNA, 470 bp, Zea Mays
acacgtcctcgcgcacgcgctcgcggcaactatgcacataggccctcggtttattaactaaatcgaagtaggtttgtttactgttcctctgtgccactgacgtttttcaaataaaccctcgaactcctatgtcttcacagagtccagtccacgatggtggacggcgacacaccgatcaccggcgtacccgtactggccgatttacgcaatgaccggcgctctccgtcgactgacacctaattcacacctcaatcgatgtttcccctaaattaatttcaccaatagcgcactaaaacgccctggccacgatgaccgtatgggcaatggatgaacacgggcgttcacggcaacccagggcggtctagttcaatcagaggggtcgtgaagcttgaggaggacctaaggacgctagaacaattgatcaagacactgggactgacctggaataggctggccgcggtgaagtgttc

SEQ ID NO: 84191 - DNA, 759 bp, Zea Mays
agtagggtatagtggtcaccctgagttaagtaagtgtgagcatgttgcaccgctttaagtcatttgccgacttaagtcgtttgctccgttagtagggtatagtggtcaccctgagtcgagtaagcatgcagattgacaataaacagttcgagtgcctttgagaatgaagtctttttattgatgatgtattttccaattacagaatacaatgctgccccgatagcttttgaaatctagctaggggtaaaacttcctaagatgctctatattccatgaattccctatttctgtgccatccatttgaggtcgatatgaaccaggtcgagtgacttctgctactatgaatggtccttcccatagtggcgacaatttgtgccgtccttcccctgttagaattcggcgaaggaccaagtctcccactgtgaaagatcgatgtcgtatggctttatcatgatagcgcctcagagtttgctggtacctagctgactgaattattgtattcaatcgttcttcttccaatatatcaatatcctccagtctagtggcttctgcttcggctatgttttcaaaaatcagcctcggtgccccaaacttgagatcagctggtagcactgcctccgaaccatagaccataaagaagggagtgtttccatacaaagctcgactaggttgagttcttaggctccagaccacatacggcaactctctgatccactttcctgtgaacttttcattcttgtcaaagactttctttctgag

SEQ ID NO: 84192 - DNA, 813 bp, Zea Mays
ctggctagtgtgttggccactactgaaggtcaccaggtgggatttcctcttcctaaagaaagtgtttgctataaacatgtcataggctagggcgaagttcaggatttcctctccttcttgattcctagtcccaaaggcgaagcctccatgcacaccctcaaaactagtgctagatgtacccacatggccattgagatctcctcctatgaagagcttcttgccaactggcacattactaaccatgtcctccaggccttcccagaactccctctttgagttctcattaaggcctacttgaggagcatacgcgctgataacattgagaaccaagtccccaatgaccagtttgactaggatgattctatctcctagcctcttaacatctactaccccatcttgaaggctcttgtcgatcaagacgcctactccattcttgtttgctgcagtccccgtgtaccacaacttgaagtctgtaccttccacttccttcgtcttttgtcctttccacttggtctcttgaacgcataaaatatttactcgtctcctcaccgcaacatcgactatttctcgtaacttacctgttaaggaacctacgttccaactacctacacggaccctagttggctcgactagcttccttacccttcgcacccaccgaggaagatgcaaagacccttgttcattttccactacacccgggcgtcgatgtagcgcgccactaaggatgcgacgacccgatccttgctcacttatcgcaggctccagatcaagagacggcgcgtcacttaaggggtgacggcccggcccttgctc

SEQ ID NO: 84193 - DNA, 526 bp, Zea Mays
aagagattgaacagagtttttgatgccattggctttgtttaccccgactaccgctatccgctgcgaggacagggaaaaaagaggaaagctgctgcttcggccaccccagacgagcctctgccgaaagggaaaaaattgaaggtcctaactcaccggccacgctacatcgaaccggctgtgatacctgaacttagcgaagggacctcctcatctgccaagacaaaggaaaccgttcctcccgcgcggaggactgaagagtcggctacaatgccgaaggtacctttggttaagctagttgaaccgaaggctgacaaagataaaactgaagggccaaaaattgtagagatgccaagaatgccagaagttttaagcccttcaacagaggcaacagtgtcgaagatgcaaaaaggctccaccgcaactcctaaaaggagaaggatggcgaacgtgctagatgttgtactagaaacagcaagaactttgaatcctactcctaccagaaaaattgccgaaacttccaaggcgc

SEQ ID NO: 84194 - DNA, 790 bp, Zea Mays
ttattttatcagccttacctctttaaaatttcaactgagttgacatttctcttgtagatggttcgtactctccaaactacccgtgtcaacaccagctacgccccttagccccgacagatcccggtctacccagtggtattgtggtagtcgaggaagttccggtggatctccctcacatctgagtggagaatgtagtcatcctagaggacaactcagaggaacagctgccgacgcccaccccgttggcagagtccctggccttcgcagctagctcatcgacatcggccccgcctgcaccagccgtccaagcacctgcactcggaggcgacgaccccgatgactctggggacgacgatgacgaggatgacgacgatgacgaaggaggagacgaacatgtcaacgaggaagccgactacgcccagcaggactacttcattgggtttggtcctgttgtcgaacattacacatcaatgttcgagacggggcacttccccaacctgctgcaagacgtgctgcatgcgctaggcacctacgtccgccccctgtacgaaacaaggcgagtgagcaagcctccccgagcttgctagtacatcactcgcatccacgtcagggtgatggatgcaggggataggggattcaggactctgtctgctcatgagtccctaacaccgctatccacctacactgcctcggtcagcgacgctgccaaacagaccctgtggtctcttagccacacctaccggtagcagctgcaggagacgaggttcaggcatcttcctatgcgtctgag

SEQ ID NO: 84195 - DNA, 655 bp, Zea Mays
aagagaaggtgggcgacggcgaggtagccgcgactaagcgggacctcgggtaccagtcgcctgagggggacctgaaagatatcgtcatcggaggctcctactccggtgaagacaactagacggaccccagagggaccccgtgttccccggtctatggagctgaagcacgcctttcgtccggaggcccttccggaccccccacgggtccgagctgcagacaggtatatgctgaagtgaccacagccagagacgagggctcccatgtcaaatacagatgagaaccctgggtcggggcttagccccacagcagataccataccaagaggggctccgcaactctcccccagctgggaaggacccttcaaggtaacgggagtacaccgacccaaggggaaccatctagctacgaccggaggagtaccttaccctgatgccaaatatctctgtaagttctatccatagagcaagactaaggggtcgagtctgtttccttcttttctgtaactagataacacatacgtgtacgacaacccggtgggtctgcccccatgaacccagactattggactacacacatgcacgacaagttatgaagaagaaactaccccccttagccatgctcttgtgatagttccatcttgctgctccagggtcc

SEQ ID NO: 84196 - DNA, 662 bp, Zea Mays
gatacatgcgtgctaggcagtgaacccttcccaataatgttgagcttgtcatgctgtaggggttgatatgtcccatcgtagtagccggactaaacatcacactgtcgagtacgacgccgtagttggcaaatgatgtagctacttgtactttataattcacacaggtatgttagtacgttcgtgcatggtggtactgtatgcactacaaaatggcctcatgtatgactgttgcccatggttgtggcagtgtggctatagagatggttccacacactacatagtggcctctgacatggtcacaatgcatctccatgaccataatgttgtcctaacacattaaatatgaaggttggaagcattatcctgcaatttagtaccaagtggctatcatgagtagagacgcacatggcgcctaggttgtacagtctaggtcatcctacccttaaggcatctccacccatgttcatcctgcccttcgggcttctacttctagggattcttcatcctaggggcatcttgaagaatgcctaaaaggtctagttatagtcctaagtctatagggggattgagtaggttgagtggtgagcttggtttcaaagaccctaggaagctgagagagcctcaaaggaccaaaatggcccaaagacctagtccctgatatg

SEQ ID NO: 84197 - DNA, 850 bp, Zea Mays
gcggtctagctcgcgaggacacgctggcccttgatgctgctgatcagagtcacccggctcctctgggtatgaccgagggtgcttcagcttttgaagttgtcgctaaagacgacctagcccccgagggtggtgctgggggcgacccagcccccgagggtgctaggcctggctcctctttggctgcttctatggacgttcacgttggatcaccactggttcaatctgaggaactcgtggtgacaaatttatctgatgctctcgtcggtccggtcaccttggaggctagtgactaggatgctaggaatccactgtctattgatggagctgaggtctctccgagtcatgctttcaacattgttcctgttgatgcccctcaacaagcagtgcatcgatgcctccagctttgggtcttcccttatttctttccaatctttaggtgaatcaacttttgcttcttattgttcgtgttggcaaacgggttctcttgataatttttgaaattccagaaagtcttcgattttgtatctgcccaggtgaaatcttgtggcgtccctgtccccgaccaagtttagtctttgatgcagtggaatcctctactgcttcagacagatggtagcatgcttttggaacgatcttgattagaagctcaacataccaacctcaaacagatggtcaaatggaaagagtgaatcaaatccttgaggacatgttgagggcatgtgcgatccactatgtcaagaactaggacaagtgtctttcactggctgagttttcttataataacagctaccaagcaagtccgaagatggcacccttcgaagctttgtacagaaggaggtgtcgaacaccc

SEQ ID NO: 84198 - DNA, 328 bp, Zea Mays
tgctttgttttagttgatatgcaaggaatactgtattgagttctctactgtcactgggtgaacacatagaagtcttgttgaggatattactgaaggataaatcaagcttgctgggggaatatacatatgtagctttttttgtgcctcacttatctggataagttttgatgaatgctcttttacatagttgcctctctagacatgctagcagagattgagcactaacccagttctgaactgcatgatgttggccagtgatggcctggctactactcatttacgcttgctttctcccactgtgcttgtataattagagtttatataccag

SEQ ID NO: 84199 - DNA, 676 bp, Zea Mays
tgaggatactatcagtgacgctggggatggggatgattggacacaaccccatatgactgcaaagatcaacaacaatggtaattactatcattgttttcaagtcgaacgagttgtcggtcattttggctgaccgacttggacgattaatcgtgaccaatctcgattgatcggatgacttgaaaacaatgattactatcctatcttaaatggatgcagcatgacgacgatagcgcgtagtccgactaaacgtgtgtttccatcagtacaatgtaggaataaatgccatggtgctatcgtggcaacaaatgagagtgcaagtatgaccgaacaagaaagtggggtggatcatacccagtcgaagccaagggtcatttccaatggtaattgttaagaatctttattcaggttacatattttccccaccctgttatcatgaatgcccttgtattttatgtggcttgtattttcacgttccagttgatgacaatgacagtgtcgtatttgaaggcgatgctgatgagaacgagggatacctattcgctgggcaatgtactaatttcaatctttttatgataccaatgcttatataaatacatatgtcttactcattgtttccaaaaaaatatcagatgaggataccgatgaggatatagagatcgatggtagtcaagatgaa

SEQ ID NO: 84200 - DNA, 759 bp, Zea Mays
tcgccgggcattattggttctcccacgaaccgaggctttttttccccagtggtgctggtgcggctgctgtttccacaggagtcacgctgtcccgtgtgcaatatctatcccgtgacccgtcgtcgtccttgcttctctgcgcgtggcagtggcatcgccttcgtctccggccggcccggctctcttttccccccgctagtgcagcggccatgactagcagactgctcagtatgccgtgtgacgatgtaaactcagcttggatcgcccgatgatggccggtgagtgaggggcactcccatgttcattatgcaaaccgtgctctgtccgctgtcaaagcgcgtggtaatctgctgcctctcttttcactttaggccaacttccgttgcttgctattggctgatctgttcggcagccacttcgttgagccgtcattctccggacattattagaacgtgtcattagcaaacatgatcgtgcaggactggtaacttggacgtacgcttagtagatcagaccactggggggtgtgcactgcttggtagaccatttggacactgctcagtagaccatgtgaacttgcacaacccgatgaccggtcaccgtttgcaatgtctatgcaaagaaagcacatgtagtgtgaaactctcaggctaatagagagagatatttagttggctgcccatctttaggccaactgccactgcgatgttcacaggtacaggctggtatgtttgggtcattgggtgagccacttcactg

SEQ ID NO: 84201 - DNA, 421 bp, Zea Mays
gcaagggcagcccccgaacctatgcatagggcgagaggacgatcaaagaatgccttgacttttgatgatatgcatcttcgtcgtgtttctgtaaggatgaagagggggaaagcacaatgctaccctcgatgggcaacgagcatgatgtctcctacgagctgttagcgggtgatctgagtggaggtctgagccccgtttgataaggttggctagcggtccggacatgtgccccaatatacctgcgggtgattcgctggtcccggacccattcgatgggatctaagggctcgatgcctccctctgatgagatactgttacgaatcaatactggggccccggatatgtcttaggatacctcggaattgtagctcgtgcctcggccatgtatggacgtacccatggttcctgactctatgttctg

SEQ ID NO: 84202 - DNA, 352 bp, Zea Mays
gagttgttgtgttttccaagcttgaccaccgctcaggttaccaccagatccgtattaaagaaggggatgaacacaagatgacatttcagacaaattatggtcattttgagtacaatgctatgtgatttggcttaactggggctctggctaccttttaggaattcatgaatcacatcttagcccctctcctaagaaaatgtgtggtggttttcttggacgatgtgctggtctacagtccaaacttagagttgcatgtgaaataacttgagccagtgttttagttacttagtttccacaaattacatctgaagatgtccaagtgcctctttgcacaagatactttagaattttt

SEQ ID NO: 84203 - DNA, 514 bp, Zea Mays
taacagtggattattccctacagcttatttttgctggcatttaggtgtaataatatgactttgtaccaagttttagccactaatacctattggtcattttactgtgattttctaaagttcttggccataggggtgctttctactaccactatacttgaaaaatgtcaaacaatagatttctaatttttcctatcttctttgtgcaagagcaatcattctagaatttggcaactttttgcttaggtgagagggtggtagaaattcttggattttatggtctttttcatggggtagggggtaatgtgtgttaccttacccttttaattgggtttcatatttttctctagtggttgacctcataagtaattgggtaaaaatttgtttgcccactgttgcacaattttaggcttcctcatgatttaattagaacatgggccaaatccatgttttaattgtttaactcacttattgtgatggtttggggggtttattatttttgtagtggtgttctagc

SEQ ID NO: 84204 - DNA, 274 bp, Zea Mays
caacaacagatattactgctctcatacgaataaatcattaggagtagagaggatacaacaggtctctacaagatcttcatatttctatcacaaattatcatcactagtagtctagtggtcaagacatatgactcttctggtgccaaggaccaaggacatattaatgcccaatttagcttcaagctttgtggtgatgtgggagtttaaggctattttctactcttcttacttctggtagatcagagatagattatggtaagcatgtaaaagggtg

SEQ ID NO: 84205 - DNA, 456 bp, Zea Mays
agattttatatatatccattcacataaatcatatacaccaatcacaactcacatacatcacatttcaaattcatcaaacatcatcatagctaacatatccatttaaaatcacaaacacatcgtaagtaaagtcatttgttcaccaaactaatgggattcagttcaattcatatcatccatcattcataaccaaaataaaggacaagtttaaatgtaaagaagcatacaatggtactcatgccaagggaccaacaattggatgattagagctttggccactgcctcctctaggataagggtaacgaagagcgactccacaaaacatgttccatctagttcaatcccactcgcatctgccatagcctatgtaagaagagtgcaaatattcaaaagttaagtatacaattgtccaaatcatatgaatagtttgagagttacaaaacgtatctggtctcc

SEQ ID NO: 84206 - DNA, 820 bp, Zea Mays
cttggaagtgcgtagttccctgatggtggagtccttggtggacaacagccagccaagtcgagatacgtcatcctaagatgcctgtatcgcgtgatgatgatggtctaaatcagacatggtgaagcggtgactcctctccaggatggtcaaggagttactagcgtcacagtacaacctgtccagattatcacaggaagcaacaagtgttcatttttcttcttgcaagcaaagaatagcatttagcattgaagcaaggatagcaaagcaaggtcagtcaaggaagtttacctcgtgtgccatcctctcggaatcaagctgtgcattcagagaagaatacagggaacgtgcactatccagaaaagcagaagtctaggctaagtcggccggactctgagagcacttctcctctaagtcagagcaccgacgagccaaatctgataaagcagctgaaggggaacacacgattaaagataagctaagcaattaaagcaactagagaaaccgtgagttcactaacaatatttgatgccttcaaatcgtctatttgtttttggagcaacagagggttccattgcattagagataaatcttgatcaggaacagtagcgccgcaagatctcagttgggcggatacaccgtcaacaaaatcctgtggtcatagacagataagcaaaaaatatatttcgccagtacgaacaataaagagcaaaaagttgactcacctgaagattggaaaggaataggggaagacccaaggcaggaagagtcggtgcatggctcgatgagggaagatcagcaggaacaatctcaagagcacgac

SEQ ID NO: 84207 - DNA, 353 bp, Zea Mays
gcggagggtgctccggaagattgccctgcagcaaaaccttggtattgttataaggtagcagcatccacttgttcttccagtgtatctccatggggctgaacgcccgtggaggaaaactgtagagaaaggaaaagagattgtcgtcgtggtggccttgcaagcataccagcacctgggtctgggcgatgggtctgagtgcttcgttgtggtgcggcgaaggtggccgtggctcctgcgctagggttgaaccgctgttgtactggcaatttcttgccagagtgccgtcaccaccgtggagccgccgcataccgtggccagctcgccttgaccaccgattggaggtgagccgctaa

SEQ ID NO: 84208 - DNA, 463 bp, Zea Mays
gaactactagctacagagctacagtttccacaatttctagactttgctgaacaaggcaattggccttgaaaacaaaaggaaagaactgtccgaccacaagaggaagtaccaagggcagaccagcagaaacacctagcaaaacaactcccaaggttctcagttccgctcaggaaaccatagtgggaacaacaactatcaagcacagcgctctggacaacaaggtcagaggagcaaccaataccagaaccagcagagaagcaacactcagaccggccaaaggtctagtgggcaacaatagaatcatcagggaagcacagtgaacacaccggccaagaacaacaatgcaactaccccagttcaacccaatggttgtttcaagtgtggtgaacttggccactatgccaacaactgccctaggcgtaacccatagacaccccagaagaacaacaaccagaggaatgac

SEQ ID NO: 84209 - DNA, 719 bp, Zea Mays
gtggcaccctttggagtataatccttgagtcgttgcaccggtgaacgccatggtcacagccacccgtgttcttccctatctccggccgccagcacgccgtgaccaaattgagagccaccgaccccgaatcctataaattgagcacgccctcggctccgccatgtagtcaagcactcaacgcacccacccgtgcctccaattagtcaccagagaactccaatttgggattttccccaaatcggtcaagaacaccgcagaagtgagctcaccgtggccagctctccactggtccgatcgtgttcccctcgctcttgttctagcattcctgtgtgttcttaaagctcatcggcccgaccaattgctttaaaccagagtagatcgatgagaacactttgatttgtccccggattgcgcggtcaccgtggacagagtgattaggagttcgaatcttgcaattaggtgaggggaaatgattgtcaggggtagaattaggtgccaggcaagcctagggtccggtccttgcatatctcgaccggcacaagctcgccggaagatctgcgcgtcgccgtccaccgtcgtggacctcgtagtgtgaagggatagaaacacaggggtttatttgcaaacatcagtgactgcagcaaatagtgtcttggactcttttgagttattcaaaaagagagggtcctcgatgcaatgtctacacgcgggtgcgcgtg

SEQ ID NO: 84210 - DNA, 284 bp, Zea Mays
aagagaggaagtaacaacaccagcgccaccacccctatcatggcaaaccctctgaatcgggtacttcaggagggagtactcagaggtatcgggctattcctaagcctaggttggggatggtgtgtttccgttatggtgaagcgcattgccgtgccgagtgtcagtggagtggcaggtgctctatctgtagccaggatcacaaggatgtggtgtgtagaaggaatcccaatgggagacttaaatgggagccagtgacttcttcctcttcgcagggcactgtcaac

SEQ ID NO: 84211 - DNA, 538 bp, Zea Mays
ctctatttcaatatagattctaggtgcagttcaaactttcaaatcttcattgacttgctcaacaatcggccttcacaacttaccgacaccctggcggtgtggggacatttttttgatggtctttctcacgtacgtcatcgtcgagaggatgtttttgtccatctttgttccttcactccacaaccaggtttccatacacatatccttctcttgttccttcactccacaaccaggtttccatacacatatccttctctgtgtccctacttaccttccatagatgctcctactcctaataatgaacctaccaccgacgctcctcctctcactcaagctcctacctccaacactgctcctcctccatcattcacttatccatactctcctccatacacatatagatatccatatggtgctccttcatatggatcgtatagtgctcctcctccatatgatgtcccatatggtgctcctctatatggatcatatagtgctcctcctcaatattatgtttcatatggcgctcatcctccattct

SEQ ID NO: 84212 - DNA, 377 bp, Zea Mays
caagttcctattgccgccaactatggattttagttatttttgttttaagcaacaaattttaggtaaatcattcagtatatgaatctggaacactgcttaaatttggttgtactgggcaactgtgttttgttacaacagattgtacacatactgtccctttgtatttgtgccattaaaactttatcatattaacgtgactaggccattggtgagtgctactgtttagaaacaaaatccatatgattaatagcatacgtggctatcttcaaattctaatgttttgcatcacagtaataagatggtagaatgctcttcaagacatgggaaaacaatagcatctatgaagtttgtatgatagctgaatatctgatgacgac

SEQ ID NO: 84213 - DNA, 361 bp, Zea Mays
atttaaagctaaatctttggggtgtattccatcttttgaagtcttctttagtgcctcttctcatatcaactttgccattttcctatctctcttcatactaatatcatgtcttaggcattggcggatctagagggtggacagggtgagccccagtccaccctctgattttgatcctgttaaagtatatagatggttttgaattgtttgtttcttttgattctcatacaatattgattttcataagattggaccaccctaactttaaatcctagattcgccactggtctttggatcccactacgcattggtgcctctggatgtctttgttggatatacaaaccatctcaaccggtgttgggca

SEQ ID NO: 84214 - DNA, 1364 bp, Zea Mays
gggctcaccactagacaccctgctcaagactaatcataggtatgtgttttcctccttgatcctagtcttatcatgtctgtaggattcaagagcagactgcaaaccctcatagagtgcacgatgagcaggtacaggtgcactcactgagctagccttcacaagcaagggtatcctagcattcttctctgctagctcaacatgcaagctaggacaagtctaacacacacccaacaggctagacctagatcgaagctcatcgaactcttctagcaaggtggcgcacctggtatataatgtggcgatgtttgacatgtgaagggcacacccatcaaattcagtttcatcggacaccacaactgaagctctagcagactcaagctccctaagcacgctctcatacttgctcttaaattatttcctctcatgagtagcaagcctaagcaacttgtccttaccagccaaagaaaccgttagctcatctacctcagtggagaagatcatcgacagaaggtgatatctcagaagtggagtcatcattgatgtccttgtcatcgccacccactgcatcctagctaagtaccatgatgtagagacctttggcggtgtcggcgaagaagtaaattccattgagcttgtcctcaacccgtctctagggttccttgtcactcgaggaagaagaagagtcatcagagtcatggtcgaggtcgttgaggaaggcaaggaaggcacgctccatgatcttggacttctagaggtacttttattgggcgcctccttatcaaacgttcccttggacttgtgcttggcagaggtgtgctcacgcttgcccttgcaccgatcagaatgatggtcgtgttggccggcctctggcttgcccttcttggggcaatttgcaatgaagtggtcaaggtcactgtagttgtagcatccatccttggacccagcacgccgccgattgagacggttgttgtggaaccgcgtgaaccgacttgcaacaagcgtcgactcctgatccccaaggctctccaccagctcctctagatggtcaacaaagaagacaaaccaaacatagaagctgaagtgttagaagaagagccacctctagacatcagggccatggtgggtgcaccagggttctcaatcttggcctaggtatggtggttaatatcattggacttgagcttgctgaacagctcatgcacgatcagagtctcatagttggacaactcgattatcattaagactttcacctcccaatccctttgatctagagcatgaagtagcttgtgcactctctcatgatcaagatagggtagttgcaccatgtttgtgtgcatcttgttcacaattggctggaaccaaga

SEQ ID NO: 84215 - DNA, 681 bp, Zea Mays
aagacccatagcgcactgcgtaggacggcgggttgaataaatgaaaaggcaggggttcttttgcaaagcatacaagctgaaggggtatcgggtggcatcaaccatccgatctacatctgacggcctagattagactcatctaaaatcgaaacagtacgaagtgcggtccgtccgatcagcgatctacgacatagattgaaataactgtgatggaatcctagacacacgattcagatcagatggatcagaatcgtcgcaggacgcacacacttgctaggcgctatcgtggtcgttcacgcgacaatcaacagccacaatacttcttctctcccacgcgaacacccgagcacccaggaacacgcgcatggcggcgaccctgccggagggaactcaatccggcgctccacaaccccaaactcaaattaaacggcgcaacatgaaattggggacatggtttagcggtgtagatggttctcaccggaaatatcggagtgattcctcccggccacggcactaggcggactcgcggcaaacttgaagctccgatgacgaatcacgcgagctccagttagaaatcaccagtggagaccccccccgaggagatcccgcgcacactgacgatgccaaccgttcgctcaccgggatcccgacgccaccataggagaatctccccgtggcggc

SEQ ID NO: 84216 - DNA, 1312 bp, Zea Mays
cgttgatgcaggtgcagatgggggacggaggccgggcaacgcaactaactaacccaacaaaggcaaccaaccactactcgcccgttcctcctgctgctcagctcatgctcctgagtcctgcctggatggtctctttcctttgaaactgggcaatgtttggaccaaccaaccaacaaccgagatggtacgtaccatgcaatgcatgttgcatgcggcactgcactggtatgtaactgtaacgttgtactctccctgactgacacgacttgcatgctctagcccaggttattcgtcccggaggataggacgcttgggcttacatcagcctccgagtcgatcggccggtggtcaactaatgaaacccgtttcatttttgaactaatgaaagagagtatatattagtgaaaaaggtacataaacggaatattatttatttcttcacgtaacaaaaaagtgcataacatgctacgaaaagacaaagtaaaaatatatgtatgtatgaaaccccatgcatgtgctaattattgcaagttttataaaattagtgggtgtgcacagcattgtgctagctagctagctagcttgtcttcattaattaatatacaccgccatccaattaacaagaatattaaagcgtgcactgcatatatagagaggtaatccaacaattaataattgtgtaatggtttgttaggcgacgcgcgcgcgcgcatgcaatgcaatgcaagagggtttgttaggcgatcctccatctcgcaattatttgcgacagctcgaatgtgtactagctactcccacttttttcttgttcttgctccgcatcctgtctccgaactggcgtcctccacgtccctttgctgtgtgatagatggtccgatggatcagctaactccaatcatcccctgcatggctgcatgcaaaagtcgtgtcgttgcacgcctgaaaagtactacatgaaagtctacttctcaaatcccctttagaattacggaggattacgatgaaaatgaacttcaatcatattcaattcccaagaggatttaagtttctaaactagttctaaaaataaatgaacacagatccggccaaagtggaccgtatatgtacgtgtactatatcttctcgaactcagcctgtttccatcttggctcttgcccgccgctgaaaggaggaattccaaacttgcttccacagaccgtgtgctgacgctcggctgcgaccttcttatccgtccgtcccgcgtccatgtcatatatacatatatatcggttgtgcgatgataaggaagtcgatggccaattaaaccaatcac

SEQ ID NO: 84217 - DNA, 450 bp, Zea Mays
agctagtccaattacatcacatcaaggtgcaattatcagaaaattagcaggttagttacacgtaccagatgacctagaaaattttggaagtgcagtatgtggaaatccccgagctgtgtggctcggacccctgaatctgaggattagcgaccatgcagccagacagcaaataatcaatgctataacagtagacaaaacaacaatagcaatgaggctgccattcacttttctcttgggacttcttacatcgaccccaaggggcttcacggcccttgcatttctgttgttgccaaacgccccatccccaacaccttgccctgaaggtggtgaaggaggaagccctgcacaaaattcatatttcttggtgagaactagtggcgcagaattttaacaatttcaacaattaagataatgcacgatttattttacactgtgtcatctactttatgc

SEQ ID NO: 84218 - DNA, 793 bp, Zea Mays
ataaactgaaaaatatatgtgctttgattatagtagcaagcgctgctgaagctgaactagccaaataaagagttcatcgagcagcagtgtgccaagagagattcgcatgacaaggaaaggcaggtcaagcaagaacacgcgaattaatcccgatggttgatggagactggactggagagcgaggcatgcatgaacctatatctttctatcaatctatcttatcaacaccaccacatgcacccagcagccaaccagctgcttattcttggcaagcagtgcgttaacgttaaaggcatgcatggtatctatagcggcacaaagctaattttgcgttttcttagccttttcgacccgtgcagaagctatctgcagtctgctacatatatgagatgcgtaccacactgcagcacgtacacgggcacacggcagtagtagtgcgctcgtgtcgctgccatgcaccttattagctctgctagctagcttcctgtagtgtccagtgcctattattagtcagctagcaaagcaatataatgttgcagacgacgaatcgtcaaagctacccgtgcttggccgtaacgacagtggcacgcgcgcgcgcaccggccggccgtaccgatcgatccaacaggcaacagcgacgccgcagtaacttgggcgggcggccgtgcgcggttagtcgtcgcgccgtcgccgtcgacggcacgtgtcgccgtgcgcgcgccgccacctgtggagtggatagtccttgttgcgagccaggcatcggcgcggaaggcgatagatggatggagcg

SEQ ID NO: 84219 - DNA, 364 bp, Zea Mays
ggtccaggaccctagtagggaggaggatgagcatatgtgaagaaggagtcatcaaactccttggcatcatcctcaggagtaacaaatggcacaccatactcctgttggtgccattcattaaggttcgaggggtaggcagggctcgaaggcggaggaggacgctatggcaagggatggcccatggaggctgcgaagcctcggaagtcatgatgtagcgcctcagtctggcacctgtgcatagcctcctcgatcgctcggctgcgacacatggcgaagaccctggtgatccccttggccaggcacacaaataggcccaaacctaaccccgtcacaggccctaacctctacctgtaccactacagtt

SEQ ID NO: 84220 - DNA, 343 bp, Zea Mays
cgaggattgcacacacccaacaagagattgcccggaaacaaaggccaccagggacaggatgtctcgggcgcaaccagccgacaaccagagagttgtcgcgcacacatatcatcaccaccacccacaaccatacaacaacggccaagtccagcacccacccaaccacgcatatccacaccatcaggaagtacaaatcgtcccacccccgcctccgcctctgcatcaccagaacccacaccaccaaaatcacccccaggcaccaaagcaggaagacttcgtcgatcagccgtatcgcggagtcattcacatggtcaccggagggtccagcgtcgacttcgagacg

SEQ ID NO: 84221 - DNA, 981 bp, Zea Mays
ccagtcaatatcgaccgaggttggaaccagccttgcaacaacatgtgtagtctttgaacttgacctaacatattttatgtattctaaattatagattgtaagtatgttttgatttttacatacattattttactacacacttaaataacactatatatacaacaaataatatataaaaaaactaaaacattttatcatttaagatgcaaatagtatattaaaagcctaagatgggtgcatgttgccattttcacatgaatttttatgagataagttgatatagcttctagctccatggtggatcagatctatcaaaattatagacctagccccatattcaccaaatcggtggagcatctcaaaaggtcctccacctaatccaaatttgatggggttagaaaaaatatgcaacacaccactagttatacacaaaaatggtcctttctgttcttttctgccatcttcctcgtagcacacgcctgctcacctgccatggctaccatgcagtccctcaccgaccattgagatgcccttggtcgacgcacctatccttggcaagccatcgtgtccactcccaaccgaccaccattgaaatatgtggttggggtcatatgtatagcccccccacgtccaaaatagtcattggaataatagaatttatgcgagggcaccgctcaacacatcatgttggacatgtctgttagttacacatgtactagccattaccgaccgttgaactcgaggtatcaaatgcaaacaccagtgccacgtcgaacatgtctagtgcatgtaacctgacttggttgcgctttgcaacctctttgactaccctattgtgtgtggagtctagtgcatcactggatatgtctaatgcattgttaacctccacataaatgctacaaacttctctgggttttgtatccactgtggcctctggtactttatccgatgcacacctacgtgttcgttgtactgtttttc

SEQ ID NO: 84222 - DNA, 313 bp, Zea Mays
ctgaaattgtgtgcaggtgatagttcatccatcaatgtaacactcatgtgcttctttttggagttgggcatccttgtgatgtttcctttttgaaatacctgacaattcatcgtttggcagtgcatctgctattagttgttcttggggagaccattgactttttatgccagaaaataaaatccggttcttctgttttgtagtttcactttcgttcgtactgatctggcgacaaggaattccatagtactcaacaacaacatgttccaagatcatttctctattggtgtgcatccttttgtgtttgttcattagt

SEQ ID NO: 84223 - DNA, 888 bp, Zea Mays
gtcgggctttcacttcttaaaaatggttgtggctttagtttattcgtcaaagcagcctttctgaaggagccaaagacattaaaaaccatctgacaaaataacttctagactaatttttttttaaaaaaaaactatgtcaaattaaagccgcgacatgttctgtaccaacaacgacgcctattttgcctagtgtactaggccaacccggggacaactttgacataagcgcgaggtgaggcgggagacggcctttgcgaaataagattaatctatactactctattaagagaatagcgtcagcgtccacaccaaatatgcccctgtctggtattgccctgctctcgtggccccgttcgcagccaattttttttcccgccaccaacccagtcatccctccgtgcatgcctctcccctattccttttctctctcccttacacttgcaggtgggccccactatcctttcccacttgctgctcatcttcacaatggaatggcgggtcattctctctcacgcaaggaacacaacagccgccactgattcccgtgaatgaaggagtagtagccgctaccctgagatgccacaatctctttccttctttgctcgatctccttccttcttcactcttttttcgtccctatatgtttcctcccacggtggaaagcagccagtcacatctgctcatatggaagcgcagtcgcgccattaatggaagcttttggagccgcaatcacctttttccttatcggcattgctatctcctggctataagacgccacggccgtggacctatccccatcctcagctcactctatgtaacctctctctccctgttgtctgcgcgccggagcattgcagcgatgtcgccgcccctcactgatgtgtcgcc

SEQ ID NO: 84224 - DNA, 330 bp, Zea Mays
ctaatactctataaactatttactaaggaaccaaacaaacctcattcaagacgaaaataaccctaacagatgccgcttcatctcttctcttccccacctctggtctcttatcgcaccacaaaagtcatcatttcacatccacaacaccccatggcataccagcagcgggtagaaggtggtcgtccacgtcgccctcaccacacacctccccctccgcatccaccccacctccctctccgtagtcatatcgcctattagaggccttctatgccaaagaccactcgtttaaccttttgcttcagcacaagcaagtgtatttcaggagtattt

SEQ ID NO: 84225 - DNA, 529 bp, Zea Mays
ggcaggtagttatatccggtcatttcagttactgtctctccaaaaattcacagctaataattcagttacactccctccatatatacatttcacttcaaacggctcgaaggaatagattagaaagcactacgagatgcctacgctttgcttgacgtacgtctataggaatcggaacgggtatatataacctagtaaattttttaccgcaacgaccaattaagataatgctacgtggagtatatatatactataacaaattaatgctgtgcagtttattaggcgtacgacgttacgtaagcgtaattaattcacgctagcgcgagcagagagtgctagtagaaattaaaaaggaaaagctgacaggctcaggcgtgaagactaaatcaaaatttataccctgcagcctgcaggggcgggtgtgtgtgtcatctagtttctatgttattaatttagctgtggcaatttggttatatatcaagaaaattaattagaaagaggaacaaatgatttcctacatgagaaatccggc

SEQ ID NO: 84226 - DNA, 904 bp, Zea Mays
aaaaatctgaaaacggtcggaaaaatctggtaaacggtaccgaaaatttaccgaattttaccgaccatttacatccttagttggaggagtgtcatgcatcgaaggatgacagtctcccagcacccatgaaagtgtccgccatgaggatcctatggtgttacacgcgctagaaggatcatggataggagtagggtcagtgaaagcaacgccacatggccccactgagggttcaccagactggactgacaaagtgagttgtttgggcaatgccgaaatagaaggattagctcaaactggccccaaccccacctgagatagaggagagctagaccgagtaagactgttgcatcatcggtaacgcgacacacagggagcattgctgaagttggtgtccgaggccatcgctccattgactgggtttgcttgtgaagccatattggtgtcgcataacaaagcgcaccacaccactacctagtgcaccaaatatcatccatatatgacaccatgtaccatgggtactagaaaaaaatcaaagagagaggagagcataggactgggactgttgcaatagaggtatagcacaacggtatacacagacacacaatacaaagaggcctgggccgcttgatcataatgtcctacatccttcatatggtgaatgtttaggtgtaagtgcgggcataatttacgtacttagatgatagctgagttaatgagtgggaacaacccatgaattctagtcgtcttctttggtgtctctagtcaccagtcatccctctatgtgtcagctgagattcaattatcccgagggcgagagcctgattctaggtactagacctagttgtcggatcaaatttgttcatatgttgctctacacctttttatagcacaagatatgatagag

SEQ ID NO: 84227 - DNA, 444 bp, Zea Mays
ctcgggggtacttcagatccctggcataatgttgcacttcggcaacctgctcctctgatagttgttttcccgaggcatgtcgaacaatgaattctagctccttaaggagtgcttcaggagcaggagatttaggtttctcaagaacactctctttctctggtgctatcggtgcagtttctgaaggtccagcttcagcaggagcgttggctacgctcgcaacagcaattttccttgcatctttagtctacgcgttgtgagcttcagcaaaggcaggagctgatgtatttatggactccaaaacaacgtctagcacgctagccattcttctcttccttagagtcactgcgggaatgcttgatggcttcgataatcgtattgtccctggcggactcaacaccttcaactaatctattgccttgtctaatttcggctcttcggccgggt

SEQ ID NO: 84228 - DNA, 651 bp, Zea Mays
cctcaacacctaataaaagaatcaacatgttagagcctcagtacatgaaatgcattcctaatcgaaaagtaaaaataatatcacctactccatcgcccgccgagtcctgtccctaaccacagagcagccatgcgtaccccacatatggtaaaatagggcactagaagatcgcttcttagacagttcctcaacttgaaaaacttcttggtcgaagtccagactacactgctcaaatctcttgaaatgttggtagcctttgtggaatagagcattgacatcgtcctcgtaggtaacgagggaagcataggccatcagccccgtcacaatgtctggaagacttgcaagctcctcttgtaaccagccaaggaagcaggtgcctagctcttcctagacctatcgaagggcgtcgttacacccagttcacgataggcctcaacaaacaatgaatgggcttgatccatgctagcccgcgtcttagtttctagcttttcgcgataagtcttcgcaactgataattccaactctagcacggcaacacggtcctgcacgccttgcgcatccaaacacatttgaaccactgtttcctttatctcgcccagctaacggttgaggtcatccttctctttttcaagcttcttgtccttctccgcc

SEQ ID NO: 84229 - DNA, 914 bp, Zea Mays
gaaattttccccttttcgctatctatccattggattgttgaatgttgtattgttaattttaaagatcttagagagtttaagtgatcattaatttgtatagtggctcggggcgtcactttcaccttgcatcccatgcaaagaattttttccccttttcgctatctatccattggattgttgaatgttgtaatgttaattttaaagatcttagagagttaaagtgatcattaatttgtatagtgacccggtgcgtcactttcaccttgcatcccatgcaaagatatttcccccttttcgctatctatccattggattgttgaatgttgtattgttaattttaaaggtcttagagagttaaagtggtcattaatttgtatagtggctcgaggcgtcactttcacctacctccggcaccgtgggagttttttttctattataaactccatttcaagctgaaattcgataaaagtcctttataccgcgtcataccattataatagaattactagccaacttaaatcaattgtgttttattttatttctcttgtcacatgaatagatatttttgcccttgctctgtttaagaacgcattataaaacgctacctactttaatcggaaatgttttctattgttcctgcaattttgtctctattattacaattgcagtccgaacagctgactttaatctgaaacgaacaatataatgattttaactattttaactgaaacgtctacctgctaatctgcattatatgcagttatgtttctttcatctataatgaataaatctgtgtagcaaagctagaatatgtttactgtaatatatctgtgtgtaacaaagctagaatatgtttactgtactatatggcatcttgctgctgtctggatgaccaccggcctgctgccagactg

SEQ ID NO: 84230 - DNA, 550 bp, Zea Mays
atttagagtatggcctcttgtagagaattgggagatgccgaaggagactgtcactgagtctagcgaaggtgacttggttcgactaaaatacaccttcagatatggagataaatttgatgaaccaaatgacaactagctgaaatgtatcgaatctataagtgatgaattgcttgggtcatattccaaagcagaagatgatgcattatccacatccttcgggggccgaggaaaaaagagattgaatagagtttttgatgccattggttttgtttaccccgactactgctacccgctgcggggacggggaaggaagaggaaaaccgctacttcggccaagactgctgcttcggccactccagatgagcctacgctgaagagcaaaaggttgaaagtccttacccatcggccacgctatatcgagccgtccgtggtacccgagtttggtggggaaactttttcagctgctgaaccaaaggagcctattcctcctacacagaaggctgaggatccgactacaatgctgaaggtaccttcatccgggctagctgag

SEQ ID NO: 84231 - DNA, 464 bp, Zea Mays
gccaggtggtggctcgacgaaggaatatcaaccggggcaatctgaagagcatcatcagggatcaactcaacatcaccagcaggaatcagaactctagcgtcaggtgcgccggtctctaaggcgacttcctcgtttaaggcatgcgctgttgccatgccatcagaatgtggaggagaagacccaacgtggacatccatggaggtatgagaaggggagcccgctcggacaccctcgggggttgggtcgcagcccgcactgcccatcagagccggatcaccaccagcaacaccctcgggggctgggttgcagcttgcgctacccacccaagccggatcattaccggcaacaccctcgggggctgggtaaccgcttgcgccatccttgaggaccgggttctctacaacagccacctctaaggctgaaggattctcagtcacctccatgggaattgaacaaccttgacc

SEQ ID NO: 84232 - DNA, 709 bp, Zea Mays
ctaaggttcggggacctagtttaaaaattaggacctacgtgtaaggtttttttaaccaagtaagacttgcgagttcattctctagtttttctagggactatttagcaaagtttccgtgccgaagaggtatcctcgtacgaaggggtatcctcgtacctaggacgtccgatcgcccaccaacggcacagattagaaccttactctccactaaccgacgcgtattcttaaccgctgatgtgaagatccacggtgcagattttattaacgcatgacccaatcctatccgcacctgcctgatccaacggacacaaacccccagccaaaccattaccttggattctaatcagagtcgttgctttcaggatcaatgctctgacatcttcttgtacccccctccgatgccaccaggcgacggcgccgccttgaccacggcgaaacctcaccggcgcaaggccttctactgatctggtacgctatctcttagcatgtccttcgatacagagtgtggagacgaagatgaatcggtttagatggttatcaccttgtgatacaccgtaggacgacatggtgttgatgtggggaggatccgcggcccggcgacgaatcccgtcctactccgaactcctaacgtgtggaagaccccgacgacgcttcctcaccaccccccagcggcctacatgaccacggaggcaagtttctatggtggcag

SEQ ID NO: 84233 - DNA, 1470 bp, Zea Mays
agcatgaccctttctctgattccctccggtgcatggcgaagcaactccttgaactgaagtacgatggcactaaagatagcgacttatatgactttgaagcaaacagtgtgggatgtgatgtcaagtatcagggaatttctgaccctcctgttgaaattaaggagagtgacgtgcacaaatttctgccagattcatcctatgatgatgtgggttcaagaaaatgcccgcaggaagaaatgaaccatgggcaggagcatgatgctccacctactgacagtccacatgattcagtccctgatgaaggaaacggatttcaggaccccaacatgatctacttggcaagcatcatcacatcttccagttcccaagaggaagaaggatgtgcaagtacttcactgcatgagaattcatctatggcagtgctcaaccatattttggagcatgctcaagagaagtttgaggaacatcttgacaaggatgtgaatgaggacattcatacagaagtcatttctgaaaattcatctggcaagtgtgaagacttgaaagaagtcagcatttactcagagcaggtgaatgtggaagatatggaggaaagcaataaatctgatgtatatgtgttggatgatgaaacagccgagtacatagaagagcaagtagtttcagatggtatgaactcttcaccggtttcatccaagcaatcagatgatccctgccggataactccactcgccctcgcagatgaagatgatacagtggcatgtaaggtcatcgatagccctgaagtggatcatattacattatcagaaacattcacggacattgatctacctaatgtggtaaatgagtcagtaatcagcagcgaacatgccatgccagaaaatgaacagtactatttccatccagaaactacttttggacaagatctgtgtctcgacaacaatgaaattgtaggggaaaatggggaagttccactatgcagctcaaccactgtggctataactcctgaaccaactgtaaacagagagatagaacatgagtttcatcaagctgtgtatcaggaaccatcgaattcattcaatagcagtaaagtttttggagatccactagcttctgactccagagatgttgcaccgtcagtcatctcgagctttgattggatgcttaatggtgcaatgcagcagtcattcaatgtctttccttctcatccaactaatggaaatgaacaagaaaatggttcttctgaagatgcgccaccacttcctcctcttccaccgatgcagtggagaacaaacaagatacagacatgctcatcaccgttatctgcaaagatcgggagaccaccaaggccaaaacctccagcaaaacaacaagaaagtgaagctgctcatattcttcaggagaacaatctccacaaaggcttgagtttgcagaatgaagtagcgcaggcaactatttctagtgatcatgaga

SEQ ID NO: 84234 - DNA, 506 bp, Zea Mays
actcatcatcaacccaaaccataagggacaagtcaaccttgtgttcacaatctcccccttgatgagtgcattgtcaacaccaccatttgagcatatttaaacagaaagaggaagaagaagagaaactcactcaaatgaccataagccagataaaagccagacaagtcatttagagtaagcaaaacttggtccctaaagaaatgggcaatggctcaacacgaccaagcaagaaaaggctagccctcaataagaggcaaaagcaggtttcaacaccactagccagaagccaaaatctcaatggagcacaaaaggctttatcagagcttaaaaacccaattcagagcataagatcagcacaaaagctaaaatcaaagatagttcctccagaaggaggcaacggcttaacacaactagtaatagctccaaataacacatcgcgccctcttgaatgaggggaagcccaaaagacaattctccccctagatagaggaaatgggaaatctcaa

SEQ ID NO: 84235 - DNA, 358 bp, Zea Mays
aaccttccttttataccttaagggagaagccttacattgaagtctctctttggactagaagagtgagacctatccatggtcgtaccccccgatatggcactgtccattatgttggtccctatagcgagttcgtgctgacgccctggcgatagtgagtggtgggtcccacgaatctgtccctgggcgcggtcgtacgcagcgtggtttcgcccattatatttctcgtgtcaccttccatcgtacgtggtacatacacttggtatggtgtgttgtcccatccttttcgatatgtgggccagtgttgagactcctgttcggaggtctcccatggtcgaggctgattgaccctacggggcaa

SEQ ID NO: 84236 - DNA, 346 bp, Zea Mays
atcggtaccgaattgtgatgttattaatggccatacaatcaacacacatgcgccaagtgccatctttcttaggaaccaaaagaacaggaacagaacaaggactaaggctctcacgaatgtacccgcggtccagaaggtcctggacctggcgctgaatctccttagtctcctcggggttggtcctgtaggcagcacagttgggcaagctcgcccctggaattaaatcaatcttgtgctcaatgcctcgcacaagtggtaatccaggggtatctcagagggaaacacatccatatactcttgcaaaaggttagcaacagcggtggcaaagcaatagatgtatcatcaa

SEQ ID NO: 84237 - DNA, 697 bp, Zea Mays
ctgggatcgggctcacccctagcggcaccagagccgagctcgcctcgtcagcccatgcggtgatatgctggaccccgatgcgttgctccgcccggagatcctctagcgtcttcttcatcgtctctgccgcctgggaagccggagccggctgcgccatctgggctacatgcgctgcctgcgccgcctagaaccagcagacccgctcctccagtttcttctccttctcctccgcctcgcgctcgtgctcggccagcagcttatctcgcctttcccacttctcctccctccaggcgagctccttctcctatcgaatgagatctgatgcccgctcctccagaaagacaccctttgccctgaggttttcctcggcaagagaaattttgccagccttgttgtcaagctcctgctgcagcttttgcagtgtcgcctcagtagcggtctgcttatcccactgttcctcaagcatcgcattgtaggctttcaacttctcatgatattctgtgacgaccacctctcgttggtccaagtgctctttcttcttgagcagcctcctctcctcccgagcagcctcccgctcccgctcgatcaccttctctaggtcctccctgaggtcctcacgcccccgctcaagctcggaccgctctgaagcaaattggcaggacatggccttggtacgttgctccaactgggtgcacca

SEQ ID NO: 84238 - DNA, 335 bp, Zea Mays
gttttgtcacactccttgtcgctgtttcgtatctcgctccgacaagtaaatttattgtgcgcatttcgggctccgagcgcagagggcacactatttatactggttcggggcagaacgtccctacatttagtcatcgatggcttgcactaatagcaccatttgatgatcaaactcgtagtaggggttacaagcagttgagacagggaggagaggctctcagatctcttatcggggtggaagtggagcttagaagctaagatgtggagtcctagctaagtcttggcttggtagggctccggcctcctagccctcgccggcactcctcctcctattcg

SEQ ID NO: 84239 - DNA, 700 bp, Zea Mays
cgagtggtttagacttaggtttttctaaagtttctctcttgtcatgggcacatatggtcaaggtaagcaccacatgaaattagacactagctaaccctcttgttgctaaattgtattcatcaaagattccactattccacatgtgatgacagattagggtgtggctctagagtggaaaccctaagtaacaccaagggtgttacaattctactcttagttcttctactctccccaggtggcttcatcttctgcgtggttactccactgtactttgcacattctaatcactttattcctcataacgcgagtcaagatatcaatgatcttgatagggtactccatataagtcagatcacgttgaacacgcagttcctccattggtagttgctcttctggtaccctgaggcacttcttcaactggtatacatggaagacatcatgtacatctgctaaacggtcgggtagttccagttgataggcaacttccccactcgctttaggatcttgaagggtccaatgaagcgaggggacaacttccctttaactttaaacctcctcataccctgaactggtgatacctttagatacacgtgatcaccttccttgaactctaattgccccttgtgggtatctgcatagcttttctgtctagactgcacagttcttaagttctcccttattatccgaacttgttcctctg

SEQ ID NO: 84240 - DNA, 560 bp, Zea Mays
cgggcaggtacagaccaggtggacaacgagccaggcggggctaaaacgtatcgggccacaagccgccctacaaacctgtcccatgtggacatgtatactctcacactagtgacgcgcacgtgcaggtaggtaacaatgcaatttaagttttcctatagtacaggttcggtgcacattggaccttggccatgcctgtaggttcattgactgttttgtccatgtgtcaggtgttagggtggcattagaccggtccagtgcaacaccagacctaccacatccgagccatgtcatctaaccattgggtaaactccatccgatcgttcgatgtacgagtattacggtgctcaatggacggagtcctatgctccaagtctaaaaacaacgtctctacgtaagtggtccggtgcaccaccggaatggtccgattcactaacccacacaagcccagaataatgactctttgcgtaaccggtccggtgcacaccggacttggtctgatgtgccgcaaagcagcacaattaagtcatttctggactttttatctttgtcttcatttgtct

SEQ ID NO: 84241 - DNA, 471 bp, Zea Mays
tttttcactcaaacttcatggttcacctcttctccctcgtatcttgttgcctgcaaaatttgagatcattctagaaaggttctgtagtccgacactgcggctctcacgcacagcgctaccgctcgatgaatttttcagacttccagaatttttactagacctttagggtcttctttggagtttcttgtgaaagtttgggttcaaatcaagtctttaagtcccattgagcttatattcttctctagaacttggttgtagcagttaatcgatccatggttgatctattcttttgcggagtgtttttggtgtccctagaggttggattgggtcagggaatcaagtcacagtgttctcgcaattcgagaatttttagtggctctcattcacccccctctggttgcctcactagtccttcaattggtatcagagtcggttaaggatttcccttttttaatcgattcgaaatccatg

SEQ ID NO: 84242 - DNA, 347 bp, Zea Mays
acgggtcttgctttattagctcatgccggcatgccactcaaattttgggacgaagcctttttgacagccacatatctcattaatcgtctccctactcgtgtccttgataacttgtctcccatggaacgattatttcaaagtccgccaaattattctatgctaaaaatttttgggtgtgcttgttggccccatcttcgaccttaccaccgtcataaacttgaatttcgttctaaaccttgtgtctttataggctatagctcccttcacaaaggatacaagtgccttgatatggaaaccggacgtgtctatatttctcgggatgtaatttttgatgaggctgtttttcc

SEQ ID NO: 84243 - DNA, 291 bp, Zea Mays
atcaattggatcagattaggacaacatttagcatcagtcttttcttgcagccaatgatcagaccggaattttatcgactccccattgtccagtattgacacaacagccacctcaaagagggcctttgcatttcggtgagcatggacaggccggcaggcccatggtcttgaaacatcagttttttcgcagccacaaccattggatgcacaaggcttagcttaagacctcaatattgaggatgcctagaccaccatacttgaaaggtcgctgcacggattcctacaatacaag

SEQ ID NO: 84244 - DNA, 404 bp, Zea Mays
attttttgaccgaaccaaacaggccgtaggcgagtttgggtcaccccagaatggagtcaagaatctgctgtaaaaatttgagctcaaacggagcaccgagcgaaaagttatgcctgttttatggaagatacctcaagttatggttttcaaaggtacaactcggcaggaaccgaagcgacggctatggagcacaggttcagttttagagataggatttgttttctggatatggttggtttagatatatgatctgttttgtggatatggtcggttttagagataggatatgttttgtggatattgtcggttgtagagataggatctattttgtgaataggatcgattgtagagataggatctattttgtgaataggatcggttgtagagataggatctgttttgtg

SEQ ID NO: 84245 - DNA, 633 bp, Zea Mays
gtgttacactgacatgtgggcctctagaaacgtctcttggtggaccaacgatgtgatgatcactgtgtagccttcgccgccacctccagcgtctcgatgcccttcactctcctttaacagatgtatggcgcgggtgactctaggacgatgtcgtggcgaaggccttggtcggtgtcgatagctcagaggcctctgcttgacgtcatcctgtgttacgaacagtctcaaagtcgaaggcacctttgcctgtggtcatgtgtacaagttagttaaaaatgggaaggggaagccttcactccatgatcgaggttacgttcgtcctttgcccaacagtagccctcgagggagtggttcatcctaatgggtcattcccaaagtctcttggtctagaaggggacgaacactgtcctcgatcatctaatgaaccgcctcgaggggccactagatatgaccgttggaaaatcgaggttgcactattgcgtggtgtggtaggtaccgcatgcctcattgctaggttaccacacgtgttttcgaattcgtgattgctccgtcgttgctgctgaatcaccaccgcctttgtcgctgttgtgctgctgacgataggatcggcaacgagcccctccgtgctggccg

SEQ ID NO: 84246 - DNA, 319 bp, Zea Mays
gatgattaggaacacatggttaggcagaagtagagaaggtttcggtaataaggattagggcaaagaaagatttcattgtggatggtgggtcttgactcatctggtgattccgttttgccctttgaagacttgagttggtgcttatccttccttgatgaggttgatcatctttggtctttaatcttggagttatcatctgagtttatagacaagtagatagatgtggccatgtgggtaggataggttttctgagatagttcaaaatctcgggcgtttttaatttatgttgatctatacggattatgtatgttaaatagtg

SEQ ID NO: 84247 - DNA, 553 bp, Zea Mays
tggaccagcccggtggtgcaacgatctgggtccgtgtggggcctagacttagcctttgggtggcctggcacatgggtctaggtctgtgtgcatcggaccacctgtacggccaactcggtggtctcgggaatttattattaaaatcactagaccatgaacaatccggtctggtggtgcagtagactaccctccaacggctacttcacgggcacgcgggagagccaacgactagctacgtggcacccggtccggtgtcctctagaacacgaaagatccaatcaggatcccaggcttgaggcatgtgtacccgatcaggtggcgcatcggaatgatccggtgcccctacagagagcaacattttggcatgtttttacaaggaaggagcaacaatattgagggtcttatggggctataaaaggacccctatggtgacctccttcagtacccaagcactccaagagctactctacactccgacactcttccacggtgccatactaagattctagcgagatctgagcacaatttcaaagcttttcctgtgactcttgtt

SEQ ID NO: 84248 - DNA, 699 bp, Zea Mays
aacaccagtgatgaactacttggagcctactccaaatctgaagataatgcactatctgtggcctttgggagccgaaaaaagaagagactaaatagagtttttgatgccatcggatttatgtatcctgactaccgctacccgccaaaggggcaaaagaggaagagtgcaacttctgggaaagatgttacttcagctgctccgagtgagcccgtgccgagaggagaaaagtaaaggttcttactcaccgaccgcgctacattgaaccggccacagtgcccgaacttggcggtgagacctcttcggctactgaagccaaagaacctgcgcttacgcaaaagattgaaaagccgactgcaatgccgaaggcatcatcggccaaattagctgagccgaaggccgataattttgaagagatagaggtcgaaagaacaaagatgttagaagttataagcccttcggcagaagcgtcagtgccgaaggcacaaaaagatcttacagcgacccccaagaggaaaaggatggtcaacgtactagatgtgctggagacgataaagacttcaagctctactccagggaaaacttccgaagctttaaaaacgcagactgagacaaaactaaccaaagccgaagctgcaaagagccaggccgagaccgaagctgggccttcagagcccgccaaggagaaatccttggaaaccg

SEQ ID NO: 84249 - DNA, 355 bp, Zea Mays
ctctgacacattgtgttcaagaaagctatatgactacatcagagtatggaaggtgcaaatttaatttgcatctttacatgaacacagctgagtaggtgtgcccttgtgccatgcaaacttcaagcatgtgtgaaacagaaaacttaagaattcttatattattacagttaccaaatttcattcgtagttacttttgtgggccgaacagaagaaaacataaacattgaagctgagttcatttttatcaaacgatattttgttgaagctatatggctagatcagtgtatagaaggtgcagtttgatttgcacttttgcatgccttgtgccagttcttgaaatatttcagcacagggg

SEQ ID NO: 84250 - DNA, 1063 bp, Zea Mays
cagcaactaggatgagtacatgaacacttattcagcattgctatctgttactgacttatgtgtcacatatatatatttagttagccttttcaaaactccagctttctctcgagcagaataggtactcctttgcaatcacacccacactcgttggacagtcacaccgttcaccgtttgccacttacagtgctggtaagaacgttgtaagaacggggtaagacacttcataatttgtattccaccacccaccaccaccctgagagatagttgtagggttcacattgtgtgttgccttttttctctgtttgtgctaacaatgacaggaccaaagaatcaaatggacaaggacaaggggcttaagcttaacgacgacgagtgtgtctctcagctggaattgagtagatgatgcgcgcgaggactgaagcttttaaaaaaataccaggactctgcggcgacatcctatgagcagcttgatcgacgagttgctcaacttgttacacgcatgggcgtactggaggctcgtcccccaccaccaactccagccctagctcactctcctgtggacgacgacgacaatgtttatgcaccgctgcgacaatgcctcgcacgtaatcgacaaggtatgggaggtaatggtagacgtcgtcatcataatcctgaaccagaccatgatccatttgctaagattaagttctccattccaccgttcatgggttcttatgatgttgaagcttacttagactaggagatgacagtagaacaaaaatttaattcccatcttgttcctgagcagcatagggttagacaagccactagtgaatttagagattttgctatcatttggtggaatgaacttgttaacacacgtgctgcaccacaaacatggaatgcgttaaaagaggagatgtgagctcgctttgctctcccttcttatagacgtgatcttcgaaaaaattgcaacgcttagattagggagacatgtcggtacaggaatactaccaagagcttcagaaaggtatgctacgatgtcggggtagttgagtatccggaggatcaaatggtt

SEQ ID NO: 84251 - DNA, 682 bp, Zea Mays
gcttcatcagtgttacgaggtgcgtcgatcgttggaggctccgtagtaggagcattgactcttgatcggtatgggtatggaggactagcatacgaataaggaaagagtggttgaggagttagggcatggcgatgagcaagaacgttctctcggtgatggtggacaaaagaaaggttgtggaaaaaacttgccacacactggtaggagtctcaaaaagttgcagagattacttgcgagcaagtctatggatgtatggaagttgggactccacgaggtatccatatccaaatggagtttgggaagctattaaatcgaaatggagagagaaaagctacaaatggaaacgagaggttgtgaattagagatgaatgtgtgtaaatgaactctagcacccccctatttatagtgtggatttagacatttctagaatcatttggtttttatattcaagagattgaggtagtgccgataaatcaaagtgcacgacatcagcaagagctgatcacgcctggtcgatagtggcatctaccctaatgtatcagtcggtaccgatcgaactgaccccgtcgctgtcggtatcaatccatctggccggttgacatctcagccgattagccgagcatagtgcccgccattgccaccaatatggttggtaccgaccacctaccgcgccatgccaaca

SEQ ID NO: 84252 - DNA, 757 bp, Zea Mays
aagcaataatcctcggcctacagaagcttagagcccttggggtcaaaatttgcatcatcaagacaaactccagaattctggtaggtcaagtagaaaaagactgcatcgccaggaagtcatagctgttacaatatcttttagttgtccaaagtctagagaaatagttctgcgttttcactctccagtacatagaaagagaaaaaaacgtagaggtggacatgacaacaaaggctgcagcaaggggtgaagtcttgcccccagatgtattttatcaagttttgacaagacctttagccaaaaacaagggcgaagggcaaacaattaacatcataacaactaaaggttggagggacccaatcattttgtacctgcgtggacatttttaccctcatgacaaggcataagcatctagactcaagcaccgtagttgggggcacacaataatcaaagactgtctatacaaaaaggcatagtccaactggtcctcaaatgtatcacccatggtgaaggcaaaagcatcttactcgaagtccacaaaggattgtgtggatgtcacataggtcctagagcccttatatcgaaggtcatgtgctagggtttcttttggccaggaatagtcaaggacacactcttcacaacccaatcatgtgaagtttgtcagaaaatttcaacatgaagggggtccttcgcagctaactaggttaatagccccatatggcccctgcaactgtggggcaccaacattgtcggaaataaa

SEQ ID NO: 84253 - DNA, 648 bp, Zea Mays
gccggggcccgcctgtcctttcagcttcttagtatgttgctcatcaaggaaacatgcaggcgaggctgcatagcataggaactgatggatgatgtccactttcttcctctagtccacaaacttcttagaggcggagatgcagatggctacgaggaacatgtctttcttgggttccactcaatggtctatcggttgaccgacaattccctcttcttgcaccaataggaaggggaatcgagatctaggtcgtcctcggtcgcattgcctaatcctgaacattgcaaagagaggagcaccacttgaatcttgcggttgattttgatctgactctcgagcgtgggctgaagattagggatagagatggggataaggatgggaggactcacaggtgccgatgcgcgacttgtgctccctaaagggcgtggatgtgccgatgcgaagatcaacaaggagacgacgaggaggaagccccccccccctcaggctatgttcgtttaagcacttcccggccgagaacagggacaaaaccccgtggacctccctcgtctggaaagaagcccagcccatgaaaaaacgtgtattcggttaacccccgtgtggaccgtatcccgatatttcctcttcgttccataccgggaaccacgcccg

SEQ ID NO: 84254 - DNA, 672 bp, Zea Mays
cgggaagattggctgcactgaacacgtttatctcgcgatccaccgagcgaagccttccatttcttaaaacattatgcggcgccaaagactttgcttggggcctagaacaagctgctgccttcgagtctctgaagtaataactgtctgacctggcaacattaacaagtccagacccaaagctacccctattactatacatcgcggcttcgcccagcgcagtcagcgcaacattagtccaagaaaagactagagatggcaagactgaccaatgtccagtatattttgtctctgaagtcctcacaagctcaaagtgcaacaagacaaagctagaaaaaatagcatacacggtcatcatggcttcgtgcaagctgagacactactttgaggcacacaaagtacgagtcatttctgataggggtcttggggagttgctcaggaatccgaaggcgtccgccaggataataaaatgggcagcagaactctccggttacaacatcaccttcgagccaagaacattaatcaaatcaccttcgcgcaagctgagactggacatggccttcggaaccactgcaatgtcatgcagaaaccgtctagaccatccactgtgatggggcatggtgtcacgcaagcgtcggcgctgcaacaatcattacatcaccgccggactcaaat

SEQ ID NO: 84255 - DNA, 377 bp, Zea Mays
aagagagctagggaggagaataccacaccgaagtccagatagccattgtactgttgtggaatgtgggaggcccaaaggggaatcgttgctgcatcgctatggagggaggggaaggtgacaccgttgtccgactcaccagtcaccagggctcagaggcggtggaggcggtagagggactcaagaaggccgcaggcaccgcagctacttggggcgtcggtgggtcgggacgggagactgaggaagagaggagccgagtaggagttagggctatggtgattttattataatataggttgtacgggtcacccatttatacaggttgtgcctgggctaacccgatgggtcgattcattaacccaatcattgcccgatgatcg

SEQ ID NO: 84256 - DNA, 633 bp, Zea Mays
gtcatctttagttgtgatcacaacgacaacaagcactagctagtacacctttttcgaaacaaaccaaaaagtgatgttgcatgagatgagagcctccattctatactgttactaccggccgaaaggcctgcaccaaatggacatagccccatgcatggttttgattcagaagcaagcaacttgttgatgagcgcatcgtgttaacgtcaatggtctgtttcgtgtataatttaaatctgcactatataaattattttgcccgtttatacaccaaactcttgtgatatcagcctcatcacaaagcaacaagtacttgacacttgcgaaggaaatgctcttctttccccctccaacacaaacacaagaaaccaaaaaaagaaaaacccgagaaaaaaatccccagaaagaaagtgagtcacagagtgctaaagtgcaaggcccacaacgcattgtcagatggagagggtaggcccagtttggacctagcatatgaaggcccaagttcttgccgaaccccctgaatccgtcgattggattgttccacttcctggcctggccttaattctggagtaacttgggccatgctgcttgggcctgtgcagcaagctgtccggactcgtacagtacatgaca

SEQ ID NO: 84257 - DNA, 1543 bp, Zea Mays
ttgggccttcatttgtctgtgaagaagcttccaaagattgcctttcaagaacttatagacaaggtggctgacaaattgccagggtggaaaatctgccttgatcactaatgctggaagactgaccttggttaaagctgtcctcactgccattcctatatatcatcttcttgtccttcaatgccctaaatgggttatcaaagccattgacaagattcgcaggggtttcctctggaagggcagaaaagatatcaagggaggccattgtgttgttggctggacaagggtgtgtagaccacttaatgttggcggtttgggtattcacgacctggaaatccttggttgggcactcaatgtgagatggctctggctcagaaaaacacaggctgagagaccctggactgagttcgacataaaagtacaccctaatgctgaagctctcttccaggcctcggttcactcttctgtgggggatggtgctacaactctcttttggacggatagatggattcaagggtagtctattgcagtttttgccccctatccgatcagttgtattccaaggagggtgaggaaaggccgcacggtgcaggaggctcttgctgaaaattgctgagttcaggatatctctgggagtctctgggagtctgactgatgtagtcatcagggagttccttcttgtttgggacctgattcaaggtgttcatttacagacaggagtcctgatgtccacctttgggtgccttgcgcttctggcctctattcctctaagacggcttataacatattttggaccggtacaacgtcctttgaactggctaaaagactttggaaaagttgagctcctccaagatgtaagtttttcatttggttagcatcgctcaaccggtgctggacggctgacagattggcccgacgaggtatggatcatcatgacaaatgcctcttttgcgatcagcaagaagaaatagtccagcatattttgctctcctgtgtgttctctagaaacatttggtggcaggtgttgtgtaaagtggggctgcaatacttggcgtctgggcctgaggacatgattttccaagattggtggagtaatgctgaaggactgtcatggttgccattgaggagcatgattttccaacatttgctgaaggtctgtgtttcctctcctggatcctaggactgtcatggtcgaccttcggacgtatcctcgagcatggtggtactgcctgttaggcctaggttgccattgaggagcaattcctcgacaactgcgaggctcgtgctctccacctcgactccgccttttggaccttcatgcggggcaatctctccataaccaagtattgccgccaggtgaagggcacgacagactccctccatgatctcaaagagcatgtctccgatcgtacgctcgtcctcaactgtctacaaggcctcaacaagcgctactatcacttgcggacctagatcacccgctaggtgcctttccagtgatccagtccttccacaaggtgtcaaggtccgcaacgaccttatcctcgag

SEQ ID NO: 84258 - DNA, 447 bp, Zea Mays
accctggaaagtaatgaatagaaaaagagacagtgtgccctctgactataggtagactgattgatttgcctgcctgccaatagcccaatacgatgacgtgtgcgtgtctgaacgaacggacacaagccatggaacttgcgttcatggagaaagacctgctagctgtacttgaaatggggccctccaaatgccacatctcctaggcatccttgcttaaaccggggatgagcaaagaaggtgtccacgaggaccacgacggcgaagcgcttaaccccgctcatggtggctaatgtgatctattgaaaattcttccattggtgtggattgcggtaaaacggtggtcatggaggcgttgccgggcggggctccctgcagaatacaattataggcgagacacgatgacgcgagacatgcagatcatcatatccaaaactagctagaaggctg

SEQ ID NO: 84259 - DNA, 348 bp, Zea Mays
cagcatcatactacactacacacgtttacgttgccaacttttagatagtgcaagagcactgcagatgatcgggtagtgcatgggtcataagactactactactacaagagagtgttgaaggaggaagatgcatcaatcctagatccgttccagttgtgtggatacgtatgcgtttacatataggaacagaacagaacagcacaaggcacctaactcccacccgctcgtgtgcttacgccgtcaaattctttgctgaaagcgtcatcatcgagtcaagattaaaaagaaaccaaccagcagctgatggcaattgtctggcggtcgcggtcgcggcacggtaaaaaagcg

SEQ ID NO: 84260 - DNA, 844 bp, Zea Mays
ccacttaatagaatcttgttgatcatccaattgcacaaatgcaattttagtcactattttattccaattaagtaacatcccccccaccccactagaggtcttcttgaacaaatgataaggggagtagtgtttggtttccctgtctaaagtttgaatattaattatgagtattaaatatagacttaagtagatttaacaaattctacgttgtctccacgagcacagggatgagctcaccgttgcagacttgcagctgccacggcatcacatcacatttgacttgaaaattgttgtgaagccggcaggacgtaagctgaattgaacgggtcaagtcttagcctcatatggggtccagtctctgacgttcatgtccatccatggaagacttgaaatcacaccttggaaaacaggtttggctaggttcacatgaacacgcagccagatagatccccgtttacattctgtacgcatggctgccaagtgccaaccgatttccaggtcaagcacaactgataagaaaatggaggccacaggcccacagctctttatctcttatttatttattcattcattcactcactcactcactcatttcgttctattgtttgtttatttatttatttatatcgaattcaatcgagtagatttctacgccttttaatctggtcttgtggtaatggtcaagaaggctttgatcgctgttagattccttttggagcaaatcttcaaacactaacccgtgtctagagttcctttttcctgcttggtcaggtaagactagactagagcccgatgaggccatgcaccaccgggagaaaacaaaacatggcaatccgtagaggag

SEQ ID NO: 84261 - DNA, 324 bp, Zea Mays
ataaaatggcctaagaaattacatctacgtaaatttcacgactcctaggccaagcactgacgcctgtcaaatgttcatcgcgcatggggtgatacgatggcaacgtagactggttgttcttcaacatttctctcggtttttttaagcagcaagtgacgggccggcctgcgggtgcgggatataggaggggggagccgaagtgggctggacgggacggagatcactcacgtgaaagtgggttgggcggggatcaatccatccactacagataatgtgggtggtggatttcgtacgcaggactcactactgcgtgtctgcatcgtg

SEQ ID NO: 84262 - DNA, 739 bp, Zea Mays
ggcagggctaaacctcaggatgaccttaatttattgccggtgtgcacagctcacggtgaactcgcctcaccacgctgaccagccatgccgccatctccaaccaccggtaagtcgctggggacttgctctattgaccacccgcctcacgtatttgtagtttcggtgtggtttgggcgccgtcgtgccgggatggtgatctctggcgagagcgccgctgggggcatgctctgcgccgctgctggctagcatttggagggagatggtgttcgtgccgttggttcaggcatgtacgggtgagattagaaggaagggaaaggctttcgacagtggatcggtgatcttatggctgggatttgaatagacgataccggttcggtcccttggatttgaccgtggatctgatatcctatggttgtaatgacgtaccggttcgatggtctgttttcggccgtcggatctagatcttgtggccgagaattgacgcgtgttatacaaccggtgtagatttataaagaagcccctggtgtaaggccttattaatccgcacgcatttgttgtgctaagatcattacaaacaagttcgggaacttgcgaatttcaccctgatattgtaggaaatagtgcccatggtactgaaagtcgtcggtttaaataaaataaaatctgaaattgtttcctagaaaaaaaataacctaaaaagtctagaaaactcatatcttattcattctcgctccaattt

SEQ ID NO: 84263 - DNA, 748 bp, Zea Mays
ctgatatctgcgcttcagcactcagaccccttcagtagttgcagtggtcatgatatctgccccttcgccaaaacttgcttgtccccaagcaaggacacggtaagaaaacgaaccagcataccatgaaaatctgcattgccctttttcaccaatctgtcattggggatttccattatcgtgacacctgcatgtgcctcggttagaagttgcagatggaatgccattgcccaaaccattgccaacactgtgtatagtacataatactgaaagtcacacaaacttcgattgaattcactgtaatgtgtgcaatacctctagtcccaagacaattgctctttgatcacaaaactgtcagcagccttcagttgtatccaagcagcccccactaaatccacaatcccgttgagcaccagtacaactaataccacattgttatacccatatcgagctgtacagggaaaataacccccaattttccacagtcgaggatgatcctggatagcaaacaagtattgctgctcttctttctcttgctcagtaactgaccactgctctctgaactactccaccatagtttgcagaccgatccaccacgctttcgctgcgcttacagaacactcccacaccattgaatcatgaaagcttcgaatcaatttagtgctgaatgttgagcttctgcccacccaaaactgaggaagtcttctagtcttgtccttctgcactgagaacacattcccatatggaatgt

SEQ ID NO: 84264 - DNA, 1058 bp, Zea Mays
gcgggactatacacaaaattactgaaaccagtcccaagaatagacaacatgtcaaagtccgagatagcacacaatttggtttcctgtagacaaacaatggaaggcttgatatcaaggaccagagatttaaccgagtccctcctggcacgatcatttagacccctcacattccaaataagaaaacagctattctccattggaaacaaatcagatcgcccccacctgagggacctcccaaccaaacaaagctgccaaagcagccacatgtgcactcgaaagcccggaatcaaataactttgcataagtgcaggcatcttcgagagagatattctccatgtcatcacaaaaacctagatgcctacagacttgtgcagccgcattggatccaagttctggagggaatttggccaccctcctacttctccgtggccgaaaatcacttggcatggtctttttcctgcttttggtccttcggtggggagggggtggtaacaagccatcagaaggcttagtaactgcggacttgaactcctccaaaggtgcctccaaaggtggaaccatttccaccacagattgcagtaaaaggtcttcctggaccacctgagcctgagataatcttcttctggaataaactttaaacacgggtggctttgttctccatctatcagcccgggaagactgacaatactcaaacctccgcaccctggcagagacaacagcaggagaaccaacagccaccaattgggagaacccgaaaccatgctgcccagcagtgactgcctcctccacattagcagaaacaccatcggtcagcaaataggagagcccagaaccatgctgcccatcagtgacagcctctaccaagtcagacataggggcccccaccaaaggattgtccaagcaagacccagccggcgagataacaacatgcgaagaccagtcctcctgacaactgacccccaaatcctcagccagatccaacgctaacactggagggtgaccaggcgcctccagctctgcaaccgaaacttccgggagagccagggcatcaactgatc

SEQ ID NO: 84265 - DNA, 783 bp, Zea Mays
cgaaactacctcataggtagtcaaggtacctgaggggcaacacaaaaacttgcccttgagccaagctgcacttgcacgtgttccagtccggtaaggcttgcctatgtaaacccagtctcaggcgcaatctgtggtccaacccagtagggaccgtccttgtaaacccggtccctggtgatttttgcgcaagatcacacatatccaataatgtagaaaggttttgctctcggtacaatccctatgcattggctctatcattatattcttaacctagatatgattctctttttaccctcgctcgaggttcttacttttgattgttatcatgaaatttgaactatgtaactagcattgtcgcttagtttgtgatccctcattatgctgaacaaggtacatactgataggagccaggtctgagggaaaagtccacattcttagggatggtccggagctgggtagccacttagcctagtcccgtacctaagcctacaccttccaccaccctataataggtgacttagtactttctgcaccaggtatctaaaagtccacacctcgttcaaatttaagtttcggatgcaaaaatctgcttgacaaaagctcagttgcataactcgatagattgagtgcaacaaagtaaggatcacgagggtacactgctaagcactattcttgaaccatgcctaggaatagctctttggtctaaaggtagtctcagacatctgggactacctctaaggaattcctatgccaggggccagtaaagagagtttcttgtcttcg

SEQ ID NO: 84266 - DNA, 712 bp, Zea Mays
gccgcgtgctggagatgcagcggctgggttactttggaagtggagtcaggcgggctccaagggctgaagatgtccctgagccggagggggaattggttgtgtttgtggctttctttgttactggtcttcgcttgccagctcatcggttcgtagttaaggtcttgcggaggtttgaggtacaaattcatcagttgacaccaaatgtcatggtggcgtttgcaaagtatgtgtgggctatttcgtcatatgatggggaaccatctgttgacgtcttcgcgaagaattattgtctgcactggcaaaagaggaagataggtggtaaaattgatcagtttgggtcctgcacctttacgctgaggactgggatgatctcggtcggagttatcgagattgttctgtacgcgaaaaataagtggggtaactggtgggagttctggttttatgtggcaccaggtgacgtcgaagggttgcccagcttgccccctgccatcttgtgctcgcactactatgtggcgttttccacagttcgaggtggcggaagaggatcaagacgaggaggaccttcactatgcagccgcctgagcagtggccatgacttggtggaagcgttcattgcttgtggggtgtggcccttggcacatgggtgggctttgggcgagattacacctcgctggatgccaaccctgagttcagtaatgtttttgcgggctta

SEQ ID NO: 84267 - DNA, 887 bp, Zea Mays
ccccaccttctgaggattctccatcttcgggatcaaaacaatgaaggacccgttgatacttctaaggcagacctcaccttgatagaatttatcacaaagatcatagaaatctggagcaatgacatgccaacacttcttgataaaatttgtattgaaaccatcgggaccaggagatttatccgaaggtaatagttttataatgctgtcaatctccaatttagtaaacggggagtctaacttgtgaagttgctcattactggttaaaagttctgagaggtcaaaatcaatgcctgagaagtcagacgatcccaatctgcacttgaaagcgtcccagaggagaccagatttatgttcaagctcgaggagggtgatcccattgtcgtcagtcaaggtagcaattgaatttttcctgtgcttaatggtggcatgggcgtggaagaagcgagagcaaatgtctccatcagtaacccacttaatagccgcacactgcttccaatagattttctaaatgttaagcaattcggccaccttttgttgcagaatttctctgaaattccattcctcaatagatagatcccgatgctcttccatgttgtcaataagctcaattagcagcttgatgtttttcaccgttttatcaatttttggcagcgatctctgccaatcttttcagaacttttcggacatacttgaacttggcagtcaggtttttagctttgtcggggatgctagggagcccattccatgtagtttgaaaaagattcatgaaaccatccaattcaagccagaagttctcaaaccgaaataacttaggtttagggattctagacttaaaggaaaccaaacagggaacatgatcggagatgtctcgcggcattgtcatagca

SEQ ID NO: 84268 - DNA, 591 bp, Zea Mays
taggacactaattcgcgtgcgccagtgctcttctccatctccggacgccgcgcgtcttgctcgaaattcgcggccaccgcccgctaacactataaattgacccctccccgacctccgtagggtagtaagctgtccagccaccacgaatcaaccgcaatcgttcgctgaggttcgcgaattcggagttcccccaaatccgatttccgccaccgtgaaacgagcctcaccgtcgccagccatactccgggtcagttcccgtcctctgctcccttgtttaagcattcacatacgtctgcgatactcgccaacccatccaattgagctaggatcccatgaatcactgggaacatgtaggttgttagttcatccgcgcgctcaccgtggccagaaacatttggttagccgttcttgaaattaacttggggaaaaccttcactcgaccctgaatttggtttcgaccaacgtagagcgccagtacttgccccactcggccggtccaggacctcgccggagtctctccgcgcgcgtcgccgtcgtggaccgcccactgcgaagaaatagaacctcaagggcctctgtgcaaagcgttag

SEQ ID NO: 84269 - DNA, 406 bp, Zea Mays
ggttttcccgggttgggcaccgtttctaaaaagtgtcaagtcatcactcgggaaaacgagatttccgacatagctcggctgctacctctaaaacgccgataacatcaagcaccactcgaccgttacctctaaaacgccgacaatatctatcataactcggttgttatctctaaaacgcatacggggtcaagcataactcagctgttacctctaaaacgccaacaacatcaagcaccactcggctgttacctctaaaacatcgacagtgtctgccataactcggttgttatctctaaaacactgacggggtcaagcataactcggctattacctctaaaacgccaacagcatcaagcaccactcggttgttacctctaaaacactgacaatgtctgtcataactcgg

SEQ ID NO: 84270 - DNA, 424 bp, Zea Mays
tttatgtacatgtccttatcagtttatataggttcaagccattggactgcgtaatacactacgttgatcgaagttttaggttacaagatggaatgctctctcagactacatatgtgtagaatcattttgtaggggatacctataccaccttatatacacgacgagattaggttttacatgttgatgcttatcgctattcgtacacatatggaaatctattctaattcgtacacgacattgcatgcatggtgatcttgtgcagacttatgggcgaggtagaactccacaccattttcatcgacagtgattgctatgacaccttggtgctctagcaagccttccgctgtccatgggcctgagttagtaggctaggccatgggcttaattgcctggcccactcaagacctttaatggcccacgaaat

SEQ ID NO: 84271 - DNA, 293 bp, Zea Mays
aagggggatagggttccccagcgacctaatagtaatagacacccctggggtagatgtcatcctagggatgaattggttaatgaagtatgaagcgaatgttagctgtgacaagaggaccgtaacattgaagtccccgtccagagaggaggtagtggctgagctaaggatgcctaaaacagcgaaaggtgattgtcaccagatttcggttgatagcaaggaggccaacccgctcgaggctatcaaggttgtgtcggactttctggatgtgttttccgaggaactaacgggcatgc

SEQ ID NO: 84272 - DNA, 352 bp, Zea Mays
agtgaggttagcggggctgtggcgggtcggtacagtggtgaggcaatgagaccaaacggtctattttctaaaaaagggacaaaagaaaacacaatccttgcatgaggcaataaattccataaatagtaatatatgcaactatgacttgtccatgttctccatctcgtttcttatctggaagtttctagtgggcctccttgtccaccattagaactatattaccttaatgggtccatcaaaactagcaaagtcttcatgctatatatgagtgtctctcaattgttttgttgacatacaatcaaccatgactaaacatataaatctaccacacaagattaaggttcaaatccac

SEQ ID NO: 84273 - DNA, 797 bp, Zea Mays
actgaacaactactaatggagcccttagcagaactaaccataattgggtgacccatcattcgcaccgaaagaccggcataggacacaaaattctccgaaacaaacgaaaactagcgccaaagtcaaaaagagcatgtgcattaaacgaatcaactgagacagtacctgtcaccacatctccatggtctctgtcttctgcagagggtagcacatatgctcctggaacacccatagaagaggaaacactcggagtgaaattaacacaagaagaaccccaacgagttgcaggctgaggcagacatggagctccaaactgaggtggtaaaggagcggtcggtgcaggagtaggtgctgccaagcactgaggaaaacctggcaaagacaagtactaaggagtccttggcatataaaactactgctgagggggtggtacagaaaattgttgctcagtggttgccatcatgttgacagtgccctgcaaagaggaagaagtcactaggtcccatttaagtttcccatttagattcctcctacacaccacatctccttgtgatcctggttgcaaatagagcaccttccactccactgacactcagcacgacgatgcgcttcaccacaacagaaacacaccaaccccaacccaggcttaggaacaacctgatacctctgagtactccctcctgaagtacccaattcagaggacttgccatgataggggttgtggcgctggtgttgaaactttcccttcttgtgagctggacccccagtgtagcccctcctcatatcctggccacgag

SEQ ID NO: 84274 - DNA, 1073 bp, Zea Mays
cggtgctgaaatctagcttggtgcccatagcttgctgaaggctcatctaaaattttgaggtgaattgtgttcccctttgacactattcttcgtggaatgcaatgaagtctgactatttctttgagatatatccgggcaagggtggctccttcgaaggtagtttttactggaatgaagtgagctaccttggtaagatgggcgattataacccagatagaatcgttccctttttgggtcaggggcagtccgattacgaaatccatgcctatttcttcccattttcatttgggcactgggaggggttgcagtaggcctgcaggcctctgatgttctgccttagttcgttgacaagtatcacaccaggccacatactgagctatgtcctttttcattcctctccaccaatatctggtcttgaggtctaggtacatcttggtagaccctgggtggatagaataggctgagttgtgggcctcatctagcaggatttctcgtgcctctcccttcggtacacacagacggtttctgaactgaagggccaccctttcatctgtcctgagatctggaagttgttccttgctagccttttctgcaagtcctgccatctcaatgtccaaacgctgagctttgcgaatgagatcttccagcatcggtttaacttctatgttgccattttctcctaaacaagcatttagttgagctgattctctcttccagtcttccaagaagtttgttgctttctccccaaaaggtttccggccgagggcgtctgctactacgttagcctttccagggtggtagtggatctcgatgtcataatccttaatcagctctagccatcttcgctgatgaaggttgagatctggttgggtaaagatgtacttcaggctcttgtgatctgtgaatatgtgacatttgttcccaatcaggtagtgtctccatatcttaagagcatgcactatggctgctaattccaaatcatgggttggataattctcctcatgaggcttgagtaggcgagatgcataggcaatgactttctcattctgcataagtacgcatcccaaaccttc

SEQ ID NO: 84275 - DNA, 1165 bp, Zea Mays
aggagcaccggagtaagaggactagttcaaagcgacatcattgttgcttattagggcactatcatgcctacaagaggatgaaataaaagacgagcgtcctatagagaaggaacaccagatgggagagggaacgaaggagtagcaccatatggagcatcatatggaggaggagcaccataagattcatatgaaggacaaccataatccatacggatatggagtagggtatggataagtgaatggaggaggaggagcgtcgataataggagggttgtcggtggtaggatttttattaggaggaggaggaacatccatggaagttagtagggatttgaaggagtatatgggtgtcgtggttccggagaccaggggcagtaagatttgtactcggagtgggaggctattgcagactcgctctgaatggtgaatcacggggactcgaacgatgaactagagacacggggtttactggttcagttcggtgccctagtccagtgtagtgtttgatcgtagtaatgcaataataagtgttacaactggtgtgcttgtgtgttgagaataaagagggcctgcccttttatagctcaagggccgaaccttatagtggtgattggttttctaccagagagagagagagagagagagatcaactactcacggtcatcgtgtagtccctccataggatcatgtgtagctataccctcaatatgtgtattgtcttaccccgctcgtcccacggtttcctatagctagtccattgtcgatgtctccataacagtgtgtggtgggtcccatgggttagccccacggtgttctcgtgcgtggcgtggctctgcttctcatcacgagcctacgtcactcgccggtgtgcgtaagcatacacatgttatggcatatctctcgcgtctcttcgtgtatgcgggtcactgttgatactccgatgtcgatgtccccaaaatcggggttgactggtcccacacctcgacgggtgcttgcttaagatagtgtgtgatgatgtgtcgttagcgcttgatggggaccttttgccattgtacccgaggcccagatgtggcttggtgatgacacgtcttgtcctgctgacgtggggtaacatcattggattggcccttcctctgcgccggcacgactgacgcgcgaattagtt

SEQ ID NO: 84276 - DNA, 491 bp, Zea Mays
gttgagctaacctaaggacagtcccttaacaagttaacattagtaaaataaactggatcctactcctataaatcttgttctcctctcatgcacttaaacctaaaattagtgcattagaccaactccaccgtgaacataagagctaacccaaccaatagtgtcatgatggattgcttaatctgtctattcccaccgaacatcaaatgaactttagacctacatcatatagtctatcacatccatacctatcttaaccatattctccattcacgatgatatactctcaccccgaatcaatgagaccaggatcgaagaaggaaaaggtcaaccttgtcaaggaaggatagagaagtcaaacttgatcttcaaatgcattaccgctcaacacaaaattcttcctcaccataaactttcttacccctagctattcttgccctaacctatccatcttttatatcctacatgataagtagctggatacccatgctctc

SEQ ID NO: 84277 - DNA, 419 bp, Zea Mays
gtatgatgaagctaggagaaatcagaaatcttcattaactaatattatcttggaaatcaaaaggttgtgttcgccctttatcttcatatcatacaagcctcttatgcagtctgtctcactaactcttttaccctctgactagacgatgaaccctaatggaaatgaagtaaatgatgccaacgacaacattcctaccttaacaactatgaacgagaaaaatgagtcacagagatattcgatgaatggaatgaagaacaacaaaaataatagaagaatgtttggatacatgattagtccacctcaaccacaagcaaaagccacgaaacacatggatacccaaacagaagaatcaagtcaggctcagctatatgagatacagacacccaatcaaccctcacccccagttggtcaagcaaagt

SEQ ID NO: 84278 - DNA, 1039 bp, Zea Mays
aatttgaagaaaaatgagcccaaagtcgagctgtcagactgccctaggtctgaattcagactaacagtgtgattgggcaatctttggactggaattcaaccatgatctagtgagtgtttggctatagttgctatagcaagattgtagctggatcatcaggcaacaactttgttactggtggattagtaagttgccacatggaaaattgagatccaggccctgcaaattaggctgtcaggcgcactgaatagagaccccattgtacagtgactgaacaagatcctaaattcatcccccttcgccgccggtgatctgccattgcaattcgcgctcgcctgaaagattcgtgccacgagaagtatggataacatcaggtgtggtgagaatatccagcgcggggtgaatctggtcgctagccggaccagtcgccgtgtcttgccgtggttagtcacgctggcatcacgggagttcgccgttatccggccaggctacgtgcctcaacgttttaccacgtcgcagtgagtcaacgtaagacactctctgctactggttcgtcgtcggtgaggtcgccacggttgatgccaccgagctctcgtgacagtgctctcttcactcttcgaccgccaccgcgccaacccaaattcatgagccaccgccccaagtcctataaatagagcacaccgtcaggttcgtagggtagtcacgcatctagccaccaagccatgccttcaattgttcaccagagctcaccaattccagatttcccccaaacctgctttccgccaccgtgaaagaggtctcgccgtggccagctcatcttaggtccgctcataccctttgccctctcgttttagtgttcttgtgtgcccctgatactcgtcgaccaactcgattgagctaagctaccttagatcgccgggaacgcatcagaatgtccgttgatcatacggtcaccgtggacagagtgagttagaggtccaatagagaaattagttgaggggaaactcttgttagggtttgaatttggtctcagccaaag

SEQ ID NO: 84279 - DNA, 622 bp, Zea Mays
cttggcagtgagatgagccacgggataaaacacatgtcttgtcacttatattttgaattgcattacttgtgttccattcgatttacatggtttgcatgtttatgagtgtagatacttagtggacttgtcactacacatcaccaagcccatctttaagtattacttgcaggtgtagctattgttaggcaatctatgttgagcggtagtatcgagaaaggcatgacaatactagggagtggctgtcgcatgctaagtggtagtgtcgtgctggtttctatcaacaagtttgagttttattttaaatagtcctaatcaccctgctcgaggagatataaaggtcctttcatttttgggaggaggtggagcatctatggaaggttggtagggatatgaaggaggaggatatggatatgaaaatatagattatggattcagggaatgggaactagcagaaacatcctttaaacaatggtgtacgagagaaagatcgtcgaataagacctaccctacactgacaggggtgttaatgttgtggaggttggtcgttgaggaagtcaatgaaggttttaaagtttgaattccacctgatatctatattggaatataatgtgggatgctaaaa

SEQ ID NO: 84280 - DNA, 778 bp, Zea Mays
cgccggctcaattttggttcgaacggtgtgttacgacaacattagtaaaggtgtatctctccaccaacccggtctagcatcagccgatgtcttcatcaaagacctttcgaaaactatgttcatgcgaattttggtctagtctcaaatgcccgtcttactatcgtatcgactgtgggagagcgttagatatgttgtgcacggaatgcatgatccctccgtacctgttatcgatagcatatcaaccgggccgtgtatggtttatatatttggtttgtaggcgaagttaggtatagctatgataaggtgaggaggatattcaatccgttttctgattttacggttgtaggtccctatgtgtgtgtgtatatatatattttaacaaatggaaatattcattgtgcgagaaacattatctttacgctttcagaaatctcgtttgaaggttgtgcttttattctcagtattggctacagcttttcttataattatcatgtgtgtggaggccaggccgctggaggcactcactcgattgtctttattgaaagaaaaaaaaacaactgtcggctagctacaacaaatagtccttgtttagcgcacgaacgaaaatgacaaaactgcagatccattcgccaagaatttatatcctcccttgcgtgctttagtccctttatttaatttgtgcccgagacaccgaatagtgcttactaaaagcccgagcacttgaaataggtgtgtttattatatatgcgactgcttgcagattatgtcacctatcaag

SEQ ID NO: 84281 - DNA, 425 bp, Zea Mays
cagctatattgacattgtcagcatcaagcataggctttaggatttggaggagaatgttactcgtaatcttgtcaccctattagatagtttacaattcatttgctaggtgaataagagctggattgtttgttaggctaagcaagttagcaggacctgatgcttgtagatttatttagggcgcgtcccagagtttagggatgtgcataatgtgttcgtggctataggacggcatggtcgtcatgctgttcatggccacacatgtaggggcaactagtgtcatgtttacctctttgtttcctttactagtttagctaatacataaatataagcttaaaagtcatctagagggggcgaataggcgaaacttaaaattttaactcaaaatacataacttgatcaaatatatattcttagaacaagatgag

SEQ ID NO: 84282 - DNA, 421 bp, Zea Mays
cgcagtagatcgcattatgcatatccggtgatcgccggtgagcttgccacagtaattgccacaaatcgcttgcgccagtgcacctccttctctccgaccgccaccgcacaagctcaaattcattggccaccgctcaagggccctataaattgagcacaccctcggcttcgttaggtattcaagcatccaatccacccgcccgtgcctccaattagtcaccagagcccccgaatcgctcagttcacccaaatcagtttttccaccaccgtgaacaagctctcaccatggtcagtgcccttcaggtccgatcttgccctctgctctcttgtttcagcactcttacatgccactgatgctccttgacccattcaattaagctaggccacgctagatcgtcgggaacaccggtgttcatccgttg

SEQ ID NO: 84283 - DNA, 937 bp, Zea Mays
cgacggtgaacagcacaggccgaactccgacgagcatatgccggccagataccgcaacggctggggctccagtgcgacagacacccgattggacctttcccgcacttttcccctcaatcaattttaccaacgaggctttgaatcaaccggttcacggcgacaatgcggatgatcggatggataaacgcgtttcgaacaaccgacgacatggatgaccaaattgaagcttggggaagcttcacgggttcaccagaggttatgtacacactagaatttggactgggcaagagtagaaaagtgggtcgacagagagggtgtcgcggcggcgttctacggagcagaggagtgttccggtgatgggactctggcaaacttcaattggtcggctccgagagcaataggaagctataaacaagctagaacaggaagcaatcggggagttactgacctgaggagtgctggccacggaggagttcttcacgacagcgcgaagaacagggcagaatggttttgtggactgtgtgagttcttctggtgaaattgagtcgattgctcaagtgcttgtatgcgctatgtggtgaagaagtaggattcgagctcaatttataggccgatggctggagttggatgagaatcgcggagctgtaaccgcgctggcgagctcacccgcgcgggcagagccacgacgattatccggtgaccgccgattaaccgggcaatgccaccgcaacattttaacaccacgtcgcggatgatctttatcgtggctgcagacccatccccaaccgctgtggcattcttatcgccagtgagatctttctgaagttccatgaacagtgcgccagtttcagttaaaattcgcctgacagcccatctttggatcatattatctccaaattcctcatggtaccaagacttaatacatgtagcaaagttg

SEQ ID NO: 84284 - DNA, 517 bp, Zea Mays
atcagcagcagccgcagcctcagactctctccagcaacgaactttaaaaacaacatgtactctaaatttagaggatagtgtgctcctttatctgtccaacaaggaaccctaataaaagatactctaaaatttagagtctctgcttcagccgctacatgtagagaaacactgttcgtcctctatcccgcaatcaaagcgctacgacctgacacttgtgcacgtgacgaccactgttgattgacttacccacgttgcatgcatgcatattgtgttaaaaaaatggtgtccgatgctggattgttgcataatgcagttgcgaatagcttagtcaaactattttaattttggtagagactaacgatttttttgtttgcgtatacaataaggaaaatatataatacaaatttgtgatacattgttttgctatatatgaatgatgagtaatttctccataaaatgaaaatgtattgtaataagtatttcaatttcgtgatgtaaaaaaaaatctttttataaa

SEQ ID NO: 84285 - DNA, 636 bp, Zea Mays
atataaagaagacaactaaggtagattataaatatgtgcctaaaaatatgtgtcgggcagacctctacttacttttgagaaactaaggaagctcccggctggtattaaaaggttgcatgactggtacatgcgggcatcttcaattggcatcgacaccatcagtgtacatgtacaaggaaatgttttttatggtttaagcgataacacgtttattgcattcgaggacatgtggttaatgatgaaccttgaaagactcgacatgcaactcataacggtgtttgcattataagtgtcactcatacttccacatatatgtgtcatttagtgagttgtataaattttcaatagttgacatgcatgtgtgtcttgcagaatgcaacatgatcagcaatagatcctttatggtaccattcctgatgctaatgctggtaaacggatcgggtaatacaacccaataaagatatccgagcaaaatcacactttcataattggaaaagacaatgaagaattaaaaggaaagatggacgaagaagttgagaagcatatacaagatatgtagaaagattttgaagctcgatacgccacctacataggacacgcaatgcttcaatttcaagacagggaagccatagtggc

SEQ ID NO: 84286 - DNA, 557 bp, Zea Mays
ttacaaatagtagtaacgtatatatatttatgtagcttggtggagctggtggttaggaaagcatgggtgtaaatatgtatgtgcacttgattatgtaggatataagagatggataggttaggtcaaaaatagccaggggtaagaaggtttatggtgaggaagaatttcgtgttgggtggtaatgcatatgaagattgagtttgacttctctccttccttgatgaggttgatcttgtccttttcgggtcttagtctcattgattcaaggttgcgttggcctaatgcactaatttagggttaagtgcatgaggggagaaaggttcataggagtaggatccagtttatttcactagtgttaaattgttaagtgattgtccttaggttagctcaacttaaggttagactttgttaggttagattgttatgactagatagactagacaagatctcattaattagatcatggatgttactttagggtgagatgagtagagtggttaggataaggtgaatccttccaaataagatgaatctattaagataagagagagtctttt

SEQ ID NO: 84287 - DNA, 574 bp, Zea Mays
taaagctggattataggttaataactttgatacatgaagattagtaagttgtcacatggaaaatggagaacaagactcctcaaatcgcgctgtcagaacgactgaacatgattgccatggtacagtcatcataaagatcttcggtgccgtgcttctcaatgctggtgatccgccaccacaattcacgctcgcctaggagattcgtgccacgggaagagtagataacgtcgggacaaggtgaaaatatccagtgcggggtgaatccgatcgctggccggaccggccgtcgtgtcccaccgtggttaatcgtgctggcatcaccagagtttgccgttatccggccaggctacgtgccttaaagccttaccacgtcgtaatagaccgctttcggtagcttgttcatcgtctaagacactcccccggtgaaagccacgatagcactacgccagtgacttctcctttctccggccaatagcacaacttcttaaaattagccgccaccgctctaggacgctataaattgatggtactgctagctctgttaggttatcacgaagccagagcacccaccctt

SEQ ID NO: 84288 - DNA, 921 bp, Zea Mays
tttaggatccaaaagggctcatatccacatgtgggtgagattattccacgatcttgagtggtcgtggttgctagagacgttagtttggggatggtaggagggttgttggtaataatctgcgatttgctcaacataccatgtcgcggatggtccgacatgatatcctgatggtccagtgatgtggttggatggtccgcgcgtatagcctgactttccgagcatctttgccatccctagtgtgtttggtggctcattgcagaaataaagctgaccaccgctaggccggaccatctggactcagacccgaaccgtccggtcgtatgcagggcgttggttcctcccatataaatgggggaggatgtagtcgtctgctataggaaatgatcggcatcccataaagtggttaggattgggcatgcccatttgcagcagatggatcttgtgggttatctttagtttggacatcatgtgatggaaaactagcaatgacagatttatcgaatgagcgtactactctactataatcttcttgcacaccccctagtatttgttgcatccgatcctattgttcatatacgtaagatcgaagtgcttggatgtcgtctgtgttacttacagtggggttgctgtagtaggtcagagtgacgtcaggttagtctcatgtatacggacgacaatatggtccctgtccaccatgaaatgggccaagtatgtcgtcctggcctccttgatcggctgctccgtgtactcctcgaattcctgctattcatgagccgacattgcctccatagtcagctcaatgatattgctaggggaaatatcggagtagtccttgggaccggccattagggaccgattcaatggatccaactgccttgtcctcaacagagttgccaaatggtgtgttggctccgattcgaa

SEQ ID NO: 84289 - DNA, 689 bp, Zea Mays
tacagaggtagtagaggagatagtgatattccttctccagccctgtctgctcttgttagccttcaggatttatctataacagattttgatcagacccttgaggatgccattcctgaggatatgctatcagagccaactgatggtgatatgatggatgtttgttctgacattccagatgtgggattagaggtatcctaggcggcatctcgtgcgtcgtcaaccttggagggcggtcttcaatgtcaagaggttggtcaagattgctcgactcccatggaggtgactgaagatccttcagccttagatgtggctattgcagaaaatccagtcctcaagggtgatgttggcggttactcagcccccgagggtgttgccggtagtgatccggctcaggtgggtaatgcaagctataacccaaccctcgagggtgttgccggtagctatccagctccgatgggtgctgcgagttgcgacccagcccctgagggtgtccaagcgagttctccttcccatacctccatggatgtccatgccgggtcgtctccacctcattctaatggactgatactgatgcatacttctttagcttcaagtgagggagtcgccttagaggttggcgcaccggatgacaagattttgatatctgctggaggagctgaatcaacccctgacggtgcttttcagattgt

SEQ ID NO: 84290 - DNA, 702 bp, Zea Mays
ggcaaatccagaagttttccccagacccaaatttaccccgcgcggatggcaggttaatttggaataaaccgaggggctcataagtaagaatgacatgcaaaggggtatgggacgattacagtcgtgcgattggtaatcggtggtccagattatatctcttttatccgaaccggtatgcagcccaggccgttagatcttgattcaacgcttagaattttatacggttccagactatccttgcccgcccactagcagatctgcaatcgcgatctatcccagccgaaccggtatgaggcttctaatcgcagccatccatcatagatccgatggttgcaagcttatcccctaccccaggtggtctgaccacggcgacgcgttggagctacggcggtgcgcccgccagagttggtcaaaactgtgacagatggccacaccaccccacctgactagtgcaaaacaacgtggaagcgatcgcgagacagaaggtgggcttacctctaagtatcgtggcgttcagagtcctgcccacggtgtggcgcggaacaccggcccctccccaagtccgacgagaaattggatcgagatcggtggtctttcccgcccgccaacgtcacgatgagcacgcacgcaccccggcggccatcctcgagcacaccgcggacttcaaacggcggtggaggccaaggacagctgcggcggagg

SEQ ID NO: 84291 - DNA, 677 bp, Zea Mays
cacaaggcaagcaaaccatagaggaataaggtagaagcaggcaaacatgtcctatacaaggtcacattgtacgcaaaagcacgaagttttgccaacccagactggattcagaagcagacaaacaagtacgcgatcttctgaggaccaaacaaactatatacatgagacactatttattatacaatggagcatatatgcctaggttgataacactatgtgaagcataagataggtcaagctggaaaaaggacattagacttgattcttaagaacataaaatagcttctctacaaaggaactatgtttcttttgaggagaaccaacagagtctaaaactgaacacttgggtcacacaaaacattgttggtaaacatgtttcaaaacatgtcactaccaaaaacatgctgatgtaaaaatatattgcaggcgaatgggtttgttcatgttcgatattgaacaacatgactctgttttaaaaaaaatgttgtaagaaaatgcagtgtaatggaaaaatagtgttgtggcatgttgccaatgtgctagctcaacctagcttaagtcgggattgtagtagcgttatccctccctaaccagccaatgcgccagcttaagcactagattggtatgttgtgttggagatttttttctctagaagcttcatgtgcatgtaatcttca

SEQ ID NO: 84292 - DNA, 836 bp, Zea Mays
cggcgacggaggtctggatgtccctcctccagccaggggagcaagagtcaccttgctcccctggttgggagaaacgattgtcggcgtcaggtgggtgtctaggcaggaggagcaccattttgtagttgaagccaagggacatgaactcaagactcctgaaccagatcgtcgtgccgagccgcaaagggtgcttaggattgtccatctggagtcttggtaggaatgtggtgtcaacacgcagcaagcccttacctggcacgccaactgtccgtgttttgacccaagggtcctaaccaactagtgatttagtgtcatgtgccctagtccagatgggtgatgcaagaagacacaagttttatcctagtccgggcaatgaaaggccctacttccggtagagggggatgagacttatattatcttgcacctaagtgcttgtagtagggggtacaagctagtctctctgaagatgatcgaggcaagtgccaataccggttgtggaggcaaaaacctgtgaagtgttcccctgccccttggaatccctgaactccttcttttatatcctcaaggaggggtcccaggagcgccaaggtttgttgtaaatgggagaggaggcgggtctgaacccccttgtagcagcatggccactagaatggcctttgtacttgcggttgacttggatcagggggagaacatttggcccctatatctcgcatcttgacctatcctatcttgtggatgtgttgttagagtcgtagttgttggaatagtgataagtatgggaaaagtacaaggtaattctccccatatagcataaagcagacttgtcaccaatcctg

SEQ ID NO: 84293 - DNA, 536 bp, Zea Mays
gtttggttatctattctgtgattcggatagcaggcgaattttgaactgttcggatcacgcgcgtaagtgaatacgtaaatcagaagacttctgattttatgtaaaatttggagccccgcgctatccgaaaggaacagtgcgcacaacttctcgcctacatgcgcgatgcgtgacgtcgcttccggaatggatcgcactctcgatgccgcatcgatatcgcgcatttatttctcgatatatcgagttatgtatccgtttaaaagttataaattaagagaagacgaatttcggaagcacttgtatttataatttggactgtgcgggtaactgtgaaattatgcgcgaaagagataatggagtttggttccccgcaggttataccgggtagagcagtaaagtactcgggtcaataacgaatgaagtttgtctgatttcgatcgactcaaacacgacctaaatatcacagctgatgctgcttgattcggtctgtttgtttttgaccctgatccgaatatttggttagcaaatagatttat

SEQ ID NO: 84294 - DNA, 962 bp, Zea Mays
gctgtctgcaatcgtcatcgcgcccgcgcacagacgcatcgacgctatccacccttcactttggaacaccgactcacctccttttccctcttactgtggctaatggagccccactcgaaggcccctcacctgcgtcagccttcatcgtagacgcaatttctagcacaacaaagaaatccgagtcctctttagaagactcgtcgtccatctttgcgaagaaatccaaaccttcttcgctctcggacgtttctgggtcaaagaaaaggtccctgtcactacaaaatgatgggctccagtaggacagtggcgtaacacactcagcaacctcaacaataccctttcccttgttcacgaaaccaaaatttccctacgtacgtaggcccaatcatcagaacccacatatgtaccaagttagtgtcagtgcacacctcaacaaaacccctaaaaaagtattcacccctgttacacctacacatcacttcgaccatcgttggcagaatggtgcgaagtctccacaacgctcgactcgccagcaatagcccctacccgtgaagactgctcctccatgcccgtttcaacactagcattgtccaacgtagccaatgagccctccaagctttccaagtcttcaatctcctcatccctctgtgcctgatacaaaaaaaacattattacctgctccatcgcccgaccagccctctccgtaaccgcagaacgaccatgaggaccacacatctgatcaattagtgcgctagcaaattgcttcgaaggcacgtcctcaacatggaaaacctcccgatcgaagtcctggttgctccgtttgaagacctcaaaatgacagcaaccttcgcgggactaggcgttggcggcactttcaccggtgacaagggaggcataagacattagccctgttgctatcgccagaagactcaccaggtgacaaccaaggaagcaggtcctag

SEQ ID NO: 84295 - DNA, 654 bp, Zea Mays
gggaaacagaatagaagcagccaagagagattacctcatatgcaatcttcttcgagtcgagctgtgcattcagagatagagttcaaggagcgagcactgtccaagaaagcagaagtttggcttaagttggtctgcctctaggaatacttctcttcaatatcagagcaccgtcgagccaaatctgataaagcatctgaagaaaaacgcaagacttagaatgagacgagcaatgaaagaaaataaggaaactatgagctcactaaccaatgtttgacgccctcagatcatctatttgtttttgaagcagtagagggttccactgcatcaaagacgaaacttggtcggggacaggagcatcgcaggatctcagttgggcagatacaccaccaagaacatcctatgattatgaaaagataagcaaaaagctagtttgccagtgggaatagtaaaaaagtgaaagttgactcacctgaagatctcactttccttgctgctgccgccgtcgcccttgtcgctgctgccgtcgcccctattgctgctgccgtcgcccctgtcgccatcgccgtcgccactaccgtcgtcgcccccgctgtcaccgtcgccactgctgccttcaccgtcacccttgtcgtgatcgaccttgctgccgtcgtc

SEQ ID NO: 84296 - DNA, 461 bp, Zea Mays
agtagttttggtatggttggaccaacaaatcattgtttagagaaaggtggagaaatagctataagtagggatcaatacaattaattaaatttcatgtaccagactgatagaggatgagatgagtaacatggctagagatagcttaaccaattaaacagactatattttaacttcatgaaattttattattgggtggttggtgttttttgttggcaacatattgggatgggtatcgccacgggagagattttctgcatcagtagatccggcagcactaaagaaactttttaattaagttttagttcatacaagtactttacatccatttagtacttcaaaggtatatctatctgatcaggaccggagtcgagctgaagggttggtcgaaagctgggagcctggaatcccaagtagaagggaaccggatatcagttatgtctacttgatcatcgatggtgctc

SEQ ID NO: 84297 - DNA, 784 bp, Zea Mays
ctttttctgcgcgcttttactgcgcagtctgaccagaaaccggttgatccggttttctgtctgttgaccggccgacgcctcccctatttctctccccttcctctcttctcttcctctcagttcctttttccagccgatgccgcctactctttttcctctctctccttcacactttctccactccaaaacccacttgtgccatccaatctttggaagttttattggagatcagttcatctcggcgttctccatcatctccctcgatcttgttgggatttcttgattcaaactccagatcgaggtattgtcctatttcattctttttactcgatcttacccgttcttgattatctagtatatcattcgttgggtacattttagtttaagtgcttgcaacacttaaattatcttcatttgtcacgaacattgttagagtttagcggtttgatattgttcgttgtagttgaaccgctcgcatgaacggttgaagtgcatgctcaatatcatacgcgtctctactcaaacgtgtttgttaagatccttgctcatcataggttctatcttctctttttaaggatggtgcgtaggaggaatccttctgtggttgaatccgactcctctgacgaccaagagattcatggagatactcccccacgcgccagatccaagcgtgggcgaggaagtggcaacgtcatgcaaggtggtgaggcctccgggtctcaaggagctcgcggtcggacagcctggaatccctccggtcggtcccgacccacgacaaatccgc

SEQ ID NO: 84298 - DNA, 683 bp, Zea Mays
aggaatatcaaccgggacaatctgaagagcatcatcagggattgattcagctccactagcagatatcataattccggcttccagtgcgccgacctctaaggcgactccctcacttgaagctaaagaaacatgcgctgctatcactccaccagaatgtggtggagacgacccgacgtggacatccatggaggtatgagaaggggaactcgctcggacaccctcgggggctgggtcgcagctcgtgctgcccatcggagccagatcaccatcggcaacaccctcgggggctgggttatagcttgcgctacccacacgagccggatcactaccgacaacacctttgggggctgggtaactgccagcaccgcccttgatgactgagttctctacaacagccacctctaaggctgaaggattctcagtcacctccatgggaatcgagcaatcttgaccaacctcttggcaccgaagatcgtcctccaaggtcaacgatgcgcgagatgctgcctgggatacctctaatcccacatctggagtgttagagcagatgtccatcatatcaccatcaattggctctgacagcatacccttaggaacaacattctcaagagcccgatcaaaatctgttatggataattcttgcaggctaacaagagcacacagagctagagaaggaatattgc

SEQ ID NO: 84299 - DNA, 2321 bp, Zea Mays
ttaaaatcaccacaaatgatccacgacccctcacacacatccctgacctgacataattcctaaaggaaagaaggcttgagactgtcctgatggggcccatacacacttgtgaaccaccaagaagcaccggaatcctcttgaaactgaaccgaaacagaataattcttgaaagcccactcgggggcaattccacctctacccgaaaagcaagcccagaatccagctggccagcaggaaccaaatcaacacatgaagaggcaatatcaggagcagtaattgccggggtggaaccctaggaagctggagacccatgcaccaccaactcttcaaccgaagccatcgggagagaagtggcatcaactggttcccagctcacatcagggccaaccatcatcgaccccgaggagacactttgaaggtgggggacaagtgcctccaactccacttccgggacagacgggggagaagagacatccactggtccaccggacgttgacgtcgaatgaatgcgcgggtccaaccgcgccgagacccatgtagatgccatcggggggtcctgtcgccgtgctcgccgtctacgatggtcttgatcgtgatcgttgtcaccgagctctagcggagaaggggagggtgatcacccccggaaacgccactcgagctgagaatcttcactgagacatggaacaccaatgtacgtgggagccaggccccatcttcatcactgaccatcgactcaacaacatgaacatccaaaatcttaggtagagattctagagaaaagcaccaaatcctcaagttgagagctgacatgtcttcgtcctccaaggaacccgggagcataccatcaaccaggcaatgagcaccgagcagagcacgtgatgtctcaatcccccagagatgagccgggatttcccagagtttgacatcaaggagcagaggcaaggcacctccaccagaagcaaacacatgtcgagaccaccgcttcacatgcaagcggagggggggggggcgaagagcgattgtccatgattgacgacacaattagccaagtccactgaagggaaaaagatgaggaatgagtttggcgcttgacaacagagttggagcgcatccgcttgaaggtcaaatctcgatgcgagcgcatccctgatctccgtggcgcaactagaatcctcccgatcgacgatggtaacgatcagcgcacgctagagctcctcctcagcccgatcaatctttccagaacgttcgatgacacacacgtgcccgatcaatctttccagaacgttcgatgacacacacgtgacgagaagagtccactgcactggaaggtgggtcctctcggggagccctggtgaccccctgacggtggcgccatgaccgcccaacccgccatgaccccctgatgacgtacgacgaccgattctccccctgcactagggaaacggcaggggaggagccaaccccgccttcttcacaccatcgctcggacttcgaccgtccaccaggcagagagacaagaggagagcctcccgacgccgaggaatggaagggggtggacgccgggcttggagtaagcgccggcgtgaggccgagggaggtggagggagctaaggcgttgggaggaggggggatgctaagaggcaggatcagaagtgtcatactgtaacaatcacaagtgctaagtgtaaggtctttatatggcttgctataaacaataaatgttggacaacacacagagtacaaaagagaggacttgattatcctgaaagttgtgttctttgttaccaagaagaagaaactgtgcagcacatcctaacaaattgcatttttgcaaaccttagctccaattggtctttctattgtgatccctgggtcaggcgcccttttcttccgatgttgtcgccgtccctgggcaatcttcggtccagcagcgaccctctggtgcttctctgtcacctgtgcacacggcccagcaggactggacccctacaccacccaggtccactgctcctgctatgccgtttgctaaccacctcactgctggacagtctcacctccgcggttcgacgctccatctactcccggcggactgcaccagttccccctgtggatgcatctgcgtcatctcctccagctcgcctcccccatggggcggtagtggtctccccggtgctcaatcatgatcgtgtgaccacccaagccaagttgggcttccgacagcccgccttgttccatgcagcgacactgtcgtcggtaccatggacctatggcgctgttctcgctgatcctaattggcggaaggctatggaggaagagttctc

SEQ ID NO: 84300 - DNA, 789 bp, Zea Mays
ggaagtcatgcagatcaacagagagtggatggtaaccatgtagtatgggggagatgagttcatctttagcaccttgaggttcgttgttgacgtgctcgataatctcgagcttatcccagatttgtcaccaatgtcagcaccatatcattaagaattggaggttcaatcaccatcatgatgactctgattctataagatctcatgacgtcgactcagactcaactccatccttgactcaaactttgacccgagtttgacttggactactactctatcccaagatttgacttggacttatacttgagcacaaactcggattcatatgatctaaaagaccacttcatggctgacgttgttgatggactctaggatggtcacctttctgaccatgaagaagacaatgctgacgtagtagcagggataataggaatcaagacaatccatgagagtgcgacagagctatcaatgaccagattcatatggttaactttcaaggtcaacaagtctacgaaacaccaactaagaatattgtgacgacaaagctattgttcgaccgactcagaccacactacccagagagcacatgcaagctaatgaagacttaaattggattaactacatgctgacttatgcaactatgtgtgttgatgcaccagctgccataatgcctagttatggcaaacccgatcccttagctgaaccaacactacacgatcaagagtacttggaggagagccaaagtcttcaccaaacctagtcacgagatcctagtatgaacaagcaacatga

SEQ ID NO: 84301 - DNA, 516 bp, Zea Mays
cccgcatgcggcgcaaaagagggcaggagaaggggaggaacgccgactcaatcgacatcgagggaatcaaggtcgggaggagctagcaaaggggaaacatcctcatcaaatgcaacatgacgagagatgatgatgcgatgggtgagaagatctaggcaccggtaccccttgtgatcattgtacccgatcgtggtgaaagtttgaggagcgtggcagaggtgttgggatagcaggcacactcgaaggtgctcataggaggggatggtgtcgaagagggcgaagaacggagtgggatggggaccgccttggagggaagacgattgaggaggtaggtggctgtgttcagcgcctcaacccagtaccgggcaggaagaaaagcttagaaaaggaggcaacataacatattggtggtgttgcgcatcatgcgcttagctcgaccattctgagagcatctccaagagagtcctaaaattgggtcctaaaatcgaaataggacatgatttaagtgatttaggc

SEQ ID NO: 84302 - DNA, 473 bp, Zea Mays
ttcctatcccacttcatggtggatcgacaccagaagttcatcaagcaaggagaaatccaactcgactcccttaggcctctgccccatgatagcaatgtaagtaattccagtgttaatcaatctattatgcatcttatggatttgtaatgggataaagtagaatagcaaatagggtgatagaagaaactatcataaaaactcacacatgcgtttgagaaatttgttgttcctagttttccattccatgatgtcacagtagaggcaacctcgctagatgcatcgacaacaaatggacttatactgtaccaaccattgtatggtatatagatgaattcatacccaggtcaacccctgccctcacaacacttagttgacacagcagcacctcttgtagtggtcggactgttcaagtataatcttggaccgtccgggcctattctagaccgaccggtaactcaacatagatcatccgg

SEQ ID NO: 84303 - DNA, 776 bp, Zea Mays
cataaatccaatagaggtggtctgcgccacggcagacaagaaggagattagggcggcgacgttgcctggagtggatatgagatggcggcgtccgggagctcacgggcgaggaggccggtgatggcaagggagctggcatggtggccctaggtagggaagggaaagatcatgacgtacgtgtttggttctcgtggtcgccatgaacatgaatgagatgaggtgaggccaccgatcaaactaaggtagctattattccaggccagcgaggaagtttctcaccaatttatccatggcgagggacgtagataatggtgtgccatgctgcaaaagcaaaaacacggatagattacaaacgaagcagcctcaactcttccgtcttcctgcattcacgattgatcaattatatctcgcccactatttagcctgacaactgctatgtttttttttctttaggcttcaccatggatgactgctagcagtggtggatctagcattggtcgcgcgtactaggtactattatgatcttttttttcttctattattctttttttcttcatcatcttcttccttcctctccttttcttctcttctccctttctctcccttcttccatcctcctcttcctccctcccccttcctcctcctcctctttcttcatctctcttcctcctctactatcttctcccttcctcctatgtgcaagcaggcgcaggggctggagctcctagccccctctagatctgccaacgactgagggatagaagtggtaatccgta

SEQ ID NO: 84304 - DNA, 574 bp, Zea Mays
caggtttgatcccatacttcctcggtttctccctgttgttcttgctctgtctcgaatctcgatccataacctcagccctcgccgatctctcctgtccgtttggctgggatctcggtcggcgcccccccccccctgatatgctttccatgctgtcatgacggaccggataagcctgttagcactagcaactggcaagctccaattttgactttcttgcggatcagtagttcccatcaattgttgagttaacttcagttcaattgccaattgccatttatgtcagcttctcctaattcactgacccatgcgtgcttcttaaatttgaaccggaccaagcgtccgtatgatgatacttctccacacatgaacatgtatttccttcctgctagaatttatataaaagaaagaatttataatgcgtccctccttagccttattactagtaccatcaacacctccttagggttcaggcatgagcacgcattgcaggaaggatcctagttttctcaacaagtaaaaaggacagaaattttgctgtcaattatttcttgtagcaagtgtagttcagtttgtc

SEQ ID NO: 84305 - DNA, 869 bp, Zea Mays
caattttctcaccagaggctttcgcagaagcaggagttggtgttttcgtggactccaaaacaacattcaaaacactagccatcctcctcttccttggattcgttgttgcagtagtcgataactacgacaactctgttacagctggagggcttagtagttttggttgttctgctattttctttctttctggctcttctaccggatctgcattagcttcggctggcttggcaggagctgattccgtagctaaggggacagcatcgagactctcgattagctttggcactatagccatcccaataagctttggcatacgggtaacaatcaaagctttgggagtaagttgatgaaggtatatttcaaatgtcttcataacttcaaccatcatcttgtgcattgggaaacgaagcccagccttcatgaagcttttgaaaaccactacttcatccgctttgggaagagtaacaatgctttctcccccagtcctcactatagatatatcatggaaatattttccttcatcgcttcaatcttcccttgtttgacactttactttccaaaaacaacatggccgagcctccacggccgatcttcggcatcctcattaccactctccacatcaaagctataaatgtggctggaatccccagatagcccaactagcatttcattagtgatcttttcaacattggtcctttccattgcttcgtaaaaaccagcagctgtggggtctacaatcttcttatcctcaaccatttcgatgatggttgcagaaaatgccgaagctcaaataaaataattgtgctcgcaaaagaagaagctaaaatgacaatcacaacacaaagagctagatggcacggaaaatattc

SEQ ID NO: 84306 - DNA, 513 bp, Zea Mays
gcacactgctagctgtatttccaattttcgataaaaatggaaatgatgcttaccagaactatagaaatgtgcatatatgtttttctaatcacgggccaagctacgttctgtgtggggatgcaaatgcaccccctaaaaatgtctgatagggactatgggtagttacaacaaccaatctggttctgtaaaacatgaaactatattatgtgtgagagaaaacaaacaatttgtgtttctaactttaatccatggcactgatcatgtttcagcttactactatccagaaagaagagagattggaaagagggcaagcactcacaaatgaaggttggggcagtgaaacccgctgcagtggccaaggtagtgtccaccagctcatcaggaatcttcctcaccaccaaacaaagtatcagggattctgagataagcctctcacagaaagtaggaaaggcgagagggaagcgacgacaccataccatggggttgtagtccatgaggtagctagaaaaccag

SEQ ID NO: 84307 - DNA, 289 bp, Zea Mays
aaggacgacgacgttcccatacaagacacacgagaccaacaatgcatagacatgaaattggttgcctcctatcgcgacaagatcaacagcgtcgtagggccaccagcggtcacctcatcacctgcttccgatgtatggagccaattaaactggcggccaagaacaaagctcgctcaccctagtgcatgcactgttacgttgcaagctctcctgatctatcgctggcccgaccgaccataatataagtatggccctgcctactcattcatttcatcatagtaccattcac

SEQ ID NO: 84308 - DNA, 816 bp, Zea Mays
ctagccttcacaatcaatgggagttcataactccaagcacaagagcacaagattgcagaaacacactcttctctatcgcactcacaaaagacactatcacaaatcgctctagaatggctatcacttgcttgattctctaatttgtacttgggaggcttttgatctctttttaatgttgttgtagcttgcatgagttatttcttatcttttgtgtattgaatgagatggctagagtgtatttgtaacccctaaccacccaaacaaccattgggtataatcccaaaaatctacactttccttgagtggacattctgatggaagactgcattgtaagtggcacttgacctgtccggtgcaccaccgtaccccaccacgtgttccaccatgttatttagctgttgcaacgggaaactatccattgagttcagacatgtctagtgcacactagacttggtccgatgtgccatggtcttcagctcttcaaaacaactattctatgtaagtggttcgttgcactaaccatagaagcctgggaaaactgcctctctgcatatctggactagtccgacgcacacatgactcggttcggtgcaccgcaaagcaacatacacaagtccttcttgggcttttctcctttgtctttatttggttgtgattatgagcatttctatgacttagactaacatatctagagtctacccaactaatctaagtcatagttcttcatctttttgaatcctctaacttagattccaattctagatcaaacttagcaccaaatgcaccttttccaaagtcttaacttttcaatccctt

SEQ ID NO: 84309 - DNA, 375 bp, Zea Mays
aaaaaaagaaaaacatgattcacaatagaaggaaaccatttaaagcatggctgagtgctaggcttgaagggaactactataatgacctactactgcagctagaaaaaacaagtgaaatagggcagtcatcttagattaacaagtttagattaaccagacacacaataaccttaattttctcttataaaattgctatattaactcaaggaaaaaagggtacaagaaagacataacgcagcaggagcaggtgaacaacactaaaccaaccggaaaactaagagtggattgaggagatgtagatcaggggctcacacaaaccattcaaatggataaatcatcggatactaaaggaatatgtactgcgcacttatgtac

SEQ ID NO: 84310 - DNA, 731 bp, Zea Mays
atttatgggacatgatcaaataatattgttattatgcagtcaacattgttatggaactaatgcaacttgaacgggtcaattcggagttaaaacgtggaaaatatgcattaaataagatttagattcacttaatactaattttactagctccatggataaatttgtaaatttctaggggcccatttgtgaaacgcgagggcttaactgctacttttattgaattgggtggactgtgggttgattgcagaaaagggcaggggcttttttgcattttggcgcggttgaagaggtatggagcttttctgaccacgtgatcttaaatcgacgatcccgactaaaagggctatccatcgaaccggtacgctacatgggccctcggatctagatccaacgaccagggttttacacgactgaattataatctcaaacgtctgatttgatatcaatgctccagatccaatttccctgaaccagccacttacttctaatccgggccgcacatctgaaaaccgatggtcacgattagatcccccaagcgctatcccgtgaacgaatcacaaccacatgatcccgatccaacctctggggagtcatcccccacctcacgacagaaacccggcccaggccccagtttacccgaaggcgaacccaccggcggaggggctaaatcatttcctagattgccatcacacaatccgatagatgctaatcgaccagtagggcacgccgaa

SEQ ID NO: 84311 - DNA, 1275 bp, Zea Mays
tgcaaaattagtccacttttggactaaagtgcaaaaaccaagttaaataggtatctttagtcatttggttcatgaatatgtgaatttgcaagctaaaccctaagttttgggcttatttgcaaaaatcacctcttaagcactacagagcctaagtctgaaattcagttttgttggttcaactttggagccctgtatcttttaaaatatagggattttgcccaaattgaccacaacaagtttgaagaccaaacataggagaacaactttgtttaaggattcaagccatgttcttatgagaaatgtggagaaaatctcaacccaagttggactgtcagactgctaaaggactgaaatcaggctaacagtgagctaacagcaacttcaagcccaatttcgagtatgatctaatggcttttagtggcaacaccatattgcaacatggtatatggtacattgctctacaatttttctgcagagattgacacgggttgtcattagaaattgagagaggattgggctccaaaattgactgtcaggcgtctgaaccgaacttcaccatggtacagtaacccaattggggatcagaccgccgcgacagaaaaatcccgccgacggcgacctccctgcgcgaacagtcacgacgcctccgtgattcgtgttcactggcggttggataactacggcggggaggggataggatcgcgtcgtggatattttcgggtcgccgtggcctcgcggtattccgaccacgtgcatcgacaacgtggccgtgcggccgtcgccggagtttgcgtcctccgccgcgattgtgccacgcttccggtcagtgaccacgtcgccgtaaaccataatcattccccagtgactgttgaggcttctcatcccgtgaactgccacgaatcaccatgccggtgactcacttcctctgaccgccaccgcgctccacccaaattcccggccaccgctatcgtcccctataaaattgaagccaccgtgagctccgcaaggtcatcacgcacccagccaccatgaatcagcctcaatcattcactgagagccgcgaatctggagttctccccaaattgttttccgccgccgtgaaacccacccccccccaccgtggccagaccactctggtaaggttccgcgcctctcaagtattgttttagcatctgtgtaggcatgtaaagctcaccgtagcatccgtttgcccaatccgggcctgtataattgggaacatgggatcgacgccgcggttctcgccgtggacgtgga

SEQ ID NO: 84312 - DNA, 733 bp, Zea Mays
aaagcaaagatgaagcttcaccttatagagacaggtgatgactctttcagttcttatgagctaggatggtgcctttctttctcgactaaaggctactggtttaagtgtagcatgtctctactgaacatgtgattatgtagtgcagagaaatgttggaaagagactgcaaataactcaatgcactcgctatgttagcttcataagtggaaattgattatacttaaatcttggcactgtagtgctcatgtgttgtttagcaacttttgtttactgtttacatgctattcaaatggcaattttatcctaactgatagatctactaaggcacagtcccctttaatgttctaagctctgtgagtccatctaattacatgtgtgtacatgcacctgccaccttcgatccctttcaaagattattatgtgtacatgagcacacccatgttttttactggatatgtgcctgcagtcaggtgtactttgcattgaatctttgtagctcttctattcttcatcctccccacaatggtgacatttggataggcagtgcaagtgggatcaggatatgtgatgctgagacagttaaagttatgatgaagaatcaacagaattgcagtatgattgggaaactggtttcagaagttggactatgggttagcctctcaataacttagttttaaatggtctacgttgacatgtctttgtctaaaattttattggtacttgcattatcaac

SEQ ID NO: 84313 - DNA, 650 bp, Zea Mays
cacaacaatttggtgcacataattaggattgagatgagtgaggttcagagaataaaaattgagaagaccacgaaagaatggagaaactgtcagggccatcccccggatgagaaaaggcacgaagataactgcctcgtgagtatcctctatcgggacagtaactgcactccagatccgccaggaacaaaattctttcggcggtagaacaccaatctcaacaaggtgcagaaggtcagctttagaaacaacggacacatggttaccagcaaacgggagttgactgttgggatcgattggagggatgaccggggtggcagcactctgttttcttttcttgggcgccatcgtgattcctcagacaatgtgaacggattcagaaagctagagagcggcgaggaaaaaagcaggaactagggttcagaactcaaggggacgtcagcagaagtatgtgttggcatgttaagtcggacatagagtggtaggccaattgctcgggggaagtttggatcacaaaaaagcaagcatcactcgggcattacctctaaaatgctaatgaaccatcaaatgcaaaaacagagtgtgtagcaacattgagaccgactcatcatgagtcggcctccccacccttcgaccattacattacattacta

SEQ ID NO: 84314 - DNA, 618 bp, Zea Mays
attctatattaatatatggttatcttaatccagggacatggcgactaacagaagtccaagattcctttctcatggatggatggtcccaattgagttggacgttttcggtgggaagcggacaaaccaaagcaggttcccgtttgacacctaaactttcttatacaaaattacttcttgcaagaccttttccaacataacacttacatataaatctgcatccttctaaccctaacgctttctagttgtctgaattgtgcccatattttgaagcacatgaaagtctattccttgtcatgggagcaatcaagagattgcttagatcactagctcactgttgaacgttgattggttggcgcgagctttgcttcgatcgtgaggagtgggtgatttgatccattcatcgcttgttctgagcattcggggactaggttgtggcaagacaaaatctgattggaagtattgatacaggttgtggcaagacatttttttagttttataatccctttctcgagaaaaaaagaactacgtgttctgcacgtgacgtacgacaacaaaaaaaactggtgctttatagtaatagaagacaaaactatatctaattcattctctatgcacccc

SEQ ID NO: 84315 - DNA, 422 bp, Zea Mays
gaaggagttatctagtggattgacgaagaagctgaagctttcgatgaaatactcggcgatcgcgggtatttctgtgctttcgtcggtgcacgaggggttgcgaccattttggaaaaagctggctatgaacatgttaaggccgtagcccatgtggaggctatcttctcagctgatgacaccaaagacccttcggccgaagcctctttgttgggcggaaaattctactctgatgtttggatgaagggtggtcgttaaatggccgatgaagccattaaaaagaatgaaaaagaatctcacgacgcccgagaagaggcaaagcaagctgaagaagctgttgaatgagccatgattataggtatttctacttaaagttttgctttgtcgctcatttctagcttcgaagtttatcaacatattctttt

SEQ ID NO: 84316 - DNA, 379 bp, Zea Mays
ggtgagtaagctgctagagtggagatagctaaggaagtggagagagctgttatcggccaccagagaacgatgcaggacatgagtaaattaacatttggtgagagaaaagggatggagggagagaacaaaagggtgagtgaggaggctggcaagcgggggctagtaacgagactagagcgtgggtagatgggcgggtggcatggctggagcacaagtgggtggcatgacatgagcacaggaaaaaataggtggaggaggacacacgaggattagtatcctcacgcaacactaagagcatctccaataattatacaaatttagcactctaaattatagatttagaaagttgataaaacactttgaagagtaaaaaatgttt

SEQ ID NO: 84317 - DNA, 479 bp, Zea Mays
ctgcttgcgctcctaacaccagtaaggacgcaacctggcaactcattaccttctccgttttgcgcaagacaatccgtgctccaaaccacgatctcgggcggctagtccgtcactcgtcggcttcgcacctccctgatgcgggcgatcgccgttcggaggacggaggaggaagaagggtctggggccgtcgatttcgtgagaaacagccatgattagatgaagagttgtgcgggtggtagctgtggcatcatagatgagcagtgaagatttaatcttgcgtactcccctaggcgatttgattggggccgtaggggtttgagcgcgatcgcataccggttcattttaagtgctgttagatctcggcgctcgatctctaatcggacggccagaaactgatgataccctttcagccagcaccatttgcaaaagaacccctcaggttttaatgaataaactcgtcgtccactacttatataaag

SEQ ID NO: 84318 - DNA, 981 bp, Zea Mays
agcgagcagagcactgcgcttgacgctcttgtgagatggccattggagggccgaaagatctcgacaggcctaacagtaacagcacccgaaaaaggatcagacagcccgtcgctacggtgagtgccctatccccacctgatctttcttgtgctgacaggtagtagcttttatagtttgtttgttgcccgcctatttcctgcgagagttttcatagtctttgcttttcgttcaaggcacaggctgacaggcaggctagtgacatactgacatcactcactccacactatgagtgtacgatagactactctctgcagtgaactgatgaaacgactccctcctgatctcagcagccccacaagatcgcgcgcgcgcgagctaatcccaagcatgctggatggccacccatggatgaggtcgcgtgttattgaccgaagaactgtaaggtctcatatgagcggaccttgcttgagatgcatacgtgtggctattttttttatctaatggcttacatcgcttagctccatcaccagctcaccttcggctctcgtctgttcttcggctctcgtacatgaacatcaacaacggctcctcggctcatcttatctccatctgccattttcttcgccaccaaactatccgtcgccgccacgaggctattcgccgccatcccacctcgcctcctcatccaatggtgaagtctcaccgagctccctcctaaactggtgacgacgtccatcctctgctgatcctctctgcttctgtcgccatcagactgctcgcagacgtccctcctatgctcactctcaccactgcaaatctgaagcttcttggaaaatatgtgaactcccatatcttgttcttcagctcttaacttgcatcttcaagtacataaatttgtttccctcaagagttctaattatactatttgtataccaacattgattagattgatgttgatttttagcaatatctctctctccc

SEQ ID NO: 84319 - DNA, 759 bp, Zea Mays
ggaatgtgcatctaacttcagccactagtgttgattccactagctttggcctagatgcaaaactgaatgtgtgtgtgagttctgtgtgccgtcgactgcatgtatatgcaaaactgaatatgaatgtgttgcttttgttattattctttgtatgtctatgcaaaactgaatgccgactgcatgtgtatgcaaaactaaatgaagaatttatgtaaggtaatgctattgtgacctgagctgtctgcttctgttattctttgcatgtgtatgtgaggttctgtgttggccgagcattcagcaggcaacattcagcatgcacatgctactgcaggtatctgtcaaagtaaactgaatgttgccgaccgagctactgaatgtatatatctggaatcttcagttccagattgtgtcactttgtgttttgctgtaacttgtgaagagcagattgttcatacatatagttgacatattccacgactcgcagtcattgttcacaattttgtcacatcgttcacagacacagactgaagtttcacaaacatggtgggaagttggcgcccggtgatgatgcaggtggaggtggggagcagtcgggccataggccactggacatggagatgtgtaccatgtgcacaaaactttcatgtgcacgagatatgtcctctttaaaatatgatgttacatccaacatacgttatcaacttactatgaattacatgtcgtacgtgcgtacgatctaattagcaaaactataataca

SEQ ID NO: 84320 - DNA, 1523 bp, Zea Mays
gcggagaacgcccgcgcggaggcccaggctgcccgcaagcgtgttgccgacttggagctggaattgaagaatatgtgcggccaccacgagaagatggagtctgccacccgtgctggggtggattgggcgcacacacctttgtggaggcataccatgacctcggcgcgcagactatccccttcgacaaatcagggaggaggtggggacccgcttcttggggtggctacaggatgagctagaattgctctcgtccattgtgacgggtctcatgtcctatgcgtctcttgtgacctgtgaagggtctgcgaatgccttgtcccgtgagggatgtaggcgcttagaggccttcgatcgagtcaacgaggactttgattctggtgtgctccagatcaaagatgacatgttgaagcgctctgcgggggcgctttacgataggatgtggggccctcatgatcgtggtgtcatcgagagagggccgaccgagcgctggcacatgtatgtttttggtttggcgaaggtggtgtgtgtgttcgttgtctaaaacgttattgtgttgtcttcgcaagcaatgagggatgaagaggtggaggacctcgccgacctcgagagctcagtggcctggaaggatgctgcggtggagtcaggagcggaggagcaatccttgcttcaagaaggcggcgctgagggtcctgcagcagcgagtgcttctgagcaggttgaaagaatgtaataggaatagtctgacagtgttcgctttgtgcatgatactgaagatcgattgttgcgcaggttccggcgtctaggcctacgcaagcaaaccgtgatgataacacgaatgatgatattttggtgggtggaaatgtagtgattcttagtagtgacgcatctgatgtatctgatgttgggtcgtggtcttcgaaaggtgaaaagttggggagcccgtttgcttggatagatgacgaatctttggaagatgatttagattattttgtggcgttagatttagctgcagcggagtctccgttgagggtcgccccccttgaggcgccggcgacttcgggcggtgtagcccctggtgaaccataggggcaaaaaaagattaggatatcgaaacaaagtgtcggaatggtaggagagtcttcgcaatgtattggagtctcccgaagacatcgccgaatgggaatggagagatcgtgccttcggattggaccgcggttggatcaagggacccgtcgtgtcatactggcgccgacggccaggtcatgcttcgaggagggggatctatgggctctttttgatggtgaagaattgagattgatgctattcaattttcgagaagccggtcttattgcgaaacaagagccaatgtaacaatgcgtgttgtcgtcgctgttctttggtgacgataagtgaaaatgctaccattgcccctcttcgccaaaggacggttgtggggacatgtatgtggaaaattttcttgcgtgcagtgggcatcttgtaattgaaacatgaggtgtctttcg

SEQ ID NO: 84321 - DNA, 542 bp, Zea Mays
gtcggatcagctgtgcgaagatgtggcagagataatgagcatttggcagctgtcgccgagcacgaagaccatccaataccgtgtcctcgatctcacaaataaggaagtcaacaacatcaaactctgaatgaaagatcagggcaccgaggagccaaagctgaatatgagtggtagcctctctataacccatccacgacagaagcgtccgtctcatgagctgatataagtacttggctactgtagtgaaatctgccggagaacgtcgcgacccatctgagaagggcggtcggaacaaagccgcgatgtgagctgtagctggagcaactccgtcgtgagggcgacgaggaggatcagaggtaccatagcacaagctatgaagacaagtcgatgactcattgaatccaaacagctggcgaatctagctagcatgaagtgtaacatcctctcgctcaaagcggaacctcatccactggtgatcggggtcgatccatactgacgcattgaacacacggacccactcctcaacatatctgccgctggta

SEQ ID NO: 84322 - DNA, 304 bp, Zea Mays
cctgtccattccagtgacaggcggtgtgcccagtccacgctgcttgtactgtgctgttactcacacgttaccatagcaaggacaatgactcaccattactcacgcgttttcaggaaaagggtcattgcctatcaatgctgcatggactgcagtcatcatgactcccgctgattactcatgcgttactaaggcagagggaatctgaacggctcccttgtttagggtttagtcagcattaattattcacataatgtattccttccattatgctcctgggcccgcatgtcagagctcagcatccttg

SEQ ID NO: 84323 - DNA, 524 bp, Zea Mays
aataagtggggtggaaatgtgggatggactgacaaggagcgagtcatgatgaactaaagattttttgtacttcaacaatatgtatagatatagatatttttgagtcaagattattggatcatttacccatggtcatgcatgtcaactcatttattgggtgagttcattcttaattgtatatattatgtgtttatataatcgaaacacatgcgttcttgttgtgctcatgatcaatggataagtgataaaagggaggggaatcacacaacctagattcagaccattgtacaacaccatcttgtgatggtcaccatagttgatttttatgttctaggactttatggaaagtttatcaagtcttcttccaaatggatctgatctcaagctcatatcttattcgagccaaccacaaacttcattttaagtcggatacctattcttcccatggcattgcatcactctattttggcttgatggctcatgtaccaagccgagtccattatgaacatgtcttaaagatgaag

SEQ ID NO: 84324 - DNA, 717 bp, Zea Mays
atcagagggatttcatcctcttcttcatcatattcatcaacaacacagacagtacacccattggggtcaacttcagcaggatcacacccattgggctcagcagtagtcgagtcacacccattggggtcaacttcagcaaattcaggcactagcacttcctcagcaacaggaacagaaggatcggcatcctaatccaagctagacactcgacgaagacgtctcttcttcttcttctgcccctcagtaggaaaagtgggttgatcggctcggcgagaacgcttcgggcgaacactgtcagacttctgagtatccaaagctttgccggcttcagggatgggtgcaaccaccaatgtttcagcaggagcagcgtcagaagaatcctcagctaacatatccagcatgacacttatctctgtgtcacttggatttaaaggcacctcaaaatgaacctgcctctcgtcgtcaggaatttctccgagtgaggcaaccaaaacactaacttcttcgggagagggtcgcactctaaggcccaaaccgctatcaccagcaggaggatttgacacgaaactggtaaaggcctaagaaggaggcagattccaggccgagtatgcaacaggagcgccaatgttagacaccttgcctctgagcatcatctcgagccggctcaccaagtccacaacaagaattcttctgttggttacccgggttgaatcagcc

SEQ ID NO: 84325 - DNA, 691 bp, Zea Mays
ctcagcctcacgtgccaaggtgccagcaaaggtgcctaaggcacgaccttccggggccgacgatgtacccgtgaacaccgtccaggttggaacggagccctcccaggttacctgtatagcggggaacctgggggacaaataggaaagcgcgctcgtcgcatttcactgggcaaatgtggatgcattcgcctaggaaccgtcacagatgcctgggatccccagggatgtgatcgagcacgagctaaagattgaccgtgacgccaagccggtccgacaaaagccacgcaagcagtccatcgagcggcaagccttcatccatgaggagatccgcaagctgctgcatactggcttcatcgaggaggtccatcacccgatgtggttggccaacccggtcgtcgtccccaaggccaacgggaagctttggatgtgcatcgactacaccagccttaacaaggcatgtcccaaagacccttatccactcccacgaatcgaccagatcgtggattcgactttcgggtgtgagttgttgtctttcttagatgcttaccctgggttccaccagattcagatgtctagggaggacaagaaacataccgcttttgtaactgtggatgggttgtactgttatgtcgtaatgccatatggtctaaagaatgccttgccaacgttcgcgcgagccatgcataagact

SEQ ID NO: 84326 - DNA, 637 bp, Zea Mays
tttatgtagcttggtggagctggtggttaggaaagcatgggtgtatatatgtatgtccactttattatgtaggatagaagatgcctttaaagcatagataggtttgggcaagaaaggatagggtaggaaaatactccatccaagattgtggatcttgattcctttgaagatctggcttgaatcttaaccttccttgatttgatgaggtcgatcaccttcaatcttcgttctcgaagttgttatccaaatttggggcatgtagtgaaggcatattcttaggtaaacaaaataggttaataggtggttatgagttaaataagtttaagcaaagtctgtctcgttgtcttgcttttagattggttggataagttatgtaacctgttatatcggtcatgtttggtgttatcatcaaggataatgggtattggtgttaccgtacctagggacatagttgagataggtgtaggtacatggggtaggtagactaaacaaagttttgctttcttggataaatgttttgggcaacctatatcacaagctaggtcatgatttcacggacgagtgggtttaggtttagaaccaatttatagaaatatggtgtagttaatacttgtaacatagattagaccatattaga

SEQ ID NO: 84327 - DNA, 531 bp, Zea Mays
gttttgtttgctgactgcagaagtagacaaaagagatatttgtgctatgcctgtaaaccaacccaaagtcagtgctctgtaatgtttcactcgactggataagtgaaggctgaaatgaactagggtggtgagacttggttcactggctaaagactatattgcacctgttactggattgattacaaccaacatttccccctgcccattcttttgtgcacactcttggatgagattcatcacccctatgttatcttctacgtgttgtttatgcactgctgcttagtgtccatgctaggggagttgttggcatccccagggtccctctccatcgtgccctagccgagctcagtgacatctctctacctatcccttactcaaattgttgcttctgtgattcttgctgtctcaaactctagttagtatccactgcagaggagtggggtagtacttctgttccagcctgtgtaaacccccttctcagtcaccatgagtgatctgctctagttgatgtgtgccaacctctgtggtgac

SEQ ID NO: 84328 - DNA, 476 bp, Zea Mays
gtcataatccttaattagctctagccatattcgctgacagagattgagatctggctgggtaaagatgtactttagactcttgtgatctgtgaatatgtgacatttgttcccaatcaagtaatgtctccatatcttgagagcatgcactatagctgctaattccaaatcatgggttggataattctattcatgaggcttgagtaggcgagatgcataagcgacgactttctcattctgcgttagcacatatcccaaaccttgtcttgaagcatcacataagatgacaaagctttggtggatatctggcaatgtcagtactggtgcggttgtgagcttcttatttatgaccttgaaactttcttcacactttgaggtccacacaaatttgttgtctttcttgaagagttcggtcaagggttttgcaatgctagagaatcccttgataaaatgatggtaatatcccaccattcccaaaa

SEQ ID NO: 84329 - DNA, 283 bp, Zea Mays
caggaatgagaggaatctgatgatcacagtccctgacaggaggaaggccagtaggcaactgaaacactgaggagtacttgtccaacaggattttaaggtctatggggagctctctgaccagttcttgatcagttgctggcaatacgtctaggctacatagttgtactaaagcaccatgggtctgtgatgtctgtacaccaaaaagtttttgagaattaccatttgttgacatggatagccacttatctgcccaatgcactaccataggactatgagtggaaag

SEQ ID NO: 84330 - DNA, 489 bp, Zea Mays
gacaactcccgctaccgcgacgacccgcggtacctccgcgtctggatccagctggtcagccattgcttctctgacgtatatgtatcgatatcaagatactgcttctattagctagatcatactgtagaacctcgtcacatctttgcgtgaatgttgtcttccagaatctggactagaacagtaccctcgctggataacttttcgatgtgaatcatgctttggagcccttcctgttgctataagaaatgaccttaccaggtttctaaatcctgtagatggactacgtgacggacgcaaagccattgctcaagacgatggagaggaatggaataggcctcaaaagggcttcgttctatatggcatatgcactgtattatgagaagcacaggagattcaatgatgcagagaagatgtaccgtttgggaatccagaagtaagctaaagcatttaatacccccaatcccaacacacccacttcttttttttaac

SEQ ID NO: 84331 - DNA, 755 bp, Zea Mays
acgctcgacagtttgtcaccataataagttgttgtgaagtttgacacctcctctagaatgtatgcctctgcaatggaagcctcgattttacatttatttctacatttctttcaaatagtctttagacatctctcgattggatagcaccaacgtccctgcacgcccccctcccattcgtgcctcataggggagatgaagaatcaaatgctgcattggattgaagaagtcgggtggaaatatcttctcaagcttacacagtaacacgggtgccaatctttccaagtctgcaaccacggtccgagataactcttttgcacaaagctgacggaagaaatagctcaactctaaaagcgctagccagacatgctcagggacatagcctcgaaccatcgcatgaagaatccgttcaatccatatgtggaagtcatgactcttcatccctaagactcgcatagtagataagttcaccccctactcaggttagctgcatacccatcagggaacatcaacatcttgatccactgaagtactttcttcctctgggccctgcttaggacgaaatcggccttaggccttctccatgtctttccaccacttggcggcttcatctcttggtttggtctatcacataacgctgccagatccactcttgcctttacgttatcctttgacttatcaggaatgtccataattgttgcccacagtgcctcggcaacattcattttagtgtgcatcacgtcaatgttgtgtggaag

SEQ ID NO: 84332 - DNA, 812 bp, Zea Mays
ggatcattttaatgtcatctaaaattatactattagtttatattttctatcccttcaatgccattgtccgttacctgtcaccattaagtagtgcatgggtccagatgtcaccgttaatatggcattgatcactcttaacagtttgagcttgataatatgcttaggttttttttattttcaccgttacatcaacagctactcttgtcggctccatagcaacgaccaaactatccacgtagtccaaaaaaattcagaccgtctgatcgtcaatcaacggttgacggctcctctcgctctcctgctcccttcatctctcgatacttccgtttgattcgatgcttggccggtggacacctctcctcgctccttctgcctcgtctttcttcgttctcactccctccgtgtcgtcgttctctcagtcactttgtttttccgtcgctttctttttctctatgccatccttttcccagcacttttgccttatgtccctttcgtcgttggcttcgcatgtcgcctcctgtattgtcgccttcatcacccgctccaactgttgctatgaatgaggtttgtttcccttttccatcaacatttttccttgtcgcagatccagtttctttcgctccagattcgttttttgagttacgcatcattttctacagtcgcagttccttcttgacgtgcttccacatcttcctccctgatacaaattacagacctctcgtacaaatagtgtgttggtttttcattataactatttgccctttgcttttttagtgtggttgtgtcttgtatgtgatcttggatgctgtacg

SEQ ID NO: 84333 - DNA, 348 bp, Zea Mays
gtcgagatacaagttcagttcggtggtgtaagttcagttgtaggtaactgaagaattgccagttgactgaatttgtctcagtttggacaggcggctgcttgcttgcttgtttcctgtgtgctcggcgtgggtagcaaaaagaggcaaaagtttgagtgcaggttctggaggccgaagctgaatcaagatacgaagaaatggaaagatctcagccccacaattgtgctgacattgcttggttggtttggttagagtgtagactgggactttctggcgtctggtaaagtggagtcgagctgagaaacttcaggtcatggagaggttcaaagtatctgtggtggagtccgt

SEQ ID NO: 84334 - DNA, 488 bp, Zea Mays
aaagttgtgagtataccgagaggttattctgagaattttttcactatgttggtgtgaaaaccatagtgtgttaccgtcgaaccacattactcgttctatctaggacctctatgcttgtgtcgcatacatctctcagaattgtaaatacttatagtcactgaattgactcgggatagtcctttgacaagtttggtatacactgtaagctaaatggtaaaagtcggtcctgaatggacacatgcctagggtttatgtagccgaactacactgaattccaccctttggcatgcttaccattatctacctctgatctaccagaagtgagaagagtagacaaataactatgaaatcccacattaccacagagcttgaagtgaaattggacattaatatgtcattggtccttggcgccggaagatccataattcttgaccactaagctattgttgatggtaatttgtgatagaaatatgaagatcttatggaga

SEQ ID NO: 84335 - DNA, 667 bp, Zea Mays
gactgttcaagatgaagagggacgagcatgggccgttgactaaacacaagttgaggctcatagtaggtctacgtgcaatgacacgacatccgactacgacaaggtgttcatgtcagtggttagaacagactcggtgcgcctgaccattgcaatcgcggcacacgagggatgacattgcaatcgtggcacatgagggatgataggtgcaccacatggacgccgagtcaatcatttttggacggcgacttgcgagaggagctctacgtgaagcagcagccggttttggcatcaccaccaaggagcacaatgtgctcacgcagtcacgctgcgaaagacgttgtacatactacatcaaacaccacgcgcctggaaggaaaaaagggtggacgacattctgatgtcgttcggcttcaggaggagcctatcgaagcacgccatctacatcaggtgaaacgatgatttgcagatgacaatatccaccaaccagtataaaagaactctgatcttatacgactgcgaaggatgatgctagctagctgcaatatattgaaaattctgggaacaaacccaggcctcccgatattaccttctgaagcacttgtttttgagcgtgtgctcatcttcttattcagtgaacgatgatatgcgatacacaaaatcttacaac

SEQ ID NO: 84336 - DNA, 807 bp, Zea Mays
cgagcattttgcatgggcactccatttacgatggttatggttttaatggaagaacaaagatcacgtctaggcagggctagatatcccttgttcaaaggttgatagagccctatttcacgcttcaactagggtcactaatggaaatggatatgttacattcttttggtaatccaactagctagttcttcggctcacgccttagctcttttcacttcgagaagaccaaacagaacaagatcactattagataggccatcgagggtaagtgggtaatagatgtgtctcccacatgctgccggtggagtcaccgatggaaattatagagttcgtgtttctttaggaggccattaatgaggtggctctatatcctaccaaggaggacgatataagttggaggtggacttcatatgacgtgtataccaccaaaagcacttaacttgcctagttctagggcagcctgcctaggcttaggctcttgtcgatatccggagggcaaagatagaacctaaatgtcgcttcttcacatggactttgaggcataggaaaattctcacagagtcatggctagcaatttgttgcataggggatggttgcatgacccaatttgcaagctgtgtgggcaagagctggaaaatactaaccatcttttcaaaggttgtgtgttcaccaaggaggtttggaatcttccactcatttagttcagtcttaatgctctccatgctgtatactgccatggatcatttatacattgtggagaaagattcatctaaaagttgtaaagcatcagtgttggagcggaggctgaac

SEQ ID NO: 84337 - DNA, 1223 bp, Zea Mays
gcgggagctttgagtcggaggatgacgaggatgatgaagaggaggaggacgaggagaagaaggggaggaagaggctgatccggaccgtgccatccgtcgactggttcgacgtcgaggggaacgaggtctccgtcgcgcagcagctcgacgactccgaggtgaggggggggggggggggggggggggggcacgggtgttgtttctgttgcgtgatcgagatgaatttcctgtgctcgtgcgcttacaatggcctgggtcacgtgctgatttgcttatttagagaagatgaacttctggattcgtagttaatgatcaggtgggaagggaaatctgcataaattgaccttttggctaagattgagcgcagtgcaacggcacaatcacacatgcacgccaatttactcctccaacctgaagttatatcacaaagatttacatgtagttgattaaaacaacgcagatagtcttgctagagacaacattggtttggtccatacaaagttgagtacatatgtgaaagcagctaacgaattgtaaaagcaagctgggcaacatcaaaactgaacttacagacacgtagtgtaaatgttcaataatgttccaggtgggttttctgcaatatcatcagctaattcttttttcaaaagaaaacagtagccattgtttcaaacacctgtacttaacaatgatttatttgactatatatcttcaaatgaacctgaattatgatatcaactccctcaatttgaaatatatcacaaacacaataaattctgtgggataccagatacatgtgaaattcctttttggacgcttcaggaaattaggtttggtgtacatggttacttcctaatatgttcctgtttgctgaagaatgtttgcaactgttgatcatgtttcactcattatctttcatatggtttagttatttcatttacatgtgcaggagtttgattttggcaggacaatgtttcttgctcttcagactcttgctgtggtgtttggagatattggaattggtccattgtatacatttgatgtcatgtttaacaagtaccctattcttggagaggaggatgtccttggagcactctcactagttctgtatactcttatattgatgccattagtgaagtatgttttggttgtcctttgggccaatgatgacggtgaaggtatatgggaggttgtgaattgagttaatcagattcaggctttttccg

SEQ ID NO: 84338 - DNA, 369 bp, Zea Mays
atcttggaaattatcagagtcaaaatcactagaaagtcagagaggtagtgtcggccttaggtctggcagtgcaggaggtccgacagtgtcgatcgtttaggttcgacagtgcccaaaatgatctcaaatttgacagacagtttgcacagggtgtaagaagttctctggtgaagtatgaacccatgcaaataagagatcaagtcacagatcggaaatcccgagaaggatggggtttctcaaaacgaactcaaacgagaatcaactcggatcacgaccaagaactgatccgtgagggcatatgctgtgatccaaagagtctatcaccacccaaatcaaacctcaacagtacccatgtcatagaactcaaag

SEQ ID NO: 84339 - DNA, 919 bp, Zea Mays
aggcaaacttttatcccaacttctaccatgttttagagcacaagctcttaacatatcttccaacacttgatttgttctttctatctatccatctgtttgcggatgataggctgagctgaagtttagcttggtatccatggactcatgtaatcttttccaaaagcacgaggtaaattgggttcctcggtctgatacgatcttcttcggtactccatgcagacaaataatcctcgacatgtataattctactaactggctcccgagtaagttgtctcacgggtataaagtgtgccactttagtcaacctgtccactataacccatatggaatcatagccatcacgagtacggggtaatccaactatgaaatccatgttgatttcttcccatttccattccggtactttgagaggttgtagtaatcctgctggtctttggtattcggctttaactcgttgacatacatcacaaagtgcaacatacgtagcaacatctcttttcaaaccgtaccaccaatacttttcctttagatcctggtacatcttagtacttctagggtcaatagaataagccaaatcatgagcttctcttaagataagttggtgtaggtgctcaatgtctggtacacagaatctctttttaaaccatacaatgccttgttcatcctcggtgaaatttgaggtttttcccatattaatctgtgccttaatttccttgattttctcatcggattcttgtcctttatgaatcacctgttccaaagtagattccacttccataattgttgcttccatattattgagcataccaagtttgagttgttccatttcccaacacaattcttgcgacataaaatgagtagtgatactgttcacttgacctttatggctcaatgcatctgccactacatttgcttttcc

SEQ ID NO: 84340 - DNA, 629 bp, Zea Mays
gcttagttcaaatctgagatgaagaggggtctcaaaatgagtgatcttagcccattaagctactatcttggcattaaagtacaccaaacaacatcaagcatcaccattagctagggtggttatgtcgagaagatcttggttaaggcgggaatgacataatgcaatccatgtcgtacttcgatggaagcccaacttcatataagcaagagtggtgcaactccaagggtcgatgccaccagctatcgtaacctcgctggtagcctgaggtatcctgtgaatactagaccttatttgctctattttgtgggaaaccttagcaggtttatagaggagccctaggaagaacatgttagtacaatgaaacacattctcaagtatatatgttgttgggactaagcattgggaaatcacatatgcaataagaaaggtaacaccaggaaagtgatatgatctacttcctctctagcaatccggttacccagcggtcctcaaaacagaaagtcatagcatcgtcaacatgtgaagttgaatacatcgaggcattgaccatggcgtgacaagctatgtggctggcacaactcatggcaaagctgatggatagagaagacaacttgtcaatgctgatggtg

SEQ ID NO: 84341 - DNA, 435 bp, Zea Mays
tgggatggtcataagaatgatacttttctgcccaatctgtataccattgtttgatgaataaacccaacaacggtcggaataagaacctctggaaagttaagcctcccttgaaaataaaggtttttttgtggaatttatgtcggggagcgatcctctaaagataatttagtcaaaaggtgttggaaaggttgcttgacttgtagcttttgcaaccgtaatgagagtattaaacatctcttttttactgctatatggccaaaagcatatggagaattatttattttgccttaaaaatagacatgccagttagcattaatcatagtatcaggtcttggggaagcaataggggtccaggacacaaaaaaatattactttatggagtatcagctttattttggtctatttggctcagccaaaataaggtggcttttaatc

SEQ ID NO: 84342 - DNA, 277 bp, Zea Mays
ctttgtatgttttagaacaacagggtcaacttcaagaaggggagcaacattggacgacatcaagcactacatcaacaccttatgcaagcacctacgactttgagtcgaggatgactcaaaactaagaagaggagaatgacgagtatatggacgtcaactatgtggtcaaggtccaacaaatcatagagtcccaagctcaaggggagctgaagtctagtttattcgcgaatcaggttaggactgtaggagtggtccccatgaaaacagatgcccatgc

SEQ ID NO: 84343 - DNA, 383 bp, Zea Mays
agagttaacccaacccatagagtcatgatgaatggcataatctatctgtccccaccaaatgtcaaacaagtttttgacctacaccatatagtttaactcatcttaacaaattctattttaaacttggatattcaccttatacaactagttaccccaagctgaatataaaacaacagattaagccatgtcaaagaatcttcagttcataaacagctactagcctattcgttctgccttgcaaaactgtttttgccatatgcttctaactctcatggtcaatactaggaagggaagattatcagacaacagcaaacagaaatgaatcctccaaatcctccacctgttggagtcgatcaagtggttgccgcccaaaggctggtaat

SEQ ID NO: 84344 - DNA, 1717 bp, Zea Mays
aggaggaatgggagggatcgagcaagcataggaatggttgcctcaaacaaatcaaaatgctctagtaagaatgcactattcccactctggcattcaccaaatgaatcgaccacttcaataaaacacgaccattacctccactgggcaaatcgaccacctcgataagtgcgagataccactaacgttgtaggaaccagagatgacacgaaaaacagtttctcgaacagtaaacaacacgcttccgagagtcaatcactgtttctaggaaagaaagcatacaaggttttatacgcccctacaacccattaaaggtccaagggttcgaaggatggcccaccgaagggttcaatagtcacccgaggcaaaaatggtgcgagggatagaatggatgggtcctagtggcttgtaccccaacgctcgaatgttagggaggcatctcgacatgtattcgagtctagacttccaagcatggttatttcatcgaaaaaggcatatgagtcatcggggttaaacaaacaatgttgggaactatatgatgacgaaagcgagggattttgatggctaatcaccagctgatcctatggatcccccaatagggattaggccattactcgaatatacccatttgtagctcacccgacccttctgctttgtaccaacgagataaagcaaaggcgtggtgtatcccctccacccaaaagtgaacatgacatagacataatgacgatgagaagtcgatacacctctctaatcggtccaccgcaatgagcgaaggtgtagaggtagacaaagcaaaatgatatcgaaagcacaatcgcagggttctttactcaaaaaaggtagaagatccttcgaatgaatccacaattcctttggagactaggggctagactcactgagttccatcatgtgtcctcgggaaaattttgacacatccattcgaaggagcgcacggctcctccagaggctcaggggctacaattagagagtaataacacatgtataatacaatgtcttaaagagacatgattaaaacttactttttgctccatgtgaacaatgttctgatacaaccaacccccaaccacgagatccctattcgctcaactctaggtcttccgaggggtcagggcttgggaccaccctagaagaaaatggctcgcccgacctagggttcgaaaactacgcccaacccatcaaagatcattttgtactaaggtgtgtcatgaggatggtatgatgctgccagagtgacactcgaatgagaggacatgggttaaaaattgggcacacgagctctgacgaacagacaacctgaatgaccactccggcaagagcacacgcgtgcgactgctggtacgagggctgaccgatgccttatcgtggcatgacctgagagacaaccgggtgtatgcactaggacaaatgagacagagcatgactcaacacgatgacataaaaaggggagcaacatcgactgcaaactctggaggatgaaaagtaacaagacaagatcgatgccccttccgaccggttcgagcattgtccctatgtatggaaattgcccctcctttgacatataaaaggaggaggagcagtgggtgggggcaacagacacaagtaactaacacttgcagttcatcaaactccatacttcctccgctctccactttagaggtttggacctcgagtcctccctcacccgactttgtaatcc

SEQ ID NO: 84345 - DNA, 431 bp, Zea Mays
ggaggatacggataaacaaaaggttgtggaggaggagcgtcggtggaaggggcttcagtggtaggaggagaagcgtcggtcgttggaggcttagtaggaggagcatggatatggaggatgatgcgaataaggaaagtaaggttgtagagttaaggaacagggacgagtagtaacatcatcaaccaataatagatgggagaaagaccatagaataagacttgcccacatagacacatcaggatctcaagacgtcgagattgcttgttgagcaagtccgtcaacgtatcaaagtttggagtccactttagatccacatcggaacgaagagtagaaagctataagtggaggagaagcttgtgaatcgaaatggagagtggagagctatacatgaatggatgagagggcttatgaattggagatgaatgtatgtg

SEQ ID NO: 84346 - DNA, 481 bp, Zea Mays
aacgaacccaagggagcgtcggactgtattctacgagccaaccttaaaccaacagaaaaagaggaatcattgaaccccaagcgttagcacaagtgaagaagggcatcagaccgaacaattctactattcacaccgacaagaggcgttgaacctgttggttagcgaccgttggactatctcggatagggtccgaactccgacggttacgtagagaggctccagagaggaaatgggcgtgtcagactggttcgacgatagttgtcatactatacactatagagcatgcctctaagtgttggtaatgactagtgctgacatattagtgacatgttttgagttctatttttgcgaagtcaatgttacgaatgacaaaaatataaagtacaatcccggtaaaaaaaataatacacattgtttggagtctcaaaaatcgatttttttctctcgcacaacaaagggccagagatcggcccgaacaaac

SEQ ID NO: 84347 - DNA, 2552 bp, Zea Mays
ccaggccacaattgtttggtaatggcagacgaagaatgccaccttcataggccttgttgataatagactgtaaaagatcagccgcaagaacaaaaataagcggggacagggggtcgccctgcctgacgccgcgtcgacagtgaaattttttcccagggactccattcaaaagaacttcagaagatccggagccaagaatcatagagatccagtggatccatttattaccgaaccccttgtgtctcaagatctctaggatagcagcatgctccagtttatcaaatgccttctcaaagtcaagctttagaatgaccatttcttttctggatttgtgacacagtgaaatatattcaaaagcccaagctaagcaatcttggatcgatctatccttgataaaaccatattgattccgatgaacgagctttgtgatcaccagctgcaggcgattggctaagatttttgttaaaactttgatgctcgtgttaaggagggagatgggtctgtagtcaccaacagaatcaggagagccatttttgggaatgagtgtcacatatgatctgttgatgctatgcatgcagagagatccttcaaaaaatttgttgaataggtcatagaaatcaggggcaattatcggccagcattttttaacaaagtctgtgttaaagccatccggacctggcgatttatttgaaggcagacgtgcaatgatttgatcaatctccaggctagagaaaggttgttcaagctcagatagattaccaattggctgaatcaaagcagataagttgaagaccatagtagtttgttgagaggtccccaaacggttcttgaaagcattaaaaagcacaacttctttttcattgtgagagagagctaaatttccattatcatctttaagagaggagataaggttatgtctgtgcttgacagtggcattggcgtgaaagaatttagtaccggcatctccaagggtggcccatttgatttgacctctttgcttccaataaatctgttgcttagctaaaagatcttgtaaatgaaggagcaggatttctttgaagttccattcctgaatggttaaatctctgctctcctcaatgaagtctagcagttgcaccactaacttaaccttatcaatcaattttgttaagttggggagagacttacaccagccatggatatgcttgcgtgcccttttaaactttgccatgagccttttagcagggtctggttgaaagataggctgattccaagagtcttgaaagatagagtggaaatcatcaagctgaagccaatagttttcaaatctaaagatgggtggcttgggcacattgatttggacattgaccatccaagggatatgatccgaggttcctctaggaagcgagagtgcagaggtagctggaaaggtgaccgaccaagcttgtgagacaaagcaccaatcaagtttttcaagaagcgggtgacgttgcatatttgaccaagtgtatacttgtcctttgagtggaatttcctgtagccccagttgactgattgccagattaaaactcatcattctgaggtgatccccacccggtttgttgcggttgtcaggggatctgatcatattaaagtcaccgaggaagatccataatttgttatcctcaatctcaatgctggaaaaccaagaaagaaactcatctctcctgtgaggagtacaaggggcataaatgttggtgagccaccaggtctgattggtaagctttgtgtggaatcgaattgtgtgaccgaaagaattttgatcaataatctccccatcaaaaagagatcctttccaaattgttatgaagcccccagaagcgccaatagaagtaccgaattcaaatttatcaaaggatctgctgcagaagcgacgaatgtaggagtcatcaaaggactcttttttgtctcttggatacatatgatatcacatttagagtccgagatgttatttcgtaaggaattccatttagtctctgagctaattcctctaatgttatgggacaaaatttttagagagcggtgtaagttctgagggccggaagacatggaaaactatcagtcttacaattaagaaataccggtatgagtagcatacaccagtaggtccttgtaccagtataaatccataaatagaagaattggaagggccacataaccaacgtgtcaagagggaatagggcctccaatggccccgaccggcaaagtgcaaagatagtccacataacaaataaccggaccaccagccatcaaaattaaccatctcacgcagcacagagttattgactccaacatatttaattgtatcaaacaggaaagagacctcgattccatcatagtatgtttcagaaaaaagcaaaaagcgccacatgcgcgccagcaccaaccgttaaccaacaaaatagttgccaaccagagaaaagaaagtaccaaacgagccaaaagggggaggccaaagccttacagccccgccgaggtattgtcttcatcatcaatgtcatcattgaagtgagggtcccccacctgttcatcag

SEQ ID NO: 84348 - DNA, 339 bp, Zea Mays
aagaaagttctacgtatcttcttacatgcctcactgggtagccattccctcatacataagcatccctgcgcccactagttaacccattccggcccatagacgacgacattatccttcccgggccttgacgaacgacgcagcccaattactcatgttccttgtccggtacacggttgttcctttactgcactactgacactcttctgcctaggagactggactgggaagatgggagaagagaggaatgagaaagaaacgcgacagggtatttatagcggcagcgtaggtggaagggcagagctgagcacgcggcttggaagctgcttcgcaatttctttt

SEQ ID NO: 84349 - DNA, 565 bp, Zea Mays
cggcgggttattttactgaaaacagagggtttcttatgtaaaaagacatggctgaaggggtattaccagatctacaccatccgatctcaaaccagcggtccagattaaaatagccatcatctgaactggtatggaacaggggccacacgatctaagatcgacaaccccaattgaacatgacgaagggatacacttgatttaatcagacccgtccctaccccgatccacagctctcggtgcatccctctaacttctaattgcggtcatttgctagcagatcaacgctcccgcttcttcccccaatccggcaattgagcacgatggcgctagctccattgcggcggcgcatcatcggcataaaagcggcctagctcccaggatccctacttcttccccgcacgtggtgattcagagcgagatcacgaaggtgaatcggtccggctaatttcttgtgcttggtagagcagggagctttgcccacggtggcgggcgacactacgacccggctgcccgacggcgtggtgacttgtgacgtgctactactggtgaagtgttctacacatac

SEQ ID NO: 84350 - DNA, 395 bp, Zea Mays
tagagcttgaagactttattatctccagtacatccagaacattaaccatcctttttcttttgggggtcaccactggacctttctgagtttgtggcactccaacttctgtcgtagggcttaaaatttctgatatttttgtcacttcagctttcgactcttcaattctttcaaccttcggtgttgcagtcagctcttcagttttctgcgcaggtataggttttttggcttcagtagccgaagaagcctcgccgacaaactcgggcactatggccggttcaataaagcgtggttggtgagtaaggacttttacccttttcctcttcggcacacgctcgcttggagcagctgaagcatcatctttcccggaagttgcatcttttctctttcgccccctt

SEQ ID NO: 84351 - DNA, 694 bp, Zea Mays
cagagatccaccaggttggtcagcaataaagtcatccagagatatgagatacgttatttacaggatactggaaatctcgtagattcaatttttcgccaggcctatacacaatctttagatgaacaaagttcagatgttagaaaatactaatgtgactgtcagaacaataggaaggcatgtacatacctgcattaaaagaataatcagcgctacaaacaggtgtacaatgtgaattgtcatcggtcaggttgcccacagagacagagaatgcacattaaccagctgaaaaacatctgcctctggctgataaatgtgacatagaagtgattcaagtaatcccaaatattatataattgacagcacacccagtcatttgtataataacattgataaattggtccccgtttctagcaaacggaaggtggtaaaccggttctgccataggagaatgaaagggagcacacgaagttaactatgggacctatataggcggcaatgcaaacgaagggagcactgcatatcaagcatcagtggtgtgtatcagtgcccaattcgatcccaaacaaacaaagggagggaggcactacatgccgatagggagttggtgatgtgattaatttggaatcagcaagcagttgtgcacgcatgcaaacactaaacaaacagatccacggcagggacagatggataaagc

SEQ ID NO: 84352 - DNA, 1091 bp, Zea Mays
taaaaggaccagaagtctggctgtcaaaccactctgagactgaatactgactaccagtgagttctgaggaactttgggctcgattcatgctcaaaggaataagcaaatgggcaagatccctatagcagaattgtagctggtgtatagggctacaagtttgtaaaagatggattggcaagttcttgcacaaaaatccaagatctaggcattgcaattctgtctgtcaggcactctgaatcaggatttcgatggtacaatgttcggatcagatcacctggttcagttcatctcgccgtcggcgaccacgcgctcggattcacgcctgacgctacgattcgtgctcaacgaagtactgattgttgctcggggtagtaaatatcatcgtgtggatgaacttgagccactgttcactccggccaccgtgtccgcctagctcacggccgattcggatgaactcaccacagttagccgctcaacgatcgtgcgccacgtgccttggtgtcttaccacatcgcagtagctcatattacacatatctggtgatcgtcggtctgcccgccacggtaaaagccaccaatctcttgcgatagtgctcttttctttctccaaccgccaccgcgccatctcaaattcacgggccaccgctcggggatcctataaattgagcatgctgtcagttccgcaaggtagtcaagcacccaacccatcaactcgtgccttcaattgttcaccagagccccctaattgctcacttccccaaatcagttttccgccgccgtgaaaaggctctcaccgggcccagtgcgcttcaggtccgatcatgtcctcttctctcttgtttcagcacccttatgtgcccctgatgcttctcgacccgaccaattaggctagaaccccttagatcgccgggaacacctcgtgttatccgttgatcgtgcagtcgccgtgagcagagaggttgggtgctcgaaccatgcaattgatcgaggggaaacgtttgttagatgttgaattaggtatcggccaagttagagcatcggccattgtgtgtcctggccggtatagcttcgccggagctcggtctagctcgg

SEQ ID NO: 84353 - DNA, 349 bp, Zea Mays
ggctggcatagcgtggcccatgcttacgcttgggctaggactctagcgagtgcgtcagcctttggagatggatccacaaccaatcacccaccacgaagtcaagttcacgatggcggatgttgtagtagcgcttagcatactcctaggtctagagaagacgctcgtgaaccttcacgaggaagacgtcacagttgcacaaccattgtatttgtttgagttgcccttgcgacatgcggaaaaataggcggcgggggttaaccgtacaccacgtagcaaggtgtggtgcaaagcgtcatgtggaacgaagtattatagcaatactccatccaaggaagccaatcaattcctc

SEQ ID NO: 84354 - DNA, 544 bp, Zea Mays
ttttgtcatagttttataaattatttaatatgaaaaatagttctccccacattctaaaatataattcattttcgatcatcataactccctttttactttgagctccgggacactgacaatattaggcgacatttggtattttgtcatagttttataaattatttaatatgaaaatagtcctccccacattctaaaatataattcaatttcgattaatttttttcaataattaacttttgaatgtagtttgtatgcatgtctatattcattatcatttattgtgatgtgcctcaagtactgtattgtaatccgctgggatgaaggatttccgtctcatctaccgcttccatacagtctaccctcgtgtcgtgacggaggcagacctattgcaacctggtcttttaatatactattgcaaaatggtcctcccgactcaatggcctcttcggtacagtacccctctatcatggatgccttgggacgagcacgggttgatacataaccattcagtattgacatgaaacgctcgtacatccacatttcg

SEQ ID NO: 84355 - DNA, 484 bp, Zea Mays
cctagtcagagagattgttcctggtatgcctattgaagccattgcagacccgaggaaggtagcagaaaaagcgccagagcagtctaagatgatggtgacagcactgccgaagctaccagctaccacaggaactccaaggaagaggaggatggctagtgtcttggaaggtattctagaatctgtgaaaatgtcgcatccttcttctgccgaagctactggaagcaaaactgaatatgtcacagaggtaatcactgccagtacttctgctcatgctgaggcggtaccttcgaaaactgcaccaataagtcttgtgaaagagagccttcccgaaaaacccacagcacctgctcccaaagcaccttacaggggtgatttgaattttattattcgacatgcttcgagaaaacatctatcagcagagcaagttgccgaaatggaacattatgctaaagagctgaagtacccccatggatccttggtatat

SEQ ID NO: 84356 - DNA, 500 bp, Zea Mays
gcccggtacggaccccatcccattggggtctggggatgagctgaagagcacagagcatgcctgatttagggagcagtagggaaacatggacagagctagacgatggtcgactgtacagccgactccacaggggccgattcaaccgctatgagaatcgaagcccaagccccctatcaccgggaccttaggctttcgaccgtcacatcctacgggcgtccgtaccgcagcactataggccccccaccatcacaaagtacgatggggaattgaaccccagtctttggttaggggattaccggcttgtgtgtcaggcagcaggggcagattatgataacttcataatccggaaccttcccctttatctagcggattcagcgcaagcccggctcgaaaacctcaggcctgggtgtaaccagaattgggccaccttaaggatgtttttgtcagaaatttccaaggtacgtacgcccaagaaacccatgggaccttaagaattgttg

SEQ ID NO: 84357 - DNA, 480 bp, Zea Mays
gaagaaagagataggtttattcaatgttgttgttgttgagtggatagttaggatgtaacagttcaaattgcaaaccagctggaagaaaaaaaaagatagtaaaacgaaatggagttgggagtagctggattgatgtgccgcttgaattgacctacggcaatgggggaaggccggaaggggcttcggccgcgtgcgcataatttctagaaaaaaagaagcctttatttcagtcataaatcaccatttaactctagcttttgtcctgaattgtcgtgattcctctagttcaatttagaatcatcttctatcctagattttctagattcatgtgattcatcttacaagatatcatgctcctgtaaaatctatagttgacagctgtttcaacaaaataaatttcagttttccataatcgtcagcccatagtagctttcttatagctcacagctaaaatcagattttcggaaatctacaacttaa

SEQ ID NO: 84358 - DNA, 448 bp, Zea Mays
cagcttttctattttgatgatcaggagaggtcggcggtcatcacctaatccactggctctgttcctcgagaaactcgatcatcagaaaattcgtgctgccaatattggatgatgggatccatcttcggccgttcctccatgtgcggtccttgtggttgtggcggattggctgtgacttctgacctggccggttccgtttcgtcttttgcagagttctcatgttgtctagtgtttacacgtgcgtcccccatgtgcgagcttctgataaaccttaatgaagacgcgaatggcttttcagcacgtgcattctttcagcaacgctgagtagacttcccggagttgtagggactgtttaggatgtttggtttgagggtacattcaagatacggtgatatattataagtctattttttaaatttgatgagataaatttatttcttatgttatt

SEQ ID NO: 84359 - DNA, 439 bp, Zea Mays
gggcattcctttcctaggttagattgagaaagcaacaatgtgattctcatggagaagcaaagcaggatagaaacatcagcttacaccaaccaaaataaggtgaagcttagaagaaaaacatgaccactgaagagtcacgcattaaacgacgagaacatgtactcaagatccttgtcttaagctcatgtgcatctattttctatgagaagattacctaaacacctatttagataagcttgatcctaatgtaacgatggaaattcagactcgtccacttttggaaactgggaaaaaatttcggggaattaacatcgatttgggtcatggctcctaggagaggacatggcctagctttgtgtttatgcaaacaaactacctgcattctaccagcacaaaagcacgaaaacaaacccaagttgcactatcaatcagactaaga

SEQ ID NO: 84360 - DNA, 489 bp, Zea Mays
cttaaccctgccattcaaaaagtatccaaaataaaaaaactctgatcgagctggcaagaagatttccaaagccaaggtcttgtctgcgatacagactgtacggcgttgccctcgttacgggctggctgacaaaggtggtagccggccgtctgtcacggtcacggtcacggtcattcatcgtcacaagagcctccatcgacgcctcttgcttggttcgagccatcgcaacaagaacaagagagctctacggacaatatcagctgacacacaaatcccccaacaccatccgagaaaggcccaactctgtattgctgtgcatgtggtctttaggcccatgttgtagttgggccataaaccggggagccctagtccccaaagttggaaggcccataccatgttactatcggatcgaaaggctcaatcccaatccatactgaaaaggccttgtgtgactggcaattgtagttggcctgaaagattgtcgtagac

SEQ ID NO: 84361 - DNA, 818 bp, Zea Mays
ccgaagggaagccacttgagtggattcctcgcctagcccaagactaagccaccataagtgcacgaccgcattaactacgcctgacactgagccgtggtaggagagccagtatgcctcccactcatgatctacgagcccctcagcttatggcgcactcatgacctacacgaccctcttcgtgcggtgcactcatgaccttttgatactaggcatgagtatgcagattatctacaggacctgcaacacgatgaggcacgccaatatctaggctatggaggccaggggtcggtgtggcatagaagtggtaatgatggcgccaggtccacgccacccacatcgtccgtcataaatgagtatgagctgagacaaccgggtgccaagatgaatatgaacaacgcaacttcaccatggtaaaacactcagttttaccacaacatagtagctctatcagtgtttcgaacctccctctgacaagtaaatttattgtgcgcgttctgggctccggacggtttgcgtggtaggtgcaagatttatactagattggacagaatgtccctacatccattcattggtgccttgcactaccggtaccattgatgatcaaagctcatagtaggagttacaagtaggagagagagggaggagaggctcccaagtctcttattcgtggtggatgtggttacaaggtacagtcctagctaagtcttggcttggtggcgaggctccaacctccgggtcctcctcctgttcgtcggtcttctgggcgtcgtctcatctggggttcatccttgtgtcgtccgtccaaaaggaaggaacct

SEQ ID NO: 84362 - DNA, 333 bp, Zea Mays
gtttgattaagcagccccctttgttaattcttgtacatttaacactgtgtttctgttatgaagttgtattccctgaaatgtgtgtgtgttttaatctttgggcatgaaccgtgaagggtctagttttgagtcaattcatgcagtactgcattgaattctgttgggttaataacaaacttctgtgaccctaataattattggcttgttaggttgtagttcctattgatcattggttcatgggtgtgatatttgttgctcaccttctaaaatgattgtgttgattgatattgacctgctgattacggcgagtggagatctgcacctggttctaaa

SEQ ID NO: 84363 - DNA, 682 bp, Zea Mays
ccttgtaggagcaggactcaaggtttttgtcgtttctaacacaacatccagcacattcgccatccttctcttaggagttgagacagaccccttttgtaccttcggcactcttacctctgttgaagggctcaaaatctctggcattttcgttatttcttcaatttttagcccttcagccttatcagccttcgtcccaactagcttgactgaaagtaacttcggcattacagccggctcttcagtgctctaggaagacggaacagtaacttttgtttcggtagctgaagaggcaccttcaccaaattcaggtatcacgaccggttcaatgtaacgcggccagtgagtcagaaccttcaacttcttgccctttggctcagctgtggtggccgaagcagcagcctttccataagcaacaatctttctttttaccccttgccctcgcaacgggtaacaatagtcagggtatacgaagccagtagcatcaaataccatgttcaaccttttcttattccgacccccgaaggctgcggacaaggcattgtcctcggtcttggaatacgctccaagtaactcgtcgctagtagcttcaatgcacttcagccagtcatcatttggttcatcaaacttaaccccaaacctaaaggtatacttcagccggaccaaaccacctttgctagagtca

SEQ ID NO: 84364 - DNA, 1374 bp, Zea Mays
cttgccttgtgttcagatgcgtctaaaggtttgaaaaaggcaatgaacacggtgttcccccaagctgaaaatagggagtgttttagacacttgatgcagaactatgtcaagcaatttcctaggtcggagtatatgtttccagcagtcagatcttataggatagaggggtttgactgctagttttttagtatccaagaaatccccaaggtctctagttggctacatgagcatcacgattgtttgtggcatcgtagtggcttcaatacaaccatcaagtgcaactatgttacaaacaacattgtagaagtgttcaaccattggattaaggagtggaaagacctaccggtttgtgacttggctggcaagataagggaggaaattatggacttgtttcataagataatgaggataggtcagaggctacatggggggatattatcctcaatgatacatgtcctacatgctagaataagagatctagggcacttaactgttgagaaagctgacaactacattgctaacgtgaggaacactaatgatgttcactctaagcacattgtgaatactcaagtgagacagtgttcgtgcaatgcagcatacaggcaagccttgtcaccttgtcctttgcttaataactacataggaatttagagatgtgtgtatggaatatggaagactttgtagatgactactactccatagaaaagttcttgaaggcttactctagagtagtatagccaattggtgacaaatcattccagccaaaagtctcatttgcatgtgaggtaggtgctccaatgggaaagcatgtcatgggacgtcaaaggaaaaattggattaaaggatgcttagaggccaggtggaaatggtacaaagaggaataagagtggaagtgtcaatagcaagaagaccattcgtggcaagttcaaatatcctaattatggtgaacttggccacaggaaagccagctacaaatgtccgtagaatggtactaagaagaagtatgtatatagtaaaacaaaagaacatagggacgaccaagggaagcgaggctggagtagaggatgaagaggccaagcagcgaggagcatagatcctaatctagcggtcgagaggatagtgcagaggggaggagagggggaggaggatcgaaagaggatgaaccctagccacacaagagggtagtgactcaccgacctggtcgaaacatggacgaacgagagcactcaccgaacggagaacgaagacgacacaaatggaagaatggagcgacgatgtcacgaggggcaagaagggaagaggaaacctgcaaatgacgatcagcagcaaagaatgacatatgttcaaagagcgcgggattataatgccaagaga

SEQ ID NO: 84365 - DNA, 319 bp, Zea Mays
gtcagatggttggaacatgcggggagtcagatagtttcagagttagtgcatacgagagtttcagatcataactccaaggtgggaagtttctcgtcttctgatctcccacatcttgtcaggtcctgtgtcttctgatattccttgtccacttagttctctgagcttgattatatatactttatcctgcctttgtttagtgagagagaacctttcaacaactattcagttatggccaagcattcatgttccaccacttgtgcacacatgttctagaagagtaggcatatgagttgactgtcgttctagcactcaccttctc

SEQ ID NO: 84366 - DNA, 1105 bp, Zea Mays
ctggccctgtaacaaccccacgaggatgcggccgtggatcggtccatggggggtataaacagggatggcgacctccctcccttgagcccgctaatctgaacccagacacctccttgcaacaggataaccggaatttagcaatcgtcacccgcatgggtcatactcgccgtcgtggccataccatcaattcgtcgccgttgtgtcgtcgtatgggtaccagggaattttatcgggatatctagatagtaacagtggagtcaccggggttggagatcgtctagggtgtctggaatgcgtcgtcggaggtcgaccacctcggtggagcctcggagcaccatggaccggggtccctgctataccactgtaggtaattcctcctctattgtgtttgatattccgccctcatcacttagcactatctagactcgggattgcggctttcggtgttggttggccattcacacgccatggcctccgccgcggatacgttctgtcgccgtgggtaaggggagaagacaagtctccgatcgtcgatccaataatgaacggaaaagattatgggagcatggcgcttgggcctggtgcgagggtggccatagatttgtaatcgtatgggcgagatgatagtatcagatactttgagtcctggctcttgatcggccgatgggcggtcgagattagacggtctcgtaccgattggaagagtaatctggagcccttggatggtgatctcgcggccctggtcatacacaggtgttagccgcgtcacttttactaaagaaaccccgaagaataggataatcaggccgcggtacacctctgtgtaaaaacaacactaccgttgggttgtttttattgcggatcagaccttggcctttcaaatattaattgccaccatccttggattttagtaattcatagaataaatctagaaaacgatttctagtagaaaagtaaatataaaaactcgtaaaattcataactctaccattttaactccaatttgacccgttctagttgcgaaagtttcgcaataaaattacctacactgtgatgacattatttgtaccataaaacatatcgttataaatagacagtggtcagc

SEQ ID NO: 84367 - DNA, 735 bp, Zea Mays
ccagcgcctgagtttttattgccgtgcggggccggaactctatgtcgtgagctcccagctcgcatgcccacttggctatccttccaatagcttctttgttatggagaatatcccctatcggaaatcctgtgactactatgactttgtggtcgtcaaagtagtgtcgaagcttgcgagcggttagaagtaccgcgtacaacagcttctggacttgaggatactttatctttgagggcctgaggactttgctgatgaagtaaactggatgctacagtgggtatgcatgtccttcctccacccgctcgactactaacgtggtgcttaccacatgagtcatgcaggagatgtaaaggagtagatcttctgcctcctgactaggtgtagctcagcgtggtggcttgagtactggtggtgtggtcaagaacttcttcagtgcctctagagcttcctgtgcctctgtggtccactgaaacttgtccaccttcttgagcaacttgtaaaatggcatccctttctcgcctagccttgatatgaacatactcagggctaccatgcatccagtaaggctttgcacctttttctgtgaccatggcgcttccattctcatgatggcctcgatattttctggatttgcttcaatgccttggtggctgacaatgaatccgagtagcttcctagccggtactccgaagacacacttttttgggttcagcttccatcggtagcgcctcaggc

SEQ ID NO: 84368 - DNA, 445 bp, Zea Mays
tgggttatagctagctatagcttctagatatatgtgtgctgtagctctgtgactgaaattgatcgagagatctcagttgcatgcatgcacaagggccggccgtgtgcatgtatgagccccgaacccgggcaacggcaacgcaatcatgggaggttcgattgatagatagatggataggcatagctgagattgctagctgctgttacttatcaaaaagtgacggcaggaggatcatgtatgttgccgacacctgacccaattcactagtacgtagtaccactagccgcggtacaggcattattcaattaccagcctagaatgcgcctagttccatgcaatcaatcaacttgtggtgaaggcacgcatataggagtatgccgaagcaagaagatcatacagccaaccaaacaaatgtatgcggcatgccatggaacttgtccaaaac

SEQ ID NO: 84369 - DNA, 345 bp, Zea Mays
ggagccgggcgggagacaggcaagaagcgacggcaggcacgcacagcacagtaactacgagacagacacgacgacacgagagggaggtcggtgctatagctatcacgcgctgtacctgtacctgtactgtacagtacgtgcagtacccctctcctagtaccttgtcacctgcccgcgccgatcgatcttcattgctcgttattagtacagtcgtaagcctagcacgctggaagcatgatcgacagttcgacatcgattagacaaaatagaggacggtcagaacaatgatgtatgtactcctacgttaccggatctacaatctgtgtcgcacaccatgtttcgaac

SEQ ID NO: 84370 - DNA, 478 bp, Zea Mays
atgccacagtaactcgcgccagtgacctccctctctatagccacccgcgtgtcttcaccaaaattgggctccacagctgataaccactataaattgagcgttcggctagctccgttaggttgttacgcgcccagtgcaccagccctcacctctgattagccaccgtagctcgcgaatttcaaactttccccaaatcggtcagaacgccgccgtgagacatctcgccgtggccagccccctacaggttagttcaagcttatctgcttgatgttctagcctcccttaagtctcctattgctcgtagacccgtttgattgagctagactgcgctaaatcaccaagaacatctcgatttcccctcgggtttcaccgtcgtcgtgggtagaaaggctccgggctggaattgtgcaatcgatggtcggattagagtcgccaagggtagaaataggtgtcgaccgagttagggcatcagttgttg

SEQ ID NO: 84371 - DNA, 358 bp, Zea Mays
ggaggtgatcggagaccttctcagggcgctctggagtcggattgtcggtctggcaccaggaattcctcgccaagcgttgtccatcaccgtgtaatcgccgcagtaccgcctgcgctgtggccaagctcgccatctccgccctgacttctggtaagtgcaccagttcgctcgttacatccgtggggccgtgtaaccccaatagggcagcagtcgggtcggtggatagtggtcgattgctcgccggatttttgtatgcgtcgctgggccgccattcatggtgggaagctcctcagcgtcgaccgacttactggttcggcctccagattgttcctaattgtcgccagctcggtgtagcacc

SEQ ID NO: 84372 - DNA, 503 bp, Zea Mays
gacattttagagcaaagaaaatggaggacatacttgatggtcatttcttttggcccaagatgagaaaagatgtggcgagatttgttgctcgttgcatgacatgtcaaaaggtgaagtcactgttgaattcaaacagtttgtatttgcctctacctgttcctagtgctcattaggaagatatttctatggattttgtgttgggattgcctaggactaggaagggacgtgatagtgtgtttgtggttgttgatagatttttctaagatggcacatttaataccatgtcataaaattgacgatgctactcatattgatgatatgttctttcgtgaaattgttcgcttgcatggtgtgcccaacataatcgtttcttattgtgatgctagtttcttagtcatttttggaggactttgtgggcaaaattggggactaagcttttgttttctactacatgtcatccccaaactgatggtcaaaatgaagttgtgaatagaactttgcct

SEQ ID NO: 84373 - DNA, 752 bp, Zea Mays
cacggatccgcggagatggtaagtaagggcgcccggacgtcgacgtgcttaaggactgccgcgctgatgacgtgagcgacagccaatcctggctgtagcacgaatctagcagagggtcacggctacaactgatgggttccctggtgtaaatcgtccgcacggcttggaaaaatggaggggaaggaaaggacggtgctcgtcttctaataacggtactagtgctcccgatgcacagcagagaagacgcggaggtagttgtagccaccccctggagtccgcgccgccattccgggcgaccgcaacagacctgtggagtgcaggtgggctccgagctagaggcagtgagatgcgcgcgcccccggcggatgcggccttcagttacgaggatgaagaagcttactgctggcgtgggacccatgcgatagtgcgtgcgtgcggtggggagtgaggctagcgacgtgggccagcatggcggtgagaggaggtcaggcggctagggttttggcgtgtgcaagcgctagtgggctgaattgaggagccaagcccatttaggtttcttcctcttttctttttcttttcttatctgttttccttcctttttatttttaaatcccaaatttgaatccaaatctttgttgtgaatttgtactttagattaagtattcaacccaaggattccattatgaaaaggcacttttatttacatattttcttcatattgtatatagagttttcctattcttttatttttc

SEQ ID NO: 84374 - DNA, 311 bp, Zea Mays
gaattgaagcagccgaacgaactggtgctgatcgaaacgattgcatgcatgcacctccgaaatgccggaaagtgtcgtgcgtatgctatgcatgaaaccattgattttattgttattaattattaggactagttaattagcagtgacctatcattgagcaatccaccaaagtacttactagtagcagagggcaaaactttcctcgaaatgatgaggtgcataagtatgcatgtgtgagaaatgagaatggaaccaggcaaaaagactttgggaaatggattaataattaagtagtggtgacaagggggggc

SEQ ID NO: 84375 - DNA, 379 bp, Zea Mays
aattattcccacattaagtgttttaattgtcacattagttccgtgattacgcggctgattacttgtctattttttgtcatgttgtgtgtacatattaagggcgagacgtcgtccctcagtacatcagacttttttccttctcacactagagcgctaagttggcttcgtctttcccatcccgccgccgatgtgttatcgggtcgggagagcatgatctccgaagtctacgtcccctcgtgtccctgcatagggtagaggtcgtatcaggttttttgggaagcgccgtcgcgactgctcgttgttcgcttgctttctttgcgacgacgtcgtcgtcctcgctggtctgctctgtctactcttacgttgttctagcgtcgac

SEQ ID NO: 84376 - DNA, 522 bp, Zea Mays
caaagttgtatcagcctctaggaggggcgccactaccaacgccccagcaggagcagcgtcggaagaatcctcagccagcaaatcaagcatagcacttatctcaacatcactagggttcaagggcacctcaaaatggacttgccgttcatcatcaggaatctccccaagcgaagcaaccaaggcactaacttcatcagcagagggtcgcactctaaggcccaaactgccatcagtaacaggtggattcgacacaaaaagggtgaaggctttgggaggaggcaggttccaggccgagtatgccactggagcaccaacatttgacactttgcccctaaggatcatctcaagtcggctcaccaagtctgcagagggaattcttctattggtaacccgagttgagtcggctagcccacgatacagataagctgggtatgccctgtctttcaatggctaaatattcttgaaaacaaaatcagtaaccacggcttcagcagtcagacctctctctttcagcagtccaac

SEQ ID NO: 84377 - DNA, 575 bp, Zea Mays
aaaagcgggaaaagaggaaagctaccgctttggccatttttgttgtgccgaagggcaagaaaatcaaagttttgacccacaggcccagatacattgaaacggccatagtgccgaaatttggtgaggagacatcttccgctgccgaggtggaaccggctgctcccgccgctctgagtgctgaagaatcgactgtagtgccgaaggtgcctatagtcgagccagtcgaagccgaagatgagacaactagaaagccagagttagaaaaggcaacagatctgccagaaattctgagccaactagtagaagcggagctaaggttgtaaaagctcctgccaccactcccaagaggagaagaatggctagcgtgctagacgccgttgtggaaacaacaagagcgctgactcctgctcctgtgaagaaggttgttgaagctgctacagcacatacggaaaccaaagctgggccctcagtgcccgttgagacgaagctcgccgcaaccgagcagagggccgaagaagaatctccagatactggtgtagctctggagaaaagtgtggccaaagaagtcaaatccc

SEQ ID NO: 84378 - DNA, 625 bp, Zea Mays
attaagtcaaccataaagtctattcccattatcttaaggttaacattggagcattgatatgtggcttctatttcaccttctggtaaactaacaagtagtttctttcacatagaatgcttaggagtgttatgttttccacaaatatttcagttatgaaagagtgtgatgctcctgtatcgaacaaaactgaagtgggcattgagttcataaggaatgtaccaagtacaagttctggttcctcctgagctttcttagccgtgatgtgattgaccttgactctgctctaactctgttggtgttttccttgggtgttgcgtgcaggcatgttttggtcaaaccttgcattattgttcctttgaggtgtctgttggttgcgctttgggcatttgttagcaaaatgtccaagttcaccacacttgaagcatcaactaggttggactggagtagttgtattgttatttttggtcggtgtgttcacgacgcttccttgacgattttgttgataaccactagaccttggatcggtctgagagctatgcctttgttgattttggtactagttgcttctctgtccttgttgtctagagcattgcatttgataatttttatttccactctgatttct

SEQ ID NO: 84379 - DNA, 740 bp, Zea Mays
gggaagtagttcgactttgaatctagttttggcacccgtcgaacctagctagcgctagggtcgagagtagaggacatcaagggtggagaaagccggttggtgcgacctatgggggagcggtggtccagtagggccacctatagggcggcggtggtccaacgacctagctgtcttgctacgcggaaaaggaaaaaaggtgcgccaaaggaaagggagaaataacatgcgattgtgaagaaatcggcgtcaaatacctttaggaagtgcctatcattttgccaaacttgaaaagtaaataaaattggatagtgtgggggacagatgtccccgggtccactagaaggcgaaaactctgcttggggccacaagccagtcgccccgcaaggttgctgcgtcgtgggctaggcaaagacaacagtggaaatgggccgacccaggaaggcgatgggctcacgtccggattattcgcagcttgggcgtgatcttgttgaagttgctcgcttttcctgcgcctgacatccttgaatgccatggatagctcagaacaattatgctgggttttcctcgagataagcaaagtatgttcactattagctagaggataaactggaagagtatgatcagcatgtacgcgggaagtaccctatggtcgtgtatataaggccaagggggatccccatcattttcatctcattcgcacctcatcattcggaagacaccacttgtaaacacctccagca

SEQ ID NO: 84380 - DNA, 857 bp, Zea Mays
aagaagcacaatggtcgtgggcgaggccgtcgagagcgttggctccgcatcacgcgaaggctacaagggctagtatggtgatggataggctcccaaccatgaccaatgcaagcgccgtaaaaaatggccattgtgctagggattgtcttagcaagcccaaggacgaggcccacatcacgcaaagagacttggagtccacgttgtagatgtcattaaagaggacgtatttgagctgcttagcagtatgatgaggaggaggcttagaggtggagttgtacgtagtcactattcatccccaaacgaccaatattctttttatcgttgtcgtcaacaggttaaagtatggaattcataaaggtgtatgtgtacttataaatattttgttcttcgtcttagtttagtcttgtcacagttgggattgtaatacattgagaaacacatactagttggaggctacatcattgtggctgcttagtggaactatcgtgtctgagggagcacgagaagaggcagggacaccatatgtgggaggagtaccataggtgggacagaacacagaaggagcaccataaggaggaggatatagagaaggagcaccatacaagccatatggaggagcgtatgcgcacaaaagatgacactcataagtaaaagtttgtgaaggacgagcatcagtggaatgggggatatgggggaggagcatacgggtaagaaaagagagtttgaggagttaggctatggggacgattgagagcacctcgaggggggtgaataggtgttcctgtaaaatcaaatactaaatagccacaaacttgattattaagatgttagtaaaatcaagtggctatggaacacgc

SEQ ID NO: 84381 - DNA, 1019 bp, Zea Mays
gggggttacgatatgatcctcggtatggattggctagaatgtcatagccctatggctgttcattgggcacaaaaatggttggagtttgagtatgaccaaagaaaggttcggttgcagggagtgctgcccaacacacaaacctgcaacaatatcacctgtttgcagctgaattccttgatcaggcaggaaggagtcgagcagttactcgaattgcaacaaatggaacagacagcagcaactgaaattccggagccaatcaaacaattattaagtcattatccacatctgttcagtaaaccccacggcctaccgcccaaaagaacagttgatcatgccatcgatctgatacccggtgcaccacccttcaggctaagaccttaccgctatacacctcaacagaaagatgaaattgagaaacagatccaagagatgctagacagtggcattgttcaacaaagttctagcccatttgcttcgccggtattgctagtgaagaagaaagatggagaatggcgcctttgtgtggattataggaaactaaattcatatacagtgaagaatcggtaccccatgccgatatttgatgagattgttgatgagttggctggtgcatcggtattctctaaacttgatcaccgctcgggctaccaccagatcagactgagagaaggagatgaacccaaaactgcatttcaaacacaccatgggcattttgaatatcgggtcatgccctttgggctgacgggggccccagccaccttccaggattttatgaaccagttattagcatcgtttcttcggaagtgggtggtggtatttctagatgatgtgttggtgtatagtgctacgatggaggagcatgtagggcatttgaaacaagtgttagacctgatcagtcagcaacaactttatttgagggaatccaaatgtgtgttcggtcaggcaaagttggaatttctgggtcatattgtaagtgcagcaggtatcactacagaccccaacaaaatcagagtgatcag

SEQ ID NO: 84382 - DNA, 405 bp, Zea Mays
aagtgttatttgatactggagcaacacattcattcattactgcatcatgggtagaagcacataatcttccaataactaccatgtcaacccccattcaaattgactcagccgatggtagaatttgatccaatagcatttgcttgaatgtaagtgtggaaataagggggatagcatttcccgctaacctcatagtaatgggtactcagggaatagatgtcattctagggatgaattggctagataagtatcaggcagttattggttgtgataagaggacaatcaagttggtgtccccactaggagaggaagtggtgaccgagttagtcccgcctgagccaaagaaaggaagttgttatcagatggttgtcgatagcagtgaagcagacccacttgagattatcaggg

SEQ ID NO: 84383 - DNA, 913 bp, Zea Mays
cacaagactaggcgaccttccccgacaacctccagaggtcgagtgacggtgaagccttgaatcgactatggtagcgacttctctctccctctcatcggcaccaatggcgattccgttcttcctctcggtgtatcagctaagagatcacggtgggcgcatttctatatattaacagctatatattaacagcgggagcatttcttgcctgccgtttgtccacgtcatcccatctcaactgagccgtaagattctacatcgacggggcagcatttcttgcctgccgtttgtccacgtcatcccatctcacctcagccgtaagattctgcatcgacggctacggatttctatatattaacaatgggagcatttctgcctgccgtttgtccacgtcatcccatctcacctcagccgtaggattctacatcgacagggcaatatttcttgtctgccatttgtccacgtcagccatctcacctcagctgtaagattccgcatcgacggccacggatgcccctcatccacgtgaccatccttcgtataaggccagctcgtcaattcctccagagcattccagaaaaaggaaggaagcagatgggagtaccctgtcgagttcgacgaaagcgacaacgcttctggtcttgagcgcctccctccccgttcactgcgcacattcttactactatcgattccacgccaacggcccacacccacgaatgctcaatcgtcgtatgtagccgacggcgaagtcgtacctggcgagcgaagcgataggtgcgtgtggcatcctcagccaccggacacgaaggattgaaagagcatcggtcatggccacatgtcggattgctttgctctgacctgggaatccgcagtgtggctctcgcttgctgactacaccgaagacttctgccgcgag

SEQ ID NO: 84384 - DNA, 290 bp, Zea Mays
gtttatctacaggagactaaaatgcagaatatctcctaccataccattctttccatgctgggttctaatttcagtgaatacattttcctccctgctgttggagttagtgggggcattttggttgcatggagacacaatcttaaatcgactgggcagagcagaattgataaccatagtgtgtcggttcagttttgtaaagagaatgggactgcatggtggctaacctgtgtgtatgggccgcaaggggatgctgagaagctgctatttatgcaggaattaagagatatcag

SEQ ID NO: 84385 - DNA, 400 bp, Zea Mays
ggatatatggagagtagcatgaagcagtatgcaagacctgcttcggctgattctgtcgtgcctcgccttcagcaattttctttttcttttggatcatgacttgacacgtcctcgttgtgtgtcccttgtccttgccacagaacgggcagaacaatttttctgggctgattaccttaccttcctctagcaaagcttctcccgctctgcctctcggggctggtggtctgtaagaagtttgctgcaatgcccaaagattgtgagctgtgttgactgctttgaacattattggccctatcatcgttggcattgggattgtggattgtcctgacatgcttgagattaagtctccctcgaaagcccctagtcatctcagaatacctatatgcttcctcccttattt

SEQ ID NO: 84386 - DNA, 526 bp, Zea Mays
catgtttgaatgaaaatttgaatttggagatttataaatttaaaatttaaaacagaaaacaaaataggggattagaaagtgaaaaaaatataaaaagagaaaacacttccctcggccggatgggccaaatccacccggcccaagaacacacctgcctttcgccccgcacatccctacccgcgtcctccgctcatggccactgcctggcgggtcccacagtgtcagcctccctgctcgcgcgcgtgtcttctgttcctgacaagccggccacaccgcgcgtatcgcgcctcactctgtcgccgccatggctctatgactgatggggccacctcgacagctcagtcgtcctcctcaacagaccgcgatttctactccgtgctgcggactcgatgcaaacagaagcgcgtggagatcgcgcgggccagtcgtcggttccgcaacctgatcttcaccactctcccccgtccgtgatcttcgtggggcggcctataagaccatgccagcgcctctcgtccagggaagcaag

SEQ ID NO: 84387 - DNA, 1101 bp, Zea Mays
tgtaccgatggtcatcgtttggccccttccatacctccccgacactccctgggtcaggcgtgctctatgctccctcgcttattttcagttccaacggggtgggatccgctcctggcccacttcagacttgatcagttgtctcatagaggcgtcgttggttgccggcactgtcgtagcgctctagtcaaccctcggcactattgtagaggtgtcgttggtggcaatctctagcatggcgggtcaagtggagctaggactgacgccacgacgcgcaccgcagtgtcagcgaggctcccctcgaggttccctaagagcaaggaggggtccttgatcggtgagatcacgagacattctcgagtcgagatgtggctagtcccatctaataggaaaccgggtctgtctcccgaccctgacagggggtagccaaacgacggtccctgaacaggacttgatacctcaaaggccttgtcaaaaatgggttgtggtgagcctggctgcatgctcccaccttccaagtgatcgaggtgatgtcaagagactcgctcgtcctaggagtctgggcttcggaggccttgttcatcattcctttgttgccgagggcgttggcagagttcctaaagcgttcggttgctccgagagcccatgctacgccaacatcaatttcagccatctagagcttggagaatctcatcgtggaatgtcggtgtttgtgacaccgcacaccccggggttaccctcatggtgcttttgagtaggatggcgtcattgattgtgactcgatggttcatgcgatatcacgatgagagaaacgctcgggcttgaacaggttcaggccgcttcgagaggcgtaataccctacgtcctgtggtggttttctgtattgaggtgagttacaggttgtggctatgagagtggtgggttgagggtgagatgaaaatggtaggggttcctcctggccttatatatacaaccagagagagccccctgcacaggtgtcgattacaatctccttgcttatctcctgatttgtagcgaacagtcttcctttatactatggaaatcttgcactcacgcgtccgagttattgctggtggtttagtc

SEQ ID NO: 84388 - DNA, 309 bp, Zea Mays
accgctgtgatggcgacatactttcatgtggccttgtctggacctgcccggacctggctcatgaacctcaccccggggtcagtctactcctgggaagagctctgtgcacggtttgttgcgaacttcgccagtgcttaccagcagcacggtgtggaggcccacctccatgcagtgaggcaggagcccggggagactctccggaagttcatctcccgcttcaccaaggtgtgaggtactatacctcatatttctgatgcttccatcatcacggccttccgacagggagtacgtgatgaaaaaatgttagag

SEQ ID NO: 84389 - DNA, 760 bp, Zea Mays
gcgaaaagaaagagggttgtgagtattctgaacaggcaggctatccggtccgtcaaagaagatcagagggctgttaagaagcagaaagttctagcggagccgaaggattcggctcccaagaaacgaaaatctgtcaggatggttcctgctgagacaaaggtacaagatgtaccagaaaagactgcgggcccttctctgtcttcctctctcaatgttttagaaattctgaaggtaatgactgaacccttcgcatttgcaatgctaagtcctttagggttagatctgactagcctattgcagtcaaaggagaagggatttgaacaaagctcgggaggaaaataaactgctttggctaccgagggaaatgccgggggttagtagaaacggcaaatgatggatgtaatgcaagccatccagaagaccacgccctcggcttcggttaaaaaattgatgtacctgctaatgctgaagatattgccaaagctaaagctaataaagccagagctaaagctgagaatctcgggaccacaatgtcagagattgacagatttatatctgatgtggctcccgagaaagacatagccgaagtatccactaataaggcttcggaggccacagagttggacatacggcacttgggcggccaagaactatcggatgaagatatttttgaattgaaagaattcgcccttgcttgcggatacaaacccagattcgtgctctttggcgatgtgggcgaagaaattttggggtgtattcc

SEQ ID NO: 84390 - DNA, 592 bp, Zea Mays
aaaggggagggtcatcgaggtttgctattcggagctctcattgctctacttaggatacaatagaagttgatcgactgcgagcagaattgaactagcagctagagcaacaaagggcccaagaggaatacctgaggcaagtttcacaacaacatgagtactatgcagcttagttgtcatagcagcaaatatttattcaagtaggtttcaaagttaatagtttatattttaagttatgcattgatttgaaacactgacatgacaactcaattcggcacttccatagcaaatagcacaagagtaggggatacaagtcctaatggctccacctcctgtatagtttctttggccttcacctagacctcatgtatgcgacttcatcaacattctattataaattgcttctttttagcataagtagatagtttgcattatgctttgctaaatccgatgaataatttgtttttactcatgagttagttggttatatgggttatataaacaaatatgagttagttggttatattgagatgtaactcattgaatttcatttacacaggtgtaccagacctctccacctaccttaccaacactg

SEQ ID NO: 84391 - DNA, 288 bp, Zea Mays
ttgcaatctagaggggcaagataggtgtcgacatatttgtctcccacatttaataatgatctccgattcccaaaatgaaagattcattgttccgtattcctagcacaatgatattgcgcgcattgctaggaatttcatcatcaagatgaacctcttcgtgaggcacatcaccagcagggtgagttcatcggaggagagttatttacagaccacgtgaatctgcaatcagaacatatgctttgactaaggctaatggatcatattcgcaggcgtccccaagaatagatc

SEQ ID NO: 84392 - DNA, 852 bp, Zea Mays
ctcaacttcttgctcgtaggtggcttcatcttctgtgtgatgactccattgtactttgcacatcttaatcactttattccttgtaacacgagtcaaggtatcaatgatcttgataggatattctgtataagtcagatcaccttgaacactaagttcatccatagttagttgctcttctggcaccctaagacacttcttcaactgagatacatgtaagacatcatgtatatccgctagatggttgggtagctccagttgatatgcaactgcccccactcgctttaggattttgaagggtccaataaagcgaggggacaacttacctttaactttaaatttcctcatacaccgaattggtgacaccttgagatacacgtgatctctacagcttttctgtctggactgcgcagttctcaagttctcccttattattcgaatttgttcctctgcttcttggcttattattggcccaaagaactgcctttcaccagtttgatcctaatacagcaggattctacacttccttccatataaggcctccaacggggacatcttcaaactggcctgataactattattataggagaactccgcatagggtaaactcttgtctcaactgccatcgtgcttaagatcacaagctcttaacatatcttctagcacttgatttgttctcttggtctgcccatcagtttagggatggtaggctgaactaaagtttagcttcgtgtccatactctcatgaaggttcttccaaaatcgggaagtaaactgagatccacgatctaaaactatcttcttaggtaccccatgtaggcacatacactacacgacggttgatctttagcgacc

SEQ ID NO: 84393 - DNA, 417 bp, Zea Mays
atttatttggacatttggaaatttaggagttcaaaacatgagttgaatgtgaattgaatttaaagttagaaatcagaaaacatgaaaagaaaatagaaatgaataagctagcgcttgggccaaatctccttcatagcggcccactcatctcctcaccttgggccaaatttgcctagccgcggcccaggttggaacatccgcgtagtccaacgcatggttgcgcaccgttgacgcgcgcgttcggtaaatgccacgcgggccccacctgtcagatcttccacctcccttcatatctcgtccagcacaactaacgcccgaagttctctgctccaaagctgttgcgcaaatccggggaggaacttgactcccccgcgccctagtccatcctccctccgcatctggcgtaaccgaactgcc

SEQ ID NO: 84394 - DNA, 555 bp, Zea Mays
gtttatttaggctatccaaagtcaggtggctaaagctagctcatagtgtttctatagaccaatgctcatcgtaaggagggcatgcacaacaacttcatgtgctataagttctagtatcaacaagatacatcgacactggtactgtcttaccaaatcaagtgcccgaatgactaggcaaatgagtggttttattacaaagttgacttgacaaaatgctccgatatgaaggagttgatcatgagccccatgaggtccaccttgacccttgagcaacctttttatacaattctagaagcgttgcacaaacaacaatgattgcttacaatatcatctatgagaatatgcacacacacacataggacctagtgtaggaacacataacataccatgtgttccccatcaagagtgggtggtcggtgccaaagcccaaaggtgaagaggacaccaagagaaaaattactaatagggagctcataatgattgaaaaggagtacatcacttttggggataattctagaggtaaggttatctctcgaggcaccattcaggtaaatg

SEQ ID NO: 84395 - DNA, 423 bp, Zea Mays
atccgcactagggccagtaatgcgacccgattcatagagtactttctccctgtcagtgcactgggctatgttgagcatcttttccatggactttaactagtcatcagcctgtagtgggtctgaggagttagagaatgttggtggcttttgactcataaactctcggtgcttatccctgagcggagttggtggtggtggaggtggtagttgttgtcgttcctgccgttcttgacacatttcttgacgttcttgacacatttcttgtcgttcttgatggatctgtgctttcatttatgtcatcgtgttgccatttgttgtagtagtcgcatttgagcagcagccacgtcatcaacaggcgggggattcagaggaggattcatttctggttccggattagctacaacccttcttcgacgaattcgt

SEQ ID NO: 84396 - DNA, 477 bp, Zea Mays
caagttgttttttcgtgtgggccgtgggccgtatggtgtgtgtgaggtcaggctagcccatgaaggggtggagttataagctgtaaacgaacaagagagttataaaagaacagaatttgaaattaccaccaaactcgcgggttgtcctcaacggcgacggcgattctagctcccatcccggtgatgctcaccgacggcagggtcataacaacttgacagcgccgatctagacgcctatcattgtgtaccgacggcggtgctctctacgacgtcgtagacggtccacagccgagggtcggatggtccacgacctacggcaagagcggagttccctacatcaagccagcagatcaagccagatgctctgcggctagttgatggacggtccatgtgtgcatatggatggcaaagttcaccaacggcatctggatctcacttcccgagagaagagatcataggtttgtcttgtgatcgaca

SEQ ID NO: 84397 - DNA, 737 bp, Zea Mays
tagtgaggtaacttggagtttttgaatcattcctccgtttgccttatctgtgaagtcaattcctctggagtagtagctgagtcattcgggcatcatatcgtcgcttttaggggtggtggccgagttattattgttaacatttacgcttcttaagtagcgtccaaatggtgacgaagccacatcagcgttttagaattaacgtttgagtgactgatgaccacgtcggcgcttttagatgtaacagccgagtgacttatgacgacgtcggcgttttagagataactaccgagtgattgaagacgacgttggcgttttagagataactgccgagtgaatgatggtaacgtcggcgttttagaaataacagccgagttagaacgggctgcgtcgaccactttgaagataatagccgagtgatgatgtggcacaccggcgttttttagaaataactgtcaggtgatgacatggcatgccggtgttttagaagtaaccgtcgggtgatgatatggcacgccagcgttttatatataaccgccgggtgatgactgggcgctttttggaaatggtatccgacccgggaaaaaccccatatgtactgcgccttcggccgcctctgctttccgtgccctagttcttgctttcctgcctccagaccttctctgcccttttgcaattcggctcccgctctgctcgccggtggagttgagatggcacccaagcgaaaggcctcgagttcg

SEQ ID NO: 84398 - DNA, 512 bp, Zea Mays
gagtccaggggctcttttagaaaacttgataggcgcactcttttgggccatccattcgtgggtcaacggcccagatcagaccacaaagcggtatgcgtatattctaatcacatttgtccatcctagatcgacggctaggaggccatctcctttcccccgaccgatggagcggtggcgcggtttgccagcgaaacccatttctggcccagatgccccgaactcgaatcagaccggtgctacatgaaatagattcaatggtgaatcgatgggtgaagttcttactgggaatcggatgctggtgtgtgccgtccacgacgcggggtggacgggtgatgcttgttgaactttggcgagcaattcgcatcttcaccgccaccatccgagcgtgcctccgccacaaagatgctcggttcgatcctacgatgctcctaagccacatgtccctgcagaatcgatggtgcacttggatttcgccgcggcgccgaccatttccatctcggtctctctcttcg

SEQ ID NO: 84399 - DNA, 817 bp, Zea Mays
gcagtttctcgatgtatcaatgaatagtttgaatgggtccataccacaagagcttgggaattgcactgggctactgtcattgcttgtcaaccacaatagtttgagtggagaactgccaacgaccttgggtaatctggggaaccttcagattctgttagatgtgagcaacaacaaactcacgggcgagctacccggtcagctcgggaacttggtgaagttggagtccttgaacctctcgcataatgaattcaatgggagtattccacactctttttccagcatggttagtttgtcaacacttgatgtgtcatacaataacttggaagggccccttccaacagggccactattttctaatgcttccataggatggttcctccacaacaatggtctatgtggtaatctctcagggcttccaaaatgctcttcagccccaaaactagagcatcacaacagaaaatcccgcggcctggtgttaagcattttgattcctttatgcatagttactattattcttgcaacctttggagtaattatgattattcgtcacaaaagtaagaggccacaagggactacagccacagatagaagagatgtgctatctgtttggaatttcgatgggaaaatagcatttgaggatatcattaaggcaacagaaaatttcagtgagaagtacatcgtgggttcaggagggtatggcactgtctacaaagctcaacttcaaggggggagattggttgcagtgaaaaagcttcatgaaactcaagaagatatgagcgacgaaaaaagattcataagtgaaatcgaagtgttgacg

SEQ ID NO: 84400 - DNA, 798 bp, Zea Mays
caagaatgtattatgagtatatataaattacatacttagaagcattcatttaatgaacaagataaagaagtaaataaacaaatatactttcatatttgcattctcgagttttattatgattgtgcatgtaaatttgattcatgaacctagatttacatttgaaattcgatttgaatctagttgggaatagaaaagaaaaaaacagagaaaaggaataaagatcttacctgcctgggcctagatccccaaaatagctcagtccacaaaaccctagcacatcacctagttcgcgcaggctggcccacaacctcccagcccggcttggtgtgcctgcacgttactctatggctgacagccgagccatcacatgtcagcttcccttgcctttgctctgaagtcacctcatgcgggtacaacaaccactccctcgtcgtcactcgtgtgtgggactcggtggtcagttccatctcgatcgtatctcaacaaattcaccgggagtcctgggtcgcctcactagcgcgcgatccgcaatccaggcgccaccgacctcctctcctctgtataatgaaggcctaggaatctcctttttcttccccacccggccatgcttcacagcagccattatcatatagagagcgcagaggggtgccaccgtggaacgtgcatgagagagagagccgggggatggccgaggaactccaccgagtcgccgcaaccgcgctctgcgccgccgccatggagctttgcgtgcggggcagtactcaccaaaacatcagaagtcgcacgccgagctgtgcg

SEQ ID NO: 84401 - DNA, 551 bp, Zea Mays
tgattcttggacattgtgaagattgtcaccttagtatttaattactttgcacaacaatgaaagggtgagaaggagcttcatacggtatatatgctatcactcttattacttagttccacgagtagatatgatttctaaaggtttgccagaccaacgccaacggtggtgacatcaagtgggcattggttccacattagtatgactggttgaagatatgtgaatatgtcagatggttgaacattcatccttggtgatggaagcagtgatttgttgaattgcatcatgcctggccatcaagggtgttaagttacaaccagggacttcggtgcgatatctactttcttcaccagttcactaatggagcattatatcagttgttgctgatgcatacggtttacttaactgttcaagtaattaattgattatgatacagtcgtcaattggtgtccatgcataagtacttcctctgttctcaaattattgtttactttgtctttgtcctaagtcaaactattttactctgactaagtttatagaaaaatgtactaaca

SEQ ID NO: 84402 - DNA, 554 bp, Zea Mays
gaggaagaggattgtcagtattctaagtaggcaggttatccggtcggttaaagaagaccaagaggctttgaagaagagagaaactgtaccggaggcgaaattatcggctcccaaaaaacggaagcttgccgagatatcctctgagaagtcgaagatgcaagatgtaccaaagcagactgcaagcccttcttcgtcttctactgctgaggtctcggagatattgaaggtaatgactgagtctttcccatttgcactgctaagtcctttgaggttggaactgactagcctcttacatacaagggaaatctcttcggctggcaaggggaaaatgggggctagaagaaacgacgtatgatgaatatactggaagccattgaacagaccccgccctcagcttcggcagacaaagctactaaatctaatgatgccaaagctaccgtcgcagccgaagacgaaaatctcacaaccacgctgttagaaattgacagacttatatcagacgtggttgcggagaaagaggtagccgcagtagtttttgataaggggaagaaaat

SEQ ID NO: 84403 - DNA, 442 bp, Zea Mays
gacaatatgaattgaactcgatgtttaaggtttggtgaacgaatgacttacttgtgatgtgtttgtcactttgaatcgatacgtgagctatgatgatctttgagaattttggaatgtgatgtgtttgatatatgtgagttgttcatgatgtatgtgaatggatatattttttatgtgtgttgttgggtttaaattggatgagaatttggtgttgagttgcaacataacaacataactctcgtcggttttactatagccaatgagagttattccgttactatgataggctagctcccgatggatggtaaatccgacgaacattaagggatgatatggcactacttcgcttcattcccatcggagacgtaagccgactggagttattgccctgagcacaactaaattaaataaacctcgttggttctggtagaggagaattaaa

SEQ ID NO: 84404 - DNA, 971 bp, Zea Mays
ctcttcgacaggtgcagccgggcggttcactcggcatgaactctttggacgggcacctttgggtttctggatctccacatcttcaccaaactcttgtccagccgtgatggccatcggctcaatatgagtagagtcaaacgattccccggccagcaggctaagcacgacatccatctcagcatcatcgatgctagctgacatttcaaagtgagtttgcctctcagcctcgggaagactccgaagtggggcaatcaaggcctcaatatcctcaggggagggtcgcactctatggcccgggctaccatcacgagtaggagggttggagataaatttagagaatagcctatctagaggcaggttcctacccctcagaatctgagaccctacccctcagaatcatatccaatcggctcagcaaatccttactgggaatctgtctgtttgtgacccgggtagaatcattgatgtcggtatataaataagcgggataaactctatccttcaagggttgaatgttcttgaagacaaagtcagcaaccacgacctcagcagtcagacccctatccttcaacaagcatatttcagcaagtagcactttggcctcggttatctctgaaaaggtgggagattctacccagctgggtgtacgaacgtctggttgcctccttgaacgagggggagggatttgcagtgattttccatgatgaaccactcaagacgccatcccttaatgctgtccttgagggggatatcgagatactccactttcctcccccggcgaagctctaaacttgcgccgccgacaagatgatgtttccctccagccatcccgggccgatagtgatagagatacctccagagtccgaaatgggggagaattctaagaaaagcctcgcacagatgtacaaaaatggcaactttaagaatagagttagggtttaagtgtgccagatttaagtcgtaaaaatcaa

SEQ ID NO: 84405 - DNA, 300 bp, Zea Mays
cacagtccaacgacgtcgtcgagcgtgccaatggcaagatttttaccgctatcaagaaaagacttctcgacgataaaaagggcaaatgggccgaccaactacctgaagtggtatgggccctaaacactacagaatgccgggcaaccaggttcacacctttttgcctattgtatggattcgaagtcatgacaccgcaggagataaagcatggatcgcccaggacaaacacatcagcagtccttgatgtcgacgaaccaacttccaaagatctcatcgacggagaccgcgtcctcgccctgc

SEQ ID NO: 84406 - DNA, 1317 bp, Zea Mays
ctaattctttacaccatgaagccctcgacggcggtccaagctaggagccgagctccgacgagctagaccgatcggatgacgccacagctggagttttcaagcgacaggatccaaattaggctcaatccgcacctttcccctcaatcaattttgctagggacggtctgtcacgttctggccacggtgtcagtgcgggtgttcaagtgaattatgtgttccggatcaccgaaggttgggctggatgaattgaagccagggagaggttcctgggttcaccagggatcctggacacgctttggtttgggtaatacgagactcgaagagcagggcggcggtgagggttggttacggcggtatttttctgagcaagcacgcgttctggtgaaaggcttcggccgcaattcgattggttgatactggggcaataagagatcacatactaactaaaacaaagagtaatttgatcattactgaccggaggggcgctggccacgatgaggttggatttcaggtgtgcttgaacagaattggggcgaatgcaaaattagagctcgtagggaattgactaggagcaatacttggtgtgggggtgcacaatgatattgcgaagctagccacgagctcaatttataggcagcttcgtcggtggcacatgaattgaagatggcgcggtggcggccggagaggaaaaaggctactggtgcaagtgaactcgtggcaaccgtcgtggcgacaattccggtgatcggcgagaagctaaaacgaagcgcggcgatgcggtggaggtactcagatacgtggcgcaaggccgtgcgacggtggttccccggcgagcttatctgctcagccgcaaaacaagagggagatggtgacggtgagtcaccggagtgacctccagcccaccgacgacaaatatctttcctctcgcgatgttatccacccacccgagcgcgaatcccaacgccggcgacacgtattgcggcggaggagtgatcgacggcggtgaagtgctctgaacccaagcaggttactgtaccatcgacaaaaccattcagttggcctgacagccaattttggagcccaattctctctcaatttctaatgacaacccatgtcaagctctgcagaaaaattgtagagcaatgtaccatataccatgttgcaatatggtgttgccactaaaagccattagatcatactcgaaattgggcttgaagttgctgttagctcactgttagcctgatttcagtcctttagcagtctgacagtccaacttgggtggagattttctccacatttcttataagaacatggctt

SEQ ID NO: 84407 - DNA, 651 bp, Zea Mays
gacgagacatcttcgctctatgcgaaaaagacaagattaggcgattctcctagtagcctactggggtatatttttataatatataataccacacaatgcacacaagcaattcattcaagcaccatacaagcatttattcgaacgaacagggatacatggtacaacggattacaataacgtggctcgacttttaagagtcggccgaaacgacttgactactggttcctacggcacggtcttcggggtctttgtctttagcctcatggggtgacacggaaggtgtgggtggtaccgattcgccaattctcctgcgtggttgggacaaggagtacaatggaattccctctaggatatgcggctcagtaccaatcctgggatggtgttccttgcgcttggcacggtccacaaggtagacacccctaaggagctgactatggcggtctgcctgctccctaaggttctcttcagctgcagcaaagcggctttcagcttccgctgctcgggcttctgcctgagctaaggccagcttagccctacgccaatgggactccgctttctcggcgcgctggatgaggtctctcacacgctgatgcagttggtcgcacaaatcgtcaaggctaagcaaatagccagacatagcgacaattgtgg

SEQ ID NO: 84408 - DNA, 645 bp, Zea Mays
aatgaactcctcagtgcggcaagactcagtcagagagcttgtggtctcttcccaagtggatgtggtttgtgtccaggaaactaaaatgcagaacatttcaacaagaactatcctctccatgcttggtgctgagttcactgattacgtctacctgccatcaacaggtgcaagtggtggcatcttgatcacttggaaaagacatataggtcatacagggcagcaaagaatcgacaatcacagtgtttcagtccagttgtgcatggagcaagggcaggcttggtggcttacctgtgtgtacggccctcagggagatgatggaaaaatcctttttcttcaggaactcagagatgtcagaacagcctgtgctggcccttggttggtggctggggattttaatctcatctataaaacatcagataagaataactccaactttaatagagccatgatgggtcgtttcagggatctgatcaatgacctgggcctcaaggagattccgctggtaggacgcaaattcacttggtctaaccagcaagataacccggtccttgttaagcttgatagagtgttttgtactgtggattgggagctaaccttccccagagttcttcttcatagtgctgcgtcacttgattcggaccactg

SEQ ID NO: 84409 - DNA, 431 bp, Zea Mays
gcctcccactaatgacttacgaacacctcggcttgcgacacactcatgacgtattaagcctaggcctaagtacgttggtcatctacaggacccgcaatacgacgagtcacaccaagacctaggctacggaggccaagggtcggcgtggtgcaaaggcagtaatgatggcattggggctccatgctgcctgtaccgactgccataaaggacgcaaccagggaagcctagacgaccaggacgcaaggtgacaagcacgatttatctaggtagaacgtcttgttttaccagggctcggtagctccttctaagaggagtcagtaaccaacccccgccatggtctataaaaggggagggttggagacagacacgaaaaggtggacacacgagagacaaagacggactagaggactcggaggaccacggaggccgga

SEQ ID NO: 84410 - DNA, 926 bp, Zea Mays
ggttggtcacttagacaaattgatattcaaaatgccttccatcatggtcatctcaatgaagacgtctatatgaagcaaccacccggttttattgactcggatcgtcctaattatctctgcaagctggacaagtcattatatggactgaaacaggcccctcgagcatggttttctcgtctcagtggcacactattgcagttgggatttcatgcttctaaagccgatgtctccttattcatattcaacaaaggtggaattcagatgtatattctcatctatgtggatgatatcataattgtgagctcctcatcatcggctactgatcgtcttcttgctcttctccaagctgaatttgcagtaaaagaccttggttccctgagctactttcttggcattgaagtgcatcatactccaaccggtctcctactgacccaacgcaaatacatacaagatatcttgaagcgcaccaacatggcctcctgcagttcagtcccaacgcccatgcttcctactgataagctgatgctcgcgagtggtgatcctctctccaccgaagactctacacggtatagaagtgtggttggtgctctccaatatctttcattgacgcgcccagatatttctttctgtgtgaatcgtgtctgccaatttctctctgcaccaacgacgacacattgggcggccgtcaaacgcatattgcgttatctacatgccacttcagacttgggcctgtgcatcacaaagacagtgtcctcccttctcagtgccttctcggacgcggattgggcaggcaacccggatgatcgacggagcactggtggttatgccatcttattcggcggaaatcttatttcatggagctctcgaaagcaacccactgtatctcgctcaagcatggaggccgagtacaaggcagtggccaatgc

SEQ ID NO: 84411 - DNA, 618 bp, Zea Mays
tagatatagagagacaacattctattgttgtttggttgctaaatgtgtacatttagctacatccgatgttgtttaagactttagatcacttgtcatttgaaaagagccggtggttacaatggtcaattgtgctataatttgtcacctaaatacacgaggatttagtttatatactaatgcatattaggctcgtcccatatttgtcaaatacggaataaatacgggttcaatccggaaaaaaacgggatctcgtaaaaacggacggaataagtcatctctcatttccgtcccgttttcatatttttccataaatacggaaacggtcgagtcaaatgtagaaaacggtacgggtcgggacgggattttttccgtccgttttcaaccctggttgttataggaaaggttggccactgttaagaaccatatgaaactacaagttgataaacatcgaactaatcgtgtatgattcagttcttttgaaacaacaaccatatgtttagagcttggaagtcaatcgacgctgtctgaagttggcattcagatactttggaccatttacaatattgtagcatatcggttcagtggcctataagttggatttgccaacaactacattga

SEQ ID NO: 84412 - DNA, 710 bp, Zea Mays
atacaagtttctagtattgtttttgtattaaaaatcattttctaaaataaattctgaatttccttaggcttctgaactgcgcacacaattttaacaaagcccagggggttctgcataaattccaggactaaacggtaatggtcttataatggcacgggatggcgggttgaataagaaaaactacaggggctctttagagaaataaccgcggcgaaggggtacgcaccaatctacgtcgtccgatccacattagacggcccagattagatcatcataatatccgaatcggtatccaaaggtagccatcggatcgagatccgatgcccagcgttttaaataaccctcggcccattttgaccattcaacacccgatcaccggcccagattacacgaacgaggggatgcgcttctggttaaatcgtgaccgccctacgagcaaccaacggttcatagacgtcttctttcgcccgaccagaaaacacgacggccagggatccatggcggcgctcatgccggcgagtcccaaatcgaagtcccccagagttatttcttatgcggtttagggcatcgcgaggagcagagggaggcaaagctaggggtgggattataccggagtagtaggtcgcgaaggcacccgcccacggcaggatgcggtccagagctgaccgccgagctccggtgagcaattggccacgccgtgcttgacgccc

SEQ ID NO: 84413 - DNA, 740 bp, Zea Mays
gtcagggtcagaatttccgactctaggaaggcaccgtggtggtgtgggcacagggcgacagtgccgcaacgagcgagggagaacgagataacgcgtaggaaaagcccttgagggcaggcaaaatgtttgccttcctccctttcaaacagttacattgcccctatatttatagtccctagaggacttggttcccaagcaaactatagtttcattaatgaaacaataacatatcctttagaaatgtattacagaaggcgagggagacacatgtggtacctgcaacaatggcatcgccagattgtgacatatcaccggtgaaaggagtgatcggtgcatcttctgtaccacggacccagccattgtgtgtttctgtgtaatagtgaatcttggaggtaccatttgtcacaaagaggaccttgagattactgtgccacaatttcataataacttctgaactatagtgtgtgaatttggatttatcattatcatttgtgtcaaatttctcagaaggtttgatgctgcaaaggaactcaagttcttgttttgtgacttcaatgatattggcagcttcccatgcctccttaatgagtgacttggtttccttgctggatgaccatagtggaagtggaagattaaggtcaaagaatattgtaccaccaaatttctttgaaacatcaatagctttcaacaatgatgactctgtagtgggctcaagcaaagctgaagaattatagtaaaac

SEQ ID NO: 84414 - DNA, 431 bp, Zea Mays
acattatgcacatcagatagactagcaggtagctcgagttggtatgccatctccccaactcgcctaaaaactttcgatagtccaataaagtgatgggacaatttgcccttgactttaaatctcttcattccacgaagtggtgacaccttgaggtacacatgatcaccttcctcaaactccggtggtcttcttctattatcagcgtagatcttttgcctggtctgagctaccctcaaattctctcgaattatacggacttgttcttctgcctcttgaataagttcaggtccaaagaactggcttcctctagtctgatccaatatagaggaatcctgcacttcctgccatatagagtctcgaacggtgacatcttttagactggcctggtaactattattatatgagaactcagcataaggtagactcttgtc

SEQ ID NO: 84415 - DNA, 439 bp, Zea Mays
gccaaatatgtaggcccaggaaaatcaaagggctatggaggtgacaggcccaaccaagggcctgagaagagacaaaggttggtgatccgaccttttaatcggaatcgttcttcaccacgtccaccctcctacccctttaaacaacctatctttatctgtcctgccactgcccccacctcaacaaatcagccgagtgcccttggtactcatttccctgccctcccaagctcctcaacaggctgctttaattatggaaagttcggacattttatcaaggacttcccatatcccaagcagaacagatcaaataatcagcagagttcagggagttccactcaaggtaggggaaatgcggcgaataatacagcgggcaaaaatatgaagaaaactgggcggatttattatacgcaagtggccatgacaccggaaggagaaccgg

SEQ ID NO: 84416 - DNA, 372 bp, Zea Mays
ctttcggggacctgattacggacaaggtggaggtatacatcgatgacatcgtggtcaagactaagagagggttgaccttagtggaagacttaaccctggtcttcgacaagctgcgggcaacccgcacaaagctgaacccgaacaagtgcgtctttggtgtctccgcagtaaagttgctggggttcctggttttgtaccggggcattgaagcaaactaggagaaggtcaaagtgattgaggcgatgaggcctctggcctgtatcaaggacgtccagaagcttacggggtcattagccgcccttagccgcttcatttcaaggctggctgagagggtgctacccttcttcaagctgttgcggaagtccggcccgt

SEQ ID NO: 84417 - DNA, 763 bp, Zea Mays
cgcaaatgggagcacaatgtcatgaggctccccactttgcaagcactttgtcccaccaatgccatgccccattctctataaatgcacatgcccctgtgccatcaccgaaacccccaccctctctcatcgatgttgccaggatgcctctctgcttgtgtgttgtcactgtggcgattgccaacatgttcccatgcgtgcaaccaatcgccatcgttgagtttcgctgagtaagcactgccttcgagacctacgaccaaaatacatcacatttcgccctctcacccacccttttgccccatttatcaccatccttatagttggaccatcattcgagttcacctcccgttctaacgatgccaaacaatctccggtgccaaaggaaaccccgatgagtttcccgtccaatcccaaaccccatgtgctcgttaggttgccattagcaccttcctagctcactattgtcgtggttctgagcctgccaccattgaaccctggccttgagccctgcactaaccattgcagccatgttctgagtttcacaccaaggtaagcaacacctcagacccgctcttgcatttgattacccattttcttgcatgttattactcgctggactagccaaaccttgctatcgtagacttagccaacactgatgagtccctaactctgctggcaagacctaaacccctctgttaggatcaccaccatcctagctatctctctagcagagtcccatatgcaccgatctcgagagccaagaaaa

SEQ ID NO: 84418 - DNA, 464 bp, Zea Mays
ttaaagctgtaactactatttaatattacttacttccacccaacgcttatgcttcatcattaaccttatgtattttcactttctaattacattcaaacacaatttcagtcattctcaaccattaaaacacaagcgtggaaccaatctttttagttcaaggaaacgaacccatcttttttatttgacaaaaagggggactgaatcaaatatgtcacctacctaaccgaaatactatcaacaaaccaacgacaatgggtccctacttgtacataccaataaacaagaattactttgggtggatatgaaacttttgatatcataagttacactgcatatgtccagcctccagaagaaaaggacaatggttttgctgaacttttgcatacaagttacttatgttaaatataatcatctaaaacatttagatctcaggaggaaaatgaaagttaaacatgtcatctatg

SEQ ID NO: 84419 - DNA, 651 bp, Zea Mays
gtaaactcttgatatattagggggtggacttttaaaaatgacacatataaaacgtcttcgcagcagttgggttctagttctgctgcccaggtctgtaggcatttgggtttctgtgatgaaaacgagaacatctctcttgaggatgccaatggatatgcaaagctattcgagaatggactctcaagtaaccatattgttgcagtagctgcgctatttggctggcaggtgcctcttggtgggcaatgctaggcctttttgctgtttggacttttcaggttgcttatattctatatcaatgttggatagctgttttttgatttagaatgtgagaggccttaatgaccgggcgaaaagggattctattaaatcagtggtggttgaccttaggccttccattatttgtttgcaggaaaccaaattaagtaacatttcagattttgatatcctctcaattcttgggactggtttcagtaactttgtattcaaactagctcagggatccatggggattgttggttgtttggcgtgatggatctttctcttcagtcgcgtctgttataaaaaaatcggtctcagtgcaatttcatgacgagtctggtgctgcttggtggtccacaggagtgtatgggcctcatcaggacaatatccttc

SEQ ID NO: 84420 - DNA, 428 bp, Zea Mays
aactgaggaacctaaagctaaggtgaacaagaggttcttgcaagattcaaggttgatcaagttgagaagagttatgttgcattgaagacccaaacataaagacatgacttgaagccatacaggtaactcatatgcattggatggttcaagtcataaggctcaagactacccagctcgagtgaagattatggtcacaagaatgagaaaaaagtataaaaagttagaacttggaagggccaataaccgtgcatactttgatttgcagtttgggtcatttctgagtttgaaaaggttcttgttgactattggaaagtgttggaactcactgatggtacatatttgttcaatttgagcagttgaggttttggagttcaacactcaactcaaacgagacaaaatggaaaaactcagcaaaggtgagcttcgac

SEQ ID NO: 84421 - DNA, 470 bp, Zea Mays
gggccttctattgggggcgacaggacttcacggctcacaactgacctcactcccgatattggcactcacctcaatcatgcttacagacttgggattcactccctctcgactcgcttgtatcccctactacgagcacttaggtgtaagataatacaagccttcctcccccactggaagtagggtcttctctttcccgaaccaagataaatcttgtgtcttcttgcatcaaccatccgggacaggagcacgcatcacaaatttactagttggttaggacccccaatttccaaaacaccgacaaatagggaatcaatctctggtatatctaggaatagttaatgtaatgtgtcctatacgagtttagtgtgtcttagaacaaatattcatgtctaagagcttttcacatgtgtgatagatgggttgtaagactggcatgtgggacgaatgggttgatgggatgttgacttcta

SEQ ID NO: 84422 - DNA, 368 bp, Zea Mays
ggggcccgacgatgtctaggccccagcgctggagaggccatgtgtgggcgatgagcttcgtgaactgcgaagggcttcccgatcgtggagaaaacttctggcaggcttcgcaggaccttgtgacccgatttgcggcgcagatcatggcgggccagtagaaaccttgacggattacctttgcggctagtgccctaggccctgcatgagagccgcaagtcccgctatggacttcgcgcagaatttggatgccttcggtctcggtgacacatttaagcatgggttgactgacccccttcttgtaaagttgtccttcaattagtgcaaagtcccggcttcgatgtttgaggcgcttggcctcattgatgtcg

SEQ ID NO: 84423 - DNA, 410 bp, Zea Mays
cttcaagaaccgttagtccacaagcagttgtcattaattaccaaaacatcactaaggggcctagataattcacaatctccccctttttggtaattgatgacaacactacataatatattcaagataaattttgtttttccaaatctccctcataccttaggtataagaaggattttggagatgagtttcgtaggacttatcttgatttgaagttttgtccgagagatagataaatcctaattaaaactcagaatgtaagaaaagctccccctatgtgtgtgcaggatatttcaagctgaagatacaacacccataatagatcggagttttgatggagaccttcctacagtcatggttatcgaggcgtacaagagataatatgtaaagtaagcgcaacaattataatcact

SEQ ID NO: 84424 - DNA, 640 bp, Zea Mays
gcgtgtgagctaggagctcacgacatagagttccgacctcgcacggaaataaagactcaagcattggttgacttcgtattagagtggaccgagcaccaagtcccagacaacccagagattatcgaagtatggagaatgtacttcgatggctcgttgaagctgcaaggagcgggtgcaggggttctctttattgctcctagaggtgaacaactcaagtatgcactccagctactatttccagcatcaaataatgcagcagagtatgaagcactgatccacgggctaagtaccgccatatcactctgcatcaggaaactgatggtatatggagattcgctagtggtcataagccagataaacaaagactaggatttctcgactgattccatgggcaagtactgtgcagccgtgcgaaaattggaggacatattcgaaggattggagttccatcacgtggaaagagaccgcaacacagtagcagacgcgtttgtcgaagctgggatccagtcaggcccaggctccacccgggatcttcgtctaagaaatatcacaaccaagcatcctctcaagtcaggtggaagagtgcaacaccttgagccaaccagagtcggaccccaatgactggagagagcccatcatc

SEQ ID NO: 84425 - DNA, 956 bp, Zea Mays
gatttcagcctttcgaccaaagatagtaaaatcttatcctttgcaagagcttagtttctgaaagttacaacctccgatcggaggtttccaagtgctatctagcagctttcatcctctgcatatttttgagtcttcagagccttactaaggattagaccctgccaaacagaagaatgaacaaacaataacagtaagaattaccaaaagatagtccaatgtaacaaaaagtaccaaatacgaagccaaaaagtgcaaaccttcaagctattgtaagcgaggctatccgcacgtcaatccttcgtcatagcagacaaaccaagctcaagcttcagaaaccccatattgttcatcatctcgcggcaaacattaacctccttactgtcgggcagacagtagaggaagtcgtcttcgtcatttcctctgtataccaaggaccctcgggggtatttcaagtccttggcatagtgttgcacttcggcaatttgttccaatgttaactgctagtgtgtcgaacaatgtattccaaatcaccatggagaggtgcttcaggagaaggagatgtagaattttcaggaagactctcttccatcagtcttactggcgcagctctcgaaggtccggcttcggtgagagcagtagtcgcgcttgcagtagtcacttctcttgcatcttcagattttttgctagatgcttcagaagaagcgagagttggcactttcatggattctaaaacaacatctaaaacaatagccattcttctcttccttggagtcgctgctgcagtagtcgatagcatcgacatccctgttatagctggagggctcatcacctttggctattctgctgtcttttctgattcaggctcttttaccggatttacactagcttcggttgacatggcaggagctgattccatacctgagggggcagcctcagcactttcagtaagcttcgac

SEQ ID NO: 84426 - DNA, 926 bp, Zea Mays
catactcagcactacaccaaccactacggcacgtgcaaccaggtaggctagggaacgtgaccgagcccatggccttggcctcggctctcagcagaaattgagcgtctccatcgggcataagtcaacagcaagtacaagccccataccctgggccataccatctaaggggctcggctttgcctcctcatcgtacacgaccaaccccggtgctcttagcagccctccttgaggctataaatagagcagtccacgactataaataggatagtccacgacttcaaagggggcaggagaacacttgacggtttcacctccactgcgatattggcacttgactcaatcaacctcagggacttgggatcctttcctcttcgatcagcttgtacccctactgcaagcacttaggtgcatgtaatataagtcacatcctccctatgctaaaagtagagcattctcttatccggactagaataaatgacttgtgtcaccttgcatcatctatctgggtcaagacacggagcatcatttcactagttggtgagaccctcgggtcaagacaccaacaatatgtgatagaaataaccgaacaatgggaatacgataggactacaccaacgaccacctagtcgtccatctagtctcgcgaactgtttgttgccaattgccatgcatgagaaatgtaggtgccccctttggtcagcaaaggttcctcacgtctttctatctttgtttgttgttgcgagaaagttgttgacgtctttctttaattgcactcgtcctctgtttctctccgaacacacggctgaattgtaatacatcgtttagtgtcgtggcagtgatgagtggtgaatgcattattaggaccttttcgcaaaggcagcgtgtgttcgactgctacatactaaccgcagcattaacaccacaat

SEQ ID NO: 84427 - DNA, 273 bp, Zea Mays
gtgaacagtgcaaaaaccggttgagcaggttttgagtccggttgaactggtttttcaaactggctaacagatttttagacaactgaagagaaccatgaggaaatcttagtgggaagtaaaagtggttttttccaagagcattcatgatctagtaaaatgttttcttagaggatttgaaaaggtttggactgagctcatcgcacttacttactcaactattgcggatccctcttaattgaacgacgattcctataactcaagaattgtaaaaag

SEQ ID NO: 84428 - DNA, 507 bp, Zea Mays
gtatctagtgagcagttaaggtggcgttctcggagacaatgccatcaggccagaaggcgcaggacccctatgcgcacaacccggacccccgaagtaaagcagcctggagccattggatagggttcagaccccatcaagtgggctccggaccacccataacaaggtcccggtagaggatgtgtcgtaacctaggcatgggtccgatattgacgcgtgtccaggctctatccgaagcgcctccgctccccgctcggtcgaaggtctaatacggcctcatggtagattgtccgtgacgtaggccagccggcggagcatgacataaggactctgagccgcgcggcctccgcatttattgcggaggggacacgccgcctgtccacccttctgacaggtgatgtgcccccacgacatttattgcgtcctgtccattccactggcaggcggcgccagggccaccctgcagacggcgcacctgtccagtccgttgccgaaacagtacacccgtgc

SEQ ID NO: 84429 - DNA, 352 bp, Zea Mays
gtagaaaccagatatgaagaccttcccaactagagtcttggatgctgtatgtattccgcattgcccggcgtggatctcttctagtagttgcttcccggtagccgagagaatgcacttcatgaggactcctgtcgcgccccttctgtacagtgtttctccaatgagagtgtagtgggatgactgccttgcgatgcgttctgccgcagttttgtcatccgactcttcttcattctttatatatctaatgattggctccctccagtcatctgaatctgactctggctggctcagaacattgcactcttttgctgctctaatgaaatactcgggcgtggcacttcttggacaaaaa

SEQ ID NO: 84430 - DNA, 934 bp, Zea Mays
ctgatttttaaattaacatgttccactttactatgtgaattctattttacaatgtttgttgtgaattgtagagtgaagctggatctcttctaatagtagacttaagttgccgtgcttgtgaatgaaattgtgattgtgactcaaacttactatattttgctaataacagaaaactgaatagttgaaactttgtgctaataacataaaattcgtacatatttatgatgttttggttcacgttacactgaaatccgctcgagtcataacctacgtactattttcattgccataattttgggcaccattcatcgttacaaaacagatcgactatttactctaaaattcgtactcatttacgttgttttggttcacattcgcccgagacgggacccgtccataatgcacgcgattttcacgccgtaattcgaggcaacccacgtcgttacgaaacatatcgacgttttatgctaaaatttgtacccattacactgttttggttcatgttttacgttgaaatcggcccgagccataacccgcacataaatgaacatgcacgattttcatgtcgtaatctcaggccccatcactattacaaaacaactctttgatttacgctaaaattcatactcatttatgctattttagttcacgttttacggtgaaatctgtctgagccagaacctacgcgcgtacaggcatcagagtataactggatggggcttcctatactaatggaagccctgagcattcgttagattgcagcctcgctgatagagagtacgtgctgattctggagcaaggagttgatcaagagaaaatccaagagcctccttctagacctaccaccgaggatccccccacagcaccaacacttgaaggcaagccctagctttatgcataacctgttatgtgctattttagtgcagtattgttt

SEQ ID NO: 84431 - DNA, 827 bp, Zea Mays
cagagcttagctgcaccaaaatacaagtgtctgttagtaccaaagctaaaaataatttacgatgctaagtcatgatagatatacctatgtgtctggcacgttcaacaacttcttccgttattctagcctcttccaaggcgtcatgagattcttcctctttctttctaatagcttcgtcagctatctctcggccacccttcagccatacttcggaataaaactttgcatctagtgcagtggctgcggccaaagggtttctaatatcgttagctgagagcaaaaatcctggctgaaccacaaccgtggcatgttcacagccgaccttttcaagtcccgacacggccccaagggcaccgaaaaagcgcagaagtccccctatcactaagaatctcttcaaaagcttctgcttcaccgttaatccaccagataaccccgttaggatcaccgcggataaagttctactctgaggagaatgtgccaaccttagtaaaactatttttcaaattattagcacattccttagcaatattgtagcattcctctttagcttgaagaagttcctcaatatttttctgcacccttaaccgttccatgtcagatatctcacgctttgtttgtttcacattgaaatttccagttacttcatcaagtttcttttctaattcttgcacttcggttctgtgcaattccacttgggtggacaacgcatactccaagtcagcaatgcgcttcgcgtctttcaattgcctctcttcagtcttcttcattctatcctcttcttcagaaaggctagcaagcctagcttcactagattttaatatctccac

SEQ ID NO: 84432 - DNA, 586 bp, Zea Mays
gcttgttcatcacactcaaccaaagcaccgctgttgattttgcttcgtcacaagaggaagagcttcggaaaaatttaaaaaaaccaacaacttcatcaccaaatggcaagggtacgctccactgctagggttacacgtgacggagaagaagccgaaactgctgaaaccgctccgatttccgaagtgatgaaacagtcggggctgatagtgccggaggatgtttttgacgaaggtgcatctaccgctgaagctgagcaggttggtgaggttggtgctgaggaagatgaatctgaagatgattatagtgtcgtgccatctaaacccagtcacctggagtttgggaggtcctccgttaccgaagatcatatgcctaagttggtgaagttaggctatttcagtgaggccaaaaaggagctaattcgttttggcggagaggaaattactccgaagccggaaaaggatgaggtggtagtctttaaaagcttctttaaggcaggattaagatttcctttgaatgagatgattgctgatgttttgaagaagtttgggatttatcttcatcaactaactcctaacgccatcgtta

SEQ ID NO: 84433 - DNA, 463 bp, Zea Mays
ggcgtttgcatgcgtcagtttagttgcattcgtagttagggcgtttgcatgtgccggtttaggggttgcacgtgtgcggcgtggtgcgtatgagatttgaccgtggaaggcgaggcttgcatgtacgcagaggacggggcttgtatgcacgcagaggacgaggggcttgcatgtatgcagaggagggggcgggggcacaaatctggtctacattagcatcttaatagatagtatataatataattcctacccggtatcaaacacatgctctgtcacttgcatgcgcagcaggctttgcattcacgcgtgtgcacatgcagactttgcatgtagtggtggcatttgcatgcacggttgcatgcacaactttagttgcgttcgtagttagggcgttcgcgtgtgtgcacatgcaggctttgcatgcaatggaggcgtttgcatgcgtcggtttagttgcattcgt

SEQ ID NO: 84434 - DNA, 450 bp, Zea Mays
aaggaaaccagcagtggcaagccagttcttatacgaaagaggcccacgtccgagttagttgctgtaggagcgtgggtatgtctggcagggtctgttgcgctcacccgacagactaaaccaacagtgataattcgggcgcgggagcgcaatatttccccacaataaatgaagactattcgctacaaatcaggagataagcaaagagattgcgatcgacatctgtgtggggggctatccctggtcgtgtatatacggccaggaggcacccctcccattttcatctcaccctcagcccaccattctcacagccacagcttgtgaactcacctcaatacagaaaaccaccacaggacatagggtattacacctctctagcggcccgaacctgctcaagcttgtgtgtttctctcattgtgctaccgcatgaaccatcgagtcacaatcaacgat

SEQ ID NO: 84435 - DNA, 2112 bp, Zea Mays
aacaggccttctactgggtcgtcctacggaatgggccagcgagatgtagctcggttgggcgagcccgatctaagccggcgaagaccgacacccgtgttaagcgccatgggggcatggatacatcgggtggggcagttgggcacacccgacaggctaaacccttcgcaataactagggcggataggcgaagaggactctagatatgttgggatacagtttgtgacaaaggagataagcgaggagacagaactcacaccttgtaatgggatagctctctcttgtcgtgtatataagaccgagagggaccccctacaatttcatcttaccttagcccacctactcacacctctcagcctgtaatcctcatatcaataccaaaaccaccacaagaagtaggatatcacgcaactctacacagctcgaacctatataagtctgcgagccatcccagcgtgctgtgtcacgaaccatcgagtcgcaatcaacgacgtcgtcctacccaaaagcatcacaagggtaactccgtggtgcgcggtcggaccacaaacactgacagacgtgtagcgtggtttcgtcctagagaatttggagtttaggtggtcaacaatttcctcgagtcgggtgcaagaattctagcagttggagttttttggagcggggactagacgagttctcgggttggagaagacgcccatccctcgaggggaagttgtggtcttcaaggcattttttgttgcggggcttcgcttttcctaccaccattttctggtcgaagtcttgggacactttcgcatgtagctgcatcagttgacatcaaatgccatagtcgcattgtcgtaatatatctgggtgacgaccatttatgtgggagccctcgatcgaagtcttcatgaagcattactgtctccactggtagaagaagactgtgggtaacaagttggaccagttggaagcttcatgttcacgtcgaagactagcaagactgtgggtgaaaagtgtatgagttagtgccttgcacaaaaaatagatggggcagttggttgaagtcttggttttatgtaaaccttggcgaaggcggtgctgacttgccatggtcgcgcgaccggcagcatggtgccacatgctttctggctttccctgagttcgaagtcaaggaaagggatcaaggtgaggttgtgttgcgtcagacaagggttaaaagcagtggctaagacttagtggaggagtttattgcttataggttatggtcgttgagccatggctggccgtcggggaaatcatgtggcgattgatgccgtagaagagcgttattttgaaaagtgaagttgtggtgattagtccgcccttcactattgagcttggcgggcaggatggggtagccttcgttagcgaggtacaggcggaggccatcaagatcattggaaagtatgtcgggaagttggagtggtcagagtatggacatccgtgggggtaatattcgtttgaacaaagattttgagttcaatggtctggagtatgggccctatcccaaagatgggatgaggaagaggaggaagagactagtgccaagttaaaggggaaagaggtggcgaagggagcagtggggatggggtgcattgaaatgaaaagtgtcacccgctgatagtaagagaaagaagaaggcaaagaggctgaggtccctcgaccatgtggaggcgatgcctactacgcaagagaagagtttggccatcgggtcagctggcttcaccaaagacttggaggccacaagcctggcgaagctgtgtcgccttccagcctgtagacgacagggatgagggtggccacagttaccagggtgagtatcttaggggagaaataattcctagagctactagcgaagactttgaattgagtaggctagcttgatctcttgaaatttttccaaatggttgtaacattggggatgtttatcagcgctgatggaaaggaccggaaggtgtcttcaaagaactagaaggaggtgatccggattgtagtcccatggcaggcgatgaaagccatgattgtgaagacaggtgggtcgaagacgagcatccagagtactggggcaaggcaaaggcccataaaagcggg

SEQ ID NO: 84436 - DNA, 663 bp, Zea Mays
tggatttctatttcattttccctggattttctatctctggactgcgcctcatttccttgaaagcacagggggctcggagcaaaaggtcccaagacacagacagacccaggtgcggacggcgggttctatttactataaataaagggctttttaacaaaaatgccagcgcgaaggggtattctctattatcgtccgtaggatctagatcttgtggctcggattagattgtccacttaagtgaaccggtacgcgccactggccaccagatcttggatcaacggtcagtatttaatgtaacgtgatccaatatgggccatccgatccgatccgacgcttaggatcttaaaatgcagaattgaatctagtgcgcccatcaggagatccgacggccagcgtccctctcccacatcaccctcaccagctcatctccaggcagcggcggcggcaagaccgagctccacccagggagttcgccggagttcctccccacccagaacacagagaccctaaatcctaaacgcggacggcgttatacactgagtgaagaaaggcgaactgatggagagctcattaccgtgattcagttagcaggattccctggccacggaggtcagtggtgctgcggcggaggaccctcaccggtgaagaaatcctgggttccgg

SEQ ID NO: 84437 - DNA, 313 bp, Zea Mays
cagaactttggtaattatcttataatagacattgaacaagcaaatggggcgaaaggctttaatgtaagtcgcatctggaatttttgggataagagtgactatcccaaagttgagtctctcaatattaagggatccatcatgaaaggatttgaagagattaaacaaatcacttttgattgtgtcccaaaaatcctgaaaaaaattcagatgggaaaccatctgggccaggagcactattgtgtttcagagaaaacaccacatctttgacctcctccatagaaaaaggacttgtaaggaattctctatcatcatc

SEQ ID NO: 84438 - DNA, 1274 bp, Zea Mays
aaaattcaatttattctgacaaagtggtgacatacatcctcagaaaaggcatacatctctcacatagagcctagttactcagtgagatatgttcatgcttgtgatggatctatactcccactttatccaaatcatttcaaactttaatgggatgtttattgaaccaacctatgatgttgtgtgcatttatgccttttttagacctagtttaccaattactgtaattatttgatgcatttcttaaagatatttcttacaataccataacctagctataaaaatctaaaaacttgcatggaccattcattttggtgttcaatgttgacaaaaaagtttcaaatccttcggacaaagtggtgacacacatcctaagaaaggtatatatctctcatatagaggctaattactaagtgagagatgctattgcaagtgagagatgtatagtaccactatgttaaaattatttgcaaatattatataacatgatcataaaccaaactaatgtgtccatgaatagataattgcaaacaaaatcatagagagaaataaaaaacaaagaataaataaaaaaggtaggcaaaacaaaaaatttgaacctaggagctcgatctcatagttagcaggtcagaccattgggctattcaagtgttttcaatatgtacccagcgctactatatttaaacgcattagcctccggattgccaaacaaattgggcgtcaaaaaaacatttttcgacatcgtcactaaaaaacgccgcctaggacaccactttctcccccactcatcctctttctcccccacaagtttctccaaccctaatcgccgccgccgggacacaaccgccatcgacgacctgcctccttgaccaggtacctcaccgccgccactagacacatccgccgtcgacgacctgcctcctcgaccaggtacctcaccgccgcccccttacctctcatcgcgttgatgagctgcgtcgtcgtcgacttcactcgccgcatcccgctctatctcattgccatccgcatttctctcgccccttccacctaacacgccccatccacatttctcttgccaacccctaaaccctaaccatcgttggatttgggtcatcgccgacgaccttgatggtgaacacaaggaggcaaaacagtcagaaaggtccacaataagaagaaggtatcttttggttcactcagcctaattcttagttgctaactattaccaagctggatctaaccaaacctagtgatgctagatacatcattcattcatc

SEQ ID NO: 84439 - DNA, 596 bp, Zea Mays
cggtcaggcgcactgaatggagttcccatggtacagtaacctgaataagattaggtgtagtgaaccttgccgccggtgaactcatgccgtgattcacgccggccgccacgattcgtgcgttgtggtacgcggataatggctggcggtaaaagatctcgcgcgagggatgaacttaggcactgttactgctcagttcgctgtacccacttgcacaacgacgtggctggacggtcatcaccatggtggtcgccgttcatcatgattgtgccacgctgtgacgatttcaccacgtagctatgaccgtggaaagcttggaattaccatccttgaacccttgtatcagcgagggccacgatagatagctccggtgactcattctctcatcaccgtgggctcttctccattcaaattcgtcgtactcgcagtcgccctctataaattgagtgttcggcctgctctgctaacttatcatgaactcaaagcaccattcctcactgccgattagccaccgtagtgctcgaatttggattttcccccaaattggtcatctgcaccgccatgagacaccgcgccgtggccagccacccacaggttcg

SEQ ID NO: 84440 - DNA, 758 bp, Zea Mays
cgacgcacgacgaaactcccgctttaaatgtgtagtaatgtagtatcatacctccattgttctctttttcttcataatggactacaccatattccattacttaaaatcaacgaaaatacaaagtttttttaggaaacggcccagccagcctacctataccaaatgataatacgcacacaaacaaaataaataacactgttctcatcaaaaagcaagtatatagcataggattaaagcatttttatgtcatgtgttcaagatagtcatgaagtaacaagaaacaaataaactatcacaaagcaaacaaggtttattaacacaaaaatcaaatcaacacaagcttctagcacatatattttaaaataaatatacagacacatataaattacaccatactttaaaaagatagattaacacttcattcagatttgtactgaaccatgggctacacaatatcagttattgtggtatttttggcaacacgtctaatttttaaggtggcatattaaattgatacatgcaaaggtgtgcggaaagccggaaactcaaaaacaagatacgaaggttaaaaacttgctttcttgaaaaaggcatatcacagattctccacacatattgcacaataattcaaacccattctactgccacaaaaaaggtgaattggtgtgtgccagttttgccttcgaaaaccaatccaatccgattctatcaaacttgcatagttgcatagagttaaaatttatgggaaaaaaatcctt

SEQ ID NO: 84441 - DNA, 655 bp, Zea Mays
tcggttgaggtgcttgtttgctaatcctgataatgccaaacttatgagatagcattcttcgaatgagcacaaaaacaataggaagccttgacatccagccgatgggaagcagtggcaagatttcaatgacaaccactaagactttgccattgaactaagaaatattaggttcgcactaagcactaatggaatgaatccatttgctgagaggagcagcaagcacaacacatgaccagaacaactggtagcaggcttcgctctcatccttcttttttctttcctagcatgaactccgatcgatatgcaagcgaaacaatggatccatccatctatccatgaggtgtttggtttcttgactatagtttatatgttaatatgttaatatgtgttagaacacatgagcttgtttctaatatgttaatatgtgttatatattaatatgtatttaattaatgcttatgtatgtatatatagctcaatgagttctcccattaatgacaaaggattagggtcccacctagggatgaaaacgagacggatacagccggatacagtgtcttcccgtatcctaccctaatgtatttctcttggatacgggaccggatatgggtagttaagattcgggacggatagacgagaccgggtaataatccgg

SEQ ID NO: 84442 - DNA, 593 bp, Zea Mays
caacaaaatttacgacggtcgacgatatgtgtatgtccgtgtgtaatattagtactcgtaatagtatatgacacacacatgtattatgtataccatgctgatctaaactgatctggagatgcgaatgtatctagcggagagactcatgctcaaggtactgagttgacatccacatcgtgtgttgcttgaagtcgtgaaatcgcagtcaatgcaaaatagatattcattatcgtccctcgatcgtccagcggcaagaagaaaaagaagacgatcaacaacaacagcagtacaggaaggagacgatcacctagaaaaaaaaggtatttaaggtttagtcttaactttggccggttttaactctagagtactttcctaaaaaacgatatttaaggatagcaggcacttaggtcgcggtacattaggctagccgaagtggagagctggaaatgctcccctaaacttttacagttcactcaagtgtcgtagtaattaactctatacctcacccactacagtaaaacgatgcacatctgacggccacttaacctccgacagctacctacgacaccgtcagacataagcttatgtccgac

SEQ ID NO: 84443 - DNA, 609 bp, Zea Mays
ggaggattggaaaaaggtaattacctctcataattttcattatctgtatgtgaatttggacaggctatgcaatttggatatggatttcgagtctaattaaagtgctacattttagttatttaatgtgtagccgataaattaatactacaatgtatgcccatgtgttatttttaggataatcaagaccccttttttgagtgtgtggctgtccaacacaatatccagcagactgcacagattccatttagtccacattcagttaccaacagttcatgctaacacctagacattgcatacagttgatggacattatactaacaccctgacactgcatacagtttacaacacctaaacatgatattttctttattgttttggagtcatttccttgcacatggcttctccacgactggtggtgaatatagatggcttctccatgactggtggtgaagtagtggcatcttcaacatttgtagtcttgggctattatcaaaaccaaagcttgctggcattggttggcctaggaagaggtgccgacaatgtggtgctagacggctactggtcgccaccgacgttgcattctggaggatggtcgtccatggcgatggg

SEQ ID NO: 84444 - DNA, 437 bp, Zea Mays
attattttactttttggtattctcgacatcggtacatatggaagtggtagcaaacatccaagtaaccactctggtcttagatggctttggagacaatggacaaagatggagtcatttgtcaccctttatactcagtccagatatactactagcatggatatattgctaggattaattttgatggtgtttatgtgtgcatgcgtgagttaattagttagccatgttgtttgctcgttgtgtacgtgagtgcgtacatgacgagcgagtccagggagagagggagccagcgttgtgttgtcggccatggcgttcgacgccagtcgagtcatgtgctagatctctgccaaggtacagtaaaaatagtctccacgatgttcgtcgccgcctatctatgtccaatattcatcttccacctctagctagccgatgtgtttctg

SEQ ID NO: 84445 - DNA, 649 bp, Zea Mays
actgaatccataaaaaagcaatgttttgatccatctgatgttgtcaatttttgtgctctcttccttaatttttcctgtagcttggcatgtgatgtggttcaacaacaggcacagaatccttgtaaactggatcttgctctcaataactaataccatgccactttcagaaagatggaataacacgcagggaatatgacagtaataggagctggagtaagctggcatgttgcttcttgttgccaatactaggaacatgaacacatagttcagttagactagacccaatgcataataaatttggacagcatgcggatcatcttgaaacaacaaaattcagattctaaatgttgcaagaacagcaggcttgccaaacatgccagcaatgcttgcacgtgtacaatcatgcatgaactgtgaagtcaactgttccttccgtctattttactccggatgcaaagattactcatcgatctcacaatctcaataagagattggtgaaatacacatactcgtgcagatgagtttgctgctgcttccggcttagacatcacatgtggatcataagctgcactgcatttagagatgcctctcaagctggtcaaaccaacaacaacaacaacaacaaaaaggtattccagcttgtcatgaa

SEQ ID NO: 84446 - DNA, 979 bp, Zea Mays
caaaacatcatgtgtcgattcggagtcccatcagagctaacaatcgataatataaaatagttcgaaaaccaagacttccgggaattctgcaactctatcggcacaaaggcagtgttcgcctctgtctaccatccacaatccaacatattagttgaacgcgccaatggcaagatttttagtgccatcaagaaaaggttactcgacgataagaaaggcaaatgggcagatcagcttcccaaagtcatatgggcattgaacaccacagaatccagagcgactggattcacacctttccgcttgatgtatagatccgaagcaatgacaccgcaagagctgaagcacggatctccacgagcgagccccacgaccactccatatgtcgacgagccaacctccaaggaccttatcgatggagaccatgttcttgccctagaggcactaaacaaatactaagagcagatgaaggcatggcgcgataacactgtcatcccccaagaattcgaggaaggagacctagtcctcaccagaacctccataacagaatctcgggggaagctcggacccaaatgggaagggcccttcatcgtcaagacaaaaacatcccccaatgcctataggctcgcttcaccatccgactaagacctagagcactcatggaatgtggataacttacaaaaattctttgtctagtcccaaggcctccgtcctttgtaattttcgcagacactatctcagtcaggcctgcactcttttcctcgcaggggtgaggtttttaacgaggcagagccatgtaataaattgctacaaaaatcccccaaaaacaaaaattcaagacggcattgcgaccgcggatgtcaaaaaagaccgcaaaaccagtcttcggtattcgacgccaaaacagtcactgcaacggcaagcctcgacaaccattgcgtgcgacaaatccaggcaaaagtcgcctaggggtgcagccggaaaa

SEQ ID NO: 84447 - DNA, 802 bp, Zea Mays
caagcctctcttgagaaggaaattgcatcaggaaaccagagtgacacttggtggctttccaagtacggccccaggggaaatgaaatccaaaatccttctcaagatcctcagccgaaatcaagccctcaaccactttaaccaaaccaatgaaactgcgcttaggtttttttgacataggtttggaaaagtgagacgagtaaaaccctaacccatccgccaccatcccaacaataggcatacatggcttgttttgtttggggagaacgcacctcgctgtgttgtgagtttccttgcgacagatctcgcaccataaagatttgaaacagtccctagcatgatgcccatccgtaccgcatttttggcagaaaaaacgatgcaccagttcattctcttttttcagaatagggggaggggggttttaaggatacctgaccgaccgccatcaccggaagaagaggtaaggatgtcacccttgttctcgggttttccagaacccggcttcaggcgccagctaagactccgattctttccccaagactgcgaaccctgaggggcgtcttttggaccccatcggtcccagttagggttacaattcttcggatccattcgacgcgaagcagaagagcgacccgggagggaccactcctcgtcaacttcaggcggatgaaacagagaagaaaaccaaccaccgatgaagctagaacgcgtcgagaacgggagagaccagagacgagagagacgcgacgcgaaatggggaaatgaatgagaaccaacaaaatcgggcgaaaaccctagacgctca

SEQ ID NO: 84448 - DNA, 770 bp, Zea Mays
cggcgatcctataccggccaaaataagcaatgaccagacccctaagtcggctgacatctaattcaacccctaacgatcattacccctcaatcaattgcagaattccggattgggaattcactgtccacggcaacggtggaaactgagaacacaccgatgtgttctgggctacccagggcgatctaattcaatcggatggtgctgtgagcaataggggacctgagggaggctagaacatcccacagaagagcacgagctaacatgtagacgtctggccacaaccgatttggggagaaagaggaattagagagctatggtggctaatcagaggcaggagcgggtgctctggcttcgtgattacctagcggagctcacggcatgctcaatttatagggcccaagggtggtggctcttgaatttggaatggcgcgctggcgaccgaagaggaagaaggtcactggtggctcaatcgtggcgttcaccggtgcagcggttcagagattgtaatcctaggtgtgccacggttactaccgcgcagtaacgagtcacatcgtggcataactgaggtcaccgaagtctccacaacgacaccggcggtccggccacgtcgcacggctacaggcgcggttgataagcttcaccccgcgacccaatccgctccccttttgatcttttcaccctcccggcactatcctgcccgagtctagcacgaatcgccgcgatcagcgcgaatccttgcgcaaaggtcaccgacggcgaggggactgaac

SEQ ID NO: 84449 - DNA, 443 bp, Zea Mays
ctactgcaggtttgatcttcactgcaggttcatcactgtcagctgctttgaaaccgaaaataataacccttttgttaacttgaaaaccttaaaacgaccgttcttaaaaattggtagtgaaggtccatatcattacttgctcatgccacaaatcatagtggaatatctcactaccggttcaatccatacactggcggctggtggcttgagctggcagggccatatagtttatcaatgccatcatttgtcttgagcccacggtgctgattgtacaatacaaaacccaatgtactccttcctcacccttccacactcattcaaggacacacctttcccccacttctccttccattgttgcatcaattttcccataaaacgctcatgaaagcacttggatatttaagtttgagcatgaccctcttgctttaaggttggtaacggac

SEQ ID NO: 84450 - DNA, 347 bp, Zea Mays
gtgcggttgaggggcggatccgagcggccggatcccaatcggatagttaggattagatttagttatataaagcatgatcgtaagatctaggatagacgtatgagatcagacgaccaatcctggtcggctctccctggctaccagcggcaacctcgcccgactccacgaaaaaacctcgccagaggcgcgagcgtggccacgccgggggtcctggggcgctgggaagggcatgggaaagttcgggatgacacggtggacgcggtcgtgggcacgacaccagtgcaaaggcactagagggtggaggtctgtggcctagtggaatagtggcggcacatccttgctccgac

SEQ ID NO: 84451 - DNA, 433 bp, Zea Mays
ctagtgcacatgctcaaaatggggttgttgaatgcaagcatcatcatgttgtagaaagtgctcgcactctgttgatatcttcttttgttccctcacatttttatgtgaatcagtatctacctctatctacctaataatagactctcaggcaaaactcctggtgaagttctttttgaaactcctccccgctatgaccatcttagggtttttggatgtacatgctacatcttgatagccccttgtgaacggactaaattgactgctcaatctgttgactatgtttttcttggatatagtccggagcacaaaggctatcgatgttatgatccttcagtccatcacattcgtatttcacaagatatgagttatcatgaaaatcaacctttattttatatctcactcacacattcatcttcctttcaaccgttgtcac

SEQ ID NO: 84452 - DNA, 547 bp, Zea Mays
tttgcattctcaaacaactgctacaaggagcttttgaacttgatcagtgatgtacttttggagaattacaagatgccaaaggacatgtatcagtccaaaaagttgctctctgggctcggtatggactacgaaaaaatcgatgtctgtgacaataactgtatgcttttctggaaggagaccgcgaatgagaaaaaagtgtactgtatgtggtgagcgtagattcgttgaggttgaaaacgacgatggtttgaccatgacgacgaagattgcacgtaagcagcttcgttacatgcctcttatacctcggttgaaacgtttgttcatctccaaaaatacagccagacacatgtggtggcacaaagaaggggtacgtgagaatccaaatgtcatggcacacccaactgatacagatgcatggaaggcactagatgcttttgattccagctttgctgacgaagtgcggaatgtctgcttcggtttagcaactgatggtttctcgcctttcaatctaactgcaacgtcctactcatgttggctcgtctttact

SEQ ID NO: 84453 - DNA, 793 bp, Zea Mays
ctcttacccattcatcaacttctaaaggttcttctgctttgatgaagagcgggggtcgaatcccaaagaattccaaatatgtagtatcacgcggtccttgaggaggagctctccctctatgttgttggaactgattgcccgccatttcgcacaagaaacacgtattatcaacggtggcattgaccaaggtagcgatagccttggccaaagtcggtggtactggtggcgggttggagtatcctccctaccgcgggaagtccccgcaccatcatgtgcgcgagtccgtgatcgcatctgaggcaaagaatcatttggaaaaaacataacatgccaacatacaccatcatattacattaccaaaatgtaataattatacagactccagtgtacaactcgactttattacttattttacataaacataacacttagactatactattctagtcttcttcatcctttgttgctccatttcctgctgcaggagaccgttcgtcagcaaggttcatggaaggagggggcctaaaaaggttcagctccccatcaggtccttcatttgttgtacctgagggtccggctcccattgcagcaacgtcagaaggcacgtccggtgcagtcgagcatacagtacatgtacttcttcatgtaaagtattacagtacacttgtaggcttttgagggacgcactaagctctgccacacgagctagagctttcgcttcgcagttccaagcgaacgaacgcgaattgacggcccaatcaatggccgtatcccgttctgagatctcatacta

SEQ ID NO: 84454 - DNA, 333 bp, Zea Mays
cgcaggaagaattcgttcaatccatatgtggaagtcatgactcttcatccctaagactcgcatagtagataagttcaccccctactcaggttagctgcatacccatcagggaacatcaacatcttgatccactgaagtacttccttcctctgggccctgcttaggacgaaatcggccttaggccttctccacgtctttccgccacttggcggcttcatctctaggtttggtctatcacataatgctgccagatccactcttgcctttacgttatcctttgacttatcaggaatgtccataattgttgcccacagtgcctcggcaacattcttt

SEQ ID NO: 84455 - DNA, 490 bp, Zea Mays
aagtcagagtcatgtgtgatgatgttacttatggggtgaatgcgtattgaaatattttatgtcgtgtaatatgattagaaatgtgaaggatagataggggtttttcagaaatgttagccaatagattcgaacaagcgtgatagaggttgagtcacttatgttataaaattgatgctcgacatgttaggtctcctaaaatgtggcgttttaggtgactcgtgtgttatccaatttaagttgagcaatggttaagaaacactaataaatcgactccaaccatattttgagttacgatgtctaaaacggttcgctaagtcttctactgtgattagccaactcatgttaaataggagtcgatttcgttaagtgtttgttatatatgtgttgtctcggattgcgataataagaggcaagctgacgtgtaggatgtatagcggcctatgttgttgcgctagttagccgaattaatagatgggtttgggtaacctcg

SEQ ID NO: 84456 - DNA, 416 bp, Zea Mays
tattaatatggtttcaaaaattatcagatttgaattgtgataattaaatctagaaataaaaatatagaaaaaagaatagcaaataaaaggcttatctattcggccacttaaggaacacaacccacgtgagtttttcctcctatttttttattattccacttgtcggatcttgcatcattgttacctattctagattcgagtttgttagagttcctaatagataggataggattgtaagagataagtaccggattagatctatcatgtaacagatttgggttcgagtttgttagagttcctaatatataggatatcattgtaacagataagtaccagattagatctatcatgtaaccacccacctcctagcctatataaatacatgtcaccataacaccacaagccatcaattaaaa

SEQ ID NO: 84457 - DNA, 453 bp, Zea Mays
aaaatatctaggcatttgtagcccttatgaagatttttgtaaccaaggaaggcataatgagtagatcaggattggagtttatgggagttgagttgcaggcacaaccaaaaacccgaaggttggaataatctggtgtggctccggggtgtcataggctatgcgttaggacgaagtccgatttatgatttgggtggctgtgatgaaggcttgttcccaatatttgagtggcatggaggtagtagctagaagagcaaggcccacctcaacaatgtgctgatgttttctttctgcaacaccattccgttgatgtgtatgtgggtaggacacaatgggtaatgccgatggtgcgaaaaagaattgaggcgctcatattcgtcacccaatcagtttgcttggcaatgactttacgatcaaacattcgttcgacatagcactgaaattctttaaagaatg

SEQ ID NO: 84458 - DNA, 1010 bp, Zea Mays
gtcgcccgcctgcacgcgtggaccgagctctccggtgagccattcttcaattcctcgcgcgcacaccttccttgatccctggtgaagctctctgacccgtttgattggtcaatttcgccctcggtaggccagactcctcgccgccgacgagctcccccgcctgcgcacgcggcccggccaactccgaccatccccgacggtgacccgcacatcgtcgtgaccgtcaggacctcccctacaccctcggccacctcaccggagcaatctcgtcgccggtaagcccctccgccctttcttccgccgtgggcactgtttaatttgggggaaggacctcgggttaggattagaagaacctagggggttttctgcaatgttagtgactcatttgaatagtagcccagggactaatctgtgaggaaaacttaaaacacccgccagggaccctgttgcaaagtagttttccatttaatcatttctatttaatctttttaataaatagagaacttagaaaattcataacttgatgaattcttaaccaaaagttgtcaaactaattttgctagatcctgaataatatgagctatcatttaaaaataatgaactctatgctttctgttctaattttgagagtttaaaattaaaaacagaaactaaccaaaccttgtttaattaaggaaaattagttttgcttctgtgctgaacctaagaaaaattgtagatgttcaaacctcatttaagcactgtttaaaaatagtaagaaccccagtattgaaaaaaatagtgtagatatccattaaaagccatttctgcccaaaacttaagaaaatcaaaaaggcattagaaattaatgaccagtgaatgaaataatttttcctagtttgcttaagtaacaaagaacctagtaaaaataaaggaacctctagtccagatcagattcaaagtaaaatgttttatttagcattatttcagctagaaatcaattattaaaattataaaaccagatccaaaat

SEQ ID NO: 84459 - DNA, 724 bp, Zea Mays
gcgacacacaagtcagtaacagatagcaatgctgaataagtatccaaagtacttgtcctagctgttgggctagaaaatgtattagaacaattggaggaggacacaaaggaggtaacaaggatctaggtacagcaagggaacaagttggtgaaggatcggtgaggcgactagagggggttaaatgggatccactaaatattctccacttgagaacatcgtgactttatcctgatctctaggggcataaatggtatggataatattcacccgtgttcgaattcgatctgcctgaaagggctaaaatctgatctgtatccgagtatgggtacttattcgattcgtatccgatttttatccttttccgtattctcaaagttgaatatttaagatgtcaatattcattcaagtcttatccgacacaactagataatatctgtatctggtccaaatccgaaaagaatgtatgaaaacaaatattgaataataagtatctccttgtatcctatccgattacacccctaccgatctcaacgcaaccccacagaacaacaaaaaaatgtgtaacaagttatattcaatccagtgttgattgaatataccaaactactacttaggagactgcccaactgtctacagaaattaagaggaaaaacgcaaggcagggcaagtggcaggccgatagtgtcgggcagcggcagtgccgctcacaggggcgacagtgcag

SEQ ID NO: 84460 - DNA, 378 bp, Zea Mays
gtcgactacctgatcaagtgagagctcgagtttgatatccagatgtagcaatcggttggaggtatttgcctgcgcgctgatgtatatatgtgtgcgtgtgtatgttgatgttttgctgatgggtgttggcatagggtgtgtagatggaccatcttgtgatgacccatgctgggcctatcgcggggattgctaaagcggtggccgacctatgggcaaaattctgtgccattgatgggggtggtggggagactgccgatgtggttgcctctggctaggttgccagtgaaggccttaacaagtgtcactaaggcggtgaagtatgttgttgagcaaatgtgttatgtaagtttgctgacttcgtcattttggttctatttt

SEQ ID NO: 84461 - DNA, 874 bp, Zea Mays
aaaacctacaggggccacctccctgggcccaagcgctcccagcgctcatggctccctatgtcttgtactactgggatttccacgtaggatgattgctctgcttctatggttgttgatcctaggttgcctcaccacgacgcccctagaggccttgatgtcctggccccaccagccgcctcccccagcatagctgtgctaccattgcactggggccagcccctaacacatgggtagcgaaccacgcatgtccgcctagctctggtgtctgctacccttccattcggtgcggtaccaatgacgtttgctgtcaacaaccactcgatgcgcacccgtgcaaagagtggactcgctcaacctcgactcctacaagccaccacattttctctagtaccctcgacatatcgtcgcgcccttgatgatcgacactggcacgtcgtgatggacaaggaataccaggcacctgtctagaataacacatggtcccttgttcctcggtcgcccaacgccaacatcatcactggcaaatagatcttcaagcacaagctcttggttgatggtactctcgattggtacaaggctcgttgggtccttcatgacttcactcagcaccccgatgtcaacttcagtcagacttttggtccgggaataaaacctaccaccatctgcaccgtcctcagccttgctctatctagggaatgggcagttcaccaactcaacatcaagaatgccttcttgcatggtaccctctcagggacggtctactacactcaaccttctagctttgttgacccgactcgtctgaaccacgtctattgtctctacaaatcgctctttggtctgaagcacacgccctttgcatggtacaacttcttcg

SEQ ID NO: 84462 - DNA, 604 bp, Zea Mays
aacaaactggtaccccagtctaatcctagacgtacaaaacccatccaacgcaccaccaaccgtcttcttccttccccacaacgaccaactcctagtggcggcgccggccattctactgttgtgagcgtgccgacggacaacggatcagagatttggtgagccaccccgaacgcggtgatgagcaaaaggtagtggagtttacggcgaacaaaatgggggcaattttaccggtggttgtgtcgtgcagtcagctatccacgacgaggtatggtctgcggtggtcgtagtacgtcggtgagcaattccctccccaccgcacgacgaatccccccggcgaggagtaagcgagattgactatggcggcggctaggtaccttaagacccgatttgagttcacagtataaggagagggaaggaatggggccccggtttacgtggacgtggggaggcagccagggtgtaacggcctaatcaccacccgaaggcacagacccagccgggaatctcggcagtttcaccagtggaatccgcgtggcatcacgggtccagctattcacccagagcgaggaagcaggagaccagcccaatagacgggccccacgag

SEQ ID NO: 84463 - DNA, 517 bp, Zea Mays
aaaacaggatgctgacgtggcatcgccaatttgaagccacttgtgcctctaaacctaacatgttgtgtcatttgggtccccgaatttgatattatgtgtcacctgggtctccaaactttcattattgtgctacaacatggcattgtctccgggctaagttcgaggaactgttttgtcgattttgagagtttggtggtccaagtgacacaatatgtcaagttcgagaactactaatgtgttttgtttaattacgtagcagcctaacatttcgctgggatttccatatgctgcggtgggtttaaaagtttcaagcagtggacatcaccacatgaacagagagagagaaagagggtcctgctatggaaacagcgtgatctgaattagctggcagcttagagtttgtttaggcaacggacgtgtcgcttcaagcaatggacatcaccaacccatttcagcaagtagttgagtggaaggtaccacatagttgaagcatcacctcaaattaggcgcctatttt

SEQ ID NO: 84464 - DNA, 671 bp, Zea Mays
catcgtaagaactccccttaccgaactcgccatcgtgtcaatttcattttgcgatcatcggaactagtggctgtgcaccgtggggcgagatgggtgtttcgattacggcgtccccgccgcggcatcactataggttgccggtgttggaccgggaggggggaagacgtggcctggccattgatctgctgccgaacgaccctgattagataggaaataccccttcgcgtgattgaatatgggtcgtggatctgagatcatgcgaataggattcgagcatagtcgttttaaatctagattgttgatcgtcgatctaacggagccctacgcgtaccggttcggggttccatctgtgtcgttggatcacgatctcgcagcacaaaacgcgttaccattcagtgaaaacctaggtctaatctgaaccgaccgttccagatcagacggctcagatcacgcgataccccttcggtcgcgtaatcttgctaaagaacccccagccttactggaaaataacctgcagtccacgaccactgtgtattgagtctagaaaatcttgcgccagggcccctgcgtttctgtttattatacgcgcagtccaagggaatggaaaatcaagaaaaatgatatagaaattgatttttaatgtaaaagtaattgctataatttgtataatc

SEQ ID NO: 84465 - DNA, 427 bp, Zea Mays
ttcggagtccgactccaagttgtatataaccgtaccctcatccagccattagtagccccaagttagccacgcaagaagaaagagagagagagggtggaaagaagcccatcgctggttttgcccaggtcgcgtggtgctctgcggtgcgatctgaatggtcggccaagcgctgtgaacaaatcgaatggagggctggggtgttggctgggcgcagccaccttcggtgctcgtgccgccatgggcagcattgtgagcgtggggaaaagagctcgtggggatctcatctgtaagctacttgcctcgtcggggtcctgctgtcgggttgaggagcttcgcctgtgccctggggaggttgggatagcatcaccgtggttgaagggaccaccgtgtgccctgaatttctcacctggggtcggcatcgtcgcgg

SEQ ID NO: 84466 - DNA, 407 bp, Zea Mays
aattcactgaacatatatgctacaatctaaaagcatatatggatctcctaacaaatgaaaatagagagataaataccaaaaatgaaagctagagagatgtttggttggtgcatcccttcctccttatttaaagaggatgttttcatattcccaacatacctctagatacatagatcttatccacttagttaggggcaaaatgaaccaactctcattcggaagatctaatggccatggttcctttaccaagttgcttcgccttggcgcaacctctatgatgactccacatgctgcctttgatttccactagaatcgtaccacaaggttttgaggacaaacccatgaaacgattattggatggttttgaggctcaaccaccaaacctcatgtagcgtagtcaatatgtg

SEQ ID NO: 84467 - DNA, 400 bp, Zea Mays
ccgctctcttcgagaaggatcaggtaggtaaaaccatgcaatgcaatgcaacaagcatctggcatttctgttgagatccaaagcgttgagcagctcaagactgaaagggagagcggggtgttcagagggtggaacgagggcaagatcctcttcgccccgacgtacaagtactcgtggaactccgacacctacgccggcgaggacgtgtcgtccaagaagaagaggaggacgccggcatggtgagccttcgcctccccttctccatcgttgctgctgctgacgatgaaaacaaaaacaaaaacaaaatcctgcctgcgcccgcaggtgcgaccgcatcctctggcacggcgaagggatagtgcagctgtcctacatccgcggcgagtccaagttctccgac

SEQ ID NO: 84468 - DNA, 765 bp, Zea Mays
ctcccatctctgccctgccaccaccagagtgagcagccgaaagtctcgaacggcttacaaggatggtggcggcatggtcctctttgtgtgacccgaaatagtttagctcagcccaaacatagcctagacggtttccactaggcccatatcggatctatgctaaaagaaagagaacatggatcttgatcttcgttttatggttttctttgcaatgcttctatattcatgtgggtatgatagctagagaggaagctctaaacatacatcacgcaaaatattagttatctaagtcttcaagtggtgcttttgtttgtatcaattgtagattttaatggatgttagttgtatgtaatccgcagtatcaaatcttcaagcacgatctatctagtcgtgttgtgacgtgtcatacgttgtatctaagtttggggcacaacacgacacaactattcaactcgtggcggcctggccttttctttcttgccagactggtgcttcaggcttctattttcgagcgcgtggtgactgagtagccttaaagggcctgcctcaaattttcagatgtctagagacgaccttgtcaagctttacggcgcattctctatgggcaggaattttacagcagccttctaaactcctttcgaggtaattaagatggagaattttttgtgtttgtcatgcctaataaggttgaattttctttaattgaagtgtcagcttgacatgtgaacggaaaccgtgttcaccacggcgctttaatttgttatt

SEQ ID NO: 84469 - DNA, 387 bp, Zea Mays
caataatctaataagtatatatagaagatgggcgatgaatcctggtcaaccaagatcttctctacagcggtcagatatctcttcttggtcttcgtggggatctcttggcccactattctcttgccccatctaatcggagctcgagcgtaggctttgatgtaagttgtggcgtaggttgatacgttgtcgtgtgtaggggtgtatggacgttgtcatcatgtcccctccacctgttccaccttgcctcagtaatttgcggggaacagcaagagccataatgaggggcgtccttgcgacgcattgagtcaatggtcctacctcggtaacacgcgggttactggcgtagcccagaccttgcggacttcgcacgtcgcatgcatttaatgc

SEQ ID NO: 84470 - DNA, 487 bp, Zea Mays
tctaggactaatcaatgaagaaatgaaacacacacctatctttatgcctttgactctatcaatgaagaaaactcaaagaaagatgtttgacattgagtttgtctcatcaattattcatgccgataaatctagtctcaaacatgtgtctggtaattatatacacaaaacaaagtaatagaatagccacatgatgttaagaaaggggtagttagatacagaaactgcaccttgcactcataacaaaaatacatgaaaacctataataagttggataaagatgaaccaagtaatagtcaatgatttttcttataatggtcacttagatccaattaaagtttacaaatctggttgatccacaaaacatcacttcaatgattataatggcgccgttgcagtcactcatacagtcctatggaaccaagcctaaattagctaactgaaatctaaaactctcaaacttttaagtaaaaattcacatgaaagaact

SEQ ID NO: 84471 - DNA, 1046 bp, Zea Mays
tactgcaacagtgtccttcaggtatgggtacatgcctctgaaactaacagctaatagatttgatgcttggttatgcttggcttgatactggtaagtgcggcagtgtagtgaaacggcctggttcggtttttttaggtagtaggtgtgtatatgctagatattataatgttctagcacttgttcgccagtttcgagatatgccacctattggtatgggctattcatatcgagcacaagtctttaggagtttggacctttttttcgaaaactctaatttgtttttttaattcctaatctgatctcgaagttttgaccttttggagtttaagttttgggaatagtcttgaatcctccctatgtaactatggtcaatgtttatctcaatctctagaaatctggccaaacagcaatatcgtgcatagggagcagcactgctagaccacaacactatcgggatgagaagttgcactgtcaggctgagaagtggcaccgtcgtgctgctccgagagatttcagatttggcttccttcagatatttgggtatctttttggtctgattgcttcctctagagactcttttagagaattcaatcaagagttgattgaggtgttcttaattttggatcattttttaggttttgatgtcttagaggtttacgtgaagttttggaagataagccaagattgtccaaagcaatatttttattggctctcattcatcccctttggtaacctaatctaatgattccaatatagttagaaaatcagcttatggctatatatattctacatattactattgtattgatcattattgtcattcactctactcccatttacctacaaaaaaggaaattttaatctagctgtagcttggacgaacaaaattgttggtgataagatctccactcaaaggtccgaattgatgaaatccatgtttaggtagttttgtaggatatggttgtcagccaaagccaaaggaaaaacactttgaagagcttagaagcatacaaacaagccaaaaataaatgaagacgaagatacga

SEQ ID NO: 84472 - DNA, 423 bp, Zea Mays
ctcactcacctttagatcgataggaactctttaattcacctccacaactacctgtaatctgcaaactcagagcaatccaatactcaacaccgcaaatgacatagggtgttacacattcacgtggcccgaacatgtttaaaccctatgttccgacttgcatccacgtgtaccatcaagcagcgatcaacatcgccgtcctcccagaagcactacgtgggctaccccttagtgcacagccgagactaaacaccgagaaaccatatacctagtcatgatgccagttaattcaatgccttaactggctgggaaccatcattttccccattttggagacaaatccgcctctaaaaatggagccatttttataggctcactaaataagtctgaagcccatgagacccaattgatgatcttgtacataca

SEQ ID NO: 84473 - DNA, 670 bp, Zea Mays
gtccctccccgacgcgaccatcgctgcctatccacgccgcggttcccctccgggcttccccgcccttgcagcccatacatggtccgacgtcgtcgcttccctgccggcttcctcggcgctggttacggccatcgccaccatccaggcggctgtttctgcttctcgcgaccacaagcgcgtcgcgacactcgtcctggagtcagagcatgccatgagcgccgctgctctgaccgcccggatggccaccacgcagcacctcatcctcgggcatcctccagtcgttcatgaggctcatccgcccactgctaagggccccctcacctctgaactcgacgctgaccacgtcgctactcttcacgctcaggccaccaggttgcacaatatccgatccctcatgtccatcatattggacccaacatcctcccacaacccttgttggtggagtcagatcctcctcactctttagcgatatgcacttgccgatcacatcctcaacgacctcgtcgccctgccgtatccttcctttgttgctgagcaaagggactgcttccactaccattcatttggtaccaaacacccttgctcaaactcaagttcttaaaatccatatccatgttgagaaaggcctctcaatttcttcgtttttggtgctcaatgccaaaggggaaaa

SEQ ID NO: 84474 - DNA, 952 bp, Zea Mays
cgcagtccaagtccatcgagacgcagtccaagaccttggtcgccctgtccaagattctgcagcaactctgtgatcgtttggagccccagaaccaccgatggggtggattggagaaggcggtccatgccaacacggagaacatcgccaagctgcacgataaactgggtcagacaatgatacccagattacggagatgcaggcagcccagcaggagcgcgtcaacaacatggtggtgcatgcctccacccgtctggcggcgttggagaatgtcaccaaggtgttcgagtcttggcgcccaaggatggagggctcggttgagatgatttagatgtttgtagatgcagtgcgctcggaactcgccagagtttctcacatcctggagcgggacaaatcggacaatcgagcgaccatgtgttagttcaagtcgaaggcgcagcgcccacctgcagccatgccacgcgtcgacgacccgagacagcaaggctatgttccacatcctcgggagtttggttttggggagtcattccaaacccaactcccgaacaatggtacacatgatcaggctcccttccatcaccatgtaccattttagtaccatgaggaatatgcgcctgcgatgaatcagacgtactgggattttttggggggttatggtcagggtccgccaagtttgagttccttgggcaatcttccgaagttgaactttccgatgtttgatggagagaaccctaagctgtggcaaccctaatgtgaggcctatttcacatgtacacagtggatcctagtgtgtgggttcaggttgcatatatgcagtttaacggtccagctgcgaggtggttacagtctatagagttcaggctttcacacatttcttggggggaatttttccacctaattcaggataggtttgccaaaaatcaacaccaatccttgctcagacgactgtttcata

SEQ ID NO: 84475 - DNA, 692 bp, Zea Mays
tacaaaatagacaacacagaatattccctattaaaaaaatggatctattaaactagatatatttataagataaactagatcatctacgaaaatcacccactagaatatatccatcttatcttaaaagatactctcctactttaatagattcatcttaacttaaaagattctctcttatcttaatagatgcatcttatcttgaaagatttgtcttaccctaatcactttacttaactcatccaaatgaaacaatcgggacctaatccaaaataatgagatcttaactagtttaatctattcgtaccaacctaatctagattctatctaatctactatgatctaatctagagtaagttacttaatgctggtacaaaggataaggccatactcctaactcatttaagcctaaattggtgactgggattaactcggccataccccaacaacttgacctacataataggatacctgatctgtccaactaatcaatcaaactaaattctgaataatctcatttaactcatagccacctactaaactagctactccacctactactttattttaactacattcggataacaacttcaagaacgaagatcgaagatgatcgacctcatcaatcaaggaaggataaaattcaagtcagatcttcaaaggaatcaagatccacaatctgggatggagtcttt

SEQ ID NO: 84476 - DNA, 357 bp, Zea Mays
tgcaagtgaagatggatttgtctatgaagtctttggcacaggtttctcaagatcaaagcgaattggcgaccgttgtgtcgactatcaactgaggaggggcggtgataggagatggtttgatgggagcagggccaactctcagaccaggtggacatcagctaccaccagtaggaggacaacaggttccaccaatctcacccatgttgggttccatgtcgagtgggtctacaggagttttgccatctagaggtgtggagagtgatcttccgggaagaagagggtggttgccgaagtgggattttccagagtttgagggggaagatgctagaatttggttggacaagtgtgaagcatact

SEQ ID NO: 84477 - DNA, 548 bp, Zea Mays
aaagtgataaaagacaaaaaaaactacgagttaggttcatactggatcataaaataggtaatattttctttggaaaggtcgtaaagatgtcaagggaggacactgtctgattgcctgggggcgggtgtgcagaccccttcatttgggaggtttgggaatttctagcttgaaggaattatgttgggcacttcatatgagatggttgtggctacataaaactgatccaagcaggccttgggcaaaccttcctatacaggtccctaaaaaggcaaggtctttcttctccactgttttggtttcagaagtgagaaatggagcacacactctgttctagacgacaaataaatggctcttgcgtcagaatgtgagcaatctggctcctaggttatttgccatcattcctaaaaggattgctaataagagaactgtcctcgaggccctaaccaacagaaaatgggtttctgatataaaaggtgctttgtctgttggggcctttgtggactacctgaacctttgggagcttccaggaatagtgttgtaacctaaag

SEQ ID NO: 84478 - DNA, 691 bp, Zea Mays
gaactgctgatggcaaacaccccaacggttaattttagggcgatctatgctgaaactaaaaactgagcgagtggcaccggtagcagattagtcattaagaaggtgcagccgtactttttgaagaaaaaatcgtagcagaagcccagctctcctcgataatacatgtctgccagttgagactggaatgtggcgatgtcatcggtgttggtggtcaccgtcttctctattgtgctccattgagcgtcctatgccttgagccgatcacataattgttggggaagtttggattgtgtggtgatgttcttcgattaagcctcaatctgcttggactgcactgccaagcattatccatcttcgccttgtgtgtcaagtggattggatctgccaaatctatgatcggtagtctaataccaattatcagcagttgcagcacgatcgcttggggaaaaagaggaggatgggagcagcagcagtcggttgcgcccctggtttcaacgttagagttgggtagttgtcgcttccttggtgaccatacgtatgacgaggttgtcatcacatcggttaccgaagctttcagtgctttctccaggatagcatctcggggttgacgtcaaacgatggtgaggcatggcatataggggcggatctacgggtatgtcagggtatgccctgtgtccgacgtgcgcgcgcg

SEQ ID NO: 84479 - DNA, 470 bp, Zea Mays
tggagaggaaacaattccagagccgaaggaagatgaagttgtggtattcaagagcttcttcagggcaggactttggttccctctttatgagatgataggtgaggttttgaagaagtttgagatctacctgcatcagttgaccccgaacgccattgttgggctcagcgtatacatctgggctctctgaagccaaggaaagaacgctaacgccgaagggttctgccgggtacacgagcttcattaccagacgaaggcaagggctgacggcctgcacaagaactttggatgctacaacttcgcataccgaaaggacatgaaggcccctgtgataggctaccacaccaaatggtcgactagatggacaagcgggtggttttatgtgaaagctaactagaagagaagggaaaatcttatgagcatggtgatgagtctgttgagactgaacttcgacatgactcggtccctgtgca

SEQ ID NO: 84480 - DNA, 387 bp, Zea Mays
gtcttccccaacggcctccgtggatgtcgctcgcgcggacccggtatcaacagaaacgccgcggattcgtcgctcgcaagcgcattgatctccacccggatttctctcaaccgtagcaacagctcggcctcgtttcccctcgcgccctacataaaatcctggccgctgccccctgactgtttcaccagggccaccattgtcgaaccgtggagcgctgagaggaataggaagccgccgcgacctagctcatgtatcaccgttgctggggactctctaatggttcagggggtttcgctcggtccctgggaacgtcttcatagcttcgcggggagtggggggaaacctggtgatcgcgaattgctcgatggagcaactccgccgccgcag

SEQ ID NO: 84481 - DNA, 725 bp, Zea Mays
gtgtatgtgggcccaataatttggttgggttgtgacaccgatgacatctgagtcggtgatgtagggtaactctgtgcgctgcttggaaaatcattggatgtacataggcagggtttcatcagtcttctgccagcagctctggagatctcaagagtttccagggcacacacatgggccctagaagttccccacgaaaaccatgatcaggtcgtcctagtcatggatttggggtgggtggaaggtgctcgagccaggctcgggcgacgtcagacagaaacaagggcaaattatgaatgatgacattatcgttgtttgtacctcccaactaacaagccaggcagtagtcggtgagccatagctctagcttcatttctctcgagtacttggcgatggtagtcggtgcctggaaccgagccgggaatggcgccctttgtatagctcggctgaagacttgggggcctggtggcttgagtgaggggctttggtcttccccactgttgtagtgaccacctcattgagggtagtagccttgcatggcatggcattggtagtcatggcgcgaccgctcaacaaggcgggcctgaacatcatggttctgacagttgtcgagtaggaggtctcggaccgtgggggctttgtctcttgctggcatgggatggaccgaacttctctctcatggcaggagggcctcgcctagtgtaccgaggcgggctctcgaagtcggg

SEQ ID NO: 84482 - DNA, 315 bp, Zea Mays
attttctataaatctagttaaatttgagaaattctaaccaatgtaaatattatagcggcaactattttggaatagcttttcttgttcctatttgcattttacttgtttctatctgcatattttgacctgatgtgacacattaatgacggagatagttgcctcctgctgtagtactaattgtatgggactactgttcagacgtactttatgtaagtgcgttgtgctcatagagggggtaaaaataagggtgccaagtgccatctactatacttactgctgctcagtttgaattctgattattcattgttatgttta

SEQ ID NO: 84483 - DNA, 604 bp, Zea Mays
ggaggaagttgggataaaagtctaccatatgctgagttctcatgtaataatagctattaggccagtctaaagatgtcaccttttgaagctttatatgggaggaagtgcaggactcctctatactgggatcagactagagaaagacagttctttgggcatgaactgattcaagaggcagaggaacaagtctgtataattctggagaatttgagggtagctcagactaggcaaaagagctatgctgacaatagaagaagaccactggaatttgaggaaggagatcatgtgtacctcaaggtgtcaccacttcatggaatgagggattcaaggttaagggcaaattagctcctcgctttattggactgttcatgatctttaggcgagttggggagatggcataccaactcgagctacctgctaatctatctaatttgcacaatgtatttcacgtgtctcaacttaagaagtgtctccgtgtccctgaggaacagttaccaatggaagagctcagtgttcagggtgatttgacttacacggagtatcctgtcaagattcttgatacattgaatcgagttacaagaaataaggtgataaagatgtgcaa

SEQ ID NO: 84484 - DNA, 379 bp, Zea Mays
caaccttcgccctagtgtggtcccgaaggcatcctaatctttcttcgttgactcccccgaagagtaacgcacctggtctgtacccgcaagatatagcatactctttcagttcttctttttcagcctttgacaattcttgcccaagtatatctcggaaattgaagtcttcttcttccgaagtatcctcggctttctcctttccttttctagccactgcgcccgggatctcttcagcggctgcagaggcttcttccacggccgcatccagaagcatggtatcaattttagagagtgtggcatctagatttacatcttcagcggtttcagcttcggcactttcggcttcggtgggtgcagcttcggcagcagcagtgctctc

SEQ ID NO: 84485 - DNA, 498 bp, Zea Mays
gccacattcagaatcttcagtttccagaagaccagagcacttcttgtgacgtacgcaacagccatcgcatccggcatgcatgagcaccctggccgaactctctgaaaacaactgctcgttcctggtctcagccggcttctccgatccctcaagctcaaagtacaacgacagtgaaaccattatagacgacggcgatcgaaccatcgctgtcgttgcacgtacagcgcgtgatacgatacgatacgatgcttgttatttggaaatgagccatggtttcgagcgcatgcgtgttgctgtgtgtgcatggaggctaagctagctagatttcgcagacaccatgctcagatctgattccagtcaaaagggaagaaggtggtgtgtgcgtgacactgccatgcatgagatgactgatgaagatcgagagagccacaaatatgctagctactgtgtaatcatcacccccatttatttgcccgtgcccaagttgcagcacagaaa

SEQ ID NO: 84486 - DNA, 710 bp, Zea Mays
gaaagttcttattaaaagatacttttaattcaaagctttgggtaattttactaaaataccaaaataagattttggggtgtcacaaatcctaccccccttaaaaattaatctcgtcctcgagattagtagaaaagggatgcagaaggttctgtgtgtagttttaactttttagttttcagttagttttaatattaccaaaagtttcttttcattagcaagtgtggctagaaacacatgggtattttatgttttagctaataagtaagattagagcagagtaggataagagaaggtttaaaccaggaaaactctatcccggatggtggatcctgtcttatttggatatcttgtccggcttctccttccttgacgaggttgatctcccttatctggtcttggtgcttccattcaagttagggacatatagttaagatagttgtgggtaggatagactacattaagtaggtcaagatctggtttgatgttaggttggaatggatggtcatcacgaacatgttggttaggtcgtttgttcatggccgagttggtctaaggcaccaatttaggtttaagtgaattaggtgagaaaagagtttctaggtgtagagtttaatctattaactgatctggattaatttgctctaccctacaaattagtgcaagaaatatgaaccgattgactaggccttattagattagatcagattaac

SEQ ID NO: 84487 - DNA, 390 bp, Zea Mays
atcgatgcctcttcgtcgtcgtcgtcggacaagacaacgatggatagcatagtggaggcgcagcgaagcctgcagaaagtgcacaggtacatcgtgaccgcgaacgttgccatcctcaggctgtggtcgattgcgctagcaaggtcgccaaaggtacactccctctccccttcccccttgtcaattgggtccttctgagctgagcatcttctggtcttgcgctttgctttgcagcacacagagacggtgatctggatgctggccgtgtccgcggcggtggtagccgtggtcccgttcaggtacattctgatcgggctggtggcggggagcttcgcgttgaacacgagggtcgcgagggccgtgatgaacccgcagggcggccggcggtgg

SEQ ID NO: 84488 - DNA, 1100 bp, Zea Mays
gccgatcatttcccctcactcaatttcacgactacgactctaaatcatcctgtccacggagacaacgcggacaaaggatgaacacgggcgttcacggtaatccagggtggtctagttcaatccaaggggtcgaacagcattagggggtcttaagaagactagaacaaatgtccaaggagcttgaactaacctggagcaagctgaccacgatgaggtctctttcgcggtggcggaaacacggattggggaaactgagcaattcacgggcgttagtggacaattgaagacaagacttggcggcttagatgcgtgattaccctgcggagctcacaacatgctcaatttatagcaagcaagagcggtggccgatgaatttgtattgagacgcgcggcggtcggaggaatgggaggtcactggcgcagtggattcgtggagaatacagtggcgggctccccggcgatgatcgaatggcttaagcgagtcacggcgatgtggtaaaagtgcccaggcatgtggtgcaaggccatgaagcggttgtctccggcgaacacatccgaaggatccgtgaccagctcagtacggtggtcggagtaatttagtggccggagtatatccacggcgatgatatttactcaaccccaagcactatccaaccgatccgagcacgaatcatggcggcgaaagcacgaatccgcgcgtggctcgtcggcggcgagggacagagctggcgacctgatcgggacactgtaccatcggaactgcgattcagagctcctaacagcccaacttgtagcgtccagaacacaaatttctatataagaacttgctaattcaccagtagtaaacttgcagccattcataccagctacaattttgttatagcaacaaccaccaaacgagcaacagatctagctcaaaatggctctcaaacctagttctaggccattgtcagtctgatttcagacctaagacagcctgacaggtcaacttcgagtcaaattttctccaaatttcttatgtaacccaagcataatctctgtagcaaagttactctccttacatagctctaccaatttgatgtactgacctagggcaaact

SEQ ID NO: 84489 - DNA, 370 bp, Zea Mays
gagaaggggcagaagagtgtgtaaaatcagcttgaaaaactcaaccaaaatgggaaattcaacaaacaagatccccatgagtatccaaaactctagaaaggccctttttaaagtgcggttcatagttatcctcaaggagttgtgaaatagaaagcagattgaaatgcgaatttgaaaccaaggcaacatccttgaggacaaaactgtcgatcactcgaacggagccacgagagacaaccttacttatcaacttatccctgaatgtgatgtattccttaccaatcactgggttgaggctagaggaccatttgttgcttctagtcacgtggtgcaaacagccggaatccatggtccatgtgttctccaggcc

SEQ ID NO: 84490 - DNA, 681 bp, Zea Mays
gcggatgataagctgagctgaagtttagcttggtatccatggactcatgtagtcttttccaaaagcgtgaggtaaactgtgttcctcgatctgatacgatcttctttggtacttcatgcagacaaacaatccttgacatgtataactatgctaattgggctcctgagtaagtcgtcttcacaagtataaagtgtgccactttactcaacctgtccactataacccatatggaatcatagccatctcgagtacggggtagtccaaatatgaaatcgatacagatttcttcccagttccattccggtaccttgagaggttgtaacaatcctgctggtctttggtgttcggctttaactcgttgacacacatcacatagtgcaacatgagtagccacatctcttttcaaaccataccaccaatacttttcttttaggtcctggtacatctttgtacttccagggtgaatagaataagccgaatcatgagcttctcttaaaataagatggcataggtgtttgattttggtacacagattctctttttaaaccatattgtgccttgttcatcttccgtgaaatttggggctttacccaaactaaccagagttttaatttccttaattttctcatcagattcctgtcctttacgagtctcttgttctaaagtagattccacttccat

SEQ ID NO: 84491 - DNA, 736 bp, Zea Mays
cggcagccttcctctttttctcttgcccttttatcggataatggtaatcagggtatacgaagccaatagcatcaaataccctatttaatcttttcttgcctcgacttccaaaggctgcggacagagcattatctttggccttggaatatgctccaagtaactcatcactggtagcttcgatgcacttcagccattcatcgtttggctcatcaaacctttccctaaatatgaaggtatacttcagtcggaccagaccaccttcattagaatcggcggtggtctccttcggcatatcccagctttccacaagtggccataccctgaaggatatatgctcttgaatcagatcccttgtgccaatgaaggcgcacacagtgctaaaagctctctgacatgctttgacattgctatcaatttccaccttcggccttcggagaccgaagtgagaccaaatggggcgctggatgatttctttgatgtcttcccttgcctttaaatcatttttaacataaaaccactcccccatccaggacccaggccatcttttccggaatgttggtaccgggtggcttgcattggggcgagcaataaatccataacaaccgaagttgttgtggtactgttctttgccagtagccttcgtctcatactgcagaagcacttcacgctcggctccagcccttgacttcttacagcccagacaaaatccccatcctcatcacagcttcgagggtga

SEQ ID NO: 84492 - DNA, 434 bp, Zea Mays
ggggagcagcgacctgcgttgttactttcggatagttcgttttgcagaaaggacctgcctacctgattcacttgcggctgtgaaaattttggcaagtctgcacagtgtgagaccagtcagatttgtgccttatgttcacgtgccatatcacgttgcacgtaaatctcaagcactgaaactgctccgtcgggtcaccttttggtcctgagcgttgtcgtcatttgttttgaaaccaaaccatggaaatctctgcaagaccactctagaagctcatgcacgtttcagaaggaatgtcctgtgtctgtagggcatctcgagcaagtggtccgtcaatcgtcaaagcatggtgtcctgtcctgttccgccatgttttttcgcagggcatcggaccgcgcctgtccgtccgtcgtcgtgtcctgcaggctgcagcagat

SEQ ID NO: 84493 - DNA, 630 bp, Zea Mays
gaaaatatcacgagatggaggagtgtccggtagtttccagggctgaacaaagaggctacgtggaggggataaggagggatttgttgtagacgagaagacttccagccgagcactaattggataagaataggagcattccaaggatttaataagagaggagaacatatacgacttgggtaaaaataaatagagagggctgagcagtggacaacagtcagttgctgacttgaaatgacccaagggaaacacacaacaggcgtggagacccttgcttcattccctgactgagccagtttcagtcacctgaaactgcactcacactacttggctgaaccctcccctttatccctctttaatcccacgatttcaaatggtaacgagggatcaacctttgctaataaaatttgctcaccaaacaaagcactacaaatttctgtagcaaccgaagaccgaaggttcacagatcaagagccgtagcgctccaaagtgggacgaaaacactgaagttccaattcatccagctgaaacaagaacagaacatcacatggctgacatcacaacttggaacagcagtttctcccattctaagcaaggtcagggagatctaccttaatggaaattactcaccac

SEQ ID NO: 84494 - DNA, 394 bp, Zea Mays
gcagccagtggaagaactagggagagcagggaaacgagcaccaggggcactcagctgatttgtagaagtgggggcagtggtaggatgaatgaaaacaggttgtttgaacggataggagggtggacgaggcgaagaacgattctgattaaaaggtcgaattaccaacctggtttgcttctcaggtccctgattggacttgtcacctccaaatccctttgattttccctggcctgtgttcttggattctactaccagcgccgtgctgatagctctgctgtaagtaagatctaggcaggtggccattttccattggagccggtcgttgagtcccctcatgaagcaattctttttcttcaggtcagtgttcacttggtcgatagcatattgggataaa

SEQ ID NO: 84495 - DNA, 446 bp, Zea Mays
gttgatatgcgaagatatagtaaaagaaggcttgaaagggtataatcgaagatttattgaatatgatgcacagaatagttattcatgggccttgacttgcgtttttttcattggtatataaatcttgacttgtgctttctggtaggtttcataactctaatatacaccaccttgctttaatctaaaagaatttttttaatgtcgttgttgtataatggtgatggtaaataattggtaattttgcgactgtgcatatacagtgagcatggccaatttagtttattcgtacatatgcgattctcgattctcataccaacagaatgatctagggatcggatattttctagtgggcctgcacggctgtgcttggtcgcattgtccatctctgcatcttatttcaccattaattctttttgaaactaatccatctcaatcgtggtaactaa

SEQ ID NO: 84496 - DNA, 419 bp, Zea Mays
gagagaaataggacatgggcgagcagatttttctgcttgagcggcgggcggataggaacgagagagaagagatttttccctcccgcggatgaacgcgcgcaggtaaaaaatttggtgaagatgagtctcacgcgagaaaaatcagcaggaggcggttagaaaaatattttctcttttctctttatttataaagaaaaatcgctgatattttgagtcacgatttgtagcgataatcaaagggtcgatagtatttgtgacacggtgtgattcgatttgaagcacgagatatttgatctgctgtcagaacacatgattccatggtcacggtaatttacccgagaatcgaagctcaattataattctcggacgcgcagtcacggttttgatttagcgaatacttggaatcagatgaatttgca

SEQ ID NO: 84497 - DNA, 1022 bp, Zea Mays
gtgatcgagcactgcctgaagaccaaccccaacgccaggtcggtgagtcagaagcctcgcaaatagtctgttgagcgataggacttcatccgaaaggaggtccggaagctgctagacgctggcttcatcaaagaggttcatcacccaatatggctagccaacccagtcatcgtccccaaagagaatgggaattttgggatgtgcatcgactacactagcctgaataaggcctgtcccaaggacccgtatacgctgccacgtatcgtggattctacctccgggtgcaatctattatcattcttagacgcttactctggtttccatcaaatccagatgtctagggaagatagaaaacataccgcttttgtaacagtggatgggctttactgctatgttgttatgccgtacggtctgaaaaacgccttgcatgcatttgtgcgggcaatgagtaagactttcggggacctgattagggacaaagtagaagtctacgtcgatgacatcatggtcaagactaagagagggtcgaccctagtggaaaacttgaccctggtcttcgacaagctatgggcaacccgcacgaagctgaacccagacaaatgcgtttttggcatttccgctgggaagttgctgggattcctggtttcgtaccgcgacattgaagcaaatccagagaagatcagagcgattgaggcaatgacgccccctgcccgagtcaaggatgtccagaagcttatgggatcattagccacccttagccgcttcatttcgaggctggctgagagagcgttgcccttcttcaagctgctacggaagtccgggcccttctcttggactgaagaggcggagcaagccttccaggagttgaaacaacacttggtgtccctaccaatattggtagctctagaaccagaggagccgctgtatttatacatcatggtggccgcgaaagcggtgagcatggtgctggtcgtcgagagactggcaccagaaagccaggaacctgaggacttagaaccggc

SEQ ID NO: 84498 - DNA, 390 bp, Zea Mays
gatcgcgatgccgtgttcacctccatgttctggcaagaactaatgaggctcatgggcgccaagcttcatatgtcatcagcattccacccatagtccgatggacagacggaggcggccaacaaagtcatcgccatgtaccttcgctgtttcatgggagatcggccgcgtgagtggctgccttgggcagagtacacatacaacacggcgtaccagtcttcgctctgcgacacacccttccatgtggtgtacggtcgacatcccccatccatccggtcctatgaggtggggggatacccgggtggcagcagtggctaagacgatggcagagcgggaagtattcctggaggatgtacgacttcgcctggagcaggctcaggctgtgcagaaacg

SEQ ID NO: 84499 - DNA, 645 bp, Zea Mays
gaaggtaggcttacctccaaggattgtggcgttcggagccctgcccacggtgcggcggcggattcacggcgctataactccggtcacctgatacgccgtccaaaagaaatcacgagctacgattcacggtcctatgcattcaagggaacatagggagtagcgaattggtttctcaccagagcttgtcccgtggcgtggccggtccacgagacgagcgggatccgcggcggagatgggctctgacgagtgattggtcgcacgcgagacgattgcaggcacccacagctcccggattgacttccgcgaccccagcggtgcttcacgacgagaccccatgcctagggtggacgaattcgatgttacggccgcggcgcatcgacaatgatttctggcggcggtgaattggctgcagaggcgctagtcaatgggttggacgaagaggggaaggcgagctcgagatggcgaacggaaaagggatctgttacttgtacccaggagtccagccgagaaggtcctggtccggcggcgaaggtttcgcaacggccatgcccgccatgcgcggtttccggccacgggctcccaacgatttgcgcgagtcaagcggtacctatcccgcgacgtccgcgcgttaggtaggaagggaag

SEQ ID NO: 84500 - DNA, 708 bp, Zea Mays
gcagttatgagcgtaaatactaatccaacgtgaaaattgttgattaagagagttgattaggagatttaactatgtgagttaattaggggacttgtttgcgcgatcacattttatagcagatccaaaaaatatggcaaccactcaggcatatgaatttggttcctacttttaagcagatctgagaattatggttggtcgtggaagttttcattgcatgttcacaaattttggatgcatttttgtttaaactgcatgcgtgcaaaaattggatgacaagaatcgcgcaaaaacataaatcttgatagaaagttgcataaattgctacctcgtgcatcataattaatggaaaatgtcctaaaatgtgcctaaacaacaaccccatgcataaacaaatgattggagcaggtcgtagccgccgcgcactatcgtgcgcgccttcggggtctgccgctgcgtgcgcctcctggatccgtcgtcattcgtgtgtccgaggactgtcgtcgccgcactcgcctcgtatggctcctcgtcgcgcacgcctcaatgggtcaacattgtggtgtggcctaggagagccgccgtcgtagagatccgcctcgccatcgggattcgtcttcatgtcgccatagttgctctcacctcgtcgtcctacgcgccctcgggatccgccgtcacaccgccgcaaccgctgcacatcgttgtcgtgcg

SEQ ID NO: 84501 - DNA, 454 bp, Zea Mays
aagatacatagcatgtgcaacagctgttattggtatgtttcactatgagacttacatgaacaaagcctcttatagaattccagctcaatctagctatgcttgggtaatgcaaacactaggaaatagaactagttgctataacatgtttaggatgagcaggaacgtgtttgataaattacatagtgtgcttgttgaatcttatgggctaacaagcactagaagaatgacatcaatagaggcattagggctatttttatggatctgtggtgctcctcaatcacttcggcaggctgaagatagattttgtaggtcactagaaacatgtagcagaaaatttgacaaagttttaaatagtgtaaacaaactagcagcagacatcattaggccactagatcctgagtttacatgtgttcatccaaggttgcaatcacctagatttagccctttctttgac

SEQ ID NO: 84502 - DNA, 582 bp, Zea Mays
cagaaactgaaggtccagcctaaaaaacagcttgcgtcgtgccagcttcgtcagatttctttaaaattccgccttctgtactaggtgcttcagcagaagcaggactcgatgcctttacagactccataacagcgtctagtacgctggccattctcctcttccttgtagtagttgcagggatccttgatgccttcggcagttccgtcatgcttgggggactcagggccttcagctgctctgccgccttctctagttttggctcctcagtcggttctgtcctagcttcgacgggcacagagcgacttggctcagacatagaagcggacccttcaactagctttggcacctcagccgtctcaatgcgcctcggtcggcgcgtcacaactttaaccttttttacttcggcgcgctagaagtcgctaaagtagcagtttttatcttctttccttgcttccgcaaaggatagcggtagtctggatatacaaatccaatgacatcaaacaccctgttcagcctctttttcccacgagccccgaaggcagttgtcatggcgtcatcttcatccttcgagtatgctccaag

SEQ ID NO: 84503 - DNA, 446 bp, Zea Mays
gcccatcatacatggggagctaaggtggcttgtaatatggtggccatggggtagcctacaactctgcttctaaaggagaagcgccatcaaaagcaaagtcgccatgataaaagtcatcgtaccattcatcctcattgattgggctttcctgacgaagctccctgtgttggggccttcggtcttggtcatcctgagtaaggtgacgcatttcctcgtcagcttcgtcgatctttttctgaagctcggctagctgaagcatcttttctctcttcctttgtacttgctgatgaatggcctccaagtccctgatctcctaatccaactcctgctcctgaggtgttgggttggtagcctttctcttctagctcctagcttctcgcggggagagtgtctcctggtttgtgtccagtggctacagggcaacccctggcgccgttgtcttcttc

SEQ ID NO: 84504 - DNA, 561 bp, Zea Mays
gggatagaagtggacccatccaaggtggaagccgtttcaaaatggaaacagccatccaacgtcagtgaagtatgaagctttctgggaatggctgggtattaccgccgctttatcaaaggattctctagcatagcgaaacctatgaccgaacttctcaaaaaggacaataagtttgtgtggactccaaaatgtgaggaaagtttccagatcatcaaggaaaagcttacaaccgcgcccgttttgacactaccggatatacaccaggacttcgtcatcttctgtgatgcttcaaggcaaggcttagggtgtgtcttgatgcaaaatgagaaagttattgcctacgcatcccgcttactcaagccacacgagcagaactaccccactcacgacttggagttggcagccatagtacacgccctgaaaatatggaggcactatctgattgggaacaaatgtcacaccttcaccgatcacaagggtctgaagtacatcttcactcagtcggacctcaacctccgtcaaagaagatggcttgacttgatcaaggattatgacctcgag

SEQ ID NO: 84505 - DNA, 544 bp, Zea Mays
aacaattcgacttgcaaattttattcaagtcattagtgcactaaaattactacaaccaattaacaacgcattctccacgataatcacccaacaatttgcgttttaaattagacatcacatgagcactactacttttcatctgcgaccataaccatgcgcaattttggctacaacatcccaaacgggtgcaagaacactagtttctagttttaaacccccatgattgctccattaatcattttaactacataatcggcatcgaccgacttaaccttcatctcgacggtccgagcaccacaattcacgaacgtctacctagatatctagcatcacatagagagtctactacttaacattgcaatttcatgcagaaccgcaaggtgacaatactaacacacatgcaatcgacctttttctacgaccttcagttaggtcaccaaccgacgacatgatgactacgaaggcatgtcaccatttcatcacacccattcatcgcctatatgcgcactaattcttttcttgcgacacatgcactcaaaatcaa

SEQ ID NO: 84506 - DNA, 348 bp, Zea Mays
gtgggcgcctctttcacgcgttcgtaagtaaccctagcaccctggatcgctaactgaatcgaaaccttcatttctcctcgttcggttaattagccggagatttgtatgcatttaatccatcgatccactcgcaattcggtcgcagcctatttcgcgaaacaaatgaatccgggtgttcacaaacaaaccacccgaaaattaggtgacaagattggagtaccttacatgttgtttccgcaattcaaagtgggttttgctgcaaaaggtatcgtgatagatagattttagctgagagaggtcaatttctgtagcctctcatagttgtcactgaaagagggtgtgtggtgg

SEQ ID NO: 84507 - DNA, 680 bp, Zea Mays
ccttcacttgttatatatagccagtggaacagtcctggaatgcagccacgccaaaccagtttggccgcttaggaatatgtttgattagctaatctgttcgtaggcactttggtctatagaactaaaagggcagccaatgagtactagattaggaaagtaagggagaaacatacatatataatccacttaatgacgttcagagtcgcaggttctgtcaaacataccaatatgtcagatctgattaattgtgaactgagttcgatctctgttgcacttgcttacttggtggtaaaaaaaggaacaagtggcgtgtggaggagcatgttggttgtagtttcagcctcaactgaataatcccagttgccccatatgtcacatcaacagaggagaggcatggtttgagatctcggccagaaacagcttctcgctagctttgcgctggattgcctactacctgccggcagctgtttgatcgttccctggtttaagcaaagatatacagctgttcaagcgttgaacctgaattaaaataaacactcccttgttccgtggagattcatatacattgttttttttctgacgatttgtttattcaattttgtgtactaggttggcgaagtaatccgattccaatgcagacatttttccagtcagcaatgggcactgcatctagtttcatc

SEQ ID NO: 84508 - DNA, 600 bp, Zea Mays
cttgggaagaattcaagctagcattccgtgaatactatgttccagagggagtgcttcacatgaaacaagaggagttcattcgactgaagcaagggggagatactgtaatgcaatatctcaacaagttcaatcatctgtcccaacatgccatagatcaagtgaatactgatttgaagaaaaagaattgcttcatgaggggactcaacgaccggctccaacggaaaatggccacctgtctggatcttacttacagcagagctgtcatcacgacattgggccgtagaagccaagaacacaggccatggaaaatcaaaggcattgggaggtgataggtctaatcaaggacctaagaagcgaaccaggttggtaatccgaccttttaatcagaatcgttcttcgcctcgtccaccctcctatccgttcgaacaacctgttttcattcgtcctaccactgccccccacttctacaaatcagtcaagtgcccctggtgctcgtttccctgccctttagttcttccactggatgctttaattgtggaaagttcggacactttataaaggactgtccatacccaaagcagaataaattcaacaatcagc

SEQ ID NO: 84509 - DNA, 683 bp, Zea Mays
gcttttgaagtgtcgactaataagttcttagggttcatcattcatgaacatggtataaagatagactctgaccggattaaatccattcggaatgtgggacctccgacctgtaagcttgaagcacagaagttcctcagaaagataaattatttacggaggtttatttctaacctagacagaaagattgatgcctttactcctatcctttagcttaaaaatgatgccgaattcacctgggggtagaacaacaggaagcgtttgatctcatcagaaagtatttgtcttcggctcccgtattaaaagcgccacatgtaggagtatcattcagattatacattgcagctgaagataagtttattggagttgttctgacacaagagaccaagaagttatgcttaaacctgttttatgcatgcaccaagtgtagatgttatttgttgtctagtcattgcaccgtttccggtcaaaccgatgtgatcaaatatatgttgcaaaacccaattatgagtggcagaattggtaaatgggcttatgcactcatagaatatgacttggcttatgaaccattgaaatctatgaaaggccaggtcgtagcagactttattgtagaacatcggattgatgatactcataaactagacatatcatacctcactgttactcctggattttatattttgatg

SEQ ID NO: 84510 - DNA, 330 bp, Zea Mays
cccctttgagtttttgtcttttcttacttactatagaattgttatcttgtctcaaccacttacacttacattggcacagatggcttctcctacatccactaagggaagggatacacctatccacatagattgtctccaccaggatggctttccctctatcttgtggggcgttctaaggatcggaggataccccaagcctcctgagtacaatatccatcaatatgaggagcacagagtgcctcattgtagagtgcagcttgcactagagccccacccgctgcacccaggttggcgctctctagacactgagaccatcatgtttagggcaaa

SEQ ID NO: 84511 - DNA, 445 bp, Zea Mays
cgagttgccacacaaaacatggagaaccaagctctttaacctgctctgtcaggcgcactgaagaagtttcccatggtacagtactaaagaagatcttcaggtgcaatgcacctcaccgccggtgacccctgcgtcctgattcatgtccatgctgtgattcgcacccggtgacgcgcggataacgaattagggtgaaaagatctttgtcgtggatgaggttggggcactgtggccaccctgttgcagtacccacttgcgtcgcgacatggccgtcgcggtgatgatcgccgttaacccgagcacaccatgctactgaccttgttaccacgccgcagtaggtcacggtagatagcccctctgtcgtcggggacttagctcagtgaatgccacgttgagcggtctacggtgactcctctcctttcttaccaccagctcttcttcgccc

SEQ ID NO: 84512 - DNA, 693 bp, Zea Mays
ggttggatgtcgtagaagtaacaagtgatgagatacttggagcgtattcgaaggtggaagacaaagctatgataaccgccttcgatgctcacggcaagaagagattgaacaaggtgtttgatgttatcgggttcgtatacccaaactattgctatcccacgcggaagcaagggaggaaaaggaaagccactacctcgacatctactagtgtgtcgaggttgaagaatatcaaagttttgacacgtcgacctaggcgcattgagacggccgatgtgccaaagctaagtgaaagggtggaaacaaccccccggccatagaggctatccctgttgtgcctactagaattattgcagacctggctagaaagccagagccagtagtagaaaaagtaccagagcagccgaagatgaaagtaacaatattgccgaagctgccaactaccacaggcactccaagaaaaaggaggatggcaagcgttttcgaagctgttctagaatctgtgaatgcgccaccttcttcttctgccgaagtctctagaagtaaaactaaagatgttccaaagatgattactgccagcacctcttcccacgccgaagcggggccttcagaagccgtaccagaaaatcacacggaagagaaccttctagagaaaccttcggcgccagctcccgaagcaccttcccaggatgacct

SEQ ID NO: 84513 - DNA, 1200 bp, Zea Mays
taatcaatagagtatgtgatatgttacccttaatgttgttaccatgtagacaatgttattacgaagtcatcgcaattggaacggagtaaatcagagttaaaatggatgagatatgaattaaacaagtttctaggtattgtattattaaatttatacctaaaaatagcttccaggggctaaactgcaaagtcctggtttatttttatttatttaaatgctgaaaatgggtggcgggtttattatctaagtttctagggtcttctttgaaaatccaccatagccgcaatagcctggacgcaccggagccgtccgattcaacattagcggcaacaatttaatgaggcgaagaggtatttcggtttctaatcagagttgttcggtcatgaaccgacggcacggatctaaatatcgcacgatatgtcctacatcgttcgatccacactcaacgacccgatttctatgcgacgaagggggtacttcatgtcttaatcgtaattgtctattcaatgattgagctgcaggctaccgattcggcgacggagcctatccaccatgaacatgcacgatggcgaggtgcacacaaccccggaattggttatgacatcctatgaagtcatgagtaggataggagggcaatcacgaattcgtcatttataccctcgaggccatggacccatcgcaacagcattccgttggaggcagtgcatcaagcagagtccacagttttgtttgttgtggaccgatggagaagaacctgacgggttggccccacttggcagtgtcacctgacggaataggtacaaggtgggccgacagcgagccatggcggacgacctacggtgtggaagcacagctgggccgaggcaaggggttgagctagtgtggagcaagagagatgggcgagcttgcgctcgagcgactagttgctgggttccacgtgtcggccacccagagtcatagaagaaggggagtggtaatgggccagcggtgatggtgagactgggcctagcgaccgaggtgggctgatgtagagaaacaagctcgagtggctgttttattccttttgtttcttttcttttgttatttattttctattttccttccttttcatagtcttccaagttcaacttttgaaatttgatttgaaatcaaagaacaaattaaatgcatcaaacaaaagaattccggcatgaacttgat

SEQ ID NO: 84514 - DNA, 387 bp, Zea Mays
gttgggcattcatggtttgtgctagtttacattttgggtggcatatggaggcatttccccaataattcccccctgtatgagaatattgagcctgtggataacattcctcatcatatgcacgaccatgtagtgcatgggaactagaacatccctcaacattgggtgcacaggcaggtcggggcggctaatgaactgcaagcaaaaatagggatgaactaggaagatatgcaactagcggtggatgagttgttccctctgcaacatttggagggggcccggttgatgtggctcttcaagatccaatgaagttggaagcgaaaattgaagatcaaggggatattcaatcctaggactccataacttttaatcaatctggctcaattgctt

SEQ ID NO: 84515 - DNA, 492 bp, Zea Mays
attcggtacaaactgaggctacccaaagctacgatcatagggaaaaacatggggaagctcataccgacgggttaggcgatcgtttggctcgtggcggcaccacggcacaccaggtcaccggtgaggaatctggagccgcacggcaaaatctactcccgacggggcgctaatacgcactgcgcgacaaatgcaatggcccggaacacttccgagagcacacgcgacaaagcaatgggtggactaccgcggcgggactttgtctcggcggagaggttcacggcgattgtggaagtcgccctaggtatgcccaacagagggagagagggtcgtgaccagaagggttttatatgcgtggtccgagtctcctccagcccacccatagcgccggtctgatagggaggtagttgcgcccgccagggagatgcgcgaactaatgccgcatgtgacaggggagaagaggaacagtggttccgggtcccacccgccagcttc

SEQ ID NO: 84516 - DNA, 593 bp, Zea Mays
attatgactatttcaggatcaaccattggaccaacgtgcttttgttctgcattacctgacctttcatcgcaacaacagggtttaccccttccctgcagaactgatgcctttcaagtatgttccaaggaaacgacgttgtttgaaagccaagacttagatatcatagctgaacaatattccctctgggatccccaaactgtttatgttacttcttaagtcacttatgtcaagtgttgctcatttgtatgatactccccatgacacttatgtttgttgtgtccagtgtttatgctacttcgtatctgtatttatttcaagtgtgtaaaacagaagtggtaccagaatgcctagttatgctatatgtgatgaacttctatgccttacatgtccagattgtctgattgttaatcgtttccgtccaatgtttggcgtatttctattatcatattatccttaatattcaagttttatgcaacatatatacttccttgttttatatacattaggttccttttacaaatttaccatgctaattatactaactgtgtccagtgtctatgctactacctttctggtttagatgaagtgtcaaa

SEQ ID NO: 84517 - DNA, 478 bp, Zea Mays
tatatagctcactgatcaaccgctggagcgaaatggttgggtgggcaagcaagagtgcgatgttccaagacgcgtcagcgagcaggattttggatgagattttgatggggccgagtgtctgtcgtcgggcacatgctggtgccggtcatggggcgctttcagtgcctggactgccatgcttgttgtgtcttcagatgcatcggcgatcaacaagcaagggacagcaaaacgtgcatgggcacggaagcactggctgagtgtctcgactctcgactcgatcagagatggcaatgcaatgctgcgaaataaaagctcacatgacgtgctgctactggtccagctgcagacactgaattgaagaggcgataaagctgtcgagcaacttgtgtgggccgccggcgctggacaggcttaatcagatagtagactcgatccaccgccaattgaagagacgataaagctgtcgaggaactgtcag

SEQ ID NO: 84518 - DNA, 473 bp, Zea Mays
ctactttcacgatccagttgactcttttatcctttgttgatgaggttaatctctttccttcttgagtcttggtgtcggtgtccgagattgggacatagttaagatagatttgtaggtaaaccaaacagcttattaggtagagcaggtggcttagtaagtggcttaagctaaatgagagtaggtagaatcaggtttagttgttttgcttctaggttgggcaggataagtcatacaacccactatgtaggttaggttgttgttcatgtccaagttggtctaaggcatcaatataggttaaaacatgtttataggagtagagtctaatttatttcaccaatattaacttgttatgtgtctgaccttagattaggttgtatttagattagatgggatctagattagtttggcatgaatagatttgactagataagatctaattaatttattttggactagatcatggttgctactat

SEQ ID NO: 84519 - DNA, 421 bp, Zea Mays
cttttgagcgaggcgcatccaataattcttcacatatccaagcggtagaaatgaggcaaaccttttcaccaaacgagctaggttatgcaacaccccacacaccggatgctccctctctttcacggcaggaatctctcgctttctcgaccccgccccaaatgatctgtcattttcggtcagcatatgccatgcacgtacatgcgcccccctgattaatcaatcaatccattttagctacgagaaagaaaggtgggggaagaaaaaaaggcagggaaagcggtgcgaggagcagaaattcgggggtgactagctagctgttcgtcccgtgtcccgttcctcctcgcccaccaccaccgcacgccggacaaaaccgctctcctcgccacattcgcagcccccctcgctcgcgcacacgccacac

SEQ ID NO: 84520 - DNA, 599 bp, Zea Mays
tttatatatagcgagtagagatcgatcatgcatgtgtgcatattgtgctagctgagagaggtttgcattggttgtgacgactacctagctacatgtgtacgtggttcgacgcggttcatgtgccactatatatataggaccatatattatgatccaccatcgatcatcggtcgccccctgtgtggcttctgttcgtgaccaaacggactgtccggtcctgatatcattcgacacatgcgggctatatatgatagaagttgctcctaacctaatcactagatgcgtaaacaatagtgtcgattatctccaagattggagaagcttgtcattaggatgattcttccttgttcagtaatggcaaggagcgcggcacccgcgcgccggctacgagaccagacagggtcctacatatgattcttcttaatttgttcagtaatggaaaataatcgagccacatcgtgacagcccattagtcgtgacgtatatctgtgtcggtactacgaaccagacactgcacggtcctacaccgtgcccgtaacggcactgtcacttgcgttcaggccatgcaaatatcctatttttttaggactggatctatt

SEQ ID NO: 84521 - DNA, 756 bp, Zea Mays
tttgtttgtacaataccacttgaacttaaatttaaaatagattttgacttggttttgaatttgaatttataaacacaaaataaaaataaaaaaggaaaaagactcaaactcgtgctttgggcctaattccctcagctggcccaattctgttttccttccccacgcagcccactcactccaccacccgcgtcgcgccttcttatgcacatagctaggcccatcgggtcggtctcgctcacgctctcaggttacgctagcacgtggggccctggagtcggacccatctcttccacgtcgcgtgaccaggagacgaaattctccgtaacaagcctggccgcaatcaccgctaatcacccggattcatcgcccgatgctgcgtccgctcctgtataaaaccaggatcgttgcgtgctcctcctcatcccctagaacggagagctagagccgcgccatggctaatacagagaaagagatgcgggtgcagggagccttggaatctgctgcgcgccatgctcatctccctatgaatccgcctggaattcttggtcacgggtgaatgctgggggttatgggagctcgcgcactggcagggtaaacccggagtcatctcgtggacaagaattgttcatcggtgctgcgtcaccatcgccatggcgctccgcatcgacgaccgggatactggcgcccgaacctccggtgagaacgcctccgtttggctcgccatgccacgccaaataagtatgtggcttcgcctgg

SEQ ID NO: 84522 - DNA, 558 bp, Zea Mays
gaaaacttgtgttaggatctggttttagctattgtgcttccatgagctgacaattgcagttcaagatacagaaaactattgcagttcaagatgacaaaaacttgtgttagtatctggttttagctattgtgcttccacgagctgacaactacaactggtatagctgttgtaggtaggtctagtctagcatgacgaggaaaaatgtgatcttgcctatttttcagattaataaagagattaattagagtctaagtttagttcacctgttaaacttttttcaacaaaaaatctgtcatgacgactaacagtaaccctaattcatctaggattcaacccttggtccaaaacccctaccaggtatattctagcagcactgaggcctcaacatatatacatacagccgagtaattccaactcctacttgaaatttgaagagataacagttttaatatttaaagacagaaggattcagcaacactttggagaacatatgttcttccttcagaaattaaaaaacagctccaaatcctaactcctacttgattttcaccataattt

SEQ ID NO: 84523 - DNA, 318 bp, Zea Mays
tccgagaggaggaaggggaggtcgatgcaccccaaggaaaccattctaattgttttgtggtgaggacaaagaccacaccacaagaagatgtcatcataccatcaacaagcagaaagagcttgcttcgtcagccacgcagcctacacagtcaaaagaagtgttcagtacatcctcatgttgttcaccttacatcccacagtatgtccagccttagttgcaagagccaaggcaaagtttgcctttggcctcaaatatctcaagaaacccaggatgagtgtatggtcactgtctgcttccttcatcctaggaccacctcca

SEQ ID NO: 84524 - DNA, 607 bp, Zea Mays
tcaactgcaatgtataatcggaatggtacttctgctcgtggtgcttttaatacaggagccgaagacaagtatttttttaatgagatcaaatgcttcctgctgctctaccccccaagcgaattcagcatcattcttaagccgaaggataggggtgaaggcatcaatcttcccaactaggttagaaataaaccttcgtaaataattcaccttgccgagaaacttctgcacttcgaccttacaggtcggaggtcccacattccgaatagacttgattcggtcatggtctatctctataccatgttcatggataacaaatcctaaaaacttaccagccgacaccccaaaagcacatttacgtgggttcattttcaaaccataccgacacattttatcaaagactttgcacaaatcagctacatgagaactaaactcagcagatttgactacaatatcatcaatgtagacttccacagtgtttcccaacaactcatggaagatcaaattcatagccctctgataagtagcactagcattttttagaccaaatgtcatgaccacccattcaaataaatcaatgaagcctggacatataaaggacgttttagac

SEQ ID NO: 84525 - DNA, 1021 bp, Zea Mays
aaaatcacacaaatctgaacatggcaatgatgtctagattcaggtcagctattaatgatctggcattaaaggaaatccaattgcatgcaggaaatatacttggtcaaatcagcatgctaatcctgtgttggtcaagctggacagagttttttgctcttctgattgggaggctattttcccaaatgtgttgcttcaaagttctgcttctcaggcttctgaccactgccccctactcttggggctccatgataattcatttgggaaaaacggttccactttgaagcattttggccaaaaattgatgggtttcttgatactgtacagtctgcctgggactctgtgggtagttcgccttgcccctttgtgaccttggatagaaagctcaaagagacctcaagaaggctgcacagctggagtgataagaaagtgggtcatgttgcctctcagttggcacttgcaaaggagctcctccataaatttgaaactgcccaagatcacataatgctttcaccggctgagaattggctcaaaaataagctcaagatgcaatccttgctgctggcctcctttaaaagaactatggacaggctgagatcaagaataagttggctgaaggaaggagatgctaataccaaatactttcatatgcatgcaaggcatagaaagaggaaaaatttggtgactaaacttaaggatggggataacatcttgaccagtcatcatgagaaagctggagtggttgaccttttttactcaaaacttattggtcatgaggttgaaagggatagatccatcaaccttgaagctctcgagcttccggtgcatgaccttgctgatctagagctacctgtttctgaactggaaatctgggaaaccatcaagaccataccttctgacaaggccacaggtcctgatggtttcactggaaggttctataaagtttgttggaatatcattaaacaagaggtgatgaatgttgtggcagctttatggaacagaaactccttaaatttgagcaaac

SEQ ID NO: 84526 - DNA, 986 bp, Zea Mays
caatttgtgtcaacgtttgctcggatagtgtcatacccaaatcctcgacagtgagggcatgcaattgcatctgcacttttttggacagtgagcttgatggccaggttcaaacttgtcgccacaagtatagcacagcccattctgcctcctatactccttcaccaatctctctttagacggctcgggtaaggaagcagaccctctagtgtcggatttggacacaacaccccccaaacggccctgattgaccatcttgaatgacttctgtcgttgtttgtccaatattccttgttggatcctggctaacaatgctgctcgttccaccgaagctggcaaatgagacttaaccggtccttgcagctcttgcttcaaccccttaatgaaatgggccacaaaaaaagtctcatctaaatcatgattatggacaaaagttgcataccgcgcctcatcaaacacctttttgtactcctccacagatccagtctgcctaatctccagtaaggactgcatggcctgtgaatactcctccgacccaaacttcaacagcacagcttcacaaaactcttcccacgagcatggaccatactgaatcataaaaatctgaaaccaccgagacgcattcccctccatgttcaacgatgccgacacaacccacactgattcagggacccgataaagtgtgaaataatcaacacatctgtcaatccagatcctgggttcctctcctgcaaacctgggaaatggcatccgtggtatgggtagatgaccttcctcaatctcctcaatccgacgccctcccatgtcacggttgtgatgcaacggaacacccccatacatgcgattgttttctggtggtgcaggtgacggtgcagcgccgcgaggccgaccgttgagcacggacttcgacgactccatgtcccgcgccatctgctccagacgcagttccaccacctccttccccgtttgttccaactgttgcgcgaaac

SEQ ID NO: 84527 - DNA, 756 bp, Zea Mays
gcggacttcaaatgggcagagcggaacatctgatgtcctcaatcatcttaatttgatagctagggaaccatgcatacctcccaaggtatgtcacgattgcaccatctggtggggacatgaaattgtaggtgatagttggaggcttggtaggtgaacattgcaaccttacgactagactactgatgtggcagttggatcattaggacctgctcgagggtatcgacgtcccaacaactagtttgagggcaagatgctatatatgattaggacatcactccttaaaaaacaagttaaggagatgcagagcactagcatgaccttccaactaacctacaccatggaggaggcctaatccaccataagatggagtccacctcaaattttaggaacaatcctagataaaatcaatgcccagggcacgtacaaactccatttttgatagtccatatatatatgcatggaaagataattttacaagctaaacaatggcttttgtttgacgtccaatttcaacgagtcaatagaaatcatcaaaacaagttagcatctagaatctgctaaggtgccacaacactatcctttagttagttaggttgtatatcaccttaagagtccattaggggtacgttgaggagggtgacacccaagactatataatatagccacttccactctagttaggattgagttttgttgctttcttgttttttggtttaccggacattattcattgcacttttatctccaagattgacc

SEQ ID NO: 84528 - DNA, 1146 bp, Zea Mays
ttgaaaacaaaaactttattgatgatgaagtctcccgattacagagtacaatgttgcttcgagagcttttgaggcttcgctaaggataaaactttctaagatgctttatgttccatgagttccccacttccgtgccatccatttgagtaagccggtatgatcctggccgagtaacctctgatacaatgaatggcccttcccatagtggtgacaacttgtgtcgtccttcccccgttagaattcggcgaaggaccaagtcccccactgcaaaggactggtgccgcacggctttatcatgataacgcctcatagtctactggtacctggccgattgaattactatgttcaatcgctcttcctctagcacatcaatatcctctagcttggtagcttctgcctcagctatgctttcaaaggtcaacctcggcgcctcgaatattaggtcggcgggtagcactgcttttgaaccataaaccatgaagaacagggtatttccatgcagggctcgactaggttgagttcttaagctccaaaccacatatggcagctctctgatccatttttctgcaagtttttcattcttgtcaaacactttcttcctgagcgcttccagtatcattccgttggccctttctacttggtcgttggctcttggatgcgctactgatgcatacttaatctggatgctgcgttactcgcagaagtcgaagaattcagagctggtgaggttggatcctaggtcgttaatgatgctatttggtatcccaaacctgaatattatatcttgtatgaattctactgccttggttgtggttaaagaggcaatgggcttatactctatccattttgtgaacttgtcaatggcaaccagcacgtgagtatagcctccctgagctttcttgaaaggtccgatcatatccagcccctagcatgcaaatggccatgttacaggaatagtctgcagctgttgtgtgggtaaatgttgttgctttgataagaactggcaagcttcacatctctagactaactcagtaacatcactcttcgctgttggccaatagaagccagatctgaaagcctcctgactagagttctggatgctgcatgtactccgcactgcccggcatgtatttcatccaatagttg

SEQ ID NO: 84529 - DNA, 455 bp, Zea Mays
caccacggccgggcagcgccgccgcgcccccacgcgacgaagattcaccgaatcggcggaacgatgctccccgccctagtcccccattagacaggcgttatacgagggttggggaaaggcaaacatgataagcgcgcatatcgataaccgaggatgacggggtgagctgaccacggtgcttggcgacttggtgggggatctccgccacggcgagcaattcactgacaatagacgaccctccatggaagaagatgtcacacacacgtttgggatgcctcggtgagcatcaaaatccgcatcccgaggaccaccgcaggtgtactcccgaatcaaaatccgcgaccactcttcttctgcgtcaaggatggcgcatggtgccaggaagcgccgacttgatggagcgagggaggatgtggctcggcctttatacactagggtgcggagaccaaaggaac

SEQ ID NO: 84530 - DNA, 296 bp, Zea Mays
tcggcggagagtgtgtcttcactattttaaaatccggaccgtagttggctaatcgtagggctgtagcgtgatcggtgaagtgaatcgatcttggccgttggatagaaatcgggtggctacgggttcgtactggttcacaatctaatccgaaccgcatcctggtgatcggacggctaggagttcacgatacacgttcgtgatggcggtttttgttaaaagtccctgacaaaagtgcaaatcaacccgtggtccaggcaggagttttctgagtctagtattccttgcgcagaagcccc

SEQ ID NO: 84531 - DNA, 556 bp, Zea Mays
gccgcgtggtgggtacatccgttcagatcgccacttgacattaaagatccaaacggggtaagtgcaattacaatacaaagtttaaccatactttaattaatttaaaacattaaagtatagtattacactatcggtattttccgttaacactaatggacaactgtcatacgaagtgagaattgtttttttatacgtagatgtaggaagtactatgccgccgtttcgccgggctcgttcctgctcggactctgagactgttcactcctggggtgtagcgagactgcgagaggggggaagatgagaggatgaacagacggagcgagctggcggaattcataccacaaactgccctctttggatctcaacggatttttaaaatctagctcttcacgttatcaaggccgtgtttggttccacaagatacttataatcccggcgtgagaatctagacagacattagaagctgaggtggcttgtatagtggagactatcctgacaaacctctctgcgtttacgtcttcgatcctggtcatcttgagtgagatgccgcatttcc

SEQ ID NO: 84532 - DNA, 638 bp, Zea Mays
gccggggttcaaactttgggtggtccagccatggcgcttccatggcgggttggccgccaccgtcatggcctgggtgctgctgcggtctggtgttgagaaggggggaagaagggccgctggctgttagattggagattgacggctaggttcggatctggggaaaatagctatgagtcgttgatcctggcgcctacggtggagattagatcaagaccgtgatgaatccgagccatcgagatgagatcgaaggagtgataatagatcgggctataataaaatctagatcgttgcttttagatccagtggaatagattgggtaccgtttcagtttgagatgagtctaatctaggtcgtctgatgtagatcggacggttgatgccacccgataccccttcggccatgaccttttgttaaagagcccctgctctttttcgtatttaacccgccatccactccagctattcatcgagtcttagaatacttgcgtcgtagcccctgtacttaccagtaattgaggcatagttcagacagtgagaaaaacttataaaataatttagaaaagggatttttaatgtgaaaacaattcctagaacttgtatagttcctagaaaattcatagggagcccaaatttattcat

SEQ ID NO: 84533 - DNA, 406 bp, Zea Mays
gtctgatttagcttgctgacagacgagacaagcacgtacccaatcatggacaaaagatttcataccccgccaagcaaaggcttgtttcaatcgtcggtatgtgatagggatacctgagtggccacccagagggctgttgtggaatgcttgtaccaattttgccttgagagtatcatcctcgccaacccaaattctgtctttatatcgcagcagtccgttgtgaagggtgaaatgctgcaccgacgaagcatctgtcgccaatttagcaaggatagactgggcatgagcatcagctgaatatgactgaacgacagattcaaaccatcgaggagaggccatggacagcgctgaacacgatgactcatggtttgggcgacgagacaatgcatctgccacccggttttct

SEQ ID NO: 84534 - DNA, 841 bp, Zea Mays
ggaggaggcaaggctcggttgccctggccttcactatacaatccatggaccaggcaaatcgcgatgtggcccgaccccacagacagcagcatggcggacgtccgcctgcacaccagggcgcaccacagcaggcgctcttcgctactccgacccagtacacccctctactgtgtcactttacccaccctgtcgggctggttcagcatcaactcggtccgccactgcatcagctcaggactccgtagcagccccctgcagttcctacctccccgactgcgccatggactccatggactagatcctgggatcaccagtctctcgccaacaacttcagcaccatgaccctcagtcctcctggcatcacagattgggtcatggattctggtgcttctagtcacatgactcccgacagtggtaacatctctatttcgtcctccgcgctccacttccatcatggttggaaacggatccactttacctatcacaacttctggccactccattatactgggtcccttttatcttaataacattcttgttgccctcgatattgtttaaaacctcatttcagttcgtcagctgtcaaatttgaccctcttggcctttctgtgaaggatcttcattccaggagcgtgatcgccaggtacaatagctccgggcccttgttgctccaacatgttccccgatatcccgtgcccttgttgccagtgtctcctccactacttggcatcgccgccttggccatcctggacatgaggctctgtccaaactcactagtacttctgccatcggttgtaataaaattactagtgattccatatgtcatgcttgtcaagttggg

SEQ ID NO: 84535 - DNA, 460 bp, Zea Mays
ttttccattgctttgaagatgtaaagcctcgacccactatatgtgacccaatcctcaatacatagtatttggtttgaagacgtgagatagtcttaagctatcatttcttaagatggagctactattgactctggaatcaactgactgagtatttttgttttcccatatgcaggcgcatccattttatgattttgaagaaccgatggactcagtcttagatgattttgtgtattgatggccttttacctacttgctatttggtctcaaatttagtttttcggccaggtgtcagtgtcacggagctggcagactatcaacttatcaaccgagatacatatgttttaatttagtaaatttgagataagttacgttcgattatagttgtttgacttgggaggtgaggtctggctcaattgaacatgtttcaaaagttatctcattaaagcaaggtttatcaatg

SEQ ID NO: 84536 - DNA, 840 bp, Zea Mays
gccacgtgctggagatgcagcggctgagttactttggtaacggtgtcgggcgggccccaggtggagaagaggtccctgagccagagggcgagttgattgtttttgaggcctttttcactgccggtctttgcctcccgacgcatcggttcgtagtggaggtgttgcgaatgttcaaggtgcaagtccaccaattgacgctgaacatggtggtggcgcttgcgaagtacgtctaggtagtctcctcctatggcgggcagccgtctgtggaggtcttcaccaaaaattattgcctgcactagcagaagagaaagataggtgataagatagccaaatttggatcgtgcaccttcacgccaaggactgcgaggacctcggatgaggttgtcgagatagtcctctatgctaggaataagtggggcaactggtgggacttttggttctatgtagccccgggggatgtcaaaggcttgtcgagtctgcctcctgccatcctgtgctcacattgttatgtggcatttccacgatttgaggtggcgaaagaagacgaggacgaaggggccctccgatatgcagcctgcctaagtagcgagcgcaacctggtggaggaattcattgactacggggtgtggcccttggcacatggttgggcgttgggtgaagtgaccctccactgaatgcctaccctaggtggccagatggtgcgaagtccagtcttcaccgtggatcttcgcggtcgcgatgcaagcgcgtttgtgcatgaggtcgaggccgaggccgtgaagattgttgggaagtatgtgccgaagatggagactttaaggagttgggatattcacggtt

SEQ ID NO: 84537 - DNA, 546 bp, Zea Mays
gctcactccaaatgatgaatcgctgggattcgaatgaagaacctgggacatgatatttatactagttcggattcgcaccctactccaatgtagtgctgactatagtattgcaatgagtgcgttacaacaagtgtgctcgtgtgggaacaaaggagggggccctacccttttatatctcaagggtaggaccagatgagatctattttctactggagagagagattggttcccccgtgttgtcgtggtgggtcctccgtatggtcgtgtgtagctgtactcctggtatggcgatgtctgttactccggctcctgtagcgagtccatcctggcgtctttgtagtggtgcacggcgggttccacagattagtctcatggtgcagtcgtacgtggcgtggcttctcctgtcgtcatgagcccttcatctcctgttagcgtgcgtaggcgtacactcagatatggtgcgttattccgtccttctgatgtacgtgtcactgtagagaccccggtgcccattcagtgtgctgtgcgtttattcggacgtgggtt

SEQ ID NO: 84538 - DNA, 385 bp, Zea Mays
cgttccaaaacctgcaatcttctccgatcggcttgtaacgattattttactcaccggcgtggtgcgtcgtgctctcagtgcaggcagcgttcttctccaccaggtgctctcgtccacgtcgccagccagctcaatcacaaccagtgatttccctgccgaaccgagatcctgatgtttaattatggcgttgtctcccagatgaggagactgttcgccatccttggtgtcgctttcggcgaggaatacgatcaaggagaagtggttgcgcaccctctcgtccaagcagacgtgttcgacgagggtgctcttgccgattcttgctcggcctatcactgggagcacgcccaaatattctgcgtgtgcaggctctggttccagcaagaag

SEQ ID NO: 84539 - DNA, 1209 bp, Zea Mays
ggaaaatctactcgtagctctttttctctttcccaagtagcctcatcttcaccatggtgactccattacactttgcatatttttatcaccttattccttatgacacgagtcaaggtatcaagaatcttgaaaggatactctgtataagtcagatcatcttgaacactaagatcctccattgacagctgctctttaggtactctgagacacttcttcaattgtgacatgtggaagacatcatgtacatccgcaagatgatcgggtagttctagttgataggcaacttctccaactcgttttaggatcaagaagggtccaataaaacgaaggacaactttcctttaactttaaaccttcgcataccccggattggtgacaccttcagatacacgtgatcaccctccttaaactctaacagtcttctccgggtataaacatagctcttctgccttgattgtgcagttctcaaattctcccttatcattcgcacttgttcttctgcctcttgtataatttcaggcccaaagaaatgccattcaccagtttgatcccaatagagtggagttctgcattttctgccatatagagcctcaaacggggacatcttcaaactagcctggtagctataattgtaagagcactctgcatatagtaagctcttatcccaactaccaccatgtttaagagcacaagctcttaacatatcctccagtacttggttggttctctcggtctgcccatcagtttgaggatggtaggccaaactaaaattcaactctgtgtccaagcactcgtgtaaattctgccaaaaccaagaagtaaactgtgatccccggtctaacacgatcttcttaggcactccatgcagacaaactatccgagccatatacaactttgctagcttggctcccgtgtaattagttctcacagggatgaagtgagccacttttgtcagtctgtccacaatcacccaaatagagtcataccctgcaggagtgcggggtagaccaacaacgaaatccatgctaatttcttcccatttccactcaggtatcttaagcgggtgtagtaatccagcaggtctctaatgctcggcttttaccctctagcaaatgtcgcattccgccacatgagcagcaacatccctttttagtccataccaccaatacttctgcttcaagtcctggtacatcttggtactacccggat

SEQ ID NO: 84540 - DNA, 632 bp, Zea Mays
ctgccgtcgggctggcaccggtgggggagagagagaaataagggaagaagagaggcctcgggccattggatagttaacggacggttgagattaggcgtctagagaccccttcaccagttcggatccggtccgttggatcgtgatctggcggccacccgcgaataccagttcgcttataagtttgaactaatcatggccgctgttggttgatcggatggctgcagtcgcttgatacccctttggctggggaaatatgcataagggcccctgtggttttattcaatcaacctgcggtcctacctggtcttaagaaccatcacagctaggtcctgaaaacttgcttgcgaccccttgagcttcgctggaattgtggcagcggcccagaaattaaatagaatagataaaattgatgaagaaaatgattttaggataaaaataattccctcaacttcggaaaatcatatctcctttgttttaactccaatttgatccattcgaattgtgttggcttcgtaaaaatattttctacgtagtagcaacatcatgtgtaacatattacatataattataattaggaaagtgttcaatctttattcagtagattaactcgactaacctaggattaatatctc

SEQ ID NO: 84541 - DNA, 955 bp, Zea Mays
cttgtggcagacaaccaactactaggaggcgacatcaccccatgtctcaggaacaagagcagcctgatcgaggccaacgttgcaggcaacagtttctcccagatatccgcgcaggccatctgcgcaggtggagggtcatcgctgcagcatttcctggccagcggcaacaggctctggaacctacgtgatctggacttccagaactgcacctccttgcggtacatcgatctggcggcaaacggcgttcttgcaggcacgcaggagtggctcggtacgctgcccagacacctcgagaacatctattttgcccggaaccaactgcacgggacactcccgccgcagctgggcgagttcgggaagctcacagttctcggcctggatgaaaacagaatctccggtcagatacctcaggttcttggaaatctgactagcctgacgaatctcaacctgggacacaacgtactctccggtacaatccctccagaacttgggtcgctgtatcagatccttcagctgaacctgagcttcaatcatttgtcgggtccgttgcccctaacatttaggaacctctccaaacttttctcgctcgacttgtcaaactgtagcctaactggacaagcatatgaccttcttgtcaccaccaccactgaccaggtcaccaccgctgtttcgttccccgaaattgagatcctcgccctttcctccaacggcatcaccggcaccatgccgacgctactctgtagtgctagcttcctcaagatcctggacctgtcaaacaacgccctacatggagatctcccgaactgtctgtgggaattgccatccttactactcatggatctgtccagcaactccttcagcagtgtagctccgtcctccagctcctcgtctagcgctagcgacacgcttcagtctctacacctagccaacaaccgttttcaaggcaatgtcccct

SEQ ID NO: 84542 - DNA, 612 bp, Zea Mays
tctatataaaaatttgttgtggcacaccctatatagaaaacctatgcccgtcactgcttcgtcgaccattttgtgttgtgataatgtgagtgatgtatatttgacagtcaatccatcacatcactgtcacatgaagcataatgaggtttacatacttcgtccgcgagaaggtcaccttgggccaagttcgggtgatccacatgtcgtcctctcaccaattcactgacatcataaccaagggcttttatgttcaattgtttactaattttcggtctagtctttgtggccgtgattcttcttctgcgattgtagacgggtgttagagattgtataggatagtatctaggcatatcttttagatttgtaagtgccttgtactccaaaccatatatatacacaaggcccacatatgtgtgtgtgtgtgtgtgtgcatgcgtggtgcgtgcgtgcgtgtgtgtgtgtgtgtgacgcctaaaggtgtggctccgcccttgacagatattactcttcttgggggtgcacgatgcaaaagctggcaatagaattggtggaatattcattgtattgcattagacatcgtgatctaattatatagaatatgttggactagca

SEQ ID NO: 84543 - DNA, 289 bp, Zea Mays
gtggcaggtcactttagtctctttactgctacaatctatagaaacctaccatttgatcatcttcctattgtcgtctgggcaagaaaccaaattaacaaaaaatggcattccttccttcagaaaagaaacgacaattcaaaggatgagtgttgcttggtcaactagccaaatgcgtggtcaacctaaagacctaggaggcttcatagtggttgaccctgacctatttagcaaggcactctaaccatgttggctttatagatgataaaccatggatggacactaatatccc

SEQ ID NO: 84544 - DNA, 599 bp, Zea Mays
accacaatagcatatattggccacaactggatgattgtggttggggattttatatgtatgcttttataacatctcggcattagggggaggaatgtccatatagtgtaatgcctcaatattctattaaacgcacaaaagccaaactgaacccgtcgttcggagtgtactcctgtgtatatggagtttgccagaaatcgttgaggagtaaccatattggtttgaatgcttctaccagatgtagatgtggatatacccgggattaatatcatatccacatttgacttattggcatttgatctattctgcggggacgcctgcggatatgatccatcggccttagtcaaagcatatgttctgattgcagattcacgttgtctgtgataactctcctccgattaattcaccctgatggtgatttgcctcacgaagaggttcatcttgatgatgaaattcctagcaatgcgcgcaatatcattgtgctgggaatatggaacaatgaatctttcgttttgggaaataacgaagtttattattaaatgtgggagacaattatgtcgacacctatattgactctctagattgcaaaatggatctaaaac

SEQ ID NO: 84545 - DNA, 297 bp, Zea Mays
ggttgctgcttcctgggatcaaccggttcagtcttcttgccctctggagagggtgtcgatgaagcttaaaagattggcgcgaaggttgcagtcctgggggcatagtgcggttggaaatgtcaattctcagctggggctggctcgcgaggtgctgcacaggttggagatggcgcaggacagcaggccgttgtcctcagatgagctatggttgctgcagaaattgaaacaacactgccttgtccttgcttctttggaaaggacagttgcacgcttgcgttcccgcttgcactacttgag

SEQ ID NO: 84546 - DNA, 457 bp, Zea Mays
gcaaggatctccctgataggattgtgtaggattgtttccttttcctgtcgacatccttgcctatatgtacttgagcctttgctcccataaatcaactatcatattttctgctaattcattgtctctcatgccaaagaattcctaactcttttggtccaacactcaacttaccaacgctgtagattttaaatcatatgatgacaacagtgtctatcaatgcttctgcaaaacctaggtcaaagcaaggtcctaaaaatcgatgatcagtttgtttggccatccacctggtaatgattagctgattatacagcctaaccagcccaactatgcagcctgaataacaattaaacagtaacatgcggaagcgctttccttgtgtatgacatagtaaagcttcttttaggacattgggaaagtctaccagtgtccaatgtccataatcacacaaggaaacttc

SEQ ID NO: 84547 - DNA, 465 bp, Zea Mays
atcggctcaacctttgggatgatgcccgcctccctataattgaacaacattattttcaattcctcaccctcaaaaagattccgcagatccccctcaccaatgctcgtcccaatcggcgaagacaatagctctcgtttacccaactggtctactcgaagacggtcccgctccatccccatccgacggcgcctaccacttcgcgaaaccttgcccacactatgcttcgacaccacccttcgtcgtcggcaattggtcctctcactaggaagaccagccacctcgccaacctccacccgcggcgaggactccgccgcggccacatctaacacagcaaaataatccaagtcttcatctgaagactcttcggtccaggaaaacaaactcccagactcaccatcagataaaaaacacccagatccagaaccagataaaattgtcattagtaggcactacggttgcggccgc

SEQ ID NO: 84548 - DNA, 571 bp, Zea Mays
gcatatcaccatggtaatctggaagcagagcagcatccccaacttctctttgttacattgattgaacggacaagaaaacgaagcatcagcatcatactactgtccaatgtctaagctatcggttagcgcatcagtttcaatctttcaaagcgtcattggaagtcaaaggctaggtagcactagcacaagttgtttctagcatcgtccagatctgatgcatccgttaaacaggcgcacgagctcaaggccttcaccttggatcagggatgtgatcgacgacgcggtgcgacgtactcctcactagtaggagcattcactgtgatctcctgttgcttagcttagctgcaagaacgatctggaacatagcgaccggtagtatgaacctcctttgtcctcgcggagctagcggttcctctggcgcttcgcggcgccactggcggtcgggaagcagcggccggcgccgtccggggtgcagatgtccggcacgaaggcgccgctgtcggggccgccgtgttgccagtggaggccggacgcggtcggcggggagggcagcgccggcaccgaccactgg

SEQ ID NO: 84549 - DNA, 840 bp, Zea Mays
acagcttcttcacttgtggcaggctcattccccatgacagccaagagctcctcaacaagtcccatgtcattttgcacttgtacattgcctgaattcgtaatgctttcaagatttctgtaatgacatggtgcatcaccatgatctgcatcaaggtcgggggtcactgttggtggtgttgcaaactccacagtgctgggtactgctagggtctgcattgactgtgtaccacctggagtatctgctgaagattgcactagcatgtgttgtgctgtgggtggcgacctggatggcccagccaagtctgtctccctgactggagtattgtacagctaaaaatcaccatcgctctgtataaaatcaacacagaagggattctcaccatctatcttctcggcatcactccagttccatgcccggctttcttcaaacacagcatcacgggacaccactacccactttctagcagggttgtaaaacctccaagccttgctcccatgctcatagtcgatgaacaccatcggcgtgcttctgtcctccagcttcaacaagtgtttggccccctgtttgacatgtgctacgcatccaaacgtacgaaagtgttcaacagagggcttaaatccataccatacttcatgaggcgtgcgaccttcaacactctgagttagagatctattcaatatgtagacagccgttgatactgcttcccccagagccgtcctagaaacctcatagccttaagcatacttcttgccattcccatgacagtttggttccggcgttcaaccacaccgttctgttccagagtgtgtggcgcagttaggtgtcgctgtataccctccc

SEQ ID NO: 84550 - DNA, 602 bp, Zea Mays
ggtcgtcaggcactcgggtgggtgttcagtgatgaacagtgacctaacgaagaacgccaggtttagtgcattgtcgttggtgagctcgcaccgagatccgagttcaccgaggagattcgtgcttaccgtgaagtggagaactggggggggggggtaaaagatctagtgggtgggtaaaagatctagcggggggtggatttggtcgtgggtaggaacttatcagctgcacttgatggccgtgcgacgtggccgagcggccggtgtcatcgtggtacaccggtgacctcaattgcgccacgttgtgaccctttcaccacgtagtgataaccgtggcacgcccgaaattaccatcttggagcccttgcaccggctggcgccacgacgagctcgccaatgaaatatcccaccgccgccatgttcgatttcggccaaaattggcgtgacgtgtagccaatccctttaaattgagtactcccctcgctccgcctctctgttaagccttcattccacccccaggtcggcgttttcgtgcaccatagcctccagtcttcggacttcccccaaattggtcatccacgccgccgtgagacgccgcaccatgg

SEQ ID NO: 84551 - DNA, 1068 bp, Zea Mays
gcaaagtcacatcctctcgctcaaacctgaacctcagccactgatgatctggatctatccatactgtggcataaaatactctgaccaactcctcaatatatctaccaccgaaggtcagaagagagagtaaacctggcagataggagagatgatcctttgactctacaccggcgactgacagaaaggcgggaagatccaaaagccagtgcactcgcagggcaatctaagcaggcaactgcgccctgaagaaagactcatgggtcccggtgctgaagagtggcgtagctgctgggtccctctgagctggcaatcaagaatccaaagataggtgtctgaaccgacgtacctgggcagttgtggctcgctgaaggtcaagcagacgaggatcagcagcaagcagtctcacctcagtcttgtgacgctcacagaagcgagttggaggactaggtggagtggaagcgggagcgggtgcagtggaagcaggagtagtggaggtggtggaaacagagggagtggtggacggctcaagagcggtaggagctggcgaagtgggaggtcgagtggagactgggtcgaaaggcgtggagcgagcagtggaggagcgaggccgagacgcgaggcgacaaactcggtagacgatctgatcagaggagatcctcaactgccctccctgctcagcctgatctgctgctgctgcaagagctgcacgagcggctctgtccaaacgcctcttctctctgccctcttgctgctcaagatagacagtcttgcccttgacctgtttgaaggggcgaggagggtcctcgtcatctcctcccctgacggtgtgacattcttcgtcctcaccatcctgagctgactgctgcaagataaggagataatattagcgagagtggaaagcagtaggtaagtcttgaatagagtgatagctacctcggaacttctcgagagaaaaaagaaccaggcatgacaggagacacacaggcgagtaggcaaaatcactaaaatgacagaagaggtgagcacatattagtcacatagtcataagtatatgaaatgtgaataaat

SEQ ID NO: 84552 - DNA, 315 bp, Zea Mays
ttttgtctgcctcctaactccacagcaggacaaggatcaggtgtcacacaaaacaagggggttgccttcatccgtgagccgtcactgacaccagagagtcacaaagttttgtctagcgccaaggttcgctgttgtactcaatggaaaaaatagctacttacagtatagagcaatgttctccttctgtatacactaagaaataagccctagatatgtcttttcgttgcagtgtgatttacagacagccccacatcagggagccaatctgctgctaggaacagagattatcacttctccgcctaacgtgcagacgcc

SEQ ID NO: 84553 - DNA, 495 bp, Zea Mays
gtttttcccttttattctcatctgctttcacataaaactattcgctcgtccatccagtcgaccacttggtgcggtagcctatcacgggggccttcgtatcctttcagtatgcgaagttgtagcatcaaaaattcttatgctgaccgtcagcccttgcctttgtttggtaatgaagctcgtgtacccggcagaacccttcggcgttagcgctctttccttggctttgaagagcccagatgtatatgctgagcctgacaatggcgttcgggatcagctgatggaggtagatctcaaacttctttaaaacctcactgatcatctcgtaaagagggtactgaagacccgccctaaagaagctcttgaataccacaacttcatcttcctccggctgtagaattatttcctctctagcaaagcgaaccagttcatcatcattttctccaaaatatcctaacttcttcattaagaattaaatcttcatccttcactgtggac

SEQ ID NO: 84554 - DNA, 278 bp, Zea Mays
ggccgagaggggaatgagtcacggtggcgatctaccgtggcaatcgcagagcgactgaactacgacggtcactggatggtcactacggctcataccgacgcgataaacttcctaaggcgtggcgccctcacggtgaatggtgaacacgccggtgatagccactcggccacgtcgccggtgtgcactaatgaaccatcaagcacacagtacatcccagctcatctgcgacaagatctttcacctcatgatcgttatccacgtttaatttggcatgaatc

SEQ ID NO: 84555 - DNA, 577 bp, Zea Mays
gggacttaaaatctcattcccaatgatactcatcaagtatccatcttatgggaaaaacatgaccaatagaattgttcataacttttcattttatcccaataaaggaattaccaattcagtcttacccagcatggtaagtatcatcacatgaaaagttattacatatgcaacactttgtatgggaggatgtatgtagaatacagtccataagaaatgtttctgagaaacatatgcaatatccatcactatcaccttgtgtttccacatgatagtaattttatggatatctctataatatggtaaggtaaaactaggatagatcaacacatccttgatacttccattaccaaaggggacttgatattaacatatcatgatatcgcgcgaagcgattgtcaaaatattatttcctctttccaaaggaatatgagaatattttgtttccccacttatagagtttgtggctcaattctccacattgcatgtttcttcctcaattggaagaatccctgtacaagtttgcacaactcaaatcaatgagtcttcaactcccttgaagagttcgttcaactctaat

SEQ ID NO: 84556 - DNA, 423 bp, Zea Mays
accaattagagattaaatggttatgcgcatgatgagtttagtaaaaatccatcggtgtcactggtgttaagttgaggtttatttgcgagtggaaagtaataatctgatttatacttagaactcttagtcgatagtagaaattgttttggcttatataggggggtggtgacatgccaaagtagtcatcgcttcctctatatattgagtatggtcaatacgcgttatgtgttcattaattgggaagtaagcacatgatggtttcgagttagagattagtggtttacgggtcgtatgatttggtggatgtgtaaaaatacatgtgaatatgtatgtttataaaaatgttgtggtatatgttgtgtctcggatttcgataataataggctagccgacgagtatgttgtatagcggcctaggttgttg

SEQ ID NO: 84557 - DNA, 591 bp, Zea Mays
atcttctctcttactgaaatcatttctgacataaaaccactgtttcatccaagaacctagccatttctttcagaatgtttcatgagatacctcacaacagagcgatgcacaaagctatagcacccgaagttgttgtgatactgctccttcccaattgcatttgtctggtaggataatttgtggatgttgcagaaacacttggcatctggctccagcccttggctcctcatggcccaaataaaaaacccccactttaattaaagcttcgggagtaagctgatgaaggtatatctcaaatgtctttaacacttcaaccagcatcctgtgcaaggaaaaacgaaggagaaccttcataaaactcttaaagaccactacttcgtctgcttcaggaagatgaacaatactctctcccccaacccttataatggatatatcatggaaatattttcccttcatcgcttctatctgtccttgcttaatagtgaatttttcgaaaacatgactcgacctccatggccgatcttcggcatctttgttatcactctgcacatcaaaactatcactatcgctagaatccccagatagcctagc

SEQ ID NO: 84558 - DNA, 689 bp, Zea Mays
gccgatgagtatcacaagcatgtgtgggcgctaaaacatggacaaggagaacgagggcggacctagagatagctggccacggcgcgacgtcttacggtggcgcaaataacagatttgggggaagaacgaaattctccgactatggtggctaatcgagggcagggaggcatgctctggcttcgtgacaaccatgcggagctagcaacaccatcaatttatagtgactgggggcgatggcttcgaattttgaaaggggagaccggcggttgaagagaggggtgagtcaccggcgcgaactactgtggcattcaccggggcaatgtctccagcgatagacagactacccacgactatctactgcgacgtggtaactcttctaagtacgtggcgcggctacgaagaacagagaactccggagaggacacctcagtccatcgcgcggcaagtggcacattgaatagtccggtgattaggctccaaccctttccctgcgtgatctttcatcgccagctgttatccgcaaaccagggcgcacgaatcgcgacgaccggcgtcaatcgtggtgtaaggtcgccggtggcgagatacaatgaattagaagatctttttcaatactgtaccatcagaaccctcatcagagcgcctgatagagcgatttgcagggcctggatctttgatttttttgtgac

SEQ ID NO: 84559 - DNA, 436 bp, Zea Mays
tgtcaagtgaactaagtagtgacaacacacaccaagcaaacaaggtaacactctattttgggtattcaagacaacagagatgaggcactagttcctcacgaatcaagacacactctatttactccagttaacacaagttacttcagttaagcatcggttaccaaaagttacagacatgttaagaatcagtcaaagtccaccactacacagatcacacacctagcagatcagattacctccgcgccggacatgaagaactcgccatcgttagcagtagatctggagcactggttcctcacggatcaagacaactcacggggaagatttgcaaaggaaaatgatgaaggaaataagcagattaggagcaaaacagaccagatccgaacatctagaataagttagggtttcccagaaacaccagttcatcactttgccg

SEQ ID NO: 84560 - DNA, 678 bp, Zea Mays
acgtatgacatcggatcatccaagtacacaaccggaccgtctgcatagcacgcttgattgtctgagtatatgtccggaccgtccacgtatcatactagaccgtccggcgtggggtacgcagaacatgatgtcgattattaccagcaatccttacacccacctcagccaagcttccccttaccttccatggctcctgaacatgatggcgtggcctcacgaacacgtggggcaagcactttttggcccctagaaggtcagaaagatttaacatacattatgaggtggctagggcaagtattaatgacccacagaacccaaacccatgggcaaggggatgacctaacgaaacacaaatgcccgcactgttgaccaaagggccaatgggttatcaccggcttccattgatataataagggaggaaataacttggtcattcagatacaaactcagagtcaatatgacccatggggggcagtcgtatcgaaaaccctatgacaaccgatttgactatgacccatacccacaagggacaaggatacccgaattttcaatttttttgggtgactagggcaaaagcgcacatgaacacatatgttagtttctagcacaactagaagaattatccaataggaaggctttctgtgttcgcttattttcactatccttaactggtacaac

SEQ ID NO: 84561 - DNA, 631 bp, Zea Mays
aaaaggatttggcatgcgcgggctggtccctgggccctgcctcgtcctcgctccgatcacttcgctatggttggcaacttgccatggcgtcgagcatcttcccaacttcttgggtgctgttgtcaaagtacaattcggagcatacaagctttaattattctcttagctagtgcatgttgcagtcgacaaggggacgatttagaaccgagattctttcaccaaatcttccggtaacacatacatgtccaagcaggttagtttaagtcgtttcttcactggcaatatctatacaaatgtattatcttaaatgacaataatcatatattttataaagtttcatagtgaatctagtaaatattgaccttgtgccgtatctacataaaaattcaaagaacaattgtcaaaacttaaatttatttttttctatgggtcaggacatggttgcaggctgacagacccagagtcttttggaagccctgacagtttagtgggccaaacaaacaactgagtaaatataatcttctctatgactctatatatgacagacaagttgcattggtttcctttccacttagagccaccgacatgagttcccttctccttcccactagagcctcgctttaatttggaa

SEQ ID NO: 84562 - DNA, 543 bp, Zea Mays
ccaccggcaccatgagcagcaccagcaggtgcaacaggaatggtctacctcagaatggccaactcctgctgcatagcctacatcgcggctaacatggccgccggactcatagaatccccactaggttcttgtgggctaccatgagccctacgaggcggcataactatagccacaggagtaagtacataattaaataaaattggcataacaccacttccaataatatcaaactagcactgacaattcataatataacaatagtaaagcaagcaacccattctatatgtgtagtgtgtcaatttatcatcatttcttcgctaggacctacaccctatccctctgataccaactgtaacactccattgctcccaaacacaatgggtgtcaccaaatacccttcccacaaattagaaagtataaaaggatggagacagaaagaaaaattcggcagcacctcccttgaaagttgcataacgaggaaaccacagtgtttattcatgatgcaaaagaaaggtaatctacagcgtataatcatgatgcaaa

SEQ ID NO: 84563 - DNA, 1444 bp, Zea Mays
tttttattaaatactagggaaaataagaaacctaggaaaattggtttcacaattttaggatttttctacaattttataggatttgtttatctctggtagaaaaagaaaaagaaaagacagtgaatagtgttgggccaaattctaacacggcggcccggcaacacagggaaacaggggagcgccctcgcgcgcccacgtgctctctggcgtatttgcggaaaaaacctcagggtttgcactaattggaatccggtttctttactgttgcccagggtcactgacaacttacggacaggtccctctactttcttttcttccccacgagtacccttggccatggcgtgcacacagatcaaccctggtgcaacccgtactggtcatggcgggtgttgaatactacggctagcgatcgggaaggcattagcgactaacagggacctcagaacacccaacaatttggcacgaacaccctgagaacggcttgtccatgtgcacggcggaaaccgtgatcatgggcaaacgttcccgctcatccggggccggattgagtagtcgggtgtcacggtgagcatcacaagcttatggagttgcagaaacaacactcaatttaagcagagccttaccagagcggttcggccacggtggggtgggtttcacggcggcggagaccggtttggggagaactccaaattcgcaaatctcagcgaatggtcgaggctgattcgaggtggctggttagcttactaccctacggagttggtggcgcatgcaatttatatgcgcatcgagcgctggtgacgaattcggtcgaggggtgctggcggtcggagagggaaggcgagctctgtgcggggaaaacgtggctttcatcgtggcagtggttccggtgatcgccggacatgcatccggtgagtcaccgtggtgaagaccagcacagaggcacgtggcgtgcaacggaggcagcacgacggcggtgagacttatcgggtcgaccgacggccgggggggacggcaagcgtagccgcaactcgagcgcaagtggatcggacgccgagattcttactgagtcgtgcttatccgatggccatggcgcacgaatcatggcgagcaatcgatcaacggcgatgggctaccggcgacaagcagggggtggaattgggatcttttgcagttgaacatttactgtaccatggtgatctcctattagatgaactgacagagagatttggagcatgatttactcccaattttgtgtggtgactaagctagctctttgtaccaaaattatagcctgacaaactagctacaacgttgtcacagcaatcttgatcaaattctcaacaattcaagcttgaatttacacacaaagctggctctatttcactgaaaatctgaatttcagaatggaccagccagacagccaaacttgaggcttaattatctc

SEQ ID NO: 84564 - DNA, 409 bp, Zea Mays
aaacgacagattgtttgaaaaaacactggacgatggaaaaaagactcgtaagcctgacagtttgaagcataacagggctaccaacacctaatttgacttctcattcttctcgtaagcacggcacagccaagtgttccttccttctttggtcttgagggtagcaaatacatctctataacgtttctccattaaaagatgactcgcaaagaaatgtaagtcgcttccttcctctgcatcatctttgatcacttgttccaattgggcagcaacctctttacgcacggggtcgttgtcagatgaggttatggacttgtaagagcccaaggtcctggactcgaaagcatcgacaatctgtttcatgtattcatccctcatatcctttttcttcttaggtttaggagagtcatgc

SEQ ID NO: 84565 - DNA, 1046 bp, Zea Mays
cacaccgggccacatattgtgctatctccttcttcatccctctccaccagtatctggttttgaggtctaggtacatcttggtggtttttgggtggatggagtaagctgagttgtgggcttcattgagcaggacttctcgtgcctctcccattggtacacatagatggtttttgaaccaaagaactccttcttcatctgtcctaaggtccggaagttgctccttgcgagctctttttgtaagtcttgtggtctccacgtccaggcgttgagccttgcatatgagctcttctagcattggcttgacttccaggctactgttgtttcccagacatgcatttagctgagctgattccttcttccaatcttctaaaaagttggtccctttatcccgaaaggttttcggctgagggcgtctgctaccacgttggcctttccggggtggtaatggatctcgaggtcataatccttgatcaattcaagccatcttctttgacggaggttgaggtctggctgagtgaagatgtacctcagactcttgtgatcggtgaagatgtgacatttgttcccaattagatagtgcctccatattttcagggcgtgcactatggctgccaactccaagtcgtgggtggggtagttttactcatgcggcttgagtaagcgggatgcataggcaataactttctcattttgcattaagacacaccctaagccttgccttgaagcgtcacagaagatgacgaaatcctggtgtatatctagtagtgtcaaaacgggcgcggtcgtaagcttctccttgatgatctagaaacttccctcacattttggagtccacacaaacttattgtcctttttgagaagttcggtcataggttttgctatgatggagaatcccttgataaagcggcggtaataccctgccattcccagaaagcttcgtacttcactaacgttggatggttgtttccattttgaaacggcttctaccttggatgggtctacttatattccttctgcggtcaagatatgcccaaggaaggctatct

SEQ ID NO: 84566 - DNA, 444 bp, Zea Mays
tttcgctcccacggggagggttgccgaagctgacaaaacgcaacccaaagctgatactaagcaaatagaagtcgaggctacaataacccaggctggaaccgaggtagagcccacagtgcctactgagatgaagcttgccgccatcgagtagaaggccgaaggaataactccagatattaatataggttttgggaagagtgcggccaaagaggccgaatcccttgcccctgaagcactctccaaaaatcttgattatatcttttgacatgcttcaggaaagagattatccgaagaagaaatttttgaagctaaacactatgcccgagaactgaagtacccgaagggggccttagtgtttaacggcacggatgaagatgatttcttgtactgcctcccggacaacaaagaattatccgtctgccaggagatggccagaagtatggg

SEQ ID NO: 84567 - DNA, 741 bp, Zea Mays
aagatattggtgacaccatggctgcctttgatatagttttaaaattgattgaatagcactgctagctatggacaagaaaacttgacgttcagataaggagaacaagaaaataggctttatagcttatctgatacactggactgcatcttttatttcatacatgactgggcgcgatgaagatgatgtcgaaccactctgtcattagttctcggttggataaccaggttgccaggtccacatcagtaactgaatcttcaggagctaggccgaccatagagcacttcaaatggggagcaaccaagtgccgagtgaaagctagtattgtaccagaacactgctagtgacagccacatattacatttgttgggacaaacatgtacaaaacaacgtaaataagtctccagacattggttgacacgctcggtcttgccgtctgactaaggatgctaggctgaccccatttgcaattgtgttcctgccagcttgaacagttcctgccacagagaactggtgaaaatacgatcacaatatgatattatagcttttggcattccatgtaatttgtaaaccgatgacataaatgactgggcaaccttgaaggctctgtaaggatgtaagagaggaatgaaatgggcataacgacagaacttatccacgaccaccagtatgctgtcggcgttagcagagcgtggcaatcctttgatgaagtccatcgatactacctgccaagcttggtctggc

SEQ ID NO: 84568 - DNA, 521 bp, Zea Mays
gcggaaacctatgacaataattgttgtcaacaaccatggtggtgcaatcttcagccttctaccagttgcaaaaactacttcaccacaaattttggagaaattcttctacacctctcatgacatatcaatttccaaactatgtgctgcacacaggtaacaccaattgctattcagtattctgcttacaaagccccatctgattgtaacaaaattatgctggtattcctctgaacctatgtattagcttcaatcttatgcttgtagagttaacttttatcattgttttcacctgaagccaacatatataaataaattagtgattctaaaaggtgctgagattgttgcttatgtcgtctgctatgttctattgctgaattttcttctcaatactctctttccttgtgtttcagggtaaaacattttctagttcaaacaaaagcagagcttcatgatgcgttggtgaaatccaatatggaacaggttgattgtgtggtagaaataaacaatagtattgatagcaa

SEQ ID NO: 84569 - DNA, 640 bp, Zea Mays
caagtgccaagtcttgttatgtaaaagtgcctaaaattcatcaagcataacttgcttctaaagaggatctttaatagcagttaaatgagatgtggggtcgataggacaagagtgagtcacagaataggttacagtgccattagttctgaccattgggcgttggatgttgtttgtgatgcgggtaccataatgatgagtttgggtggcctctgaaggtactgttgctttatcgggaagagcaggagcagaagtcggcatgtgctcggttgccagggactctgtgggagcacatgaagaaggttgatgctcagatagtgttggggtagaggagtccagcgtctgcaggtggtgaagggttatcaggcatagatcctggtgttgatctcattacaactctcgctaaagtccatgtagggtcagtattgactgctgctgcttgctgtggagggatccgaagtagtgtttttgcaaagggaaaaatactttcatcaaacacaacatttcgggagatgtaaacctgaccagattcgtgatctaaacattttatatcccttgtggagcgcattataccctaagaacacacattctttggaacaaaacgagagcttgtgcttgttgtacgggtgaagatggggccaac

SEQ ID NO: 84570 - DNA, 594 bp, Zea Mays
ggctttgtcccttaaatccgggtgtgacactcattgatcccatggagcagtcccaatatttgttgacttggctgatgacgaccagagaatctccatatagcatcaatcttttgatcccgagtgacacaacaatattaagcccgtgtatcaaggcttcatattctgcagtgttgttggaggctagaaataggagttgtattgcatatttgagatgatctcctctaggtgcgatgaaaaggatgcctgtccctactccttgcagcctcaacgacccatcaaagtacatcttccatacctccactaacttaggttttcgaggatatgttgttcagtccactctgatatgaaatccactacagcctaggtcttgatcgtcgcgcggggtcggaattctatgtcgtgagctctgagttcacacgcccacttggccttccttcccactagttatatcttgcagagtatgtctcctatcgggaagcctgtaaccactacgactttgtgctcgttgaagtagtggcgcagttttcgcgcagtgaggaatactacgtataacaacttctagacttgagggtatctaatcttggagggcccaag

SEQ ID NO: 84571 - DNA, 744 bp, Zea Mays
gtgaattggatgtatagcgctaccccatatgtgatcaacatgaagagaccattgaacatctcctagtacatcgtgtttttgctagatagttttggtttgagctcggctgttcggtctccatacccttgctccacagcaaggtgattccttataggagtggtggactcaaaattcaaagctagctgttcttctcaaaatagttttaattctttggtagctagcttttcttctcaaaatggttttaattctttggttattcttggtgcttgtactagtggacacaactgctttgtcgagtatttcaggcacttggcaaagcctaaaaaacactcgcaaacaaggtctgagagtcttagttcgtcgagagtgacatttaataaagaatgctttgcgagtgtctaataaataatagtcggcaaagagccggtttcgatagtgttgggtcctttggaagcatacaaatatgtgtgtgtttcaaggaaggtttccaagtctcaatgttgctctctgtaacgctagagaaaaagatatcaatgttaaaaacatacacaatacatccaataagatgttttttcacttgcatttgtggtgaagatgcgcgataattattattttccgattcggttaacccataaagctatctccattagatctatgtataagatattgcaaaacacatctttgtaccgtagacgccactatttatagttaggtttcacctggcatggcactggttttttttct

SEQ ID NO: 84572 - DNA, 536 bp, Zea Mays
atttgatactggagcaacgcattcattcattactgcatcatgggtagaagcacataatcttccaatcactatcatgtcaacccccattcaaattgactcagtcggtggtagaattcgatctgatagcatttgtttgaatgtaagtgtggaaataagggggatagcgtttcccgctaacctcatagtaatgggtactcagagaatagatgtcatcctagggatgaactagctagataagtatcaggcagttatcagttgtgataagaggacaatcaagttgatgtccccactaggagaggaagtggtgaccgagttagtcccgcctgagccaaagaaaggaagttgttatcatatggctgttgatagcagtgaagcagatccactggagattatcaaggttgtgtctgagttcccagatgtgttcccaaaggacctactaggtatgccacctgagcgaaaagttgagtttgccatagagcttcttcctggcaccgcccccatctttaagagagcttacagagtatctagaccagagt

SEQ ID NO: 84573 - DNA, 674 bp, Zea Mays
ggcttgtgttgtaccaatattcagccgctggtagccaatcaatccatttctttgggcaagcgttgacaaaacagcgaagaaatgtctctaagcattggtttacccgtttggtttgcccgtcggtttgcgggtgatatgaagaactcaatttcagctcagcaccaacagacttgaataggtgttgccaaaatgtgcttgtaaacaccgggcccgatctaaaatgattgccactggaaacccatggagtttgtagacatgattcataaacagcttggcaactgaactggcagtgtaagggtgtgaaagtggaatgaagtgaccaaactttgtaaacttgtccacgaccactaaaatacagtcgaaggatctagactgaggaaggccttcaacgaagtccattgacacagtgtgccacgcagaagacggtactggtaggggctgcaacttgccggggtaagcagctctgtcgggcttagcctgcaagcagatttaacattgttgcacaaagttcttgacgaatgacttcatattggtccatgcgaataatcccttgacatggctgtaagttactggaaccccggagtgaccccctaccgctgaagaatgcaatgctgacacaatgcggactgaatggttgtgtcgtctcccacccaaatacgacctttgtatctgag

SEQ ID NO: 84574 - DNA, 328 bp, Zea Mays
cctgagtaggggtgaacttatctactttgcaagtcttagggatgaagagtcatgacttccacatatggattgaatggattcttcctgcgatggttcgaggctatgtccttgagcatgtctggctagcactttcagagttgagctatttcttccgtcagctttgtgcaaaagagttatctcggaccgtggttgaagacttggaaagattggcacccgtgttactatgtaagcttgagaagatatttccacccggcttcttcaatccaatgcagcatttgattcttcatctcccctatgagacacgaatgggggggcccatgcagggacg

SEQ ID NO: 84575 - DNA, 423 bp, Zea Mays
agcccctaaactaatgcacttgggaaaaattcagaaattcagaaatatgaatttcagcccctttccaaagatcaaccgcgttctctgtttttcaaaacttgaatcaaacaagtccaaatagcaaagtggcgccaaatttcctggaacacaccatgaacaagtttggaaacctctctccaccgtttgacacgatcttgacatggatttacctcgagactcgaccttgtgacactgccaccttagcgacgcaacaactctctgtacacaaccccaaaccgctcgacttccacacataaatgacaaagctctgtcgggagagcaaatcttgtgcagtgatcatgcccaaatacgcaaagatctcaaacctatgagtgtttgaactcgggtagaagcaaagagcaacgtgctcgacgccgtgtcagg

SEQ ID NO: 84576 - DNA, 371 bp, Zea Mays
aagatccccgacttccttgaccgacgatccagaagcaattgcgacaataaggataacgtgaactttggagaaacttcccaagaataccacctccctacccgacagcgcctgcaataacactatcttccaaaaacaggatataactgcgcgatactgagataaccaatccatacccaagataacatcaaatgcccccaaggaaatcagaacaagattagctgaaaagacttcatcagcaagaatgacggaacaaccctgacaaactgaacagctactattggagccattagcagaactaaccataattgggtgacccaacctctgcaccgaaagaccagcctgcgacacaaaattctccgaaacaaacaaat

SEQ ID NO: 84577 - DNA, 395 bp, Zea Mays
gtagtttctctttataacttgtcaggcatgtgtgcagaccaatagactgggttcatgggagcggaccccactgggttgtcgtacacgtatgtgttatctagttacaaaaaaagggaaacagatttgaccccttagctcttgctctatggatagaacttaccaagatgttcgacatcgtggtaaggtactcctccagtcgtagctagatggttgcccctgggtcggtgcattcccgttaccttgaagggtccttcccagctgggggagagttgcggagcccttcttggcatggtactcgccgtggggctaggtcctgacccagggttcccacttgcatttgacacgggagccctcgtctctggctgtggccacttttgcatgtacctgtccgcagc

SEQ ID NO: 84578 - DNA, 367 bp, Zea Mays
gaaagaaaagattaaacagggtatttaatgccataggctttatataccctgattatcactacccgctgcagggtcaagggaagaaaagaaaaactattgcttcggcccccgcagcttcggccaccgctggtgtaccgaagggcaagaagatgaaggtcttgacccacccgcagcggtacatcgaaccggccgtggtgcctgattttgttgaaggagcctcttcacctggtgaagcaagacaagctgcttcaattacacagagtgttgaagaaccaactgtaatgctgaagacgcatacagtcgagtcagtcgaagataaggttgataaggctgaagagctaaaggttgaataaataataaaaatgcc

SEQ ID NO: 84579 - DNA, 876 bp, Zea Mays
tgaaggtggtgacgcagctgcttgaaattgctgtcaaagccatactaaaccaccacaccgtgtccctctgttcatgaatcctgggtggaagatagtagtgcaaccacgtgccataactctgtctttgttggaattccagagccctccttaaccggctcctagtgaacccatcgtgcacactatgtcttgcttggagtattgggtctaaaaccattcctgcctctctcccattacttcgattctggtcatttgaaactgaataactggtgttctatgaccattccaactctctactaaacatcacaggggtgtcccagtcctatatcgttggttgccttggacgtgatgaccacgccgagccttttcaccctttcaccgtggttagctgcttcaagggtaaatttcttttgccctatttgtgttctatagccattaagtactcgtaaatctctctggccgagccgtttaaagtttctcgtggtgcagtgcttagaaagatatagaatctttggtgaatgctgttgtctagcatgtccgcgtcgaccaacgaggctagtgttccccaagtcagtcagtgtaagaatcacatgttagatgtattgttgatgctagccgcggcatcggattaaacgctactgccaaatggccttgggcgtagcttaaccaaggttgcgctcctcctgtcgtcggatatagatggggttcagggtcagcatagatcaacccggttgaggggattagtcaactaaggccaaagttggtgcgggaatgtttatttccaatagagtaggttacctgtggcgaacgctggtgccatggccaggtgctcgacctagggtaccaccggaggtgagtagaggaccgggactcacaaat

SEQ ID NO: 84580 - DNA, 386 bp, Zea Mays
tctacagagcacaattgtcagctcagattgctctacgagcgcaccgactattggatctccctgccttcctgctagcagccggtgccaactctgaggttcacctctcctatctgcctggacttctcactcttttgactaccagcgacagatatgttgaggaatgggtctgagttttctatgctactgtatggatcgaccctgatcaccacttgatgagatttcgatttgagcgagaggatgttaccattcatgccagtcagattcgtcaggtgtttggattcaacgagtcatcgactcgtcttcacagcatgtgctatggcacctctggccctcctcgtcgccctcacggcggagttgctcctggtacagctcacgttgcggctttg

SEQ ID NO: 84581 - DNA, 462 bp, Zea Mays
gttgctcgagctcatgaagtagtctagtctgcacatgaatcaccctactagttggttgtcgattgatgggatctcatgcggcatcctaggatgatacatgatgcactctacctatgtgcctttaggtgcgttgatatacattggcttcatcagtcgagtatcgaacaacttcttgccttgatacaactcaaacgtggtccctggtacagtgtagtatctggccaaaatggacttgtcactcgtgttgtgaccccctctatgatgttgaggaggatttttgattgtcgcaccatcacttaatggattatgtagttcatctcctaccagagggcagcactacactccttcaaaagtgtggcaaggttgacttgcttcaatagtggcaacgtttttgagggatcggtcgtagtactcctgtagcttttagttgaatttctcgagctaagtctgcctggtcttgcc

SEQ ID NO: 84582 - DNA, 503 bp, Zea Mays
ttcaggagcatcccattcttttatagccactagttttgtggaaaagcatggcatcccctctacccctctagagattcccttggtcatccgaacccccagggtcagaccttctatgccagctcaaatgctcccaagtcagaattcttttaagtggggtagtgttcttggcagacttaaccgtcttgccatcctaagggattgatgtgatcttaggaatggattggttgaccaagcacaaaggtatcataagttgcgcaaacaagacagtccttctcacagaccgccaaggaaagtcagtctcttgtcaggctcagccacccaccaatgatccaatgatgtttaatgtagtaacagaaagcatatcagtggtagaagaattcatggatgtgttcccggaagagttgccaggaatgccaccagaaagagaagtggaattctacatagatctgattcctggaacggcgcccatcacgaagagaccataccgcatggctcctaccgag

SEQ ID NO: 84583 - DNA, 658 bp, Zea Mays
aaaactacatcgtactacacaacacgagttccaacacccgatgaagcaacatatcatacatggtgcggtgggtatggcaaccacctgggaaagaaaacctctaacacttttccacaaccagggatatgggccccggtacgactctctaatcagtataacaacgaggtagttaggtcttagcttgtggagttgaacgttcatgtaagctctctcctctattgcactgtaaaagggaggatatggcaacatttcacacaaattatgttcaaatacaatgactaggcttgactccagacacttgcaggtgttcatctactagagaggcgtaaaggcggattgggagcattaatctagaacccccaccatagccatggagtgatggggagctagaagaatttgatgctcacttgtatttgagcttgtaaccttttcttactcaatcgatgagtagcaagaggacatagagtattacacataatatggcttgaacctctttaactagcagtgtgctgagttccactcatggccatgttcaatgtgacatagacatgcaccgtcttcgctcataactctccctctctgtggcacttgtgttattatgcaatgacaattacgatcagtaaatgaaattactgaaaactacataaaaattataaac

SEQ ID NO: 84584 - DNA, 360 bp, Zea Mays
gattatttgacggactcaaaattcaatcaagaagtttatgtgagcagtttagtatctgaattttgagcaaggataaccattaggatggcatgttcaaggttgtcgcggtgcccatggtggagaactgcatagttagctataacagtcgcattcttgcttacggccaactaaactgcaggtttaagttgctgatcgctgttgtaaatactcaagttataagattgcattgttatgggtttacctttcaattaattacaaatttgtctacttctgctagacaggaagcgaaaaattacaatgcttggtgacatagaaaatggaacacggaggaacaacacactagacatcatctacctagcg

SEQ ID NO: 84585 - DNA, 810 bp, Zea Mays
tttctatctcctctgtgcgcgtgagccccatttcaccgatagactcacgtaggagactaccctcctcctcttcctctctcctcctttcctcattctacaccacattctctcacaaatccgaggaggctcttcatatggtgggggatccatccctctcccattagagccaggaggagatccaagccccaaggatctattgtttgctcctcttccctctccaatccaaggtaatgtgatggtttccaaaaccctagccattctctattgattttgtttagttactctgggttgattagtaagatgttgatcaaatacgtgtaaacatatgattggttgcatggatctgcaactctgaatttgaaacgacacactagtacgtgtggtagtgccgcaccagagcgttgcaatgtcgtgtctctagtcagcagtgccaaaaccctatgtggccttttcaaccccagattctctccttcatgcatcgatccatggttatacatattccctgaacttcagtttctgatagtatcccactggttgcgtcagggtgatgaaggagagcgtcgcaccaagatgtgaatcgaacactgtggacagatgaaagagccagcccatcgcggtggtagaagcagctgtggggagtggaaaagtcctagagaacaatctcagcaagagatgcaaattgagatgtatgggagatcaatccaagagatggttgtcctaaaactccagagaatatcgatgagtatgactccacctacatggttcacttttctgaggaggtcaaagtcaggaggccctaggacactcagg

SEQ ID NO: 84586 - DNA, 632 bp, Zea Mays
gaggagggacgttgaagggccaacatcttgttctaagcatgataaccgccggagtcgtttccttctctttttctcctcatcaggcgcagctggatggtccgtctagcgtgatcgcttgtgacaagcacctacatgtttctaaatttcctcgtcttcactaaggttctacccaattgcaacagccatcgactcagtgcgggcagagtcagatgattccccagctagcatgctgagaacagcgttcatctcagcctcgttggtactggtcggcatctcgaagtgggtctgcttctcagcatcgggaagaccccaaaatggagcgatgaaagcctcgatgtcatctactgagggtcgcactctatggcccggactgccatcttgaataggagggttggaaatgaaataagaaaagggactccgcggaggttgattctaggcagaataagataagggggcactagcatttgaaaccctgccccttagcatcaagtcaattcggctcagcaggtcctcgtcaggaatttgtctattggtaattcgggtagggtcgttgaccccggtgtacagataagctaggtaaactctatccttcaggggttggatgttcttgaaaacaacatcagtgaccacaa

SEQ ID NO: 84587 - DNA, 461 bp, Zea Mays
gtatttttagcattttcagtaattttctagaaattatttagtcctggcagaaaaagaaaagaagaaagactctacagtattgggctcatttcaatccgagacggcccagcaaagacagaactcgcctgcgcgtgcgcccgtggaggacagtttgcacagagacccctggcgttttaaacaactagcaaaggggtcgcgacactatttatatgtttcactgacgtttacaggaaaccccttctacttcaatttcttcgcagtgtcaagtccacgatgtcgcacggcggataaccgagctccggcgaacctataacgtccgaataactcaaccaccagtgttcccgtgcgattgacaccgaattcgacttctactgaccctttcccctccatcaattgcagagttctatccctaaatcgctctgtccacggtgaccgtgcgatcaacggacaatccaatgcgt

SEQ ID NO: 84588 - DNA, 716 bp, Zea Mays
tagtctctgcttcgtcagaagaagagcttcggaaaaaaaggttattaatttgcaaggaatttttaagaaattcaaaatcaaatggccagagtgcactctactgctagagttgagcgtgatggagatgaggccgaagctgctgaagctgttccaatttctgaagcgatgaagcgctccgggctagttacaatagaggacacacctactgccgaagcaacacaagctgatgttgaagaagttggttctgaggatgaactcagctgcggggtaccaactaaacctagtcatttggactttggaaagtccaccatctctgaagctgaccttccaaaaatgatgaagctgggctccttcagcgaagcaaaaaaggagctggttcgttttggcggagaggaaactactccgaagccggaaaagaatgaagtggtagtgttcaaaagcttctttaaagcaggattaagatttcctttgaatgggatgattgctgatgttttgaagaaatttggggtttaccttcatcagctgacccctaatgccattgctagattaagtgtttatatctgggcccttcgtagtcaaggagtggaaccgttcggcgaaggtttctgccgagtccatgaactacactatcagactaaagccaggggagatggtcttcatgagaattttggatgttacaactttgcttatcgcaagactacgaagtttccagtgat

SEQ ID NO: 84589 - DNA, 323 bp, Zea Mays
ttcgtcatgctcgtgcagggctacaacatgcacgctgacatgaatagagcatgatgatgctggtgaacacctggatgagagttgggattctgcgtcatcgctataaacagcaagcaacacggtgtgcgtcgtctgcatatgtaacctttgactgtccaacttcatggtacatgtgaattcgtaaatatttatatacaaacatgtgtcgggattgcttggatctctttcaataaaactggcatacttcgatatttattatgattattgagttgattcttactagcattactaaacaatggcctatgtgtgcacagttattcctg

SEQ ID NO: 84590 - DNA, 875 bp, Zea Mays
ttttagcaattaaaccaaaacatgaccttctccctactattgtcaattagggctggaaggagactgagcttgtgccacttggttatcaaatcgatctttgtgcttagtctcttgtactgccatgagtgcgagtcacctgcagtatgcagatcacaacgaagtgctagcttctacatgaccatctattccacgatacccatactatgtcccctttggagatatctggcatccatgatatctggccgcagcttgatgtcatttgtttgcttcatgcaaccaatcgatcaatgtattaaaaaatgtcatgtgtaaagaagtttgtctttcctttatccattctgtgagctgtaagcctacacttaagcgtatgtagctaccaagttatgtacctttgtcgttggcttttgctgaaatggagacaaactgcagttgtagtttggtgtgcttgtatgagttagtcttccttggggttctttggtatttttttcaaaataacttccatgaggtcattaggggaatagaatagggtggtactggatttataagtttttaggtattgggatctatatgggtgtaatccaaatcatgctaaaagggaggaaagaccatgtagttctgcgtggcaagtctttagtaaataaacaggtagactctttgctttcatgtgataggtcgggtgcatgatttccccattcgcacggcacaacgttgctctccggcctaccaatgctcctagctcatctttctaccaatgccagatgtggcgtcacagctcatgtgcttccaatgcgtcacggctcacggctcctggaagtgccacgtctgccataagctcaatcaacctgctgcgccaccacttggattgtcatgtaggt

SEQ ID NO: 84591 - DNA, 278 bp, Zea Mays
cactggacactgcttcctagacacttgccaaaatgttgcccaaaaagccctccgccagctatgccaaaactacaacagggaagtctccaagacaccccttcattactttccacccagcaacaaaaatacccctacctagaggaaaagacttcaggccttgtcagggagagatcctaatgaggatgaccccaccattgtctacatggctggatatctccacacccttgacaaccactatgacgaccttttctcccactgcacccacctaaattcccggg

SEQ ID NO: 84592 - DNA, 597 bp, Zea Mays
gccgggatagtctcctattgtccttatcaatacaggaaaaaaatgccatctgattcatgtcctgagatatactacccattgttttgtcataaatgcttaatttccttcctaattacacaattgtttgattatatctcatcattcttaccatatcatttaaaggttgctaaacactaagctccatatgatacgcccccaagcaactgcggaagaattacaggcttctcaaacacccaacatcgaagacaaaaccattgaagaactacttcagctagatccagatatgttccccgtaataaccacgaatttctctattattacatttcatcagtatataaagtgcaatatagttattgacaacaaacttcttttccaaaatgcaggaacaaggtttcagatgcactgtcactatatcacgcctcgtacaaaatggtagatggtggttcccatcctgtatcaagtgcaacaagtcttcatcccagacatctactgggtaccaatgcacatcatgcaatgggacagaaacagagttcaggtaaccgtatacacaaacaccaaaccaattatgttttgcatacagaggaaaatgtcgtcttc

SEQ ID NO: 84593 - DNA, 314 bp, Zea Mays
ccacaaatttggaaaacacgcttactgacattgatgaaataattttgaatatggctgaggaagaaactgctgcagctgctgaggaaaccccggctacagtgcctgaaaaggagaaggagcttgccgaagatgcttcggaagaaagaaatatcaactttcaaaacataattggacaagagttgtctaaggctaaaaaagaagagctgagggactttgctatatcttgcgggtaccagccaggggcactgctcttcggtggtatagacgaagagagcttaggttgcctttgagaccggactggggagaaagttgtc

SEQ ID NO: 84594 - DNA, 343 bp, Zea Mays
cgggggtgttctggtcattcctctgattattgcctttctggggtgtttgctggttgtgccttgggcagttgttggcatagtggcctagctcaccgcacttgaagcagccattgggttggacaggtgtgttgtttctggcctgcgtgttactggtgccaccttgacggttctgggaatttccaccagacctctggttggtctgggagttgctcctttgttggttctggttttgattacttctctggctttgctgtccagagcgttgtacttgataattatttccaccctgatttccagagcggaactgcgaaccttgagcattattcggacgagtgttcctgct

SEQ ID NO: 84595 - DNA, 417 bp, Zea Mays
gagaaattgttgatgtttatcgaacgatgaatatttgccacccttcttcaaccaaatgaacctaagagcttccttgcaaactgggcatgggaacttatcatgaacacagcaggtgcagaatagcccatacgctgataagtcatgcatggagtactgctaccaaatatgcattttgaagtttttcttcgtagctcagttatacgtccataccccttcctctcaagcatggaccaattcatcaatcaaaggctccatctacatgcctattttattcactgggtgtccaataatcatcaacgacatgaatatgttgtctttgaaagcatatgttgggggagattgatggggataacgaacacgggctaacatgtgtatggggcaacgatcattccatagggattgaacccatctatggct

SEQ ID NO: 84596 - DNA, 987 bp, Zea Mays
tcctatcttgtctagacatctggatctgatggaaaccagagtaagcatctaaaaaggacaggaggtcacacccggaagtagaatccacgatttgatctattcgtggaagtggatatgggtccttgggataggccttattgaggttggtgtagtcgatgcacatccgaagcttcccgttagccttgggaacgatgactggattggccagccatactgggtgatggacctgttcgatgaagccagcgtccagcagcttctggacctccttacggatgaaatcctgcccctcgatggactgtcttcgaggcttctgactcaccggtttggcgtcagggtggatcttcagataatgctcgatcacctccctggggatcccaggcatctgcgatggttcccatgcgaatacgtcggcatttgcctggaggaaggcgatgagcgcgagttcctatttcttctccagatcacccgcgatgcgagtggtctgtgaggaatccgcgctgagccggatggacttgacggggacaccgtctgccccagatggttgcaccttaggcaccttagtaggcgtcttggtacaggaagtcaaggggtccctcctttcgtcatccggacgagcggcttctgccaccagagcgtgcaacttctcgacagctgcaagcgcagcggggcggtcgccccgcacagtgaggaccccagcaggggacggcatcttgaggaccaaatacccataatgtgcaatggccatgaaccggtacagggccggcctgccaatgatggcattgaaagggaggttaacctccgcaacgtcaaattggacgttcttagtgcggaagttttcctcagtcccgaatgtaaccaggagtgcgatgctcccaaggggatacaccggttgagggcccactccggagaatgggcgtgagggccccagtcgggaccctgggatctgcagctgcttgaacgcagcgtggctgatgacgttgagccaag

SEQ ID NO: 84597 - DNA, 298 bp, Zea Mays
agttgttggcatagtggcctagctcaccgcacttgaaacatccattgggttggacaggtgcgttgttgcttctggcctgcgtgttactggcgccaccttgacggttctgtgaatttccaccagacctctggttggtctgagagttgctcctttgctggttttgactctgattatttctctggccttgctgtccaaagcgttgcacttgataattatttccgccttgatttccagagcggaactgcgaaccttgagcgttgttcgggcgggtattcctgctggactgaccttgaaattt

SEQ ID NO: 84598 - DNA, 502 bp, Zea Mays
tttgatcggcgacagattggacatttggtagatggctcttggctggtcttcatttcactttgtgcttcaatgcttcctttgattagacttgtacttttagtagctatatttggctttcctccgagtctccatcgatatctttcttctgtcttgatacattcattgcgtatactctatggatgtgactgcttgggaaaatctattgaaaattcctggatgtaccctccccaatgggtgtaaccaagggacagcttggtacgctgagcatttagcaaactgcccttgagtagtaacttgacgtgaccacggggtgtaatcatatcgtccatgcagttgacctcagtccaaatggtgtcgtgttacatgaaacggcatctgtcgtctgacttgttttcagacgatttgaattgcttattgaatacttgcaactgtttggtgaccgtggtaggagatgagcggttgcctccagcctctataaatagactgtttgcctcgctggtgt

SEQ ID NO: 84599 - DNA, 728 bp, Zea Mays
gtacattgcagactttggcgtttatcgttggacaacataggggattagggatatggacgcatcaattcggagagggaagccgatgacaagagagatgggaggggtggaaggggattgcgaacgaagagtaaaaagaaataggagagttgtggatgtgaagtggacgactaaataggagttgcagatgcgccgatgcggtgggggagcgaggagctgcgaattaatggtagggcacaacagggatgaccaaacgagtgacaggtaatttatccatggggcgttgggccgcggtcgggacaccctaggcatggtatgcccaatggatcaggccgacacgggcacgtcgagcagctggccgtgctgggctggcaccgggccaaatctgtgcctggcattgggccgctcgatgggctcgacccatataggcatctatacttacacctaaccctaaccaaatgcagaggggccaccgcctcaaggtacaatgcagagggaccacctcatgtgaagtgatcgtacattataattttgaatatatactaagaaataaaaaaggaacgctttgagccataaaatcatttgtctcaaagaatcggagttttccacgacgacaaccctcatcgttctaaaaactccgtagagtctgagtactgtagcttagcaattgggcgattaagagcaactccaaaaggatgttaaaaattttaccccaaaaattgattattaag

SEQ ID NO: 84600 - DNA, 758 bp, Zea Mays
gacaccttgaggtacacataatctccttcctcaaattccagtggtctccttctattatcagcatagctcttttgcctggtttgaactaccctcaagttctccctgattatatagacttgttcttctgcctcttgaataagttcaggtccaaagaattgtcttcctctagtctaatccaatatagaggagtcctacatttcttgccatatagagtctcgaacggttacatcttcagactggcctggtaactattattatatgagtactcagcataaggtagactcttgtcccaactactatcatgttgaagggcacaagctctcaacatgtcctccaatacttgattagtccttttggtctgtccaccagtctgaggatggtaggtcgaactaaaattcaacttcgtatccatattctcatgaaaacttttccaaaatctggaggtaaaatgtgatcctctatctgaaatgatcttctttggtacactgtgtagagacacaatccgagccacatataactctgccaattgagattccttataagtgaaatgagccactttggtcaatctatccacaataacccatatagaatcatatcctttcggggtgcgaggcaatctagtaatgaaatccataccaatctcttcccacttccattcgggtatctttaatgggtacaatagtctagctggtctctggtgttcagccttaactctttgacacacatcgtacatagccacatgtgcagccacatctctc

SEQ ID NO: 84601 - DNA, 607 bp, Zea Mays
ccaaggcagctacacgggcttgagctgtggtgagatccacatggagcttacggttgcgcttctctgcatcttctgctcgggcaatcatctgacggtggtgccaagccaagaaatcatattgcgcatccagggtgagcaggtatgcggtgaggtacacgactgaggggtcatcctcaagcagctgctgccctaccaatgcacgcatcctggccatccaaataggacagtttctctgaaagggcggaaaaatctgagcggtgtgtcggccacttcttcttcaaagatctgacacagggccctcaatgccttgcgagcgatgacttgacaggtgtctttgaatctgtgcccagcagcagtgacactccattccacatggtgcggactggatccaatgtatgcagtcatgacacacttctctgtgccatgctcgacgaattcacgaccatcatactctggctggctcctgattccgaggcgaactgtgcatgctctcagcaacttggggaaaccatcttcattctggcaaaagctggtttggcaacggacctccatctgactcctgagagaaggaaagggggaaaacatttttgaaatgaagggatgagag

SEQ ID NO: 84602 - DNA, 1002 bp, Zea Mays
gtcaggtttctattggtcgacggcgaagaaagatgcgacagatttagtccagaggtgcaaagcatgctagttcctatctaagcagcaacacctaccagcccagcagctgcaaactatccccataacttggccttttgcatgatgtgggctggacatgatcgaaccattcaagaaagctcaaggaggatacacccatgtacttgttgccatcgacaaatttataaagtggatagagtagacctcagccaacgcagtggagttcgtccaagaaatcatattcagattcgggatacccaacagcatcatcacagacctaggatctaacttcaccagcgcagagttctttgatttttgtgaacggaggagcatccaagtcaagtatgcattagtggcgcacccgagagctaatgggcaggtagaaagagcgaacagaatgatagttaaggcactcaggaagaaaatatttgacaagaatgagaagctcgcgggcaaatggatcagggaactgcctttgtagtctggagtctgcgaacccaaccgagccgggctctacacaggaacactccattcttcatggtgtatggatcaaaggaagtgttgccaacagacctgatctttggggcatctaggctggcattcgaaagcatagcgaaggcagaagcgactagacatgaggaagttgatgtgctagaagaagaatgcttgaatgttgtcatctagtcgactaggtaccaacagactccgaggtgctaccatgataaagctgttcggcaccgatcattcacagtaggagacctagtactccaccgtgtattgtcaggagaaggacggcacaaactgtcaccgccatgggaaggatctttcatcatcgcggaagtcatccggcctgggtcctactggctaacccagatggacgggactcaagtaggaaactcatggaatatcgagcatctcatgaaagtttacccgtagtgacaccataaactccagatgatgggctac

SEQ ID NO: 84603 - DNA, 374 bp, Zea Mays
tcaattttttcacgcaatccaaggacttctcgaagcacctttccttggattcacgaagctcctcaacatttttctctagccttgcttttgaccattcactaatttcttgactagcttttgaaagtgcaaaattctcattagcttcggtgagcttttttcgaaggtcttcaacctcggctttatgagcttcgacttgagcgttggatttcgcttcatcttccttcactttacccaccaatgaaagtagaattttgtccttccccaaggcttcgttcctcagcttaatgacttctgatcgaaggttgctgagagctatcgtgcaactttcgtcttcagcattcttttgtgccctcaggacgttgctaagaattaat

SEQ ID NO: 84604 - DNA, 420 bp, Zea Mays
ttgctagggatggtatgagtgttatttctagcacaatagacaagataaaagcaattgtgttagttgcaaaaggatctcctcttcaaatggaataacttatgaaacgtgctaccgagtgtgggctatatacaacaaaaggtctctcaatagatgtatcaacaaggtggaactcaacttatctaatgttgaggaatgcattatcgtctgatcggcgtaggttagttccattcatgatacctttcagtttcaatctgctaacactactatattaatatcagcttcattttcttttgtaggtatgatcacatctgtcctagtccttttgagtggagcatggcatcaaccatttttcaatgcttgaagaagttttatgatctcactgagttgctctctggtacttcatatcccacaacaaattta

SEQ ID NO: 84605 - DNA, 809 bp, Zea Mays
tttctttggacagatcactctgcttcccttctcccttaaatcctaacatggtctgtttgttaatgaatggctgacgctaccccttaacttttgcctgctccaaaatatcatactgagtctgggctaacacaatagcacgatcaacagcagtaggcaactacattctgaccacactttggatatcatatttcagtcctcgaacaaaatgagtcataaaaaaatctcatcgaacaatggattgtgtacggctacaccatatcgaatccgatcaaaatccttgatatactgatccagagtatcagtttgtctcaactccaacagttttcttagagcatttggatacgcttccgccccaaacttcgtcaccactgttgcagaaaattcctgccaacctcccaaaccattacgcattttgtgaaactgccaccattgtgctgcagtatgttccaaattcatcaatgcaactgaaacccacatagcagctggcacactgaagatcgaaaaatattccaaacaattattcaaccataccactaggtcgccttcagagtacttcggaaacggcagcttcggtagtggctgatgatactgctccccatgtggacgtggttctccctgaccaccatgcatgccaccatgaaaacctcatggtggttccctcctttcctgtcgtggcctgttgaatggaggaactggtggctgatggtgttgctccccttccacagctgctcctggcgtttctccaagttctttgctcctgttttccagtcggagttgttccaccaacttctttgtttcgtccatcttct

SEQ ID NO: 84606 - DNA, 368 bp, Zea Mays
caccttggacgaagtgccggaactgagcgtcgaggtggagggcgcaggtttcccgattcccgagaaactggttctcgagagtcagccaagtggtgtgggcagtggcgccgcgttccatggccatttcagcaaggtccggggagatggagccggagatctaggacttgacaacgcagtccatgcgtgcccagtcagggaagtgaggcgcgggagtgtcgtcgaggatgtggctgtccagggagtatttgacagtgacgagaaggaactcatcacgccagcgggtgtagttgttgttggcgaggtcgaggacgacgtgaacgagactccggatgttttgcacagcgacgacctgggagtggaggttgacg

SEQ ID NO: 84607 - DNA, 640 bp, Zea Mays
ctaaaaaccccttccacacgccaacaactccatatatattagtccaaagggagaacacgatcaaggccacgcccaccagcttcaccctcctcgcgtttgtaagttcaattttcagatttatgatttcagatgttgagttgattttgcaaactgataagtgttttgtttcatacggcaactctgcacgtggacagaatcacagctctgttagcgttgttttatcaaggtacgtccaattccttctatttagttgactgtgattcaatatgcttgctgttcggttttacttgcgacatgctgttggggcgtgtgtttggttgttgccctgccaggcagtggcggagcacaaccaaaaattaaggtatggccagtgtcacgaagaacgacaaccaggaaaatattgacaagtagagttatggtgtacgaagaacctttaaagaagtgaaggttgttcagaaagtctgaatgtgatttgagagtccatcgggaatatgtgtgcctacgatgataaggttgacccatgcgttgtcgcgttggcgtcttgttgagctgcgtcagcgtgtggtctttcgttttatgcattttataaaacatctataggatgagatgataaacctgcacttgtatactccgtatccag

SEQ ID NO: 84608 - DNA, 600 bp, Zea Mays
cgagggcatcctatagagaaaaaggaaggtcaaggcattccaaaactgaaacatactctgcagaacaactgcaaagtgctctcgctgagtaccaagaagatgcagcgctgttcatatttcgcttaaaatcattgaggcaagggcaattccatagccttttaacacaggcttctcgccatcatgctgctcaggtaggctaatccttcctccataacactgtcagttggcccaaagattggttgaatacataacctaactatcacactgttctttggactgtagttaagctttttcaggagagggctgaagtgtcttgaggcactcgaaccccatgtaaaagctatagctgagagacagcacattgactaccagttcagtggtcttgaggatgatgaatctgacaatgatgattacagctccgaccaggatgattgcagcgaagacggagagcttagtttcgactatgaaataaatgacaaggaccaagattttcttgcttcaggaggttcgatggatgtaagtttcatgattcatattttgctgtcctctttatgcaactagctcccgctcacctagatgtgaccataggttaatgttgtc

SEQ ID NO: 84609 - DNA, 658 bp, Zea Mays
ctggcggatgggacccgcctgcagcctcacaagtgtgtgtgcctgtcttactcactagctcgtggcctccactcgccagtagcgcctgtagaacctcacccatgccgccatggtcacgacctcacctaacaactcgccgctaatctcgccaccagcggagaggtagcgggcgccccaaccgcctcgcctcggtcatataaggtctcacgcgccgtcgactttcccctttgtccattcatttgtgcactcacgaccatagccagagtgaacgtgagggtgtgggcgtcgcctgcttcaaattagtgagcctcgtcgctatcgcatcctcgggattgtgcctaggagatccgtcgtgccaagaggattgtgccggtggcctcgctgctgtggatcggtgaaggaaggcctcagaatttgtcaccggagcgcaaacttcaccgtgacccgcctcctaccgtggccaagcatcaacaccggataatcgcgggtaatcttcgtcttacctagttcactaggctgtaacttgcgcgtagagtgtttggagagggatctgggtcaaagattggtagtgaaatccctcgtcggagggactgccaccgtgggttgctggcgcggcggcgctggggttagatggggaagacggtcggtcgaccgttgg

SEQ ID NO: 84610 - DNA, 747 bp, Zea Mays
ctttctttatttttttctctcacacacattctctctttttgtgagcgtctttgtgcatgcttgtcggtggctcgtctggccactgtcaccctgtcatccccgcgcctttccatcgtgggcgacatcccccatcttgcagcaccgcctcctagccagatcgcttgtccacccacctccctgcatgtcatcctctatgtaggcgacatcctcatcaccacaatgggccaccttcgtgttgccacctggttgtcctatgcctccctgcttcagtcgatcgtccacctcctttccattccgcccactcgcctatcggcctccttgtcgtgtttgcccacccacctccacattgtggttgtccgtgatgaacatagaggtgaagaatttacaaactcaataatcaacaagcgccatggccttgtagctctccctcccaattttgttctagtgaaatttctagcctaacagtccctagttcacctttatgctagcccctagtatactataaaagttagatgagatgatgtggaatatgttgaatatcccattatgttgctgtactactctttttataaagcaagggaagagataggattgcatatcgatcgtaccatggaccccgatcaactgtggtcaaataacatcaatcttatcatgatcatggagtcatacatagtgccataccttccgttgtgtcacaatatcgaggatgtcctactgcaacagtagacatacctgttgtagaggcta

SEQ ID NO: 84611 - DNA, 564 bp, Zea Mays
atttgaaagagttttttatatctatatttagctagcaagacatttaaatcagtatatttttatatttgataactacttatagaaactagaaagtgttgattggtatgtgttgaacatcatatttgacacttgggcatgctcggaccatccggtgctatggctcagacggtctgcacccccgccacaaaataatcacgtgcgagagtgcttatcctatatgtggttatcttaacctatccatggggatctgttggtactcggctaagaacaggcccaaacctcctcccatataaatataaaggggttacggacgattgagaactcccgaacacaatccaatcgaaccaatctatttacctgcatttatctttcatgccttaagagtagacatagtgtagccttagtttagatctatttgtagtctgccacaaccatctctcttcgactctacgccgaccagaaacgtcctaggtggcttgccaatcctggggcatgccttggaactccccctcgacggtatctctcccaggggtgagttctaggatccatcgtgaggaagaagac

SEQ ID NO: 84612 - DNA, 445 bp, Zea Mays
aaagctgtcaccatgatgctgaaataaaaaaacctctctattagttagtaggtacaacagattgcttgttacaatgctgaaataaaaaacctctctatcagcaaacaactgttacctggattataatcaaagttttcaaaagtccttgcaagcttcttgctaaatgggccttctctattctgaaacttctggagttcgatgttggctacttgttcttgcatttcgtcatgataataaaaagtctccacacaattgataaaaccttctgttattttgggaacatcaaagattgatgggtcagcataactatagtgtggattcagcaaataagctgtcaaatgcaatggagaatcaagtcttccagtcatcttcttctcaataacaacaacaacatccttgaaacggttctcaacattgccaagggcctctttgacatgtctctttg

SEQ ID NO: 84613 - DNA, 620 bp, Zea Mays
tggaatgacaaatcagtacacactagatctgaaagggagaaagtatgtactcaagcctatgacccctcaacaaatcatggctaaacacttacaaaagaaaactgaaattagtgcagcaagtagaggaggagaagagcaaaagaaattaagtgccatccacaattcagtgagtgagtgctacaagccaaattcaaaagataaaaaagaaagaagagggagaacatctagttatgctagccacaaaatctgagctgagagatgtgatgaacaacccatatcatgtgctctttgtacttatgagcaaagatgttttgatttatcctaaccacataacatctcttcctagtgttttggttgatcttttgtaggactttgaagatgtgtttccacaagaaacaccggctggactacctccaatttgtgggattgagcgtcaaattgatctcattccaggggctgcacttcctaaccgtccacaatatcgaaccaatcctgaagaaactaaggagatacaaagtcaagtgcaagaatttcttgattaaggttttgttcgtgaaagtttaagcccttgtgctattcctgtgattttagtaccaaaaaaagatggatcttggaggatg

SEQ ID NO: 84614 - DNA, 375 bp, Zea Mays
taggcgttaagaggttgatggtatacagagattcactagtggttataatccagataaacaaggactgggattgctcgactgattctatgggcaagtactatacaaccgtccaaaaattagaagacaaatttgaagggttcgaattccatcacatggaaagagaccgcaatgtagcagcagtcgcattgtcgaagctgggatccagtcgggcccaggtcccacccggaatcttcgtctaggaagtatcgcgcccaagtattccctcagatcaggcggaagaatgcaatgccttgagccaaccagaatcagaccctaatgactggagagagcctatcatcaggtacataaaaaatgaagaagaaccggatgataagg

SEQ ID NO: 84615 - DNA, 315 bp, Zea Mays
ctgtgctgcaacagctccccacgataggtgatgccaggtcagccgatgatattccatctattaaaatttcttttgataatcggaaaaaatatcacagaatatatagagaggatggcacatgcattagggaaaactcacatgcctaattttttatcatataaattaggcgccgaaacaattgtgtcaaacacatcgacaacaaatggatttccccatccatattgtggtatgccgatggattcatatccaggacgaccgttaccaccatctccgctaaatggtggattaactctgagcacggtcggaccgtccgca

SEQ ID NO: 84616 - DNA, 412 bp, Zea Mays
tattggcccaagatgaggagagatgtcatcagatttgtggagcgttgtgtcacctgtcacaaagctaagtcaaaactgaaccctcatggtttatatactcctttacccgctcctaaaattccttgggaagacataagcatggattttattttagggctaccgatgactcaaaaaagagagatttttttgttgtggttgatagattttcaaaaatgactcattttattccatgcaacaagagcgacgatgcttcacatgttgccaatttctttttcagagaaattttgaggctacatggagtgcccaagaccatcgtatctgaccgtgatgtgaagtttgtgagctatttttggaaaacattgtgggcaaagcttgggactaaacttttgttctccaccacatgccaccccca

SEQ ID NO: 84617 - DNA, 328 bp, Zea Mays
tgaacaagaacggttcgaaatccagtgatcttttccagctaactagctaggcacctctcaacaataagtgtccatatttaagcatacagtacccgttaaccaccaaaccatagcagtagtgctagtttagaggacactggtacttgagtgctgatgctaatgatagaggcccgaatcatcataaagatcccaacctctttgggatttttcaaagaaccaaactttgtaattgtaaaaaaagaagaagggagggacggactctgccgcacaagctaaacaattggtcctgagcttttgattcggaaggacagaaaaagttgaccctatc

SEQ ID NO: 84618 - DNA, 464 bp, Zea Mays
ttgaaatattaaatttgtcctaacaattcggatatccactttcatcctattcaacaatgtgttgggtttgaatgaccacgccactagggctcaacgcacgggagctcgaggagcaactgatgttggccaatgaaactgagtcaatgtcattcggggaggcacaaaagcacgagaatgggcaccatgcaaagcttggtgggttcacctccatcaaggatgcattctactcgtgctcactgtgtatcctggacaacatctctcatgccttttcatctcctgatcacatgtgatcacctcacgtatatatacacacacatgttgccgagacaccaccggtattgatggtacacataaatggcatcattcactctagcatgaatacgaagatatatagtagtgtcttatttatcatgcatacagacagtagaattgcttttatcaccgtcggattgttacgattcctc

SEQ ID NO: 84619 - DNA, 543 bp, Zea Mays
atcaacatcttcgaccggagcttcgagggcaggagattttgctttttctatcatatcttgccccgcaaccataccggtatctgaagttcgttgctcagctttatcctcaggcgcgacagccttcgtctcaatgggcactgaaggcccagcttcggctccggcctggactttgacagcttcgacaactttcttagtaggagcagggctcaaggcctttgtggtctccatgacagcgtctagtacactggccatcctccttctcttgggagttgcgacgggagccttttgcacttttggcaattctgcctttgctggtggcctcagaatttctggcattatcactgtttctcccaattttggctcttcggctgcatcatctttagattcggctggcccgattgtaggcaccctcggcactacaatcgattcttcagcgctctacacggtgggagcaacttgttttccttcgacagttgaagaggtcccttcaccaaatttaggcgctacgaccggttcaatatatcgcggcatgtgggtcagaac

SEQ ID NO: 84620 - DNA, 1127 bp, Zea Mays
aaaaaattataatatcgatctaatttctatataatatcgatcgaactctactctttctctcttacaaaatgataatcaatcttcaaaggcttaactctgctataaaagactagattttctaaaaggatatcgtggacatacttgacaaaactaaatcatcatgaacctttttaagttggggcatttgtgattataaccctctccaactttgcaattgcgattttacccctcgttttgaactttgtgattttacccctctgttttgaaaatgaatctctatcatacccctgtgtcgttacttgtagttaacaatgttagatctgatgcaaaaagagatagaagtgcccatgcaatttagtgtgattttacccctcgttttgaactttgtgattttacccctctgttttgaaaatgaatctctatcatacccctgtgtcgttacttgcagttaacaatgttagatctgatgcaaaagagatagaagtgcccatgcaatttagtgtgattttacccctcgttatatgcagccgagtggttggagtagcagtaggagtggtctcatgtgggattcgtaggagagttagtggcatttaatgtgttcctaccagggcaattttccgaggccgagctcgggcgaggcggagttttctcccgagaccgaggtcgtgtccagttgtcgcgtgtcctgctcagagttgttaaaatagtgatcgaagtgagggaacagtgcccagtattcacgctcgttcctcattgtaggcgttgaaggtagattagaccgctgtcgcgtcgtcctttgttgactttagtgccctcaacgggacatgtgttcgtacagctcacatttaatgcacacaccctagggttttgatgagtcggtcggggttgggctcataccaggacttggcccgagatgctctcgggcgaggcggacacacgttttccgcccaagggtgccctcgggtgggttgcagatccacgtaggcatagcgtttgtccgaggttaggctcgggcgaagcgtagttgcgtagtcagtacgtggagcctcgggtgaatcaagatttgggtcctgcgtgaccttggaggtcagggagtgtgtttgctctatgcttcccttgtactcagg

SEQ ID NO: 84621 - DNA, 449 bp, Zea Mays
aattactaccatgtcaacccccattcaaattgactcagtcggtggtagaatccgagccgatagcatatgtttgaatataagtgtggaaataagggggatagcgtttcccgccaacctcatagtaatgggtactcagggaatagatgtcatcctagggatgaattggctagataagtacgaggcagtcatcagttgtgatacaaggacaatcaagttggtgtccccactaggagaggaagtggtgaccgagttagtcccgcctgagccaaagaaaggaagttgttatcagatggctgtcgatagcagtgaagcagacccaattgagaggatcaagattgtgtctgagtttccagatgtgtttatcgaggacttaccgggcatgccaccagagcggaaagttgagtttgccatagagcttcttcctggaaccgcccccatctttaagagag

SEQ ID NO: 84622 - DNA, 771 bp, Zea Mays
tgatgttctcctgttggtgctggcctgctgggttggctagagctagtagctcgcgagggtgagactgacaaccttaggaagttgggggcatgagcaacggagcaagctacaatccacccgaggctgaacagtaccatgtagataaggtccgatgcatcagaccaaggccactgaagcgggcagacgtctctagtaaagtggtctattttgccactagattgggccggtgtgtcgggccattagagcccgcgtgaatagctctctggtaaaccggtccaaggctccactagacgagtacgagagctaaggtgaagtctttctcagccaaaacttctccaatttgattaggatggtcttggaagctttaatattacttagacaaacatatttagagtatgttcaacttgtctaaatcaaagattcataccttatctcatcttcaactcagactccctttttcaactcaaaacgggcaccaaaagcacttttgcaatatatgacatctatagcgtatctaaagtgcttggaaatgtttctaaaggcaatttgaacttattcaaacctatgaaccgaacatagctcaccatttccaagttttgcccattttctggtcttgtttaagttgagcattggatttcaaattggaacacatggagtagtttaaaaaaactattcacaaccctaactccatgattttctggagcacctaatgacctgctccacgaactccactaatttttttgagctagagttgtcctaaaccgggccaaa

SEQ ID NO: 84623 - DNA, 277 bp, Zea Mays
attcggatattttagtttctgggcgtagtgtctggcttctaagatttcttctttggataatcttttccccgaagcatgtcgaataatgtaatcaacatcttcgttcgaagcttcgggggcaggagatttagctttttctatcatgtcttgccctgctgctatgccggtatccagaatttgttgctcagctttatcctcatgcgcgacaggctttgtctcaatgggcactgaaggcccagcttcggcttcggcctggactgtgacagcttcggcaact

SEQ ID NO: 84624 - DNA, 429 bp, Zea Mays
tagccttattatgcgatcatatccatggatgggtggagtaatggtcatagatatatgacgcatacacaccatcgatgtatgtagtggtggtgacctagctcgccgccggtccgcgagtaaataaagccagcaggtaacctccctgccccctgtccattgtacacaacacaacaagacatggatagccgttgtagttgtcatcttacaagtagtcattagctactattcctaggttgtatagatgtatgtagcattatagctatatctatgttcatacctacatgctatattgctattaaaagaagaaaaaagtgttcaataaagtaatttgcacatcttgcctcaatacccatcggacgtgtaaagtgcattaggcatctgacacagttaaccactagtttatagtcgttagagttatagccattggaa

SEQ ID NO: 84625 - DNA, 414 bp, Zea Mays
gagaagaacggtcttatttgctaaacttatgatgcccttgtgcttggtaaccaatccattgctaagatcacatcaatcccttgggatggcaagacggctaagtctgccaagaacactaccccacttaaaagaatcctcacttgggagcatttgagttggcatagaaggtctgaccctggggttcgggtgaccaatggaatttctaggtgtgtagtgggaatgccatgcttttccacaaaactagtggctataaaagaatgagatgctcctgaatcaaaaagtacagtagcgggagtaaattcaactaggaactcgccgagcactactcccggagcttgctgagcctcttgagcgtcgacatggtttactcgtgctctaccatgatattgggtcttgctctgctggctgttggag

SEQ ID NO: 84626 - DNA, 1660 bp, Zea Mays
cgagaatcttcactggcttttcccggtactggagatccttttgaatctgaattgcatctgcctcgatgtggttttctggtacctttaggcatttgcggagttgggacacatggaacacattgtgaatatctgacatggattctggtagctcaagacggtatgctgcgggtcccactcgggcaatgacagggtagggaccgacgaaacgtggtgctagctttcctttcatttggaacctttttacaccacgcatcagggagaccttgagataaacgaaatctccttcctcaaatctgagttctcttcgtctgttgtctgcgtaactcttctgccgagtctgagcttcaagtaacctcctgcggatcaaggcaactttctcttcggcttctttagcaaagtcgggtccttctagtgtcctttctcctacattggaccacattaggggagtctggcatttccttccatacagtgcttcgaacggtgacattttgatgctggactgatggctgttgttgtacgagaattcggcgtacgacaaactggactcccaatccccatcgaaagttaacacacaggctcttagcaaatcttcgaggatcttgttgactctttctgtttgaccatctgactgggggtggtaagcggtgctgaaatctagcttggtgcccaaagcttgctggaggcccttccagaattttgaagtgtgcgttcctctatctgacactattttccgcggaatgccatggagcctgactatctctttaaggtatattcgggcaagggcggctcctccaaaagtggtctttactggaacgaagtgggccaccttggtgagacgatcgattattacccagatagaatcatttcctctctgcgttcggggcagtccggtcacgaaatccatgcctatttcttcccacttccactcaggtactggaaggggttgaagtaggcctgcaggcttctgatgttcggcctttgttcgctgacaggtgtcacaccgggccacatactgtgatatttcattcttcatccctttccaccagtatctggctttgaggtccaggtacatcttggtggttcctgggtggatggagtaagctgagttgtgagcttcattgagcaggacttcccgtgcctctccccgtggcacacacaggcggttcttgaaccagaggactccttgctcatctgtcctaaggtccgggagttgctccttgcgagctctctccataagtctgactgtctctgcgtccaggcgctgagccttgcatatgagatcttctagaactggcttgacttccatgctaccgtcatctcccagacaagcatttagctgagctgattctttcttccaatcttccagaaagttggttcctttaatcccgaaaggttttcggctgagggcgtctgctaccacgttggccttcccggggtggtagtggatttcgaggtcataatccttgatcaattcaagccatcttctttgacggaggttgaggtctggttgcgtgaagatgtacttcagactcttttgatcagtgaagatgtggcatttgttcccaatcagataatgcctccatattttcagggcgtgaactatggctgccaattccaagtcgtgggtagggtagttctgctcgtggggcttgagtaagcg

SEQ ID NO: 84627 - DNA, 872 bp, Zea Mays
ggggtctccgcagtgccaacaggcatttgctggtggttggttgcttgcaaccgagggggcctgaaaggagctctgactctgctggctgaaacatgacgaagtgggtccagctggtctattgaagcttggtcccttgggtggaaacccaaaggatcgagttctctagtgccattcctgttgctgagctcggaggacttggaatttcctcttgaggtgacctttttcttcttcccttgccctttccacttgtatggctttgtttgagaggtgcgagaagctgaggaaatcttggctggctaggatggtcttgagttctggtctgagccctttcaaaaagtgggccatcttcttggcttctgtgctgacgtcatcaggcgtgtagcgggccaattctgtgaatttgtgcacgtactcactgacagatcttccaccttgagttagttcccggaattcatcttccttgagctgaacaatcccttggggcacatggtgctctcgaaaagcagtttcaaactctgtctaggtagcatctctgacgacagcgtcgaaggtatcccaccatgctagggccatcccgaaaagttgatgagcagccaattgaacatgctgattctctgggcatccgatggcttctaacttccttttaatcgtgcgcagccagtcatcagcatcgaggggattgctggatccagcaaatgtgggaggcttgagcctcagaaaatctcccatcctgtcttgtggtcttccaccattcgggcgttgattctccagacttctagtgaggaccttaatgagttgggtttggttggctagaacttgggctaaatctaatggcagctctggaggtgcggggaggtgggtctcactccctt

SEQ ID NO: 84628 - DNA, 625 bp, Zea Mays
cacgtcgcggatagtcacgctaggggtttctggtgatcgccggagagaccgccacggtagaagccacctagcgcttgcgccaatgcctttttctttcccggccactgcttgcgagcgctataaattgagcccgcggctagcttcgcaacatcatcacgcaccaccacacccagtattgctcccagccgatcaccagcgagctcaaattttgcattctccccaacccggttcaaatacaccatgaagctaacctcgccgtggccagccgtccacaggtcagtccatgtcctctgcttccccgtttaagtgctctcatatgtctacgatgcttgccgacccacgcaattgcactaggaaccctctgatcgccaggaacacactcctctgtctgcaatgttcacggtcaccgtggccagagctaattagttagtcgttgatgaaattaggttaggggaatggatcggggagggttccattgggtgttagtcgctcggggaccctagtcgttgccccattcggccggtcctggagctcgccggagctcggccgcgctcgacgccgtcgtggacccagcgcggtaaagaattagaaaccggagggtttatgtgcaaaccgtcagcgactc

SEQ ID NO: 84629 - DNA, 313 bp, Zea Mays
gaacaacttggcaggtagcagaggagaaacaccatctgttcctgtgattacacagacaagctctcaaacagcactgctaaaccctttccattgagctttatgaacccttaccattgagctttctgaaccttttccattgaacattgtgaaccctcacattggctttcgtccaccaatcagcaaagcagttatctgcgcctaggcacaatgcaatccagaacagtggggaccaataagctgtactaccacaattgcggagaaataaaacaattagtcagaatatgttgcactgtctcttcctcttgatcacata

SEQ ID NO: 84630 - DNA, 353 bp, Zea Mays
ttgaggtctcgaacgcaaccgtatgaccgggctggagatctaccaccatagaattgctaatcatcttctcagacgatggcatggtcggcaatgccctcgcagtggacgacgacaaggaagaagatgacatggtgacgtaccgtcgacgatggcgggcggtctgcttgatgcgggctagatctccggtagggcgagagcagagagggtagacaagcaaatgaaaaggctagggtttcagcagcacatgctcgagcgggtgaaaagcctcaacccaagcctagctttttataggccaggagcggcgtctcatcaaatcaatagtcccacagtaacatgtctcatcaatggtcatt

SEQ ID NO: 84631 - DNA, 436 bp, Zea Mays
tccggacgatgatctccggggtgcagaagccttctcagagcactattctattactaagagggatactgcagagtcagccatgcaagatgtagcacgacgggcactttctcagtattgctcgttgttcagcggggtagctgatggccttgaccaaaagtactaccctcgtcgttcgaccggcagtgctggaagtgtgattgcctcgccagttggtgagggcaatcccaagttgaacagcatggtcaacttggctgccgtgctcaacacagagttggaccacgcccttaacgagttgggcaaggttcgggtggaggttgcggaattgcgtgttgaatgcgcggcacaccactatctggatggtggttcccccacccctgtcgggattcagcacccttaccgttcaccgccccgtggtctctttgactatggtaccccg

SEQ ID NO: 84632 - DNA, 551 bp, Zea Mays
tgtagatgaggtttaatccatagtcgattgaactccacaaactatgacaaactaagggccagatagatggaggtgaactaaaggccaattagcctagaactctcactaaggccgaaggaaaaaagagatctagtcggtctagttttgataatatatgatcatgtaaccttcttcgtctcctctttcatcaatccatctacaataaagatgacatagggtattacgcttttacggctcaaacctttataaagtatttttacggtggtatccatagtgatacctaggatctatcgagcctcctacctacgccctcgttctctttcaactctacgaactctttgggttcctatgataccctagtgttattatacaatgatattttgtgtgctagacaggagtgggatgatgtgctttggcgtgtgttgctatggcatcaccaacacacctactcgatggagcgatgacctttaacattgactctagcaacttcgattaggagcagtgacatggaggccatctttagtgtgagtccactgcaaactcgatgcatg

SEQ ID NO: 84633 - DNA, 442 bp, Zea Mays
tttggtaacatcgtcctccttggtgacttgtcactagaaccactccttttgccgaaggactcgaccttgtcattgcacgatggcatgcagccgcggcccttcatcaacaactccatggtggtgcaaagctcttatgaacctcactccgatgctttgacagtctgtgtcctgacagtgtatgtcagccgcaaggattgtggaattgttggagaatgaacacacaacacccaaacaacgatcataggaacacttgaaacacatgccaaattcatgttgcgtgcaatttgtagcttttctcccatttttctctctcctttactcgtgaaatacaaaaaggaaagcaactgacggtggctagatacaacagtcacgaagcatccatccccatgtccacgtcatgcagctagaaccaattgcctaggtaagtgtgtgggctattctt

SEQ ID NO: 84634 - DNA, 435 bp, Zea Mays
cgtcctcggagcggaggagaagtggaggtgggggctgcaacgcgatctccagacccacctgaagtcgttgctagaggcgctgcggaagcttcaggactacaatctcaccgcagctggagttgtcgtggccttccattggtggcgagtgctgctgctagccgaccgtcgactccgactcgatgtgatgaccctcgagggattcgtggaaagttcttggatggcctcggacgccctctccactgacaaacttctccagcaggtgaagggaacagtggggaaggcagattattctgccgtagtgctgatgcgccccgagcagggctatgtgttcttggcgagtcttttgtttttgtttttatctttagcttcttcttttttgtcccagtcttaccttcttgtctctcaacaggaactccggggcttcctaaccgcccg

SEQ ID NO: 84635 - DNA, 2058 bp, Zea Mays
tgactgggatcaccgcagtgccaacatgcattcgccgggggttggttgcttgccaccaagggggagtggaaagagctctgactctgctggctgaaccgtgacggggtggatccagctggttactgaagtttggccccttgggtggaagtccgaatgatcgagtcttctggtgccggtcctgctgctgtgcccggagaacctggaactttcttttgaggtgccctttttcttccttctttgccctttcaacttgcatggctttgttggaaaggtgagagaaattaaggaagtcttggctagccagaattgtcttgagttctggcctaagtcccttcaggaaacgggccatcttcttgccctcggtactgacatcatctggcgcgtagcgggctaactctgtgaacttgtgcacatattcgctgatcgatcttccgtcttgagtcagttctcggaactcgtcctccttaagctatacaagtccttggggcacgtggtgctcccggaatgctgcttcaaattctgcccaggtagcatctctgatggtgatgttgaaggtgtcccaccaggctaaggccatctcggaaagttggtgggcagccagttgaacacgctgattttctgggcaaccaatggcttccagcttccttttgatcgtgcgcatccaatcgtctgcatcgagggggttgcttgatccggcgaacgtgggaggtttgagtctcagaaaatcccccattctgtcttgcggtctcccaccatttggccgttgattttccagacttcgagtgaggacctcgatgagtcgggtttgattggctagaccttgggctaggtctaagggtagtggtggaggtgcggggaggtgggtttcactttcctctctaacggcttccccttcagctctcaggggaaaccctgctccaatcccggaggcggtaggcgtggttttatccgaagccatctgccagggaagagagtcactattatgcacatgcaaattgttttcaaccaagttattttattcattacaccagcacattacaagcataagactactacatgtggagctacacgagagcgttcccgaggtgctaccgaactctttctctaaggtatccccaaattccttgagaagatcatcaaggcttgctagggatatatcctcgacgtcggaccaatcatctattctggggggaggtggggctggagtggtcttcttcttcttcttctctgtttggcatccttggttggtggtcttcttctggattttcttcttgggagcgagcttccttagcttcttgtcatagtccatctttaaggttcgataggcctcacgggtgttgccttcctcaccttctgctatgtcgagactctcctggagagatgccttctcttgcttaagcgctttgacctactgctctaggctttccactcgggagtttaggtgggtgcagtgggaggagaactcatcatagtggttgtctagggtgtggaggtatccggccatgtagacaatggtggggtcatcttctgtggggtttcctcctgacagagcctggagtcttttcctccaggtgggggtatttttgttgctgggtggaaaatatcgaagggggtctcagagatttcccggttgtagttttggcatatctgtttaagggctttccgggcaacaccctggcaagtgtctgggaagcggtgcccgatgaaggtgatttggaagggagggtggtttgggtagtttcggctttctcccaggtatacggccatagagcacttttctattccattttcgcggtactccttctagacatattcgggcttcttgtggatccccatgcgtagcgcgcaactccgaagaaggtgaggaaagccttcctcctctgagcaataggatgtcctaataacccaggggccttccatctggtagaagaaaagaggggtctgttaatatcggggaaaggggaaagagtgtttcttggggggtaagaggtgttttcttgttaaggcaacttttaaggtcagggttgcggtctatggccagtcctataggctctaata

SEQ ID NO: 84636 - DNA, 770 bp, Zea Mays
ccccgtgcagacatcatggagcgtgtcacccagcagaccgtgcacaccatggctccgcccaatccccctgttctccacggcttcaacgttgcgacctccaccgccacatcgtcattcccctaggaacctgctcccccactgtcgttgtacgtcgtaaccaccttgcctcacaaccaatgcgaagaagtaaacctgcttaatttgagcatattatcttagcatgccttcaagatcatcataaattgccctaatcaactgtgaagtataattgaccgtttatgtttcgtactttagaaattgaatttcaatggttcaaggtaccctgattatttctggtgtgcattctgcacctttagttattttgcattggttcagtacataatgtgtgttttctcattgttgtacatgtcactatagtgctgatagaaacaaaaaattagcaacaatattggatttcaggcttctatgctacatattcagtgttgttcgctcgtgctgtatttgtcgctgcgtgagcagttattggcttagtttctaatgtccaccttcccatctctatttttcttctttcagaacttctttgatgatcttttggaccacccctgctaatacaaacataatcattttgtggcaggaaatcaccatattaaagttgacaaccttcacatcatctatccttttgtaactgtttgtgcaaatatgagtttatcttaagttctattttttggtaatatcggtttactgcgcttaagttttcgataaagcatctt

SEQ ID NO: 84637 - DNA, 359 bp, Zea Mays
tgccatatcacatgaagactgcatcgtagtccaccgggcacagaagaatcaaggagtttggcttccttgaatagattcatttcaaggtctactgaaggaagcttgccattcttcgaaatcctgaaatcatcacaggttttcaatgggggcctcctaagcagcaagcttttgaagaattaacggattatctgataaagcttacaacactatccccaccttcgccaggggctgccacattgctttatgtgttagcttcataaacaaccttaagagctacattggtccagaagatagtaactgaaggtacaaaaagtggatgcatgtttatttcgtctccgaaatattgagtccatccaaca

SEQ ID NO: 84638 - DNA, 449 bp, Zea Mays
caagttgagagctcgatgccttggcaaacctaccagaagcgcgtagtttatgcctagtttggtaggtcaactctcttgcacaaaacactcacgcctagttgaaagcctatgacgtgatggcccatatcatattgcgcaagtggggataaaagtaaagtgattagtgatctgccctggcgctgcatcgagacgtgacccaagtctatgtgtgctgtgctaacggtatcgttggcattatagtttcatttgcttttgcagtcaacgtcactgactatttaagtacgcagtacacttcttaacaccaagatgagcaaattaaattttctttgtgaatcttacgtcccaagtaaacttggtgtgtcgtggtttgtctgtgctcatgggggccggtccggtcttgttaaagactgcagcaaagcgccgcgtggtctaacagagctctccattgg

SEQ ID NO: 84639 - DNA, 319 bp, Zea Mays
ggccgcccaatgtcgacatttttccacctgccgctgctcactgccacctgacatgtccagagctctctctccatttatacagctccccatctccagtccggcactcaaagctctgcccccttctccttctagcgcagggcgctcccctagccccgggacagctcctccattcggcgccccctgctccaatcctctctacttctccctccatggatgccgagacacaaagcccccatggacgctagcctccatgggccatggcacttagccccttgagctcaccttcctcaactccggcagcccgggatccacttctccc

SEQ ID NO: 84640 - DNA, 676 bp, Zea Mays
tacactgatagttaattcattggttggttaacgcttgctttgcggtcaacaactgtacaatcaggtcttatgtgtaagcgtgcaagcgagattttttatccgttagattatgatacaatcatgtatcacatttaatacttaaaccatctcaccatcagctcatttagattcatagaaaacaccttttaaattatgattatgtctatagttagatcatcatctaatgaactaagagtctcgcttgtatacatagtagttgtttctgctttgcgaggggattagcttggggggaggttgagggttgggaccagcagagcagatcagcaatggacggcatggcgcggctcacatcacctttcttgaccattttctggcctctttcccacgtcgtatgtccctctcatggtcaacgatctccactagtccttttgagctggtaataatttcccaccgagttttatttatggtatctatatgtttctctatactcacttgcacttgcacttgcactttgagagaaggaaaaaagaataatttactcgtttgcactttcaggcaaaaaatagggtggggggataattttggttttcactctcaaagaaaatccatttccggttttccaatccaaggaggaaggcacaccggcgtgaattggtgacttcattttacgaccgtc

SEQ ID NO: 84641 - DNA, 471 bp, Zea Mays
gccggcgccacgattcatgcccagttaaacgcagataacgatccccgggtgaaaagatctcgtcgtggatgaacttggagcacagtagtcgctctgtcgctcatctacttgccggcgacgtggccgcgcgaccatcaccgtcgtgccaccgttcctcgcggttatgccacgacgtcagccatattaccacatcgcaattgatcccaatacacagcccatctatcgcctaaggccttgccacggtaacagccacggtcaccgcgccagtgactcagtccctctctccggccgccgcgcatcttctcaaaattagccgccaccgctaatggcacctataaattttcgccccactgagctccgctaagtaatcacacagccaacgcacccgcccatgccttagattgtccatcagagcgctccaattttgaagttcccccaaatcagttagaactccactgtgagtgagctcgc

SEQ ID NO: 84642 - DNA, 473 bp, Zea Mays
ctccctctcaccaccacgccacgcacaggccctgctcggagctcgatcggttatttggcctgctggttccaccgcttggagctcggtaattatcactgcaaaatatttttcttgtttcttattctcacaacaagttccttctcacgttttgttagatcccattctagaatatttgattttctaatttctacctctcaaaagcatgtccttgctgttctgatatgtgagccaggaaggtgtacgagcttgcaaaattaggaatgaggtacattgaaccaatgaggagaagctactagtacgagctagctatcattttggtgaacgctcaaagttctggtatgttcttggctgcccgtcctttgtctttttttgtttttagatgtgctcacaataaaagaatatttttattagccagcaagtagtatttccagtagtattcttggatccatcctgtaatgtctcgattggtcttc

SEQ ID NO: 84643 - DNA, 1299 bp, Zea Mays
tattaagggtatcattcaacgccctatctggtctcgcttcggcatcaggaggtcgtctcttgcccttgggaatgacgtacaagcgtgccaagctgcatataacacagtttgcacatatattggcaccagggacttactccaggaacacattgcttacagagtgtggactcttgcaagcggctgggagatgccgaccgaagctacttctaggtctagccaggatggtttggtttacttgaagtacacctttaggtacagaaatcaattcgatgagccgaatgatgactagctagactgcattgaggcaactagcgacgagttgcttggtgcctacacgagggccgaggatgatgccatgatagtggcctttggagggtgaggcaagaaaagattgaacagggtttttgatgtaattggttttgtgtacccagactattgttatccttcgcaaaagcagagaaagaaaagaaaggctgctgcttcggctatctctaccacgccgaaaggaaaaaaggttaaagttttgacgcaccggcccaggtgtattgaaacggccaaagtgtcgaagcttgctgaagggtcgtcttctgctgttgagccaaactaccctgctctttctgaaaccaagggagaatcggccgaagtgccgaaaccgatggtaatagcgaaacatgagaaatctgaaacggccgaaatgccaaaccgtcctgccaaagctaaggaaaaaacggtcgaaaaaccagaattaaggaagtcgacagagcaaccgagaatcctgagcccgccacaagagccggagctgccgaaggtgtccaaaattcctgcaataactcctcaaaagtacaaacccgtgcttcagtgcctgatagaaagggtgaaatcccaaagaaatcttgtgaagctggtatgacactagatactgccgaagctgggccatcaactcccatcgaggcatatgcttcgaaagctattcctttgaccttggaagaagaaaatgcgcccaagaaagttaagtctcctactcccgaagtgcttgctgaagaactggactttatcgtgcgacatgctttggggaagcaactttcgaaagagcagattgccgaagctaaacaatacgccagggatctaaagtacccagagagatccttgatatacaacggtactgacgaagacaaatttttgtattgccttccggatgataaggagatatctgtctgccgggagatggcagatagcataggatatccgaagcttgagtttgtcctgtctgtaatgtctaaggatcaacttgcagacaac

SEQ ID NO: 84644 - DNA, 607 bp, Zea Mays
ggaatcaccacagcggatgaactcgaggcctttcgcttgggcgccatttcaactctactggcgaacagagcgggagccgaattgtagagaggatctggaggcaggaaagcgagaactagggcacggaaagcagaggcggctgaaaagtgcagtgcatatgggatattcccgagtcagataccgtttccaaaagcgcccagttagcacccggcagttacttctaaaaacaccggcgtgccacgttgtcactcggcggttatttctaaaaccccggcgggccacatcatcactcggctattatcctcaaagtggctgacacaacccgttctaactcggctgttatttctaaaacgccaacgttatcaccagtcgcccgacatttatctctaaagtgccgacgatgcctccagtcgctcgacatttatctctaaagtgccgacgatgtcttcaatcgctcggcggctatctctaaagtgccgacgatgtcctcagtcgctcggcggttatctctaaaaaacgctggcgtcgtcacaagtcactcggctgtcacctctaagatcgccgacgtggtcaacagtcattccggcgctgacatgatttcgtcgtc

SEQ ID NO: 84645 - DNA, 423 bp, Zea Mays
gggccccgacagggtcatcaaaccaacgacgcggcgcaagaatccccaccgtacctatcctaagcacttaagcgactaagacacatgaaaacgaaagggctagcatctcaccagtgatcacgccgcagaacccttgattcggaaggatgcaagccacggtgacgacagcaatcctcggactatagaggttcagcccaaattctggttcccgcagatgccacccacgtgagcgggccacacccgacgatctccagaagccgattggcctacggcgtcaacctccaatccgcccgatggtcgccacgccccaaatgtcaccataggcgagtatccacgatcgcgtgcgaatccaggccgagcaccacaccggtgaggaaccaccaagcgtcggagaccccatctcaccacctgattccatggacg

SEQ ID NO: 84646 - DNA, 540 bp, Zea Mays
acatattgggctatctccctcttcattctagtccaccaatacaaaggcttcagatcatggtacattttggtgtttcccggatgcatagagaatttggagagatgggcctcgtccaagatttccttcttgagatccttgttcttaggaatcaccaacttgtttttaaaccataatacacccttttcatcttggcggaaacatttatacttctcaaccttctgatggagattctcctcgatcaattgcactcccttgtcactgagctgggccatgaagatctggtcttgcaaagctggctcaacggaaatgtgagacaaagaaccagaaggaatcacttcaatctgcatcttgctcaactcatcgcacaaggtgttaatacgagaatccatcagaacacaaatgcattgcaacttccgactcaaggcatctgctatcacattggcttttcctgggtgataatgtacttccaggtcatagtccttgatcagctctagccatcttctctgtctcatgttgagatcagcctgagtaaagatatac

SEQ ID NO: 84647 - DNA, 1803 bp, Zea Mays
gcaggtactacgctaggaagtctgcgtggaggagagataagaaaaaagaagacgtcgctagggtgcacttcatcgctatgtttgcaccatagtgaacttccttgatctatttccacagctcattaattttgttcttccttcgtttccccaccaccaggacattgtcagctagagatttgtgcaggctgttgaggacgacgccctaaatatatggagctagagcctacgtcagaacggctcaatgaggattgcagggcgcgtagtaccacttcagcagactttgtcaattgagatcataccaacgaaacagatcgatgaggaaggatgcttcaggttgccaggtccacagctcatgcatctatcccttcataaaaacagatcatgcatcatgtaggcattgcagggaccatctccatcagatttaggcagcaggccggagtggactcggcaatcatagtagtcgaggagatatgatgattcaaacatcggacacactgaaatgcaggtccctttcgtcaacaaaaagcaggatcagtagaaagcgtggctgggtcaaaagtgctcagagtgggtcccgtccagtaacaagttagatgtctggagcaggctaaccatttttttgccgtagtccagggttgctgagacaaaacaaacatgtcagtgtaaagcattacaaatactctgccagtcctaaaacaaatgcacatctcgcatttatataaatcaactaatttcaagtttggctagatttatagaaaataatattaaaatttgtgtatccaaacaggcttactaaaaaatgtatggtttgattaatttgatggtgtatatttgtatcatgaatattgatatttttgtgtgtcctgtatagaaaggacaggctcagtgctactgactcccactgccccacatgaacataagtctaaaagaaataaccgaggcatgttttatccttgcattttgtagaggatgcgtccgacctaaaaccttttctcaccactatgtcaagcctatcattttttctgtgtcattgtatattctaagaagataagatttcagaatggccgtacctccatcctgattgtcttttatatataatgactaaaacatcaactgtattttcgtcaggactgttctactagctcctacgacatactccgtatacaattgcctggctacaggtgatttcagattgaactgtattgttggcacttattccaggcaggctctgagcctatctccagcagatccactatttcaaactccaccctgtaagttccgcatctcctattttaccttatctactagagagtctgacatacatagcattattcaataatgcgttttttcaaaaactattattcaagcatggaattccaattattacaaggcaaagcttgtgctttaatttgttcctccaatacaatcgacggtctagagagtagaaactcagataccatcagcacagcagatccgtgttgggcactaggcttcacgggaaagacaaccaagtcttatcttaaaaacaaagggactcgtgtaccgttctgctgattttgctccttcaccagacagcacctaacctggtttcttaacaaggtggcaagccaaccaacaagtgatccagatctgactgggtgccaacacctaacacaaacaatatacacctaacatgcaggttgaggtcgatatcaccgaacgcaatataataggaacataacagcaaaaggggatagagtaagcagtacctgctcttttatgcttggaacagatgagagccaactcaatggttgtggacttgcg

SEQ ID NO: 84648 - DNA, 602 bp, Zea Mays
atgattgtgaggtcagttgtcaggaattgaagaacaagttggtgaatgcccctatcttagccttgcctcagagtggtaagtgtttcacagtttatatggatgcttctcgtattggccttggctttgtgttgatgcaggaaggcaaagtgattgcttatggctcgaggcagttgaagaaacatgaggggaattatcctactcatgacctcgaattggccgtggttgtcttttccctaaaattgtggaggcattatctccatggtgaatcttgcgacatttacaccgatcataagagtctcaagtatattttcactcacaaagagctgaatttgaggcagcgtctgtggcttgagttgataaaggattatgatctatccactcaatatcacccagggaaagcaaatgtggtggctgatgcccttagtaggaccgatgttccaaaagtggccatgcctttgattacagatctggaccgtatgggggttgcattgtgctatgtcggcatcgctagagaggagactcggatgctcatccaatcctcccttctagagagagtgcgcatggctcagcaacaggatcgtttgttacaagaagctctaaag

SEQ ID NO: 84649 - DNA, 325 bp, Zea Mays
gtgctaattactttggaccgtgaacgtaccgccgacgagaatgagttggccacgcatcaccgcccatccgtacttcatcaatcatcatcccgtcgcacacagaaatgatattaggaagaacagggcacgtgcacatgcaccccaacaatattcagcaaaacataaaaatggacatgatgccagattccaccgccgagctctcgcgcccgacgaccaaacaaaacaatgcaactgcagtgggcagtccggtgggtccgctcggacgcacgggcacgggcacagcggacagaccgagctgcaccgcgcgcgcacaggcacagcacag

SEQ ID NO: 84650 - DNA, 772 bp, Zea Mays
taatcttgtataccatctttgtacaataatccatgattaataaagggacgtatggtaatatgtatattgcggctagaatctctataaaaattattgtgtgttaagcttttgatcttatgacctcacctcatagacatactcttcggtctcaggagttactcccgtccgctcctgtagcaattttttcagatacatttgacacgctgatgtcttttccatgacaccatgtataaataaataaaaggcgagatcttagttcaagtggtggcagagagaaatagtttgttgacatgcatgcaagaatggccctggccgcaacgagatgaatcgatgtcatccagcttcaccgcatcaccttcgcgtattaacgtgtcacatcaaatagatccatgaaaaagaatgtacatgatgtatatatgtgccatcaccgttaattagattggatcggccatgcatgcgcggaagaaagcatcgaagaagcgacctctcttgatctctaccataccggcccggcccgtatgcatgctctcccatgcaattctccatagactatacaatgtagcagtagtatacaatcttggatcatatgcatgcatcttccttttcttcccccacatcacacttgtagtacaatttgatcatccagcagccaacaaccacagatggcttgtctgctacgcacacgcgcaccacgtagtggaaatgaacggatgctacacacatccttgttccgcgcgtctgccccctgtgtctgcagggcacagcgttatcc

SEQ ID NO: 84651 - DNA, 606 bp, Zea Mays
ttgagtcttcggggcacgacaaaccatctacggcggtcagcagcgcaccttctctggtgagtcactcgccctccacgctatccttgtttgcagctggtactcgggagcgggcgacgataacagggtggggagtagacctggggtcggagaacgggtcggggtacctctgtcgggtcaagggcaagcgtcggatggtcggtatctggcgggagaagtagggtagcggtcggctggactggtgtcgtgaggttgaagacgacgggatagccatggatcataggatggacgactgggatcggatcgcagtccggatggggctgctggatcatcacgatcgttggtaggaagagcaacggtcgagatcataacgtgtcataccccttcgccatgtttagtcagggccgtcgatctggatctgacggataaaatttaatctagggcaataaaatccccaccgttgaatctcaatcttgcggttctggtcgcataccgattcattcgtggcacaaccaaatctcggtcgcatgtcttggatctaacggctatcacacgcgcgtaccccccttcgctcagactttttgcttaagagcccctggggatctaaag

SEQ ID NO: 84652 - DNA, 415 bp, Zea Mays
gtaggccttgataagaattgggtttgtgccctgattctaatgaattttgagcattcattcttgcaacctactgtagccacaacacccattattgtcacacatattaattgtcctttagatatagacgtgaggggtgggcattttttcaccgacaccgaaaaaccgaaccagacttttaaaaaccgaactaaagtttcggtgttctgtgtcgggttcggttctagtttctgtacgcttcggtctacggtgtcgaattcgatttttgcgttgtaactatcgaaacaccaaaaaaccgatctggcatcactcatggatggtcccatcatccacccatgactcaccttattacctgccaatgtcgcttggagcctagcccacacacaccacgccgcttcagtttagtagcccaccatcg

SEQ ID NO: 84653 - DNA, 380 bp, Zea Mays
gtagtaacttgatgtgaccgtggggtgtaatcataccgcccgagcagttgaccttggtccaaatggtgtcgtgttacgcgaagcgacacctgttgcttgactcatttttaggcggcttgaattgcttattgaatacttatgactgttcggagagcatggtaggaagtggacggtcacccccggcctctataaatagcctgcttgcaccgttgttctcttcactcatccttcgatcatccattactttcttctccctttcttctcttctccattcgaccatgggcaaaggcaagagaggtcgaggctcgccccgtcgtgctggcgacaagcggaagcgcgacccaagtcctccctcggaggacttcggcgattcggagtat

SEQ ID NO: 84654 - DNA, 583 bp, Zea Mays
cctggatatattgtcacttgctgacgtcaagcgttcctccattgcgcaaggtgaatgcaagtcgaagcctgcatccacttcctcatcggcttgctccaccacggtgccgacgccaacgatgtcgtccgtgtgccaggtctttgttcaggcccatcgctggcgatgaacaactctcggttcatcccctcctcttttttccttctgcttctggaaaaatatagaagccatgatttcaatgttcctctgaatttgtgcatagttgcaatgaccaattatgttttgacaaatgtgattagtaatgttaatgaggaaacaggaaactgaacagatccttattttgccaatctcagattcattttcctgtttgataattgtcgtactggtacaaatatagagccaacaaattctgtagatttgttgcatgtctttgttagtctgtctacctccattgtacatttgtacaaacaacacagtttgtcctgaagtgtaaggtatagttcatagtgtttgtgttcaattatgtttagtctctagccatcaggcaagcccttccactggaactcatcttgctagccattttttc

SEQ ID NO: 84655 - DNA, 706 bp, Zea Mays
ggcggcactatgtagcgactgttgcgagatgggtggagtgccgatggggtgaagatgagaggcatgtgtgacacggcgaaggggcacgattgtgaccaaatggaggtggcgcaacagccgagcacatgcgaggatgcaagcgagatggcgtgtgtagtgaacgacccgatgcgacacaacgagtgtgtccaactctcaaaggcaagaggcgatgagcggacagatgaggcacgttgtgggcagcgagcgaccggacatgcacgaccgagcttacacgaacgggggtgtcaaaagggtagggcacatgagctgatatagggacacaacgactaaattctgatttggggaacatcctccaatgggtcacatgtgggattgtgggctccacaatgtctagattttctattcttcaaaggacaaagtgtcctagtgctatgttctttagcttcacctttccatctctccactttctgttctcattctgatattttgcttagattttcaatagcttagagtcttattgcttcgaccatatcctttgattttttttgttgttcgtcactctcaccttcacacattactatggctgattttatcttagctcgttagggatcattgcttcatcattgaacaaaagtttgaatggtgcaaatctcgtggatcaagaagctgtcatgttgtggctccacacaaccttcatcaactc

SEQ ID NO: 84656 - DNA, 303 bp, Zea Mays
gcggcccgatcaaaccttctagaaagagctcctgcttcttctcatcgtcatcaacttcaccagtagcatatcgagatagctagataaatttgtccctgtattcgcttacggacatgcctccctgtttaagggatagaaactccttctttttaatcttcataagaccatcaggaatatggtaattcatgaattgagtggagaattctgcccaggtgatggtgttggcagcagcgtgagcagcgcaatatgcatcccaccaatccgtagcgtgagcagttggatatgctcaggggttcttgtcac

SEQ ID NO: 84657 - DNA, 637 bp, Zea Mays
tggaagaccgaaccacttggaggctgaagcagttccggagacccccggcatgatagtaggtaggtttccagttgactcccatattgcagaagtgttatttgacactggagcaacgcgttctttcattactgcatcatgggtaaaagcacataatcttccaataactaccatgtcaacccccattcaaattgactcagccggtggtagaattcgagccaatagcatttgtttgaatgtaagtgtggaaataagggggatagcgtttcccgctaatctcatagtaatgggtactcagggaatagatgtcatcctagggatgaattgactagataagtatcaggcaattatcagttgtgataagaggacaatcaagttggtgtccctactaggagaggaagtggtgaccgaattagtcccgcctgagccgaagaaaggaagttattatcagatggatgttgatagtagtgaagcagacccaattgagagtatcaaggttgtgtctgagttcccagacgtgtttccaaaggacttaccaggtatgccaccagagcggaaagttgagtttgctatagagcttcttcctggaaccgcccccatctttaagagagcttacagaatatccggaccagagttggtt

SEQ ID NO: 84658 - DNA, 439 bp, Zea Mays
agcctttttcccgaagcatgtcgtacaatataatcaagaacttggcaagatgcttcgggagtaggaatagtagtttttttcagactgaatttgctctgcaacttcttttttcgtttcctcttttctggtttccaaggatttctccttgacgggctctgaaggcccagcttcggtctcggtctggctctttgcagcttcggctttggatggttttgtctcaatttgtgtttttgacgcttcgacagttttcctcggagtggtgcttgaagactttattgtctccagcacatctagtacattgaccatcctttttctcttgggagtcgccgtgagatatttttgtgccttcgtcactgtcattcctgccgaagggcttataacttccaatatctttgttttctcggcctttatctcttcaatattattggccttcggcaac

SEQ ID NO: 84659 - DNA, 705 bp, Zea Mays
atctgtcaagaaatagtcaagcaagggtgttcagctaaaaagcagattaatcaagtagccaaagaagaaacaaagggcactaaccagcatttgccatctccaaatcagatacccgtcgctgaagcagcactggattccgcgtcagagacagagccctttccgggacagaagcaccctgtgacttcagctgaccagccatttcgtcaaccaatgcctgacgacaaaaacagatgagtgtaaagaacaatatcacacccgggatacagccagatcaggaaagaccaaattacctagaggttggagaagaacgaagaaactcccaagtcgtaggaagtcaagtgatggctcgatgaaggatcaccaaccggaacaaactcgcaatgcatcagtggggaccaagtcagtgtcatcagcagaaatcaaaactctgtcatcgggagcgccggcctctaaggcgactccctgacctgaagcttgagctgctgccaggcaaccagaatgcggaggataagaccctacgtgaacatctatggaagtatgagagggagaatcaactcgtacaccctcgggggctgggtcatagctcgcgctacccatctgagccggatcatccccggcaacaccctcgggggctgggtaagcgctagcgccatccttgagggctgaatcctctgtaatagccacctctaaggctgaaggaccttc

SEQ ID NO: 84660 - DNA, 689 bp, Zea Mays
ctcacctcttcgttacttctccaaaagattacaggttgtagcaatttcaattgtttgagtttagatagtgtacactaagatacataatacattgagcatgagtcatcacatcaaacagagacttaaaacatccaactcataccattcacttgctctagaagaagtggcatgcatcttcgctttaacaaagtaaatctgaattctgaactgtgatagtccatccaatccaaccatagtatagtccaatcattctacccaaagaagcatttctagatttttgactacctcagcgcaggccctgcttcgtcgaccaacgcctcctgcggcgccggttcttggaggattctgtgtcagcagaattagcaggaagatgcagatactcaccggttttgcgcccatcgttacttctccaacctctgtttagaagttctatttgctctgggctcacctctttgccacgtctgttgtcatcatccgtgccttcaccatctaggcaagggtgagggaataggcttgcctccaccgccacgtccgtcgttatcatccgtgccttcaccatctggcctgagtggtcaagatccaagtccagatctagaagtggactggcatgacagcaacattaccatatcgctcggatccgaccgcttgtgctcttttcactgcagcggaattcatagagacggagcccg

SEQ ID NO: 84661 - DNA, 358 bp, Zea Mays
agccgagcgtatcgccagacagtcggctcactacacactcattgggaagacattatacagaaggggtgcatcaggcgtcctcatgaagtgcattctctcatctactgggaagcgacttctggatgaggtccatgccgggcaatgtggaatacacgcagcatccaaaacactagtcgggaaggtcttcaggtcgggattctattggccaacagcgaagaatgacgcagccgagttagttcagaggtgcgaagcttgccagtacttgtcgaagcaacaacatctaccggcacagcaactgcagaccataccagtgacttggcccttcgcatgctggggacttgatatgattggacctttc

SEQ ID NO: 84662 - DNA, 292 bp, Zea Mays
aatttggctactgatggtaaaggctaggtgcactagatctggccttagatgagctgcttttgcatccatcggttgcactgttcatttcctgttgaacagggacgatggaacagacaatgttgatcacgagacacacatgaatgatggatggatggatcgatcaagaatacgtacctcgtacgtccccaatcatccatatccctgctgtgatgcgatgcatgcatggtagtacacatggtggtccaggtggtacagtacatagctagtacgtaccacgccacgcacctgttcc

SEQ ID NO: 84663 - DNA, 759 bp, Zea Mays
ccttactcttcaaaccagagaacaagccatcaccgtcgatttgagccgtgagcatgccatggtctttgacctcttcctccctctctcgaagtcattcttaaactatagaagttatgatcttagcatcgattaagacaactttcctcatggccataacttgcctattaaaaatatgcaagggaaacctcatttaaacaattgtcatataataagcataaccaagtttctagaagcttctacaatattcatgataaaccttaatcataagcaagacaactttctaggaacaactatggataaccatgatgtacatagccttatagaactccctacactaatcatgataagtcatgaagcctagatatttttagacctccctagaactatggtgatgtgtcatggtgaggtgtcccccatgtaaggtggaggtgacacatgcatggtgaggcgtcactcatccatggctcgtaggtgcctatataaggatgtgcccctcttgccatgacataccatcccacccccatccacacattcaagggcaaggtagaagtaaagtagtgttgaagtgtaggagcccttgcataatcatacgtgtccttgttgtaagtattttgctttgctgtaaaatttctatttgctcagtgcataagttgtgatccatctaaaggagtgctctgcctcctgggatcacaaggcttcatctgtaggagtgctctgcctcctggaagcaaatatggctggctctgccgcctatcgtgc

SEQ ID NO: 84664 - DNA, 666 bp, Zea Mays
tttcagctgtccgatcatccatcgagggctgagattaaattgcggatggttatgaagtcgtcttctcccgaccaaatcccagccgcctgcacacgatccgacggccacggttagatatatacctcgtgcgatcaaagccaccagatcccgatcctaaggctcatatcaatcacgatttggcacccgcttgatctattctgtgccgcccaatccccatctaacggccatccttgctcttctacctctgaccgcgcgacgcagcaaaccatggtggcacggcagtggacctcaccggagagggcgaaatcgcgcccaagcacacaaggccttaacgtagagggtgctacacgtagtaatggatgcggcgagtagggtagaagaggttttaccggcgattgtgcagaggcgagatccaatttctatgcccagcggcgcagatggtccccgacaagaaattccggtcgttcggcggcagttctcctggtccgagagcacccagagctccccagtggttcggccaacaccactgacccgcctgtgcgcccccaacgatggcgtggatgaatactgacgccggtggtggagaactggagcttggttctggtggcagctaaaaggaggggaaaagagtctatgcgagaggaaaacagatggagagaaggatgc

SEQ ID NO: 84665 - DNA, 942 bp, Zea Mays
gggaaaactggtgtcgcggcggctctgggtgaaattgggggtggagattgaggctacacggccataaaggactagattttcactgtgcactaccaattttgggaaaggtggagagaattccacgaatttggacttcgactgagctcactggtgaagaggtaaacacctcgccgtggtccgtggtgccttttatagccacagcgagccggctaatgatctgcggccgcggatagcatggcaaacgcatgcctaccacgtagaggagatgcacaatgagggaaatcaaagcatgtgtgacagcgcggcgagagttaactgagtcacggtggtcgccggtgaagactccggctgggcttgggagatggcgccatgcatgagttatccctcctcggcgttatccattccataccgcgcacgaatcaggacggcagcggcacaaatctacgcgcggagaggtcaccgacggtgagattgccgcgctggcggtaccattgcacagcttcattagtcggtctgacagagcaggtttggtgttgatttactcccgattttgtgtagtgaccggaccagctctctgtaccaaagttatagcttaataaaccagctttaactttgttatatagtgcacccacaaaaggtcataggatcttacccaaaatcgaacactaagttcatccaatctcactgtcactgaaaattcagacttaaactgacctgacaccccgactttgggtctgattatctccaatttcttcataacaactatgcttacactcttaaacaaagttgttctcctttgataggtttacaaatttgatgtggtgacctagggtaaattctcactaatttggaagatacaagggctcaaagttgaatcaatcacactaaaattcagacttcatcaaaagggtcaagtgtggctcttttgcacataagtccaaa

SEQ ID NO: 84666 - DNA, 773 bp, Zea Mays
acttcagcaaactcagattcctacgagagaggactgcgggttggttcttgaaaagtggaggggcttttatgctattctgacccgcgaaggggtattctttgctctggcccgtccgatctaaagcctggggtccagattagatcgtatctcagctgaatcggtataggttgtggaccataggatccatatcgcatggcccgcattagatctatcctctcaatgaatcagtactacctgcgatccctcggattacaaatcgacggcgcacggctaatgtggccgcgatccagctcccaccgttgatctgtctacgtgcgccccggatctttttttacaagggtatgggcagatctaatcatgggcgtcggctgaggatccagcggcccaggggtttcttctacatcgtgaccgacagactcacgccccacaccacccatggtggcgacgcacggcggagatatcgccggcgcactactgtttgctgccccggtgcactaccactagttccgttgatcgcaaaatgaaattgacacgatggcgagtccggtaaggggagttattacgatgctcacgcagcgccgtttcccgtccacgatgcgccccagatttgcggccccagcgttaaattgatgttgcccaggtcgtgcttcctcccagccaccgccttcaacacgatcccgatgcttgaagggacactgccgagcgcgcatagggcaccaatttgtgcagtatacaccggacaatgatggggccacggcggcgatagattctcc

SEQ ID NO: 84667 - DNA, 509 bp, Zea Mays
cgggcgggtacgtacgctgggcgtgggtgagtagaactagggcgctggtactcgtaaactgttgggctttgtatccttgcagcaggtaaggtaaatacggggaagtaaatggcgggcttcatccatgtgatcgccacaggaccaagaggcagatgtgacgctgaaaacggggggggcattgactcgtagagaaaggaacttcttttttactgcttgagccttgttgttgtttacctgtcttggtgacggtaaatgtggtgccatctcatctctgtgaaacggtgaaaccacctacaggctacagcccggccctgtgcgcaaacatggcatatggccccgccaaaggcaaagtacgtgctgccgcgcagggagccgcaggcgctttggcagagccgctcgcagcagcagactccgctcgtccaccggtccgccgctggccgctgccgcggtcacgaggaagaggtgacgcgcttttcatccatgcggtctctctctctctctctctctct

SEQ ID NO: 84668 - DNA, 791 bp, Zea Mays
taaacccacaatccctggatagccggaacagtgccctacggggacggaagcggcagggcggcttaccggtggtagtagagtttcgatggggtggttgggcgtgttgggagtgtcgtggggatcacatcgaggtatggctcgtcgtcggagatggccgaagctgcccggtccatgtgtgcagacaacgatgatcaacaacggttccgaatttaggtcaacgatgtaggtagagctcgatccgaccggatgggaagcttcacgaggtagtggtggtgctgtgtacccaaggaatcagatggaggtcggctggggaaaccgtcccacgttcaccgatggagcaacttactccagtgagcagtggtggctccggcgtggtagtgagctgggggagtgactggggaggtttactggagctcaaggaccatgacagtgtgcttggatggggctacgatagtgcggttcgctcggaccacgatggccatgcatcagggagaacagggggcggcggtgctcggtccaacggcgtttctggtggccggtgacttaggcacagtggtgggttcgagtagcactccactgaggccatgaggtgagctttatagataggcgtgggcatgggcacacgatcgggccgaccaacgcttcgggcgcggttgggcacatgtttggtcactcactagccttgccagccatggtcgaacacgtggtcgtttgcatctgcccctgtccaaacaatcgtttggcggccctagcatgcatatcttggcaagaatcatatgtatggtttcttc

SEQ ID NO: 84669 - DNA, 1131 bp, Zea Mays
caaaagttaagtaactttcatgtttgggaatttacatgttttgtggagcaatttggggtaaattgcaaaaagttcaaagagtacccatatgcccaactctgaaaacagtgttatcaggccaagttcaagccttaatatctcctgatctatggagattttgtcatgggtcactacaacaaattagtagatttactatagtagtccaagtttgattaaatgattgagccctagaactgtacaaaaaattggaataaaatgacctaaaagttgcgctgtcagtcgagtgcctgtctgaaatcagactatcagttgcatcggatcaattttggggccgtattgtgcttgattcaatgagtagatgactatgatctctatggcaaagttggagctggtttataggagaataactttgatgtaatcaggttagtagctcatcacatagaaactgaagaaaaaccccgctgaagttgctctgtcagggcactgaatggtgttagcgatggtacaatgactgaaaaatatcagagatgcggagcagctcgccaccggtgatcggacatgatgattcgagctcgccttgaagattcgtgcactgcttgatgcggatattatctggaggatgaaaatatcgtgaccgcggacgcgtttatgctctagccgctgtacccacttgcttcacaactgaccaaaatgccatcgttggcgtgcgccgctcatcgcgaggatgccacgtgcttgagggtgttaccacgtcacaataggttgtagtggacgacccatttactgcccaagcctttacctcattaagcgccacggtagacgagctccggtgactcatctcctcaccaccacgagctcatcttcgtccaaattcgttgcactcgtgctctctctctctataaattgagtgttactctcactccgcctctctgttatgaacccagtccagcctcagccaacccttctcgttcactagagcacaagtccatcgggtttccccaaaactggtcaccatcgccgccatgagacaccccgccgtggccagcccttctcaggtccattcacgtctctctaatccatgtttctacatcctttggtgctagtgaaactatcgatctcggccaattaaat

SEQ ID NO: 84670 - DNA, 815 bp, Zea Mays
cttttggttaagtctgaatttcagtgtaatgggttcatctttgcggcctggtaacttccaaacataaaggattgtgccctaggtcaccacattaattttgtagatctatccaaggtgaacaactttgtttaaggggttaaacattgttgttatgaagaatttggagataaatacacccaaagttaggctttcaggctgtttgaaatctgaatttggactgatagtgggttttagcaaactttgagctcgattctaagcatgatccagtaaaaatttgttttggaatactataacaaagatgaagatggtatgttgggctacaattttgctgtagagccttggatgtgttgccatacaaaatctagagaaaatttgccctaaatttgatctgtcaggccaactgaacccacctcgccatggtacagtgcactgggaaaaacaagttcagaaactcgccgccgacgagccgggcccggattcgcgctcatgccaccgtgattcgtgctcggatcgtgtggatagcgcctgggataaagtaagaatcctcgccgtggataaactccggccattaaactacttcggccaccgtaccgagcttgccccggtcacttcggataacctcgccggtgaccgccgcctcccggccttgtgccacgtgcctgggcacctccaccacattgctgtgacccgtcataactctccattgattgccagagtgattgccacggtaataggacaccaatccactgcgccagtaactttccactcctccgaccgccgcgcgtcgtcgctcgaattcccggccacctctcttg

SEQ ID NO: 84671 - DNA, 302 bp, Zea Mays
gtggcacaaccgcggtgaaagacgccaactccggtgatggccgtaaagccatgtcgtcggtgcaagtgattgaggaacagcgaggccacagtaacttgaacccatccgtgacgagatcttttcaccagcgaactcaatccacagactagacacacgaatcacggcgagcagcactaatcacgacgaagggtcaccggtggccagtttactgaatctgctgatttttttggttactgtatgatcacgatcttcttaagtcagcctgacagacagatttgtgacgccaaaattttgaatttttg

SEQ ID NO: 84672 - DNA, 625 bp, Zea Mays
cttttgtcgatactatcaaggacgaagccatgctcgggcgagacagtagtcctcccgaggccatggtcaggcctgctctagggcatgcagtcgtgcagagaacaattgaagcagtggcctccggcgggatttgtgcggggcagttggccaaggtcgagctcgggcgaggcaaagttttctccgaggctgaggctaacttcgtgcgaggcgaagttccctcctgagggtgagaccatgctctgccatacgcacgtcccatccagagttgtttgaactcagcagacgacgtgggggagcagtgaccattattcctgggcatgcgtcatcatagttggcgaaagtggaagggaccgtggttctatcgctcttgtttgactgtctcgtcatgtggggtaggtatctgcattaaatgatcacatctccatggttcccgtgacctttgactgggccaggctcagggttatcctcctgtccgagataggctcgggtgatgcagaaactgttgttccgtggaggggggacctcgggagagacgaggatttccccgagtgctgccctcggctgagggcaggctcgggcgagacggagttttgagcgaccgccgagcggggtctcgggcaaatca

SEQ ID NO: 84673 - DNA, 454 bp, Zea Mays
tttctttcacgaacgccttccctctaaactccctagatgacgcttcgaagccagcacggtagacacaacccatttagccatctatagtctagtaccttctccctcaccgttattgaactcacgagcgtggaaaaaacgagagagaaaattttatcttgtctaacccaacaatacctaatcatcattcgcactcacctaatctatggatttgaatcgtgtttaagtaaatggtttgatcaaatgtatatgaaaattttagatggcatatcctatagtaaagttctagatctatcactgcaatagatgttacgtcaaatttgtggtgacgtgaaagaaagagaaatgaagagaggaggaaagtgaattgttcactagtagccatctagagatgggctgctcacagactcaagagattttgtgagagaaagatgtggactaagtatacaacttatat

SEQ ID NO: 84674 - DNA, 532 bp, Zea Mays
ccgagtagctcaatgcatttgttagtcgagccacccatgcatgcgctttatccttccaatcgtgttgcacgactgcacccaccgaccacttgtcctctcgcctagttgtcctaagccctagcgcagcacatagtacaactaagagtcgaacgctgctagagttgtatatttgggtcgtgtctgatgggtcgggtctcttgtctccaccttaaccaattgtagtcatgtcatccctccaatcgagcatgacgccatgaccattaccaccacagtagagtcattgttgacgtgtggatcctaaactaggaggggtgaataaggttcactggctcttcatgtgaacctcagcgccaacttcagacaacatggtgttgtgatgattcccccatgcatgtcttgggagagcacgagggagcacatcttctactccatcgtgatgatgggggtgaacttcccactatcacgattcttcctccaaatccaaagttatacaaactccatatgagacacctcacactaactccatcctcgc

SEQ ID NO: 84675 - DNA, 601 bp, Zea Mays
agtaaattttaggttaggagagggttagaaaatcgttgtcccgatggctttgctctagcgagcctgagggaaagagtttatattggtttggagagaactcctacgtccagtatggtgctaaagtctttgttgctggcttttgtgtattacaaggcggagcgcttggatctcgtgcttgtgtgagaagtatacaaattgaagttgccaatctctacaatttggcactcgtccctttatatagctagaggaatgagtggccattgttgcatgaagatttcaacaggatgcatcattcctatccttggacatgtggcccttctggtatgtcattgcgcgtgcaaccgtttcaccatcctcggccgatcaatccatgggttggttaagtcctataggtgtctgaagccttgttactaggtatgtcctgagaggtgtgcagatggtttgccttcagtcctctcctttttgcttttgtcatgtctggctttatcgacttccttacctctggagcatgacccacaatggcctgtagggtcccgttcatatcttcgaggtgaagcagatggatagagaagtccttggagtcctatgtactacacttgtt

SEQ ID NO: 84676 - DNA, 350 bp, Zea Mays
gactgtgctcttcgacacaccagactagttacacagagaacttgtttttgggcttgaagactttggcgcatcggacctaggtccggtgagcactagaccacttacgaagagaggtcgcttcctagaagtaagagaggtcatttcctagaagaaaaggcagttggcgcatcagaccaaggtccggtgagctctagaccttctagactcaatggtcggataagacatctcaacggttaagctaacatgtcagggtatggtagtgcattagatcggcccggtgccaccttgcacttgacatctagtttagaacgctcattgaaactaccgggggaacagatgtgtggtgtgca

SEQ ID NO: 84677 - DNA, 521 bp, Zea Mays
ctgggcttgctcttgcgagatttcgttcgagaataggttcaaaatcacacaaatgtgggaggaggtggctgctgagtggcatttaagagctgctggaagaggaattagagtgcctggacaggattgtggtttggagtgctcaaccggttgttcctttactggtcggaagatttggttgctaggaatgtacaagtagcgtataagagtgctcaactggctaatatggccgtaatttcgtagcatggtggcatcaagattcttccaagaagactgattccatgttgcatatttttctcttcagacatgatatctctggctgctcctaatctcccattagattgtgtcttctgttctccacacaattcagtgaattcactcaatctgtcagcctgatttacttatcggtccgggtactttggttatcgccttgcaatttatatcactccatccccaaaattacatcagttggatatttagtaatattagtaataaaactatggcttttatatgatttgtatgac

SEQ ID NO: 84678 - DNA, 334 bp, Zea Mays
agcatatagaaccttctcccggtcggagcattgggcaatgtttagcatcttctctactgacttcaaccagtcgtcggcgtgtagaggatatggagagatagcgaaggtaggcggcttgtggctcataaattcccggtgcttgccccggggtggaaatggtggtagtggtggtggcaatggagcttgctgctatcgccccatcctctcttggcgcatctccttccgcttatcttgcctttcttggaacatctcttggcgttcctgtcatatctgcgcatgcatatctgccatagtatcagccatttgttgcatcatctgcatctgggctgcaatc

SEQ ID NO: 84679 - DNA, 444 bp, Zea Mays
ttacactcatgacgtcgatctattacgtcaatctgctggttgtgtacgcagttagccccgatggtgattccagccggtaggggcaagtcgcgcacataacagagaaggacgaactaatcttttcagtcatatccgatgtaatctacttcaaccctttataaccaattgatctaatcaaaccgtgcatccagacctaaaactacgtagaacctggctttgataccactgttggattacggggaggctacgctagcgcaaaacaaaattttcaaccccataataccaagaactactgcggttataggtcatggaattaccactagatgcgcagagcagcggaagacgtctcgatgtagacgaacgcgtcgagcagtgccgtgcagtcgtcggcgtccttcacgtcctcgcacggttcgtccaagtgctccagatgcagcacctccg

SEQ ID NO: 84680 - DNA, 623 bp, Zea Mays
ccggcctgtgcactggtgttcggtcactgcgcgtggggccgatttgacagaatcatctccctcccgagaacctcgccaggttgttgcaaatgctacgtgcggatctcaccttcttccccctttatcacgattatccagtcgcgtgcagatcgcaaactgcataccgcctatgcgggaccaggataccgagtcaaaactacctactacggtgcgttgccgcgcgcgcgtactggattatcggagctgacgtcgggatttccgttcccacctcgtcggggtcctgacaggcaaataaataccgagtcctcctcttggatcgaccaccgtgcgcgcaaccgtgctctctgcccaaagccaatcgtccatgtgcgagtgagatcggtcaggggtgagaacctgggtgcgtgtgggtcaccggaatcgggtctcggagttcgtcgtagtccctccctcaagatacatctgggtgattcacttgggaccgctgagtgcgtggtgacctcgacgctcgggaaatttctaccaacgccactgggattgtccatcgtcatcgggggctcatcgctggccgccttgcgccgtgtccttggcggctaattgcataattcacggtatgatcaccc

SEQ ID NO: 84681 - DNA, 785 bp, Zea Mays
gagcaattgccttcctaagcaaaaaccttgtttgcattattgtcattcccccgttggatcatcctgctcgggagagcaagttccaacagaccacatgagcaacaaccctatactcggcctccgcactagaccgtgacacggtggtttgccgtttggaggaccaggaaatcaaattgtcgccgaggaagacacagaagcctgatgtggagcgatgggagtctgggcacccaacccagtcagcatcggagtatgcaatcagcttgtcgacgggtccagtgcctatgtggagaccgaccgatagagtgtcattcacgtaccgaaggatgcgcttgatcagcgcgaggtgaggctcgcgcgggtcatgcatgaacagacacacttgctgcacaacatatgccaggtcggggcgggtgagcgtcaagtactgaagagagcctgataattcgtctagtggtgaggtcaagacaacggtaacccttatgggaaggggggtattcgagaaatacacaagctgtggaacgtggtgccagcttgtgtttggaggtggctgtgaggttgggatagcaaaggcaaccgaaaacacgaagaatggtgtagtcagggagttgctcaaagggaactttatggccaatggctgagcagggacgtctgtttaggagataggtggctgtagctagcgcctctgcccagtattggggcggcatgtgagcatggatgagcagtgtgttggcagatatcgttcagagaacgaatgatgcgttcagctttgccattttgagaggagg

SEQ ID NO: 84682 - DNA, 560 bp, Zea Mays
gtcaaagctaggagagcgatggttcttcagacctgatttggtaaaggaaatagaagaaaaggttcaacatagtcgacacaatttaagagaagctcaagcacgacaaaagaattacgtggataagcgacgccgaccattgaaagtatcgccaacgaagggagttaaccattttggagtcaaaggaaagttagcacctcaatacattggtatgttccctattcttgaacgatgtgggcatgttgtgtataaacttcagctactagaatctttgtctatggtacacagtgtgttccacgtatcacagcaaagaagtgcctccgagtacccgatcaaaccatggatgtatcagaagttaacttgggaccagacctaacttattcggaatatccagtacgagttttggaccaaaaggatcgagtcactagaataaggacactcaagttttataaagtacaatggaatcaacataccgaagaagaggccacttgggaattcgaagattatttagaaaagcattttcctgagtttctagcttcttgtaaaccctaaagttttgtaca

SEQ ID NO: 84683 - DNA, 314 bp, Zea Mays
gattgtccgttgatcgcacggtcaccgtggacagagcgatttagggatagaactctgcaattgatcgaggggaaagggtcagtagaagtcaaattcagtgtcaactgcacgggaacactagtggttgagttatccggtcggtataagttcgccggagctcggttctccgccgtgcgacgtcgtggacttggcactgcgaagaaacagaagtagaaggggtttcctgtaaacgtcagtgaaacatataaatagtgtcacgacccctttgctagttgtttaaaacgctaggggtctatgtgcaaactgtcctccgc

SEQ ID NO: 84684 - DNA, 451 bp, Zea Mays
tgacctattgagactaggcctaagtgcacaggccatctacagggcctgcaacacgatgagccacatcagaacccaggctacgaaggccaggggtcagcgtggcatagaggcagtaatgatggcaccagggcctcgcgctgcccatgccgtccgttataatgagcacaagcagagacggtcggatgattaaggcacatgcagacaacgcggcttcaccagggtaaaacactcaattttaccacaacatagtggctccttcttgaggaagccaccggcattcgacccccaccttgacctataaaaggaggaggttggtcatgaatgaggaggataactctgggacaacataccagaaagaggacactcaacggagggcaacaacacacgctcgacgagactagaagacctggagcctagagccacaacatagttcgggactcccctgatagta

SEQ ID NO: 84685 - DNA, 484 bp, Zea Mays
cacagactacgagagttgcgatcacccctagggtgtgatgcaggtcgggtggaattgtctcaggtgcatcaccgaagctgtagtgggggcagacctttcttcgccgcacagtgcggagaggcttgcataggacaagaagatccacagatcatcgtatgatgggccaggccccatatggattgtgatctgtcgccttatctaatcgccctcagagggtgaggtcgatctttggtccctatgttgccttcgcggaaagaggcagaggccgctgagggcctcgtgatggcgtcaagattgctaggcagaagcggctaggcttctaggcccccgaccatctccccttcgctgttgatgacaaagtcgaggctccccagaatggacggtcgtcctgggggccctaatgacgccgtatccggtcatccgaagcttggagaaatcgtcgagaacacacaagtacctacaacgtcgaaatgacatgtcaatg

SEQ ID NO: 84686 - DNA, 295 bp, Zea Mays
gtgggaccatcttgtcatctctatcccctccaccgtaacaaaccaaaaccgaggtagccgccaaaaccaaatccgtggattgtaactaacgccgcggattaaccggggttttagctcggagattaagctatcccagagcataaatacggtgtgccgcaccctcgcagctcctccaaatcatgggcgacgtctgccaccgtgagatccgagggaggtgagaatggagtcgccgtcgcagtccttggcctgcatcgccgattgaagtccgcactgtggtcagggatggccgcctggg

SEQ ID NO: 84687 - DNA, 922 bp, Zea Mays
atgatttgatgttgttcataacctagtgaagataataaacttgtggctctgcctatgtcatataaggttgtccgttgttagcccttgataaagcttgaacgtaccaatcacatgccatcctaaaatgggctctggtaaagctgagtacctctttaccccaagggttgaatcgtgacctgccagctggaaggcggtagcaaggctagtgtgtgtttcccactagggttaggtggggacggttcagacttggggtgtaactaggggaaagggtggcatatgtgcgaaatcctagggaaagtaagcctatgccgtgtgcttgggtcttccctgcagggtgtaaaattggttcaaatcactgagcttaccaggtgttaagctgcttgatctcgcactaacaatcgtcgtatgaaccaacgttaacatgctttagtctcgtgctttcaataccacatgtttgcttggtacatattacccaaggaagtagctggcaagggtaggtgctggaatagtggaaagttgatggtggagtcgtgctactttcttgggcgagtttggtttgattaagtagttgacagacacaaagtcagatcgaggatctggttttggaaattagatggtaggtacaactcagatctgatatctgggttttaaagtagttgataggtgcaaatctagaacgattagtgctaataattgaatttgagctaaaatatgaaagtaaggattgatttctagtaagctcccgcttttggacgaccaatccagcaaaaggcctttgcataccccttggaatcgggtttagtaaccctgtcgggtaagtcttgcagagtatttcatatactcagggttgtggctttaaccctaattttaggtctagtttaaacaaggcattttcatgaagcttgcttggcacagatcatca

SEQ ID NO: 84688 - DNA, 431 bp, Zea Mays
ctcatctttccttttcaccactgtcgaggttgggatcttgtcgttgacctcatccacttcatcttcattgggattcatcatctaggtaggggaaaaagggagagtgagacaaggtttcacaaggttcatgatatatacaaagggcaaatatgaaacaaggacatttagacatttataatagaaaggaagtgacagcgagcgtgaaacaaggatggtgttatattttaatagggataggtttgatggtattgtgtttcaagagaagattagcaagaaaacaaggttggcacatagattcttcggttcaactcggactttgccaactaagcaggtacaagaggaaaaggggtagagagagaaaagaggtaactatagacgaattaaatggagagagcaggaaaagagaacccaactacctaactatatggcac

SEQ ID NO: 84689 - DNA, 341 bp, Zea Mays
aaacagtgttttgtacgctcaaatacacatgttgcaggagacaggagacagtgttcaccatttcgtttttaccaaatttgacttttgtatttttttgaatttggaataaaaatcgataaaaaaatcggactgaaattcacacctcgatcagcagcaaagatggataattttaacgaatttcagtgatttgccggcgagaaagtaaaccctggctggagcctggagaatggagatggcctacctgttgacatgcatgcgggggcgcgcgagcagaagcttggaagtgcctgcccacggcattaacacagtgacgcacgactcggctagtgcatgcatcgcat

SEQ ID NO: 84690 - DNA, 301 bp, Zea Mays
ccacccgaatcggtattctatttctaatcagggccgcaccttttgcatccaacggtttgcatgatctcggccaccatcttccccaaccagccgactttgggcacggcggcgcaacccaccgtgcggcggcaagcccgccggagctgagaatccaatcacccagccagccatcttctaattcgttcgctccttgcctaattagtgacattacgagcctgttccccccaccagttcctgctcataacaagcccagagtaccgcccacggcgcgccgcggcaacaccatggtcggacagtggac

SEQ ID NO: 84691 - DNA, 305 bp, Zea Mays
ggttgatcttgtgtttgtgtgggctcctcagattcttttggacacacgtcactaattgtaacgacccgaatttcgagttgaattttttctttctctatcgctcgctaaattcgggcgttacctctctttccccatttctttcgctaaaaccctacctattttcaaaactccaagtcgtatactaataataaaccctagaaatattttatttagttgttgcatcatgccggaccttgcagtttttgctgtttgattgagagagtttgtgaatcatgcattttagtggtgaattatggctagaatag

SEQ ID NO: 84692 - DNA, 375 bp, Zea Mays
attgcacagcaaagaaaacgaaaaagagaaacaaaagcaaacgccttcggcctactccacaaagactacgatcacagagtccagtactttaaatattcttttgttcaatgttgtagcagtattaaatattgctaactaaaagcaacttgtactaatatcgaatcgtatgtataattaactagtagatagaagaaatgatgcatgcactgtcacgatacagttggtacggaagagttgaaacacgattcgaggaacaatgacacaacggagggggacgacgagaaatttgtatggcctctgatctgaaattcggcgagatgtgccacgtacctgaggtacaagccgccaagccggtggtgagcgcgatcgtacgaa

SEQ ID NO: 84693 - DNA, 976 bp, Zea Mays
gaacgtttcccccaacctaattccaagaatggttactgggttggctctggccacggcgaccgtgggcgtcgcggacagttgaacatgttcccggtcattggtgggtttctagttcaattgggtgggtctacgagcatcacgggcacatgagaacacttaaacgagggatcagatgatatgagctgacctgaattgcgctggccacggcgagggtgttcttgcggtgggttagagcagatttggggaaaattcgaaattcaagctctcggttgcaagattggaggaaatactgggtggtgtggtgcgtgatgatcttgcggagcttacggagggctcaatttatactaagcgagagcggtggccgggaattggaatgatgacgcgcggcggtcggaggaggggggtttcactggcgcagtggattggtgtcctataccgtggcattcactctggtgatcaacagagagctaaagcaggtcatggcgatgcagtagagatgcctagacacgcggcacaaggccggaaggcggcggtcaccggcgaactcatccgattccaccgtggcgagtgcggtacgatggctagaatagtttactggccggagttatccacggcgacgacatttacgcgaccttgagcgctatccgatcaacccgagcacgaatcgaaatggcagcggcacgaattgcggcggagaggtcgttggcggcgagaaactatgctggcggtctgatctacttcagatactgtaccatggccattcctcattcagtgcacctgacagtcaaagtttagggcaaattttctcttaattttatttagtaacatgatcgacactctttagcaaagttatagatctaggatccagctataatcttggtatagcaaccctaggaaaattcttgctcgatcatgcctgaattcgtgcccaaagttcttgcagttgcactgttagtctgaaattcagacaccaaac

SEQ ID NO: 84694 - DNA, 696 bp, Zea Mays
caaacaattaatccctatttaagtaagcctaaagttgtcatcaatcctcttgctagtgatggccctcgagcacacaatctcctcataaggagtgctccatgtgagctctagcactttgatctagccagaccacttaacacttttgcacctcgctctactagtgttgctctatgcatgtcctaggggtgagcaggatacccctcataaagcgttcttccatggagaccacaagccaccaagctatctacgaagtggcaacctcgaagagtaacaagcactactgggttgcaactagatcacctagtacctatcaatacaaccactcgttgtgatgcactaggaattgctctcccaatcgtccggattcaatatctatcaaacatatgagagtagaggcccaaagtcaaaaaaacacttcagcaatacacccctaaggtactccacccgtaaaatggctatccaaacctttatataaaagagaggaatggcaaaactagctattgccccttgaaatgccgagattgtgtgcttatggtcccattaacaggccataatggtagagctcctagtggctactttgtgtagcaagaatataatccaatggctaaaatgatcagtctgatgctctcactttgatggtactcaaagaggtccaaaaattgactttggatcattagatcaaattgccaaaccaat

SEQ ID NO: 84695 - DNA, 594 bp, Zea Mays
gtgaggtgtcatgtgccaatgttccgggaaaatggtcgggctcatggatgaagcagtggttttatgtcaaaaatgatttgagtgagagagatagaggatgcgaagggcataatccaacgccccatccattcacacttcggcattaggaggcctttgattgcaagtggaaacgaagtgcaagcatgtttgatggccttcaacacagtgtgcacttacatcggcaccagagatttggttcaggagcatattgcttataaggtatgaccgcttgttaatgactgggatatgccgaaagataccactgctggctccagcgaaggtggactggtttatctgaggtacacctattgctatagaagtcaatttcacgagccaaataataactggcttgaagctattgaagtgaccagtgacaagctactgggggcttatacgaaggcagaggacgaagccatgaacactgccttcgatgctcgagggaaaaggatactgaacagagtttttgatgtgattggattcatttaccctgattactactttctcgctcgaaaacaaggagcaaagaggaaaaatcatgacttcgacctcttccgg

SEQ ID NO: 84696 - DNA, 823 bp, Zea Mays
gccgcgtgaagccatcagggcacaaaagtctccgtgcccggttataacttcatcaagggcttcaacttcatttttaatatgatcaaaggccccggggatgtcttcggctgaaggggtaatctcttcagaagcagctccaaccgagttgaatatccccttcagccgattaacgcatcgagtggcaaagttagcacacttgttccgaaggttctcaaaagcttcatgtaggtttgtatttctttcagtttcggccttgatctttgcttcgagctccttcgtctcatgattaaagcgacgtgtactttcgcccaaaattgttccagcttcatctagttcctcgctcaacttagtattttgagatcgtgcttctgcgagggaaccttcggctgtttgcaacaggatgtctttttcctttagagaaacttcaagttcctttactttgtcctccaaacctttaattatgactttgtttgtaaccgcaagatatagtaaattctttcaattccaacttgtcttcctcagacatttcctgaccacccaagtgccgaagatcaaaatccctctcgtatgaaggagtgtaatcaatttcctttccttcatctggcactgcggccatgttttcttctgcagctacatttgtctcctctgcaaccacatctacaaccatatctaacacaagcctgtcaacttctgacattgtggctgctagttcctcagcttcggcttcgccagcatcttcggcatttgcaggaattgccgctttcgtcgccgaagctgaaggcggagtttgttgaattacttgcattatattcataattcatca

SEQ ID NO: 84697 - DNA, 312 bp, Zea Mays
accctctttgtcctgtagatcgtcatcagatctctcacacaagacgccggagtccaggcagatagatacacaccgcgccgcctgccgccatgtcgcctctctgctgtgactcggactggtcgtcggtcacctgagagcaagctaaacgacgacggacggacggagctagctgctggctgctgccagtcacgcctcctgctcatcgaccaagtgcgccaaataaaggatcggaggctgctagcttgttactaataagctgcggcggccggtccgcgtttttctttgcttccgatccgatggcggccgcctcgt

SEQ ID NO: 84698 - DNA, 614 bp, Zea Mays
ataaaaacccccagtctgataagagcttcgggggtaagcggatgaaggtatatctcgaatgtcttcaaaacttcgactagcattttgtggagtggaaagcgacgctcatctttcatgaagcacctgaagaccaccacttcatcacttttagggtgaagaacggtgtcttctcccccagccctcactatagacacatcatgaaaaatatttgcctttcatcgctccaatttgctcttgtttgatagttgacttcccaaaaacaacgtggcttggcctccacagttgatcttcggcattttcgttctcactctcaacatcgaaactctcgttgtcgcttgaatcaccagatatatagcccagctaacatctcattggtgattttttctacgttggtccttaccatggctttgtagaagccagcgagtgtgggatccacgcttttcttatcctcagccatttcgatgatgatcactgcagaaagccaaagctcaaaaacaattgcactcgcagaacagaaaagctaaaacgacaactatagcacgaaagctagatggcacaaaaaatatccgcaacacagccttctatatatatactaagagccccactgttcggtg

SEQ ID NO: 84699 - DNA, 494 bp, Zea Mays
gctggttgaaattacttatacttcactagtttaatcgaggggggataatgtggcaagatgcttttcaagatgatcgctgaactttcataaaaaatcacactttgattggttgacctctctctttttcctctgtggatttaacagaagcttgctgttggtttcgctgagcagatttaacaaattggagcatgtaccatatattcccatgttttcagaaaatgaagtttagcaggcatactgtagcacaaaatcttaacacgtcgaaaaaatctatatgccattgtagacttaagtttcaattggaatttaaagtgctcagcacattttgagttaagacatgtctacactgttacaaggtaaatattgaattatagtttatgacgacaaccacattcactttctttggttaacctttcttgagcacccatgttgttattaattgagtttttatgcagtaatttccttaatagttatatgtggcaactgctgtctgc

SEQ ID NO: 84700 - DNA, 698 bp, Zea Mays
cgcgtgccttctgctgtggagctaggtaattttgtgactctaccaaatgatgggaacagcctagactcttaacagactgctgttagtgtgaacatactcgaacataaataatctgtaatatctagatgtagtcttattagtgaaatgttagtacctgaaatgcttttgtaaaacaaaattaagaagggagatttaggacttacacacacataattggtataacagccatgcttcgggagacttacccaataacccaacccatggtgggggtggactgttttttttagataggcccgtacagtctcacattgttgctgccaaatttgaatataacctctgttttgttggtttacctggagctgtttgtgcatggagagtatattagaccatgtccactgttaccttaaaggatgttagacttaaaaaccctctacttgataccactcatgtgggagggagccttcgacactggatctgccctctatgacatattgagccaaatgaaaagaaacattcatgatgacacgatgagggatacctacttctcttgtattctctaccgcttttttccatgaatcttcgtactgccaggtgcttgggcttgcgggaagcaacaacttgctgtcggttgtgcttgtgcctctcaagtgtggtgaggagggagcatgtgaagaaaaatgtttgtttttttaaaattt

SEQ ID NO: 84701 - DNA, 614 bp, Zea Mays
ctttgatcgtgtgtttgatctacttacatcactcgtatcttgtggtcagcactaggcagtgaacttctagttggatggttatttaactttacaacaactagaattcagattgcattccttgtttactattccccaccaagctccacatataaaccatcataatcggtactctggtcttgtattcgcttaaccatcactttattgttaccaccacacattttcttgcaacccgcagggacctcataagagctttggttggtaagagtggtgaggttgtgagattctatatagcttcatattccacctatatttgttgccttgtcgccactaacttcgcaggaagatggatcccaacgctgagattgaagaatgtgtcaccatgatacaattcaatgagctcaaacaaagcatagaagacaagctagatcggttggcacaagatcttcatacacttatggttgaaatcagtggtagtcgttgactccctgatggtgcaagaaaccatgatgaagacggggaagaaggtgaaggaaattattctagaagagcaagtgaacatgggaggaggaatcaaggtgctgcccgtggtagaggaagagggcggaatcaaagaa

SEQ ID NO: 84702 - DNA, 974 bp, Zea Mays
cggagctcgagtgaaattacattcatgtccttggacattagtttacaaacaacttaaactaagaaggtctaactagtcctttttccttctttgcttggtctgggccaaagctactgagcttcatcattctgcattgttgcttctacacagagtctttgtcttgaagacctttagcagagaagaagacccccaacaattgccttcctgataataaggaaatcaacatctgccgtgagatgatgaacaacatggtatttccaaagctcgagctcggtttatctgctatgtcaaaggatcaacttgtggacagccttgctttcaatagcttgaaggtttgcaaattttggcttcatgttttagtacattccgaactgtttttcagtagttcttacatttgttgtttactcttttgttttattttgtagggtctgatcctgagtaaagctttgaaggcccaaaaggatgtcgaagacgagagttgccaaatggcacttagtaatctccgatcgaaggttataactttgacgaatgaagctctcactaaagataagatttgctatctctggtcgaaaggctgaagtctagtgaagctaagatgtctgctcaagcaaaagctcagaaagctgaagtacaagagctgaaaaggaaagttgtcgaagcaactgaaaattttgatgttgaagtggtaaaacatgagatttgcaaaattgaaagatcaagagcacaaaagaatgttgatgagcttcgtgcgggcaaagaaaaatgctatgagatatccatggagtgtgctaaaaatttaaagaacagtttctctaaagttggggccttctccgctgagcagaaattcattcgcagtgaccccgatggagttatccagtggatcagtggggaggccgaagcttttgaagaaattcttagtgataggggggatttttgtgcattcgccgatgcccacggggttgtatcaattctgg

SEQ ID NO: 84703 - DNA, 835 bp, Zea Mays
gaaaataatagtatcataattgggagaccttacatggctttgaagaatatgaggtgtgtcctgttcatgcggcccaatatgtctcatggggatgtgcttatctgcaccgaccatgtctgccgtttttgtgtgctcatcaatatgtccagctgccctcaatgccgccgggggagtaacagacacaccctctgtgtaaccggtgatcgcagacgctacaggatgcatgtccattgaaatagacgtacctgttgatctatgcacagacgctacaggtggcatgtcatcgccagcgccggtgctggacattttctcgccgctaatcgccgcccggtgctctccctttcgccgccgttaaccgccgccaatatcacagatacgaacgtggacgagcggctgtaaattagaatttgtctcctcccgtaattgtgcctttatttacgcgaacgtggagcaagtctttcctttatctcaaaccggtggagatttaaatgttgcatggtttacgctatcatgttacacagcgttatgcagtcgtaaacggtgtgcacatggtaatatttgttcccgtgattcgtggcataaaagattccttctatgcatgagttatgcacatttctacatatatttacgcgtgcgtatatcgcctctcacgtctcagccgggattcgtggctatcatatgcatggctgacgcaagctcgcgtacagtgggccgaccgcgacctggttggcgtcctggctagggcttcccccactaacggaagcccagggcttccattacctcttccctctctatatatatatatcctcatctacgttggatgacattaatattg

SEQ ID NO: 84704 - DNA, 644 bp, Zea Mays
gagctatattgagattggcggctctacactgaaggaaagagacctgcaagcaatgaggaagcttggctattttagcaacacggtcaacgtgcgcctccctggggaggagacaacgccgaagccagggaaggacgaagttgtcgtttataagagttttttcaaggcaggactttggcttcctatgtacaagatgattttaaaggtgctacaacggtatgaggtatacatgcatcagctaactccaaatgcaatggttcgcctgtgcgtttttatttgggctgtacgaagccagggaggtcataccgatgctgatgcattctgcaaagttcatgatttgcattatcagacgaaggctaaggatgaatcaggcctccataacaacttcggatgctacaacttcgcatatcgaaaggacacaactggtcccgttcttgcataccgaaccaagtggcatggagattggacgaaggaatggtgttatgccgaagttgactcagaacaacgtgaagatttcaagggtatattgatgagccctttgaaggttagctttgctctgaagcggccgaaatgtgagatgaacgaagttgctgacgagtgtttcaaagcttttaatacagttatcaaaaagattggatctcgagatc

SEQ ID NO: 84705 - DNA, 480 bp, Zea Mays
caggggtaaaactataaattccagggacttgaaagtaatgtatttccaaagcagacggacagcgggtttatttcagtaaatcccaggggctcttttataaaaccaacccgccgaaggggtaccgatggatttcagtcatctgatcatgagtggatggctcagattagatccctgtttaaatgaaccggtacgtgacaagaaccgatggatcagagatctatggctcaaatcaactcacgactggcatgtgcacctacccaccggattccgatctgacggcacggatccgacgagcgaaaaggtcacgcggtgttatgatcctggccatcgatccgtggatccacgacatcgaatacaccggcggtggggatttcgcagtttaatcacaaccattcaactgggatcaacgatccacgtagcttcttccctaacacccaaacagtgtcgccgccgccatggccacgcagtggagaacaagac

SEQ ID NO: 84706 - DNA, 491 bp, Zea Mays
gtgggtgcaccacggtgaggacccacctcctcgtattgtatcagaagttcagtcacatgaagagggggactacgataggatggaagggatgcttgacgatgtacgccatgagcttctaccagtcgattccgagaaccctcgtcaacccttcgattatgagggtcctcgtacgcctgaggttcaaaagttcttcgagctccttaaagctgccaaagagccattgcacgagcacacgaaagtgatcgttcttgtgttcgtgactcgtcttatggctattaagtccaagtttgcattatcaaacaactgctataaggagcttctaaacttgatcagtgatgtacttctggagaatcacaagatgccaaaggacatgtaccagtccaagaagttgctctctggttttggaatggcctacaaaaaaatcgatgtctgtgacaataactgtatgcttttctggaaggagaccacgagtgagaagaagtgtacagtat

SEQ ID NO: 84707 - DNA, 673 bp, Zea Mays
aatcttggttgaacttgtcacagtactgattatatatgttgctatgatcagggaactgaagttaacgatttgcccggagctggaaaagtgtgaagaaacgcagcatgcatgcgtgtctagagaaggatccatgcatcagtgtatcatgttcatgttcgccagcagccagcaggtgaggtgggtccaataatggctacccatctggaaggtcctgcgagactggagatagataggggagggagggatcatgctgttttgtacgttgcgtaattgagctacagagggaggattagttttgacatggacatgcttgggtagtgctagctttgcctttgtcatgtacaaagcatagaaaaaggaagaatgttgctatgccatttgaaattctatggggcttccacaccgtagatttctgcacacatagaaaaggattaaaaaaacaagcaaacggaatgaacgaaggcttgctgtttcatccacttcgtttctcgatttgtttatcaggactactggacaatgatcttagagactaagcgtgatctgttcttgctggcaggcaagcctaaccagagaagaaggatagaagatttctgctcacttttcactcttcttaatcttgtggcagaaaattaaaaaaaaagacacacgagctactactaatggcacacctgga

SEQ ID NO: 84708 - DNA, 316 bp, Zea Mays
gcaaggcagtcagctcattatactctcattggagaaacattatacagaaggggcgcatcaggagtcctcatgaaatgcattctttcggctacagggaagcaactgctagaagaggtccatgctgggcaatgcgggatacacgcagcatcaaggactctggtggggaaggtattcaggtctggtttctactggccaacggccaagagtgatgccgccgagttagtccagaggtgcgaagcctgtcagtacttatcaaaacagcagcatctaccagaacagcaactgcaaaccatacctgtaacctggccattcgcgt

SEQ ID NO: 84709 - DNA, 644 bp, Zea Mays
tcgtcatctgagtcagattcaacaacagatggatttctacgacgaaccatccttaagatcaaaccaaaaatacatatggtgagagagatgtttgatgttcaaggagtttaacgaacacgtttgaggaaagacaggtataatattgggcatgcacttcaaccgttcatatgagcggtttagctacaatgaacaatatcaacctacttaactcaaaaacaatgtttgagacaatgataacagtttaagtgtgccatacacctaaactacacaatctccttgaagagatacttaagataatcaagaactgtatggatcgagttaaaaaatagggaagatgaaataatacctcgatctgtgaaaccgaccacgaaaatcccaaagaagagtggagagatggtggaggagctcgaagggatcgaatctccaacaatctccacgaagttttgatagtttttggagggatttgtgtgtaggatgtgagagagggagagagagaaacgagggtgtcggtggcaggaagaaatgagagagtgaagatagaaagtagagaggagaggagagaaaaggggcagcggcggctggtcaaactgaccaaaaccggttcaaccggtccagaaacgaggtttgactgcgtagaaaaactg

SEQ ID NO: 84710 - DNA, 369 bp, Zea Mays
gaaaaaccaaagctaggggtgcagtgcagcagaagcaacaagcaagcatgaatgactcctcttccttgcggggggtgacttgtccacaaagactctaccattttgtggcaaagcgatcggtgccctactgcctactggcgtcatgtgatttcctgcaggccgcgcgacattttccccgtgtcctcgcaacagaacagtgtccgccatcagttcaccaaccccgtggccggaaaggcagcgccactgttcgtacattttgctcctaagctacctgtctcgacggatttgggatggatgagatgacgagaaaggccgccgtcttgatccacggagagaggtagaggttactgctaccggagcacagcatgc

SEQ ID NO: 84711 - DNA, 409 bp, Zea Mays
aagtacctcaccttgggcagccccagtgttatttgtggagaagaaggatgatacaaagaggatgtgcattgattacaaatcttatcccaggcaccacccctctttgaatgaagtcgctatcaagaacatgtaccctctgccaaaaattgaagacctatttgatcagttgagaggagctagtgtgttctcgaagatagatatgaggtcaggttaccatcagcttaggatccgaccctcggatataccaaagacaacatttatcaccaagtatggactatatgagttcactgtcatgttgttcggtttgacgaatgcacaagcttatttcatgtacttgatgaacagcgtgttcatggactacctcgacaagtttgtagtggtgttcattgatgatatcctcatatactcc

SEQ ID NO: 84712 - DNA, 491 bp, Zea Mays
cagggcaccgtcgaatcggcgatctatgttctagattaaaaacgcctatgatcaaatcctgttcacacgatttcatattcacggcccacattcgatcacgcgaaagggtaagccatggccaaatctcggtcgcccatccataaaacaacggtcaggccctatctcctagcgtcggtcgaacagcgacggcgggacaggggcgccacggcggcgcgccatggccggaaactccattccagcccacggtgcacaattccaatgaacactagtggctacacgaagcctatacgctggcaaatacggtaaagggactctcacccgcaattgaagtagtggcgagccaggccatgacatgcagcgggttcgcgacagccaatgaccgccgacgaggaattatcgccgattgaatcctcccgcggcaatagatcccgatgcgctccttcgccacacccagtgctttcttcctgaccaagtatctagggtcgagacgg

SEQ ID NO: 84713 - DNA, 522 bp, Zea Mays
gaataatcaaggggggctaggagattagggtttctaaccttgggattaaattttgggatgctacactcagcctgcgaatccgcaatttgcttctctatcacttcaatattgtcctgcactacctaatagaattgtcgtgctctatcaatgcttttctaaatgcctcctttgcagattcgtcagggagcaacgccgcaaagacatccaatgatgactctagtgaactaaccccatatgggatgtctctttcagaatttgtggctcggcctgtatcagatgatccagacggttgccttccatgtgtagccattggtgatcttctgcccttgtttgcgatggcgttttgacgaattctaccatgagttcccctaacagaactagtcaagccaccacgcgcagcacatacaatagcaagctctgattccctgacatcaacaaccctaggcccacggttggcggagtatactgtcttctcaacatccctgaagtgtgtaaacacattaatttgtgcgaaataaacaa

SEQ ID NO: 84714 - DNA, 789 bp, Zea Mays
cactgagagataaattcaatgagttggcatcatctaaggaagcagaaacctgagccaggttggtctaaccttgagaatacttctcgagttcagagtaccgtcgggtcatatctaacaaaaaatagttgaagaagggcacacagttaaaaacagactaatcaagaagccaataaagaaacaaaggcactaaccagcagtggattccactgcgatagaaacagagctccttcggggatagacgcaccctgcgatctcaattgaccagccatcccgtcgaccaaagcctaatattgaaaataaatgagtacaaagacggtaacttgccaggagtattgccagagccagaaaagccgaattacctgaagattagagaagaatgacggaaatcctaagtcacgaggagctaggtggtggctcgatgaaggaatatcaaccggggcaatttgaagaacatcgccagggatcaactcagcaccaccagcaggcatcagaactctagcatctgttatgccgacctttaaggcgacttcctcatttgaagcacgcgctgttaccatgccatcagaacgtggaggagaagacccaacgtgaacatccatggaggtatgagaaggggagcccgcttggataccctcgggggctaggttgcagcccgcactgcccatcggagccggatcaccaccggcaacaccctcgggggctgggtcgcagctcgcgttacccacccgagccggatcattaccggcaacaccctcgggggctttgcaaccgctggcaccatccttgggg

SEQ ID NO: 84715 - DNA, 553 bp, Zea Mays
gcgatatggtcggctggtaaggcgatttggccaaggttgcttgcacgacaaggcttgcctttggctgagccgagggcgcgctcactgcctgaggagaccctcgggcgagacgtgaactcgtccgggaccactgttccgcccgaggccgggctcaggtcgaggcgagattgcgtcccttggtagatgaagctttgactttgacccgagccgtaagcctttatggtttgctctgagggtgtttaccggccgtgattaggagtgttgggggtacccctaattacggtacccaacaataatattcaaaacttgtgcatgaatatgattgaacttttccttaggatatttgggttccatacctcggtgccattttgataagtgatacctctcaactatgtatggtgctagataaccaactatattggaatatcctgcatcaacaacgtaggacttatatgcaattatatatttttattgttttaaagtaaggtaatgataactatgcatagaaattatatttcatcaatgcttatttttgggaggatgtggaaagaac

SEQ ID NO: 84716 - DNA, 1192 bp, Zea Mays
ggttagttgtacaaactcatgcgaaaagtaggggttacaagcgggcgagagggagaggagaagctctcaagtctcttatcggggtggaagtgaagctaaaggttacagagtggagttctagctaagtcttagcttggtggcagggctccaacctctagatcctcattagtgcgtcctcctcccgatcatcggtctgtctgggtatcttctcgttcgggtccgtccatgcatgtgtgcatccattcgtttgagggccaacccttcctttcataggccaaggaaggggtcgcccaacggcgacttccttaggaagtagttaccgggtggcggtaaatcaagcgatctaccatggagcgaagccacacgtgtttgtgggcctcggggttgcctgactatctcgtattctttatggcggatggcgcgagcagcgtggggcccaatcgccatcatcatttgggctataccgacccctggcctccatagcatggggctcgatgcggcttgttgggttgcgccctaccagcaacatgtgcattttggtctagtccgataggtcatgagtgcgccataggcgagagagtgggccataaatgcaccgaagtctggaggttcgtaggtcattagtgggagacagactgacgcctctgccacgactcattacagggcgtagttaatgcagccggtcacctatgacgggtcgatcttgggctaggcgtaggatctacttgagtggttttccttccgtgcacccggcccctgtctggttccgccaagctcgaccctgggcttggtgttgtgaggttcgttcggagtcagatgccaccagggtagacgttatttatctcctccggctgaccagcgggctctagttgccaatggccctttgtcaatgcgctcgctgaacgatgagccccagggaccgggatctcatccccggcaagagctcttcttcaatggtctttattttgtccatcatcggcggggcatgttcatccttgtcctatttcttgtgtccacaacctctattttcatatctacatcctcctcctttgtatctatactgactatccatcgatgcttcttcttacaccgaagctcatcccaccaccaacgctcctaccatcgatgctttccctcatcaacttttcccttatccataccctcctctacgcaacaagagtatccatataac

SEQ ID NO: 84717 - DNA, 1027 bp, Zea Mays
ctccaaggcgccgaaagtgcagccgaccggggcagacggtgggcccgcgaagaccatccaggtcggcgcggactcctcctagaccacccgcatcgtaggggatctgggagaaaaataggaactcacgctcgtcgccttcctccaagcaaatgccaacgtcttcgcttgggagccgtcgcaaatgccggggatccccagggaggtgatcgagcaccagctaaaggtttacccggacgccaagccagtaagccagaagccacgaagacagtccgtggaacggcaggacttcatccgagaggaagtccggaagctgttgcacgctggctttattgaagaggttcatcacccggtgtggctggccaacccaattgtcatgccgaaagccaacagaaagcttcggatgtgcatcgactacagcagcatgaataaggtgtgccctaaggactcgtatccactatcgcgtatagatcagattgtggactctacttcggggtgcgacctcttatccttcttggacgcttactctggtttccaccaaatccgaatggctaaggaggataggaagcataccgcttttgtaacagtagatggactatactgttatgttgtaatgccctatggtttgaggaatgccttatcaacctttgtacggtcaatgagcaataccttcggggatctgatccgggataaggtggaaatttacatcgatgacatcgtggtcaagactagggaaaggtcggctatagtggaagacctggccctggttttcggcaagctacgggcaacccgcaccaagctgaacccggagaaatgcatcttcggagtctcgacagggaagttgctggggttcctggtttcataccgaggcattgaagctaactcggagaaaatcaaggctattgaggtaatgaggcctcccactcgtgttaaggacatccaaaagcttaccgagtcgctggcagcccttagccgcttcatttcaaggttggctgagagggcactgcctttcttcaagctcctgcagaaa

SEQ ID NO: 84718 - DNA, 284 bp, Zea Mays
tcatggactacaagcagcgggtcttcacctgtgcgggaagtggagagcaaggcccgcacacgtgtcagcaccggacccctgcacactccaaggtctttctcgttccggaaccctgccggggttcggacctacccgggagctccggacctgtatgtatataggggcccggtgaccctctgtgggggtccggccttactgaggcatggtgcctttccttgccacgtggcgccctttggcccgcccatccggtggagtcaggcgcggtcctccgcgcggctaggaga

SEQ ID NO: 84719 - DNA, 456 bp, Zea Mays
tgccgaagccaaagatgctggtgaagccgaagcgacaatgtcagatattgataggcttgtgtcatatatggttgcagatgtgactgcagagacaaatatggctgcagaggaaaccatggcaataggaaaagaaattgataatactccttcggacgagagggattttgatcttcggcacctgggcagttaggaactgtccgaggaagacaagttggaactgaaagaatttgcaatatcttgcggttaccagccggggtctttgctcttcggcggggttgatgaggaaattttaggatgtattcacgaccgtgctggggcgaagataatcgacactctgtctaagagtgttggattcctgaagctagaggctgacatccacggttaccgatggcaacacattgtcggtagcctattttattccaatttcaaggtgagatcttcgtctagatttttgtt

SEQ ID NO: 84720 - DNA, 638 bp, Zea Mays
aaaattttcgcgaatttcggaacgtaattgttctgaaagcttgcgagtcctgtgcctatttaaaattcattaattatgtgatacgagtctgaaaacttcacccagtcttgtgatttttgtcctggacaaattaatttgaactcgatgacaaaagtttaatgtaaaattaaatcagaccacactcggaatccgagaaaaaccagacgcaggattgttaattgaattgttctccgattgaatattcggatagcaggcgaaatttgtttaggttcaactaaaccaaacatcgactaaaatattgaatctgatttcgtctggtttaatccgtttatatctcgctcccgtgacaatgctgacatcgtctccggggggattcagattgcgatgccgcattcggctcctagagtttaaaatttatttatttctaaaatgtcgagcctagtgccaatttaaaattaatcgattaagacgaacaaaaattgtcacttaagtatttcgttcggttcgagcaatctctataaattcggtaaatgcgctacttggggcaggctgtttaaataaaccgaaaccggaataattgctagccaattcggtttcctattttaaaatctgagaaaataatatgcgtagccgtgtag

SEQ ID NO: 84721 - DNA, 531 bp, Zea Mays
gcggagtttcgtccccggcgagaaatcgcccaacaacccaggcctcccgcgcacagcagtgacccaagacacgaaccacgcgtagtcgcgatgctccccgaccacatgcatgctttgattgatgacgaccacgaggaaatcgctcggcggcatggagaagggagtagagatggggcacgccgagcggaggctgctggggagggagctcggggcactggagggttgaagggagagcccgcgcacaacttggtcttatactccacaggggccagcaggcgatgaacagcacccagcgagatcaccgtgcgcggattgaggcgaacgacatgcgaagaactcggcgtttgttgcagccggagacggaaaggagcctgacgagaggggcccaaacggcggtgacacaagctgagagaggggcgtgccaagcggcggacccggggggcccacatgtcggcgcttgaaccagccgaacacaggatcaattggcccgtgcggctaaattggtgttgggccgtgggaaccaaattcggc

SEQ ID NO: 84722 - DNA, 354 bp, Zea Mays
gccagggtgatcctcatgttcactatccttaccctagactaagacacttaggtcttctggagctcaaaccacacctcttgggagtctcgtaggttgaaacttgactcatgacttctagagtcatggaggtcatgaagaaactgagaacttgtttttaaacactgtccatcgggtgtactctgaattgagttttcttgacgaatcatctcctatcttggtgttgagcttctcttctagtgcaacattccaacaaatgtattatagtttgtgtttatctaacgaatcgtcgtctttcttggtgttgatcttctcttctggtgcaatagcagagccatcaaggtagccctgtagctg

SEQ ID NO: 84723 - DNA, 628 bp, Zea Mays
attttttttaaaaaaacgattagttgatagcacctatcggcttcgtcatgatttttgttgtatggcggatcgaagccttgtcgtcgtagtctcggggaatttttggaagtgtgctggtgctttactgatggggttgtatatacttgtgatgtattacaatagttgtgtgtcgtgcaagtatccacaaatggtgaaagatggtgtatgttggtaattagaaaatggtcacttcgttagccaatagccaagcttatgccgagatttaaaatatgggcaagttaaattgaaatcatgcttatctaggcgtgtggttaaataataataattttggcttgtgcagtgaggtggtgacatgccgaagtagtcatcgcttcctctatgtttctaagtcgagtcaaaatgcggggtactagtagtacgctaggcaggcggtgttccaaatagataaatcgggtgatgtggtagttgtcaagcgtgatagagattgagtcacttaggttataaatttatgctcgacatgtgaggtctcctaaaatatggtgttttaagtgactcgtgtgttgtccaatttaagttgagaaaatggttaagaaaaacgaattaacctactcccacctatgtttttgag

SEQ ID NO: 84724 - DNA, 916 bp, Zea Mays
tgaggggtaagtaagaaacgaaggctacatgacgactgtaagtgacactcgcccaagcttataaacagggacgtgatattcagtgccccttgagcgagggagggctgagtcatagacgttttgcctccccaaggtttgaatgttgcggccgaactgaacccaaaaattgaggcaggccctgcccgactcaaggaagccaccaagggggctttggggctactgtcaaggataagatcctcgggtccctgggggtcgtaagctagaggtaggaccgagggagagtccgccccagaagacccacccccgagaaaccccgagcactgagctcggtggtcgggcgaggcgaacccagaagggaaaccgggcaaaccgagggaggccacttgagtggattctacacatggcccgagactgccctgtcataaataactgaccatattaagcacgtctggtgctgagccatgatggggggagtcgatcctcctactcatgacctacgaacccagaccagaaccccactcatgatctacgtggtcgtagacctacgacccacttatggcctaccgagcctaggccagagtcccctagcaatctacaggaccctcaacacgacgagccatgccgaggcttaggctacgaaggcatggggtcgacgcggtataggaaaagtaatgatgacagctgagtccctcgccacccacacatagccggactgaaagagttcggcaagagtgctcagacgactgaggcgcatacctatggacatgtttctactaggggtaaacgcctcgttctaccccgacacagtaactcctttcacaagaagccacttgtaatcgccccctccttgatctataaaaggggagggccggcagcgacctaggtgaggtgaagccaggaggacgacacacacgac

SEQ ID NO: 84725 - DNA, 580 bp, Zea Mays
ctcatgttgacttggtccaaaggtatgggactatttcaattgagcaagataactctttatattgtgtcgctcaattagtaaataggaatgccttgcttaaggaccaagtagaaaagctaaaaattgaaaatctagcttttcaagaaaaacatgatatgcttctatgttctcataaaaatcttatggatgatcatatcatgttaaacattgctcatgaggttgtgatagaaaacttaaaatcccaacaacctcactcatgcacatgtattcaaattgaaactatgttaccatgtgctaatgcttgttgctcgtcggcaagcaaatcctcctttgagctagaatttctaggatcaaaagatgatacatgtcaaaagctcgaggatgaaaataagaggctaagaacgagcttgacacaactaaaagggaagtgcactgctcaaccttctcaagataaccgtgattacatggtgaagaagcttgagacgggaacaactgtggcatgcacaaaatcccttgaagaaaatgtcaaggacttgaggattgccaagaggaaggaacaaaagaagaaaatcaatacctc

SEQ ID NO: 84726 - DNA, 1136 bp, Zea Mays
tgtgtgtgcatgttgtcatgtcgacactctattctagcaatcttagacctacggccttctctctgcctctaattttttcaagtaccattggtaccatggtgtcacacctctgtgacatttggcctcgataggggcttttaatgcacttcgttgttctacaccaacatggattcacaagcacacctagttaatggagccatgacctttcacgccaactcaagctatactgacagtgcaccacgtcgtgggcaatgaaataggttatgatcattcaagccctttactatcttaggtcggactgtggctagttgggatgatccaccttctctagtgtttcctcgacaactccctagggtgtctagtctagcaacacctcaatgggtccacgtggcactactaccattattcccactcctgtgtatgatccttttggtgcgcataacactgaaggagcctcattgaggacaccatggatgataggagattgatgtcctttgatgtgtgccactctcctagccataatacaaagctctatataggcaacctctagcctcaatggtccatctcagtagtggacatcatgatggccatgacattgactcaactttgtatcgttgtccctatcaaacctctcgatgttgtagaggcccctccatcacgaccccctagcacttaacaacgaggaggtggctgcaaaacaatggaggcaagacatcaccaagttcatggccatggcctaggtttacccttggtggtctcaagccatgcgacctcattccacgaggcctgtgactaggcatgacttgccatctacacattgttgtgaaccatccttgactcaacatgacccatttcttgaggtcacgtcctagactcgaaagccacgacatgtggctccacttccttctcagttgtagcctcaagacctgtgacaccatctacactggcctacaagacatgcaagttgctatcaagccctcgttcaaacatcgtcacaacaaaggggatcgtatcttgcgactccctcaagaaccatctctgcttgcaagcttggatgcttattaactaatccaccccatcagggctaagtgacggtgctcacatccttactccgttagatagcatggccatataag

SEQ ID NO: 84727 - DNA, 476 bp, Zea Mays
ttgtttgcctcaagatcttggcggctaacacattcatcaaagtctgtagggacccttgcttcttcgtcatcgcctgccatcgaaacacaaaaacaggaaacaaagggtgacggttatccctaataatttcactacacgctcctctcaggtggaacacaggaacacgctctaatgtatcttaccaagctcttacaagtgtctaacgaaatacaagcaaaggatggtacaatcggaggttggttcatgatacttaccaagaggtagtgaaaccacgattgcaaggtcaaatctgtattgatcacaagatatagtatgtggagcttgggaggccaaaaactaatatcaaggattagcaaaaatcgagtgcagattagcgaagttcaataagtgtccaaagcacaagtcacaattgctggctaagacgtgtcctatcgaagcacaacaaggtaaaggtaacaaggaacggtggacaaaaa

SEQ ID NO: 84728 - DNA, 534 bp, Zea Mays
gaactagacaacaaaatagtaattttgttacgaactgcatggccatcaccagtccacaagttagattagatcggtattaggacatgaacaacccacataaatgatctatatcttaaagctcatataaatgattcgtatcataagaagtatataaaggggtaagtgcaaaaaaacataagaaaagtattatctaagtctaagatacaatttcactcatacaaactacataaatgagccagttttggggttctagtgaatagtgatagttgcctagagggggtgaataggcgaaacataaaaaattacaactttaaaaaaaacttgatcctccgattattggttagaataagataaacaattatcagagtatataactaagtcatactcttgcaaaagtgttgctttcaaagaatgcataataaactcaaagcaacacaactaaatatctatgataaatagagcaataaggcttagataaggagaggaacaaaactagttcttccttgcaagagttgtttcttagaatgagacttt

SEQ ID NO: 84729 - DNA, 669 bp, Zea Mays
cggccgagcactaagagattgccacatttccttcggcaccgagcgcaggagcacgctcatggcttgacggtcatgcgccctcttggggttgatccctggactgatcacatcccagatctccagcgcctcaaagttacactgcattaacatcgcccactcggagtaattatcacgagtgaggagtggccacatcagtgaactctccttcacgccgccaccggaacctgatgcttgattcatggtgttcaacggttgtcgtcgagggagaacgcgcttcttcttcgctggttcttgaggagggctcaccgatccgtcgtattgcatacaacctcggctctgataccagaatgttggaccggatcgacggcgaacaacgcaaagaactcagtgtagcgcagtgtcgccggagcgcgatcaccacgtctgaacggaagagaggacacagttgtattttctgttgccgcaactgcgcaaccatgcaaatgcattcaactaggaattaaaacacccggatccgtcttccccgttgcacttagctactgcaagacgtgccgtaatttcagcaacgtccgcgacatgcacggcgagctaagtcgcagcggaaaaaacgccctttgaagcggtcacggcgaggactgagtgcactcttcagtccgcccatgattctac

SEQ ID NO: 84730 - DNA, 527 bp, Zea Mays
aggtgctgccagggggaagaataaaaaatataaataaataatgggaataatcaagatgagagaaaacattttttaagcatggaagacataggtaggcttacttttattcaaatttccctcttgtagatcaatgtcatgaccacacgatggggttctcataaaatctctgctgtcatcaagatctccgccactgcgatccaactggatttcttcactatcacctcctccagattggtcttccggtgcatttgaagtagttcctgatcctgcatacaaatttaaaaaagtgattgaaagcacagagtgatgtgtatgggcaaaattgcaacttgtatggtggatggttgcaacaataatattatgttgtatgcaacaaaaaatacctgctcctgctctagtgtcaattgcaacggggctccgtataatttcttcactatcacctcctccagattggtcctccggtgcaattgaagtagttcctgatcctgcatacaaattttaaaaataattgaaaacacagattgatg

SEQ ID NO: 84731 - DNA, 594 bp, Zea Mays
ggaatttcaaatccttcatccacttcatcacttctttcggttgcttaggtttcagacaatagtcagcttttggtttgcctccgttttctctaagcactttgggttggatgatcacatatcatggctaagtccatgcgtaccttgtcattatctttcgttttatccaagaaatccatgcatgtatttacgagggcttggcaaaagttactctcttgatgcatgacgttgatgttgtgcatcaaaatcaatgacttagcataaggaatctcccacaagccacatttgtgagtccagttatgctcctcaccaaaaccttgataccttttcccactctcgtctaggacaagtttcctatgctcttctgtaatttctatcccactacgtcacttgggcggtcccttcgtgacgatggtgcccttcctaaactcctttctctgccttctgaaggggtgattgaagggtagaaaacatctatggcaatcaaagtaacatatcttgccaccagcactaagacaaaaacaatatgtatctttaccacaataaggacatgtcaatctatcatgcacgctccatccagagaaaataccatacgcc

SEQ ID NO: 84732 - DNA, 591 bp, Zea Mays
ggcagatgagcgtgttgccacacaaaaatggaagaacaaagtgctttgatttgctcggtcagaacaatggatgaagaacgccatggtacagtaacctgaatcagattctaggttcagtgaacatcgccgccggtgatgcccacgcgtagattcacgccggccgccgcgatgcgtgcctctgtgaagtggataatcgtggcgggtgaaaagatcttgaccgcggatgagaccgtgagctggtcaccgtacccacttgcaccgacaacgtggtcgtgcgaccaccaccgtcgtgccaccattttccccggtcacaacacgccttaagccctttcaccacgtcgtcatgggccatggagaataagcagtaactgtcgtaaactgttgcccagtaaatgccacgataaacgactctggtgactcacctttgctccggccgccagcttacctttcccgaattcggagtcaccgcttgcggactctataaattgatgccccagcctgctccgctaggttgttacgaagccagagcaccagccctcgcctctgatcatccaccgtagcgccccaatttcgcttttcccccaattccgt

SEQ ID NO: 84733 - DNA, 549 bp, Zea Mays
cacaggttaccataaggacggactccgggtttatttggtaaaagaatagggttttattcgcaaatgggcggacgaaggggcacggtgcattatgggccgctggatcatgatccgatggcccccgattttaaaacgtcgtgatttgatctggtgcgcacaatctgagaccaagggtccagatcagatgcgcaaagggttatgaagtcgtttactcccggccgtcagtccaaagatcaacggcggacaatggatctggccgaatcacttccccgaccaaatcccagccgttcctaacgggatcaatggctagggctaatctccttcccccccgactgccagcagacggtgcaactcgccagccaacgacagcgccattgccgtaactctttctcccgtggctccacgcataacccttaaatccagacgctactacttagagcgaggaagggcataaacaaagggagggaaatcctaccggttcctgatacagtagcgtggcctgcttgtgatgtggagttgttctgcgacggcggcacactggtgtggaat

SEQ ID NO: 84734 - DNA, 709 bp, Zea Mays
caaagaaggctttgccgatgcactgtgtgccgagccctctttgccgagtgcgacactcggcaaagactttgccgagtgtttttaaggctttgccgagtgcactcggcaaaagccgtcgattccggtagtgtgtgtacatgtctctgcatacacaaatcctcacacacacatgcaaaatagaagcaatctgccacttatattttattacacaacaattatgcatatcctagtgtgtacatgtctctacatatacaaatcctctcacacacaaacacaaatttgggtaaacatatacactcagatacaaaaaagatatcggcgatgcattcaagataaaaaaagaaaagaaatatcatttgtgctgatactgctgttttatgtggagatgcccctatttttcatgttttcctcgatactcgtgattcgtgaacatcgacacaacaaattttaacaagttcattcctaattattacagggtgttcacactcttccacctactacaaaatttgtttaaaaggactgcatctactaccataacaggtatgagttttcaattgatataatgcgctcacctttgtgctccatgaatatgctattcaattaaacatatcaatgaatgtatggtaatgtattaaattgtgcaagcatagatggttagcattgccaatacgtacataagtacagaggtatgtatatgaaggaatgataa

SEQ ID NO: 84735 - DNA, 592 bp, Zea Mays
acttgccgatcattaagtttttgttgcattttgctttcttgcgcgcgtggcctccgaatatggcattgacctccctattgatgcgcaggaaagctctgcctctacccccttcctgctgctgaggcttcctaggctcattaggttctcctcgaggtgggggaggcggtagcggctggattggtcggccatgcccgatggagtttttgaaatccctgcagtcccacagggtgtgccgcatgtacttgtgtacaggcactaggagacgaggatctcatccagtgtccttacccctccgcggggtgcaccgtgggctcgagcgacaggtggcccagcggtgtgtacctcctcccagggtctcttctcctagcgtttgtctggttgctggtttgtgtcccttcgtggtgctagtggtacgagctttgtgcctccaatgaggtcttgagcccgctcatccgccgtgatgtagacgtccacctcccagaacaattgttcagaggtggcaggtgctttttgaagtatggcttgagcgaaaatcggatcgttggatccctgatagaagtcttcgatcacagccgcctcaacaacctcaggg

SEQ ID NO: 84736 - DNA, 1098 bp, Zea Mays
acctgggttgccttatgcctagggcgtaggaaccaccatgccaggagtggtagcaccctcactcctcatcccatagcgggccttggcatagttgttgttttgttgcctatcatgagctgaaatgctagaatgccgccatcaggggttatgatgaggcctatgtgtggagcccatcaatgccaacgattgtttctacctcaaggtagcaaacttgttagacgatgatgtcactgacgacgtggttgttgtggagaagccgcctaaacctccagtcatcttcccccacaccatcatcgacaatggaactaaggagactatggacctccctatctacgtatcattgccctcctcgatagtgccttgacccacaacttcatcaacatcacggttatataccacattaggctagagccaagctattgcaacctctgaaggctagggcaagggaggcatatagcaactatcattgggtgaaaccatcttctgcatcagctcctatggcgacatagatttcctcgaggatatgaaaagatgtggccaaagggtgagtagctcagtgggtgcaagtactgaatcaatattggtgattgtgactactgagttagtcacgacggggtaggcattaatcattgagttgaggtgctccaccacaaagcaaactcggacaacatgctaatcctttggtgctatggcatagtggacaacagctagccgaggaggaatttcaagctatagtgtttagtgcagacgatgaagtggtggccccaaagatatggttgcttgtgtcgtacaacttagactaggttgattagttcacgtaagtatgtcgctagcttgtggtggtggtagcgaaaggtcgactaaagaatttttggggtcaaccacctactatagaacaacgccgaagcctgcgctcaatgtgtcttagtccacaaataagtgctggataaagtctagcatttgcaacactgaaccagaggagaggttgctcttgagcaccatgaaggcctcaacaacctctagcatgtaggcgtacacttgtttacatagtaggcgagtgagtggcacaatgattgtgctagaatcgctaaggaagtt

SEQ ID NO: 84737 - DNA, 1351 bp, Zea Mays
tgtggccatgggatatattgaagtctagcggagagcggtcacctttcatttatgaagttgaagttgtggaatgtgccaaagtgttgggcttgccaagcgcttctttcaaagtcatgatgtatgtgttctattagcggaggctattgagtatgctcatactatgtttttgcacttagtgaaggtggttaggtgtattcatgttgctacaagtctgctatttcttgttgtagagtccacaatatgtcttttttcctcttcaatcaacctcaataccttttagaggatctcatcatggtgtcttgtggttgtcaatgcttatatctacttcttaaggtcatcattttttatgtgaaggctcttaagtaacaaatggtacttggagttaaactcgaatgctttgtcttcttcatggatctcgaagtctaatcgcttgggggtgtcctcaactcgatggcggatcagagggttggtttttggtctgatcagactagactatggactggtaggggtgtctcttggtgttgaacggagcatgaccatggctctccaaactacatgtgaaggggcttcccttaggggtggaaatgactggctctttgtgcgaagaggaagatttctttcagttggtagttatgtagccgtcacatgggcagtcttcgcttgggtctcttggtcttgagtggggaaggtgaccttaggcctctgggtgttgtcagtgaagactatctctatcaactccattgaggtggagttggatcgggtgttcttttcgaaagccatcgtgggattggtctttgtaatgaatacagtgggcgctaaatgttgggttctgacacgtggacccaaacactcgggagcaggtgagacaacggtgctcaacaaaataggaagctagggtgctcaatgtcttgtcaatcgtgtctcatctaggagttggatgtagttatttatagtgcaaccaatgggctagcctaaagtacgttcgtgcccttggatacctgctacatcctcagaatataatgtacaacagagtaaatacgaaacaatgctgacctagatctaattacaccaagagttgtacccgcaggagaggctgacagatgggccaactttacatgtagagggcccacagggtccccactgtctatacgtagtcttctagtgtcaagtcatgaaggcctttgcctcatggtcttcgatgtcgcctcattgactcgtcttctgatatggcgccgaggtggaacaattgccctttgcttcgcttgggctctcgctctggcctagacgaccgcgccaaaggaagaaaggccatcgggagtagagtcctcgaggccgaaggcctcttggctcg

SEQ ID NO: 84738 - DNA, 519 bp, Zea Mays
ctttcctgaggcgccctgctggattgttgggatcaatccagaaaggggtatatgactgatgtcttgtacctttgtcaaatttaaactgggtcacaacctcaatcatcttcatgataaacggagcatgaagacaccccttcaaaggaaagcaggcggcatgaatgatttcctgccaaatcatatcaaagacatttatactctctgagctgctgggtttcatgaaagagagcaagaccttgctctctccaagaatgttcatctgattacccccttttggaatgagggtcatcctacagagggagttgatgtatcgataatacttatgaatgtttgtagactcccaatacttcccagtctcagaaagatgaagatctttggcttcatctctagtaggctgccgaaaatcatgtatcttgatcttgtcgccagagatatcattgtcagaaaaaccaagaatgtgagcaaatcgacgatagctcaccttataccaactacctttaatgaagaagttcagataag

SEQ ID NO: 84739 - DNA, 697 bp, Zea Mays
caccagccgtagtggcaacggcaaccagcgccgtagaggaggaccctggcttggacatcagttcgatctcctcaagttgcaagtcgttgaggacctcggcaaatgttgggaaggggcgctgccgcttgagaagagacgccatgtgcgagaggcgcccgttgaggccacgcagcacggtaaggacgagggcgcgatctagaacagcctcgccgaggtcgccgagagagtccgccatggtcttgagccggcgacaataatccgagacagagagatcaccctgaataaagtggcgaaactcggcatcgagaatcatcgcacgagtctccttgttgccgatgaactgctcttggagccccagccacagggaacgagcagaaggatctggagtggtggcgacctcaatgagttcgggggagactgtgccgtagagccatgaacgcactgtgcagtccatgcgccgccaatggggatcgtcagcatcggcaggggtggcgtctgcaagcacgtggtcggagagctcgtacttgccgagggtgttgaggaagagaaccttccaccggttgtagtttggtgaaagattgtcgaggaggatcagaacgagggacttgatgttgaggacggcgacagcttgcgcgtgaagagccatgacctctgcccgagcctgggcatcgaggtatgtgcgaatcacatcatcttg

SEQ ID NO: 84740 - DNA, 296 bp, Zea Mays
cgaagactatccgcgcagaagtcgcctaagggtgcagccggactagcacaacaagtgcgaaaaaaccgaagcctaccgcgaagactgtccgtgcagaagacacctaagggtgcaaccggactagcaaaacaaaagcagaaacgacaacatcaaaccgtccgcgccaagaccaactataatcacatcagcacaacaaaacaaaccagacaaagtacacaacgccttcgcacacatatacaagcgagggcacacaacttcatcatacaagcctctacatatacaagcgtgggcaccac

SEQ ID NO: 84741 - DNA, 767 bp, Zea Mays
ggagtaccacgggatctcggcgggcgtattcctagaagaatcaagtgcgatggaggccggaccggccgccaatttctcgacgttgacgcaacgccgctgctgttccgctagttgtcgtgggcagggctctccgttccaccaaagccggtgagtattcccatattcggttcagtacatttccctgtgcgtgtaagcggttgtgattgaggaatggcgctctggggttggaggttgtcctcaccggagtcttctccgccgcggaggggaactcgtcgtcatcactcagccgggtagaggaggaagacttggattcgcgccgtcggatgtttttttggacggtcgtgattagatgtagggtcggagtagcgtgaaccatcggatcttgtggcatcggctacgattggcagagcgttccccttcgcctagattaaatcctgaccgtccaaatctaatccagtggcccatttcacgtactggttcggttaggattaggatctaatctgagccctcaaatgtcgatcggacggctcagattggaagttaccccttcggcttgcgtagattgcaaatgaacccctgcactttacataaaacaaaccgccaaaaagttacaccagaacccttgagctaatctgagccctcaaatgtcgatcggaccgtccagagaagtgtttactgagtcttatgaaatcttacaccagaacccttgagcttaccagaaatcgaggcccagtccagaaaggatttagaatagagaaataattata

SEQ ID NO: 84742 - DNA, 489 bp, Zea Mays
caagtaatccaagacttagtgaatagtcgcgaagggacgacaggttgattcatgtatagtgcggggtctctttagcaaatcatacccgcgaaggggtatggagggtgttctggccgctagattagaggtgaatggcacagatctaatctaataattatccgaataggtacacgattatggccgcgggattaaggatccacgaaccagatttaatatgactacgatcgactcctcgttcgcccgatcccgaatctacgactcagatctgtttgcgcgcaagggtacgctcggtcagctaatctcggtcgcaggtgtcagatctaacgactgcggttcatcgtcttcctcccgtgaccagcgtgctacaaggacgcggccgaggcgacgacctcgccggcgttctcccaacccggccaaatactgacctgacctaagcgagacctacaccatttcgaggagaaggaaagtgcggatgttcatggaagctca

SEQ ID NO: 84743 - DNA, 359 bp, Zea Mays
agcttaaaggggatgtggcccaaactttcaaggagagagttatcgaggagggcccttgggcagaagagggagacgcaaacatcatgtggaggaagatggcgacatgcatctgaaagatagcttcagaagagtttgggttgagtcaaggaaacagaagggaagttaaagacacttggtggtggaacgaagatgtccaaaaggctatcaaggagaagaaagattgctacaaacgcttaatcatgacaagtgtgcagacaacatagagaaatacagaatagtgaagaagtctgcaaagcgagcggttagtagagcccggggtcaagcctatgacgacctttatcaacggttggacacaaagc

SEQ ID NO: 84744 - DNA, 866 bp, Zea Mays
gccgacttcgccaagatcaccggcagcaaggcgccgcgccggcccatgaagtggagcaagaccgtccagcgcaaaatcaaggtgtgtggtctcaccgctcaggcagcaatgccggtcatctcgatcgatctcctaaccgccgtcgcaggatgttccatgactccatctgagtttgtttcgttggtcgggttggttggttgctgatcgtgcgcttcgttctcttgtggcgcagacgctttgcctagggagtttgctggtgcaggtgaccctcgaccggtacaaggtgaacgaggtacgtgcgcctgaaaaaattccatatttattcttttgctggagtttgttgcttgggaggcctgggatgagacgacgattgatctgactcttgttcctgtgggtgcagaaaggaagattttgatttcttcagtcgcgcgaacaagaaaggggggagaggaagaggaggagatggatttcacaacggaggagattgatcgagcaatgtctgcctcctcatctcgtgatgcatcaatgcttaccacaaggtacttcctcttaaccataaggaattaaatgtgtgatttcactatgttgtttgtgcatattttcactcatctatttgcttggctccagttttcttcatttaaggcaaaatgtgaactgcgttttgaaattagtgatgttatctctattcttcagagaacattttcttacacttgtatgcctttgcagatggataccataattagtggaataatgcattaaattgcccatccgttttacaggtcacatgaaaagattctaatcttttgcaaattaacaccttggaccagattaaactctcttatgaagcagcagcttcggcttctggt

SEQ ID NO: 84745 - DNA, 323 bp, Zea Mays
cccatccccccaattcctctcatccttcatcgatcgtcgttgggaacggttccactctgcctgtcacctcagtaggtgcctcggttctccctggaccgttctacctcaacgacgttctcgtagccccccacatcactcataatctcctttctgttcgtcgtttcaccactgacaactcttgttctgttgagtttgacccctctggtttctctgtgaaggatctggccaccaagactcccctcgcccgctgcgacagctcgaggcccctctacacgctccggccatccaccttcggcgcgtctctgcctcctgccctggtctcc

SEQ ID NO: 84746 - DNA, 537 bp, Zea Mays
acggttcttggagaaataagaatgcagggttggaccacatagaataggaaatcttggagatttataagcattggttgtggatcaagttaaggcaaaggtataacataggttttgtttttgccggtcttcaagagtttagagaagatacttgaccagattagtaggttagatagtcgtactattaagaggggtcaatgactttgatctgtgtaaaacttagtgcctcatagagcatctagtggttgcatttgcatgaggactaacaacgcttcaaatttcatgagttaaaaatcctttcaaaagcttgtttgaaaagtgcaaagtcttgggatgcgcggaccgtccgggccttgagggcagaccgtccgtgatcctccagtggggttcgaagtctgtccacttcggacaggtcctgttcatttgcactgcggaccgtccgggctttggggccggaccatccacagtcctgaccagaggaggctgctctcggcacagtccctgaattatagtgcggaccatccagccttgatgggcgga

SEQ ID NO: 84747 - DNA, 826 bp, Zea Mays
tttatattcaccttaggattatgttgtgattgggatctgaaaattcaaaacagaaatttgaatttggaaattcacaaatttaaagtttaaaatagaaaataaaataggggaataaacaaaagagaaaagaactcctaaacgacgcctcggccaaatctgtcccaggtcgacccaattgggcatttcgcccccccacgcggcccagcatccctgtcgcacgcgctttggagtttttttctctgcgtgcgggccccagtggtcagtctcctcttccgccgccatgtgggcccagtcgtcagctctatcttctaccacacgcgcaaacaaactagactccgttgagcagaacgcgcgattctggcggatccctggctcggactccatccaccgcgccccaatcccaacaggtttctgtatctcccaatgcagcttcgtccctttttttctcgcaacagcatgtggagaccgcgaccgactccaccgaatccgccggtgagctcctcctctacggtaaatcaggctccaccaacagaaccaccgaaatctaggggcgcctgcatccgatcttcttcccagtggagcgcacatcaagcaaaatcctaaccaaatccgattccatgccgcgtgtgtcgggatttgtcaccaaccccgtcgttatctgcccatggccatggctatttaggcaagaactgtggatcgatcgctggcaagaaaagggacagagtgagttggcaccgtgcgtcctcaagcgatccaacacgctccggttcgccaaccctgccagcccccacctcggaccacgccatgtggctacgcacggttgccg

SEQ ID NO: 84748 - DNA, 580 bp, Zea Mays
tttcaagaacatccagcccttaaaggacagggcctaccctgcttatttgtacagcggtgtcaacgattctacccgggtcacaaacagaaaaattcccactaaagatctgatgagctgactgaacatgatcctaaggggtagagtttcaaatgctggtgctcctgtggcctattctgcctggaacctgccaccacttaggccattttctgagtttgtgtccaaccctcctgctcgtgatggtagcctgggtcttagagtgtgaccctctcctgaggacattgaggctcttattgccccactctagagtcttccagaggatgagaagcagactcattttgagatgccagctagcactgacgacgcggagatagatgttgtgcttagtttgctggctggggaatcgtctaactcgacccacgccgagcccatggctatcacagctgggcaagaacttggaaacctaatggctatcacagagttggagactcggaaacccgaaggtgcccgcccaaagcgtccatgccgagtgagccacccgactgcacctgttgaggaaaaaaggaagaaaaggcgacttcag

SEQ ID NO: 84749 - DNA, 421 bp, Zea Mays
tcacaggcgagggcgacccaaatcgagtgcgtgaccatccacatgcgagggacgcaattcaaggggtacatcccattctggttgtgtttgtccaacaaaggctagcatggtcagtggttttacctgcgtaaccacgaggcttcgtctgccatcgtccatggcctccccgccttccttcctagggtgcccctggaacgcccctcaaagttgggcatggggcgtcccgaaggaaggggagaaaaggaaggtcaggctattacagttgtggcgatcctttgcgatcgcagggtcacactagcaggcgtgatcgggaactaccttcacaagggtggctcctctcacggccaggtggctaccacttttcaggatgaccgccggggctccatcaaaggggactcggctgagcgccccgcccccagcg

SEQ ID NO: 84750 - DNA, 409 bp, Zea Mays
ggagagaaagttccggctttcccctcaaaagaggttagggccaacacaaattgttacatcacactgctcaatgaagggacagacccctccacacagccacacactaacacactaaagttttttgaaacttaataaaaccagtgagatgattacaaggcaatcctattagaaaacctccaaccaaaattaacacaaaattgcatggccaccgattccaggcgacgacagacattctttattaaaactccatcagcttcatccttttgtagctgagcccagaatctaagccagtgtgtacctctaaaaagaacctgcagataagtaaaacttgaaacattattaaaaactaagtcattcctacttatccaaatagcccagcaaaacactgagacacctgtaataacaagac

SEQ ID NO: 84751 - DNA, 374 bp, Zea Mays
tccagatcctccaaattatgagagggcagccccaggtagttaagattaatagtgacagttctatccgatcttgttcccaacaggcttctgtagaaattatccaccagcatggctttgtcagcatgatcagtaaacacattatctccaaagaccaattttgccataaagttctttctatatctggcgtgcatatggaatagcttggtgttagcatctccctctttgagccagttgattcttgatctagaacgtgcaatggtgcgcttaaatgaggcaagggctaaggagtgctttttcagtccacatctcagccaatcctccaaaggggacaaaagcctgaaatcttgggctacttcaagcatgtgaataatctc

SEQ ID NO: 84752 - DNA, 426 bp, Zea Mays
gggggggggaatctggccgttatttccgatcatgggtgggcgcgaatctaccgttggatcgtggtgaacagcaggtattgctagtcattgggatccagccggttttgatatgaaccgctgataaaaaaaatgagcgatcgagattagctccgggcacttcaaaaatttggtgcgttgattgcttgttgggcggtcacgattaaaccagaagcgcattccctcgtccgtgtaatctgaaccggtgattgggtgatggacggtcaaaaccgggtctcgggttatttaaaacgctgggcgtcggatctcgatccgatggctacctttgaataacgattcgcattaagggcaattctaatctggccgttggatatgatctggtcggccagcatcatccaataccctttcggcccgtgaatcttgcaaaag

SEQ ID NO: 84753 - DNA, 700 bp, Zea Mays
gaagaaatatagggagcggaagaattgtaaatggttgaattgttcaatggaaggaaagaatgctgaaagggtagctggaaatccaaggatacgtaacacatgttcaaaacgaacacagtgcaaagctgggatgaaacttaaaaaaatctacgatgatgctaaagagaatgttatttcagtccgaattgatctggtaaactatgagcataatcatgaattctttaagaaagatacagaaaaagggcaactgcaatgcaacaaatcgcatgatcgtgaatatatgtagttccttagtgcgatgcaagaaagcaggattcaacaacattgcattatggattttgtttcagagatgcatggtggtctagaaaacgttccaataaccgtgtaggacatgagtaacctgtaagtgtattatgcattgacaataatggtattatatattaccgaaacaagcgtaatgtgttaaattagataaagtgcataatcattacattttttgacaggaaaaaaacatggcaaagggaaagaaatgcaaatgatgtgtcgaagctattatcttttttttcattatgcaagaaagataatccacaatttttttcggactttcatctggacaaagaagggaagattttaagcatattttggtcccatgctagccagcaagccgagtacattgattttggtgatgcagttacctttg

SEQ ID NO: 84754 - DNA, 604 bp, Zea Mays
gtgctgaaaatcaacaaatttacataagtattataggtacctcaactctctcttgaggatgactttcattcccaagaggggaaatcaaatgaacatcctgggtgaaagtaaagttcttctctccttcatgaagccaaatagcactgagagcttgaatgtctttgatatgatttggcaagagattattcatgcatcttgctttcctctcaagggatgtctgtatgcccccttcatcatgaaattgattgaagtggtcacccaatttcgatatgaaaagggcaccatacatctctcctatgcccctttctggattgaccccaataatccagcagggcggttgaggaaggctcccgcaagctctcgtgaacaaacttctgctggtccctcttgtccttctcctggtcgtggctctcccacaccacgtggtcgtggtcatggtcgaggtcgtggtcgcggcatgggagcaagattggctcattggatagcagctatcttctccatgtgcaggaatatttcttcggatgttcatacacaagtatttacaatctcgccattgatttttttatctctactccagtttgttttggcatcaatcaccaaaaag

SEQ ID NO: 84755 - DNA, 731 bp, Zea Mays
caaaactatgttgctaaattgtattgctaagttgttttattcgacatagaaaagataaaggagtgaattgtggccaatgcagactgtttagcaactgaagtgaacaaaattgaactatgttctgaaactgaaactgtgttgctaaactaaagtcaaatgtggacaatgtagtttgttttatcttcctatatttcatgtttagggttagttctatttcagaacacataaaagatagcaacatagtcctttttgcaacacagttctctcttcatgccacacttgaactatacgggctaagtctgaaatctgtggcattggctcaactttggagccctatatctgccaagttataaagtttttgccctaggtcaccacatcaattctgtagagctattataggagaataactttgatgcagacagtctctttagttgttatacaaaaattaaagaaattgttgcccaaagttgctctatcagactggtattgaacaactgaatctgatagcagaagtggtcgtcggtattattggtcgaactcgagatcggatttgagctaaatccagtaggaattcgagtaggactgctataacaaagatgaagatgatctataggtctacaactttggtgcagaaggatgatgatgttgccatggaaaatttggagaaaacctgtcctaaacctcggctgtcaggctaactgaaaaagcttccaatggtacagtaccaaaat

SEQ ID NO: 84756 - DNA, 293 bp, Zea Mays
agcgttttcactcaatatcgcaatagagcagcgagggtagcaaaaatgtcacataggctcctccttcggaataagacccgcctcccgaaaattgaacatcatcatcctcaactcttccccctcaaacaggtcccgcaagtccccctctccaaagcatgtcccagatgccgacgaaagtagctcgcgctgaccaccccgatccaatcaaaggccaccccaaagatgagacctttccatacccattcggcgacgtcttccacttcgtgacgactctccggcactctgtttcgata

SEQ ID NO: 84757 - DNA, 524 bp, Zea Mays
aagaaattaggcgaagaactactctggtgtgaatggcggaggtggaggaagtggtgcttcttggtcaccctcctagttaccactacccgaagctctagtggcccccgagttaatgcggcgagtagtcaccatctgcacatttttactacgagtaagcggcgagtcacgttgcacatatgtgaaataaggaaatcatgacgtacaacatatcatagaagaaaacttcatgtgaaaaattgtaaggcaagaatcacatcccaacatgcacaacaacaacaacacatacttcataatatataaatgcacatacaagcaaattgttcctctcacatcccaaccaaccaaaagagtgtttttcccacacacgcacacctgcgtcagaagccatcattacatttgccttactccatgagtcctgctcctactcctaggaacactatccaaaagggttagcctatcttctagcgacagctaacaactacatctgaatgttgtcggtctcggagactacacctccatcgtcg

SEQ ID NO: 84758 - DNA, 635 bp, Zea Mays
ctggaatatattacgcgcaaccatatattttgtgcaattataaacaatctccacttttcattctccatctttaaacattgtagctagttacactttttattctctattttaaaatattgtcaatctatgatttacaacatattgctcggttggctctcacgtggtgtcggtgtttcgaatatcgttctgctccgataattaaatttatttctgtgctccagacggtgtgtacgatagacgtaggatttatactggttcgagcaaaacgtctctacatctagtcatgagtggcttgtgctaccggtaccattgatgatcaaaattggtagtaggggttacaagcaaggcaggaaaggaaggagagtcttcaaagtctcttgttcgtggtggaggtagttacaaggtggagtcctagttaagttttggcttggcgatggggctccaaccttcagatcctcctcctattcgtgggtcttctgggcgttgtctcgtctgggtcgtccttgtgtcgtccgtccaagagaagcaacctccatgtgccctctccagacagacgtcctcctgtgcggtcgggagccgaccccccttatagactaaggaggtaggggttagcccgcggtggcttctttggaaag

SEQ ID NO: 84759 - DNA, 333 bp, Zea Mays
gccatttaagtcttcctagaaaagacttttagcactctcattgtgacctgctttgggggcataccacatacatgctaattacgttcaagaccaaataacccctgacaaacttgagaattttatcaccttctcatatccaccaccctattcttgagaattttatcgatcaaaactcccactccatttctatttgtagttgtccccgtgtaccatagcagatagcacaaggttaatgtatgataagaatttcttatcaccattaaccaaaattatagaaaaatgtgtatttgttgtcccttacagtccccacatcctatctttgtagtacttgat

SEQ ID NO: 84760 - DNA, 396 bp, Zea Mays
tgcaataattatccattgtataaggtataaactgttctagctatacaggcaagccaattaatttgacaaattttcttttgttgtttgcaagccaaactaacttgtatatcttttcttataaatcccatttcaagcatatgttgctttctgataagtcatatgcttcaattcacgcggttggttatacagttcctggtggtgattattgaaattgtatttaactattttacaatatttagaaagcctatttggtttcaatagagttcatgtatcttttcattcttgatgaaattctggtatagagtttgatgtttgaagcacccaaatgtaactatgtttatgaactagcgagtgatgttttagtcaaacatgaactagcgagtgataaatattcga

SEQ ID NO: 84761 - DNA, 827 bp, Zea Mays
gggcatctagttccccactccatgagctagacgctaccaaaaatcaagtgaatcgaaaccaagtaacacttcttcatcccagaccaccttctcagcagatgtttcatcgaacactgaataaccagaacctccaaagcaccttggaagggcaatgacctcctcactgtagtagggggcatttcatcgaacacagaaggggccatacctccaagcagaactgggatgttccgcactgctgcttccacgttgcacgtatgatcgtgcagacccttctacttcacctccatcgcctccaacctactgtcgaggcgatctaggacccgcatcaccttgtcccatcgttcctcgcccttctgctctgatgtcggcatcgcagcaagcaggatgcttgtctgagcggacggcatcaccaacgatgttgtagcgaggaaacaccgcagatcatcgatggagaacgaagcctgcatcgatgacccaaccgagtgaacgacacccaggcaactcgtcgaacaggttatctccggtctccgccgccaacaccaccaagtcgactgtctactggagatcgacgagcgtcgatgacgcaatgccgatgccgagagtcgtcgatggagacgggaacccgcgtcgaagaccctggtcaccgcagcaaagacgtcgatgaggaagacacgaaccgctccccgagacaccgaggatcggaagctctgataccacttgtcacgccctttggccggcacggcgtcgccgacgtgagtgcgcgcagtcgtcgccgcgagatcgctggtaaacaacaccgcgaggtgagtttgttaactggattctgt

SEQ ID NO: 84762 - DNA, 362 bp, Zea Mays
cagcagctgtgtgccaaagcgaacacgatccccatacacaatctcgaagacattcatcttatcctccacgtaagttagccaatctgccgcctcgaccggagtaccactgccatcaaaattgtctaacttcatgcccatccactacatcagagaaagaccactaacgggaagaggcacctcagccccaccaccagaagcagcacccatgggaacagcgcccctgggcactccaccaccagcaccttgagcagcacccgtaggagcaacaggaatagcctgcctcagaatggccaactcctgctgcatggcctgcatcacggctaacattgccaccggactcatagaatccccactaggggctt

SEQ ID NO: 84763 - DNA, 331 bp, Zea Mays
ggagtatgcagaaaaggctaaggcaatggcccaactaaggtagattataaaaatatgtgttgggctaagacaaagataaatatgtgttgggctaagacaaagataaatatcccaactaaggtagattataaaaatatgcctaaacaatatgtgttgggcagacctctactaactcttgagaaactgaggaaggtccctgctggtattaaaaggttgcatgactggtacatgcgtgcatcatcagttggcattgatgccattagtgtgcatataccagaccatgcttttattggttcagaccaaaaggcctttcttgcattcgaggatatgt

SEQ ID NO: 84764 - DNA, 316 bp, Zea Mays
gaaattttaagtccttcggctgaagttgaagtgccaaaaacccaaaaaggtccagcagtgacccccaaaagaaaaaggaaggttaatgttctggatgtattggaaacaataaagtcttcgagcaccactccgaagaaaattgccgaagttcccgaagcgcaaattgagacaacagcctctgatgccgaagctacaaagcaccaagctgaaactgaagctgggccttcagagcctgccaaggtgaaatccttgagaaccatagaaaaagaaacaaaagcagcagaacaaattttggctgaagaaactggcactgcca

SEQ ID NO: 84765 - DNA, 351 bp, Zea Mays
aagcattgcattgttgtgtcatttcgtctccctctcattcgctcaccacaccaccaactctgcctacactcattttctttcctttcccttccatgcatgatgatggtttattaggcagcaagtgcggcagatttttgggttcagttacagtcagtgtctggatgaattggcatgcgagaggagacgaagaatacacaaaatgaagggtcggaccaggcagcagaatgtgggaatgaagggaaagaaagggaggagtggtagcttctgccatttcactgctgcacgctatctatctttatgggccaacaagctacagtccaacaacgacgaggagcagtgcatagcacctcc

SEQ ID NO: 84766 - DNA, 1899 bp, Zea Mays
ttaataaactgtctaaatcttgaataaggtgcagatggttgggcagtagacttcagaaggttatatgtaactttagctggtccctcttttgattaatctattctttcattgcaagtatttcaccatcgcctggcgaagtctcatgtacattgagtaacctggaagggtgcagttggatggatggcattgcttaaaggagtggcaaaagccaaacatgtggaaggtgagcgccgagggtgatgagcgtcaagctggggttttgctttgaactaactagccaacaaaccaaaagctacggaggaaccatcggcccatccttcgattgcactacatccatggtctcttatggatatatataccaggccatgggtggcatatgccctcttctgtgctcggaggcttgagcagcagaaccatcaaggcctgatatttttcttcgtggttgatggttaggaacaatttgatcctgcatccaatctaaggtaagttgcttctatgaattcgttcgttgttattgtaatgtagttgcagcaatatagtattcattgttgaggttatgtttttagttttaatggatctagttgctctggtttgatcgattattgaatctgctgttctgcagttattttacctctagactagaacttcagtatcaaatgtaaaaaatctgtgatctagtttcattgaaggatatatgttatgtgcttcatcaaaaaggttagattatgtagcacccgtcatgacactttccgaaaaggcagtagtgctagcgcaaaacaatcaggaaaacatcatttttgaggctgagttggccttttgaattgtctcttttgttttcaacgttttattgcttcttgatagtttagtttttttttcggatgaagggtacttagttataataatggatggttacgtgcaaaactcttgcagaggccagaatataagtgctgctccgtaagctgttatatcttgtgtatacgaaacgcgcaggtctcttccgttctcgtctatcagtgggccattatctcacagatgtgagaaacgatacaaactcaacatgacataaagccacaaacagtgtatcgctcccatataataccatctcgttaattgaaggatgacatgcgactgagtgagctattaataaagagggtcgagctcatttttaactcatatatttcttgaccttttgactaagataaagtgtaatatactaatatttgttcttatccgtttaatatatggtatgtggatcatttgctcattttaatattaaatttatttttaggggtattttttgtggggaagtctaccgtactagcttactaagtcgttcatctgttgcactgctggtagaacatggtccatcccaatcaataccatcaaatataattgtcaccagtttcatgcgtcgtgtgtaggtttgtttctctatcctgtttctcgcctatcagtagacttgttacccacagatggatcgtgagaaaccattcaagtccaacataatagaaagttgcacgcaacacaacgctttcacatagtaccaccctactagcttactagaccctcgtgtgtcgttcagccgttactactggtaggacatggtccatcccaaccaataccatcaaatataattgtgtgccaccagtttcacacgtcgtgtgtaggtttgtttctctatcccgcttctcgcttataagtggaccgttaccccatagatgtgttgtgggaaaacacccaagcctaacataatagaaagtcatatgcaacacagcaacacaacactttcatatagtaccaccctactagctaaaggaggaagagcgagctataataaagggctcgggttccttttcaagtttcaactcatacttttcttgaccttttgtttaagataat

SEQ ID NO: 84767 - DNA, 856 bp, Zea Mays
caacatgattttgttgtgaaaggaattagtatgctctttccttgaaccagaattagtctggtgtaaacagttactaaagtttaataggttccatgtgatggcttcattactactttatttattgtatgtgctacagtgataatgttacacagttgatgcattatttcccttgttcaggtaagtaacacaagggatattccatgctttacctataactgctcttggggctgttttgtgtagtaagtttctaacacaagttttaacagtcaatacttttgggatcgtgtgcaatgttgctgttaaaatgaggtatgacaaacttggggttaaaatgatcagtcggcactgattgctctgaagtattgtttcctcatgctaccggtgtctcagaaacatttgtcatggagaacacaactttgaacatgtacggaggttctctctctctgatggtgccctagctatatatgttgcataatggctgatggtttggttggttttgtgatcgagcatatctgcaacccaacattttaatcctgctagctttttccttgctgcttctttatgtctcaagttccttacttattgggggtcaagttttaaaactaatcagctactatggagattaacacatcaagcttcatcccacggtccattcattcttcgataaaaggtaccttaagaaatgctaatgcattagtgagattgctactagaatagacgtaaatatattgcttagactaggtctaattatgtgatatatatagaaaccattgcaacgcacggacagtcacctagtaagtatagaacatacattctcaataaatagtttgattttattgtttcatggaaatttaat

SEQ ID NO: 84768 - DNA, 1302 bp, Zea Mays
ctcttttctaatgatatgcactaatgttaaggattttacttccagcagcgctggctgaggggtatgtggcaaggacccatggctagtcctgatcacaagaggtccaccatagggagtgacatcacctccgtggccgcccttatggggtcgacgaccacctttcgagcttggagacgactgagaagctttaggaggagtggaggcatgagggcatgaaggagcccccttagcgatagagggcgagggggttggttggtggaggacgtgccatagagagtcgaggtagacgtgctggacttagtgtctaaggtgagctccttaagaagtagcttgttgcggaagtcatggaagtacggaaagggcatggagcacttgatgaaggccttcagatggtcataacaccaactcagaccacacaggaggttgaggataagcatgcgatcggagacatgcttgccaagatctcggagagagtcagacatgtccttcattttgcgatagtactcgatgacagagaggtctccctacgagaaagccaaaaggagacatcgagatggagggtgtggtcctcctagttgccatggaactgggcctcatggtaggcctggtgagtagttcccatcgctcgcggacagcgtcttagagcttggtgaagagggagccaaggatccacgagagcaccacactgtccattcggtgctagaacgagagtagctaggcaatggcatcagtgagggcatggtcgtcaagggcataatgctacagggtgaggagcacctagtcacaccagcgggagtagtgaatggacacgtagtggaggacgactgagacgagagatcggatgcgctggacacccgttgcctgagcgtggaggttgacgataaccacgacctcatgttccgatggaagtgatagcactagggctaccggagaaggctcgacaatagaggggccaaggatccattatagagtgagctagaaggcaagggcatccatcatggagttatgttgctcccaggtgattgccacagcgcgttcgcggtcctgggtaacaaccacaacaaccatggtagcaacgagagcaacgaccaagctaaagtgggcgacgatgacatcgagggatgtatgtaccattagtgggggagagatggggatgtgagggagtgttggagtgaggtgggaccatgctattgaaaaaatggccgatgcaaaatccgagaagggggcaacaacgttacacagtgctagtgaaagggagggcgcacccacacttgggccaggggcatccatggcggcaggggt

SEQ ID NO: 84769 - DNA, 691 bp, Zea Mays
ggaacaacgtccactgcagtttgactcagtggtatcgtccaaaccctctttgttgcaacgagcacaagaacaacaacaacttgatcacctcctctgttattggtagcacatttccggaggaggttattgtggtacacctgcactgcagtgccaggtctcggtatcttattatcgtcaattcgtcaggacaaaactaatctgagttctgcagctcaacatggaggaactggttttcaggattcagattttccgccagtgaaagtaggagttttgatcatacctcacgactctccagaggacatggagcctggagctgagacctatgctctagaggtgattgctgaaaaggagaagggaatggtggtacacaccaatgcatgcctgcaagacctagatgagaagttactacccaaggcgataaattacctgaatcagaatcctgaatcgaaggaataccaaatgtgtttcaagtctagacatggcacggcgcacctttacctggagaagacgagtgcacaaatgcaaaaaggacgtacaagtaaaagcaaaaccacaaagctgcaggctcggaagaaaagggtaattccattcgacagcgtagagatatggaagcaggcctcccgggactatctcaagttatgggttgttcgtgcatcgagcacactacgaagtttattcaggtcttgggctg

SEQ ID NO: 84770 - DNA, 482 bp, Zea Mays
ggagcacgaggaccgacactatagcctctaccgcccaatccgagcccagggacagcttcaccaaggccccgccaagctcctcgagtgttgccatgaagctctactgcaccaggcccccggattgaagctcgccaacaacctacacccgcatgcgcctgttgactggcttgctcctctcgccaccggccgatcaccgccgccatcgagtttgcctgaccaacccgaagctccatgaccagcccccgacacgctaccgcgccaggtgagccacaatttctcgccgtactctaaacattgttccggcaagggtaggagggagcgcgggttgagaaccttagaaacccgagggccttttgcactgttagagaccaaggtgaataggagcccaagggcatagtgaaagagagaacagtggaaaaagctagggggccaagagcaaaacaacgtttctttttcctttttaattggaaatacgttttaat

SEQ ID NO: 84771 - DNA, 986 bp, Zea Mays
caaaaaacaaaacttctctttacatagtggtcaccgatcagtctatgtacacagactgacagacgcttatcaacagataaaatgacagcttcatccagctttgcactatcatgaataccggtacctaccagtactgaaaacacgagacacagagcacatcttgctgtcttgctgattcagccaccattgatgaccatagattgatcattctgagtgaaagcacagtatgccatggtaacttcacgtgtaaacgagagttgagttgttcacgcatagcaatttaagttcactacatcagcactatggtaggtcaaggcaatttcaggaggcactatacagaaactacatttctgaaggtgtctaaaaggtgtgtgtagagtgtgcttactagtagtttagccaccatgaccgaaatgttttcgagctcgtaccaagattacctaagctgagcatcatcccagatctgttggccaccctcgctgtcaagatcaacggcgaccacaaggcagcaagcatccagcactgcacatgggccaaagaatgagctctgtgtcaagtgtgagctacaaccatatagggatcagctaagcttatcataccttcctttttttttctcattcagccactactgcagcctacaaaggatatcataatgggccgacccagtcacccaggacgcaatatgttggtcaatcccaccagttagtaccacctcggtagctcagatgagtagaagataccttaaaagttcagctcaggcaacttgcagcacgaccttacttgaacaggatctgttctataggatcgtactgttgcatccttgattaataaggaggcaagtacttaaacctggttgatgagtaaatgacctgtgggccagagcgtgattaacggccaggattcagtctctgtgctttgtctggtgctgtagatgatcgttcctggtcaggagcccctggctaagggtggcccacaggttgtctgac

SEQ ID NO: 84772 - DNA, 816 bp, Zea Mays
caggcaagtatgacactcattggggaagagagaggacttgtcaaaggcggcaacagcgagcccctcgttgttagagtcaaatgatgagcagtctaaatcacattccttgcatatgtgcgcctcacccttcttcttgtaaaatttcttcttctcgaccttcttccccttttgtccttttactggtcatcattatgaggacaatttgctataaagtgattagttttaccgcacttgaagcaggcgtacttcccctttgatttgttcttattggagtagtccttgcgcccctttagtgcgttcttaaagagcttgatgacaagtgtcatctcctcatcgttgaggtaggatgcctcaacttgcgccaccttgctggggagcgcctccttgtcgtttgtcactttgaacatattgcggcttggtggaggggaggctcttgttggctaacaaacttacccagcatctcctcgggactcatcttggtgtaccttagggttctcatggactaatgaaacaaggttagcatcgaaaacaataaatgatttgagcatgagttagatgacttcatgacccgtccatctcttgctcttgtagttccacgcttggtccaccagagacttgagcctgctgtacatctcttgtggcccttcgctcctcttcatggcgaacctcccatgttcaccctcaattacctccatcttggtgattttggtcatcaagttcccctcgtgcacaatactcaatgtatccaacatttctttggcattcttcaggcaatttaccttgttatacacttccctgcataaggtggctaacaag

SEQ ID NO: 84773 - DNA, 905 bp, Zea Mays
tgcaccgaggtcctcgagggtttgaataactagcaaagaaccctgcacactatttcactgggtcactgacatttacaccgatgccctccatgttctaattcttcacaacccgtggtcctcgacggcaaacaacgatgaaccaagctccggcgaacctgtaccggccataataagcaacggctagccttcccctttcctggacaccgaattcaaccctacacgactatttcccctcacttaattgctagatttgagttcttaatcacactgtccacggtgacagtgcgaactacgaatgaacacaggtgttcccgacgatctagcacggtctagctaaattgaacgggtcgaggagcaccaggagaacataagggtactgaaacaggagagcagagagcatgaacggacctgaaacgagctagccacggcgaggtcatttcgcgcggtgttttggaccgatttgggggaaatcccaaattggggctctctggtgagtaattggaggcacgagcggttggattggatgcttgactaccttgcggaaccgacggcatgctcaatttataggctccatgagcggtggcgactaattcggggaaagacgcgcggcagccggagagaagggggtgctctggcgcaagcaattggtggcttttaccgtggcgagctcaccggtgatcaccggatatgcataacgtgagctactgcgacgtggtaagacaccaaggcacgtggctcaaggttgcgaggtggctaactccggtgagtctatccgaagcgaccgtgactcaggcgggtacggcggctggagtagaatagcggccggagttcatccacagtgcgatatttcttacccttctgtgttatccaactgcgctgggcacgaatcaccgcggcgggcgcga

SEQ ID NO: 84774 - DNA, 982 bp, Zea Mays
ctgggtcgcaataaccagaaaactcaggggccctagcgcaaagtgtcccgagacacagcaaaaccaggccatggactgcgggttgaatctctaaacttataaggggttttctgcaaagtggttacgcgaaggggtatcgcggcatgcgagccgcacgatctaaatcggacgtgcgggattagatggagttccatatgaaccggtatgaaactacggccgtccgattaaagatcgatggtcagggttttatgaagtgagatctaataggggtcgaacagatcgcatccaacggtccgaattggctcggaacaatgcctcacgctggatcaaatctgaaccattcatccagatccgagggtcacacgctcatcttctagatctaatcctggccacacgtctacaatccaacgacactgatgccatccagccgaaccggtatctctagatctaattgaggctgtccatgcgatgatctacggcgagggctactatccccaatcccggtcacggtacccggcggcgcccaggtccgacggtggagaccatgccggagttacggtcaacaggagcctcgatctcgaatcccccacatacacccgtgattaacaaagagcaaggagagacgaacacaataagccacataccaacggtggagagtgtcggcgcgagtggcccgacggtgaatggcggttcggccggaggagcaagtctgcggcgagctattcgtcgggttaaggcgacgcccacgcccgattgctagcctgcacaggatcctcggtcgctggtgaacgtccttgacccctccctggttcctgagccgcaccaatcgatggaataggcaggcggcggcgaaccgagctccgcccacggtgcccaacaattccgcggcggcctgtatcgtaatccgggacggtgagagcatggtccccatccctgatcaccggcgaacgtcccgcgagtgtccccattggtgaacacgcag

SEQ ID NO: 84775 - DNA, 681 bp, Zea Mays
cccctccgtggtcttgtggaaagtccagtaggtcacgcactgtaggagccgtggtgccgaggctaccagcagcgcctgtagccttgcaagttgcaatggacggtatccagtttgtttggaaacgtttttttttcttggttcttctcaagaaccctcgtgtttctggaatgtcttgtgtcgagggtatcgtgctcgcgactgccgtgtccatcgccccatcgtatcctaaccacaggagccagatttgattcgggccttgaagacgcagacaaaagcccttttaagccaagctaacccctcacagccactggctgatattgtggttaggtgcctctcgtcgccccggtgagtgtcagtcgtattccgtcgcacaggatcggtgattgcggattgaaaagcgcctttcgggtgggggtgggggtggggggtctgtactgtgtactactactaccccctcccgcgccgagggtccgacacgtcaatattccccgcccgattccggcggtccgttctgtggctggagacgctttcaaccctcccctccccggcgcctgcccgctttcctctccccttcctctctctctctctctctcggcgccgatcgcagcggcgggcagaacacgcggcgctgttcttgtccgcccctcatcgccggtcagccacgcaaaaagccgcatttct

SEQ ID NO: 84776 - DNA, 712 bp, Zea Mays
gctcggagataaaagctggtccttgggctcctgccgtgaacccctggacccagtacccaagccttcgccaaacaccattgtcgccgccttcaaaatcgtgccacacctatcgtcagacccgaaaagccccgggggaaggtccatattgtgatgttgtgccctcttgacgcatcccggtgaaagattcacgatcggttgtgggggaatttctcaccgtcgggcgcatctaccgtgcgtccgctgttcatcggtgcctgggacctctgctatgcaattcctggtacgtgatgctcatacgtgttcacctggacccactgtaccatctgcgcgtatcagaacatagtattaggtttcaattcaccgaatggctatcaccggtgaggggcgcgaccgcaggatgaatcgccaccgggatagattgcggcggaggtaggagacgcgacctggtccgttgatctgggacgaacggataggattagatctaggataacggttcggtttagggttgctgtagacgttcgatctgtatcgtgtgggcgagattcggtttggggcttttaaatcaggagcgccagatttagatcgtgcggtggtcgatcggtaccgattcgaccgggggtaagtctaatcctagcggtcgaattctaatcggacggcttgaagtgatccataccccttcggagtgcgcagtttgcagaaaggaccttataat

SEQ ID NO: 84777 - DNA, 351 bp, Zea Mays
ccgataagcacgctggtgaccgtcgccttccggccttgtgccgcgtgtctaggcatttccaccgcatcgccgtgacctgctctcgctctccgttgatcaccggagtgactgccacggtgtaggacacgaattcgttgcgccagtaactctccccctctccggccgccagcacttctcggccaaattgagcgccaccgttgttacgctctataaattgagggccgggttagctgcgctatgtcatcacgaaaccaaagcacctgttcccaccctcaatcgttcgccagaactcacgaatttctaacttcccccaaatcggttcaaacataccgcgaagaacacctcgccgtg

SEQ ID NO: 84778 - DNA, 487 bp, Zea Mays
ctggcatcggagaggatgttcccggggagggtaccgtcggtgctggagtacgtggtgacggagagctcgctggagccggagtcgtggctggattgcgtggtggcgaagagctcgttgtagccggagctggagagcgtggtgttggagtcggtggagacttgggggctggggtaggcctactcgaagaagggtcgcctactcccccggctccctcaaagtggacgtactcggtggtgaagtcgtcatacgtcggagtcgtgtcgtcgtccaccgccttgtcccaggcccatcctcgcccttcgttcgaacactacatcgcgcgtcgtgcgcacacacagtgttcatgggtcaaggatgcggtaggccttcgagccctccgcgtagccaatgaacacccctggggtgctcctgtcgtcgagcttgccgatgtgaccaagctccttggtggccatgccaagcctcgtacggtgtcatctcgttgagtgcc

SEQ ID NO: 84779 - DNA, 911 bp, Zea Mays
gttaggagtttaggtttctaaccttgggatcaaaattgggatgttacagcatgtcgcaccgacttaaggcatttccgacttaaaccgattgctccgttagtagggcatagtgatcaccctaagtcatgtaagcgtgagcatgtcgcaccgacttaaggcgtttccgacttaagccgattgctccgttagtagggcatagtgatcaccctaagtcatgtaagcatgagcatgttgcaccgacttaaggtgtttccgacttaagctgatttctccgttagtagggcataatgatcaccctaagtcatgtaagcgtgagcatgtcgcaccgacttaagccgattgctccgttagtagggcatagtgatcaccctaagttgtgtcatgctaatttcgagttgagctcaatctacgtcaattctcaatcaagagcttgaatgcctttggaagatgaaagctttattgacgatgaaaccttctgattacagagtacaatttgccctcgagacttttgaggtatcactaagggtagaactttctgaggtgctcgatattccatgagttccccaccttggtgtcgtccatctgagtaagccaataggatcccggccatgtgacctctgccacgacgaacgacccttcccatggtggtgatagcttgtgctgtccctcccctgttagtactcggtggaggaccaagtctcccactgtaaaggatcggtgtcgcacaactttgtcgtggtagcgcctcaaagtctgttggtatctggacgattgaattaccatgtttagtcgttcatcctccagcacatcaatgtcctctagcctggtttcttctgcctcagctatgctttcaaaggttagcctaggcgccccaaagatcagatcggcaggcaacactacctctaatccat

SEQ ID NO: 84780 - DNA, 349 bp, Zea Mays
agacaacagaagaagagaactcagtttcgaggaaggagacttcgtctacctcaaggtctccccaatgcgcggggtcaaaagatttcaagtgaaagggaagctagctctgtgatttgttggcccctatcctatcatcggcagaatagggcccgcggcctaccaccttcaattgttagaatccatgtcagatatccacaatgtgtttcatgtatcccagctccgcaaatgcctgaaagtgccagaaagtcacatcgaagaagagacaatttagattcagaaggatctgcagtaccgagaaaagccagtgaagattcttgactcagccatccaaaagacccgaaactcagaa

SEQ ID NO: 84781 - DNA, 789 bp, Zea Mays
cagcacatatagtgggggtcagggcataagagagtgccaaacctgccatgttagggggcactatagcacaacatgccctcagaacccaaacagaagcagagcggccgagaacaaggacaaaaagagaagtgccaaaactgtaggttggactccaagaaaaagaggtcgcccaacaataaaaaaggactagatggaaatcaagacgaggcgcagagtgagggggatgagacacagcaatctgggtgcactatggccgtggaggagtcagcagcacacgcggtgattgcaagaattaggagggcgacaacttgccatgttaattaccaggacgaaagtgattctgaatgactatgaatctgactgaatctccaatgtaatatttcaattttatcttattttataactctatgtaagttaaactcaataatgactgtgtgactgttctgaaaacactggacacacatgaccaaccaattgcaacatcgtagttgcgctggttgcaactgtatgtatacactggataatagatgaatctgtgttatctatttacgtctagacatataattaaaatctatcttgttttattatcatataacagttgctactactcatatacaggtttgcaaagtttgccatcatgctggttacacacatagaaataaaaggagagtggtgatggtcagttgcaactacgattacaatttcagttgcaactgtaacatatacgctggttgcaactgcgagcgggccccgcctcgtccgggtggctcctgcctcacctgggagggc

SEQ ID NO: 84782 - DNA, 1358 bp, Zea Mays
ttattattaatgttaagtctattgttatatcgtttatacgctcttatagccattattccataagaccattgcactcaagcaaaaatccaaatcaaacatttcaaacaacaccatcacatggttgttattattaatagtgtaataatatgaagatgttttcatctatcgcggaaactaacttattacaacataaatgaaaactctaaagcagcctagtgatgaatcctagttctccatagcggatcctcttacggggaggggataacgccatagtggggacttgaacttcagggggattccatccatcgagctgagcttccagggctgcgatccttgcatgtgcatcttccagctccatgtgtactctagagaggtctagggtagcactatacaggtcggtattaaggcctgccaccacaacagctagggtgttgaggcgatcttctctagctccacctggaacaatgctggtctggttctctccacgaatacatagaggaagatgcatgtacttcgtgttgtgtagctgctgccggtaggtgtggttgagagaccacagagttcgcctagcagcatcgttgaccgaagcagcgtaggtggatagtggcgtcagagagtcatgtgctgacagaatcacctgcatccattaccctaacattaatgcgagtgatgtagtagcaagcccgaggaggctcgtacactcgcctggtctcatacaggggtcggacgtaggttcccaacgcgtgcagaacatcctgcagcaggttagggaagtgccctgtctcaaacattgaggtgtaatgttcagtgataggccataaccccacataatggtcttgttgttctttgttggcttcatcgttgaggttttcctcatcttcttcttccttgtcatcttcatcatcatcaccagagttgtctgggtcatcgcctccgggaacaggggcttggactactggtgctggtgatgctgaaggtgatgatccagctgcgaaggctagtgattctgccaacggggtgcgcgtaggtagaaaatcttccgagctgtcttccagaataactctgttctccacccgaatgcgagggatatccacagggatttccttgaataccactaggtagacaggaacttgccgtggcagagggatgaagttggtgttgatccgaatggtttgaatggtacagaccatctataagagaaaaatgtcaacttagttgatgtttaaagagctaaggttaataaaatgattttgtaagaacaaaattagcatgttttgaacagtctatgcttccatttctaactaatctaacgacctagagtcagcataactttgataccaattctttcacacccggtt

SEQ ID NO: 84783 - DNA, 591 bp, Zea Mays
cgtctgtgaggctgtggtgttttgggttcatcacagcgtagtggtggctttatccatcgtgcaacttcattttggtggcgagcttcgcaatgccattggattacctgagggcatgatgtcagaggacctagatcatttgacggacgactttgatgccgccacgaacatcgtacttggggaggtatcagtggaggggataatccatggctcaccatagccgtcttgctaggttatgacctttctttttacctcctggtttgaacatccctacggttacctaattcatttttatgtgcgtgggttttgggtctccctgacccctttccatttcgatgatcttatatctggataggagggagggggtgctttcgtgcatcttttacgcgtccgctatgcgtgtgcagggtgagcctccgagtctctgttcgatacagagatccgtctaggggacatgttctatctttatatttttactctctcccacaagtcctgttcgcggggatgaggagaggtgagtcgtaccacacttttctcgatgggctagaaatggtgctcggtgagaagcaatcgggtaatccgagtgaagcccta

SEQ ID NO: 84784 - DNA, 802 bp, Zea Mays
gcaaaatcgatatacaaaagtcaaaatgagttataatttagaacggagaaaatagccagaactcaaacaaactcatggccccatcggcattgcattgccaagtcacgctacctagttaggcaactattggtgtgttacaatgcctaagtgatgaaattttttaatcatctagacgtacattccttagaatccaatcgttattagaaataatagtcattcaagcaatctagtctgttcctaaaaaaagtattgacatttgcttttatggtagcatagcattatagaaataccatgtgagtggcaacagtcacaagaaatactaaaaaggtcctcacatggagcgactttctcaaactcatctgcacgtctattttcattttgcagtgtgaaacatgtggcacaaggctagatcgagccacgttattttcaggtaacacagcccaccaggtattcattcatatctagcttaacttttttggttctcatctacttatccataggagagagggaatcatagcgactaaattgaaaatccatattgtgacatccatccggcataaggataattgcccgttgtagctaggacgtgcgcttcattttcccactttcctttcgcctcctatttccaatgcatcatgcatgagcctttctttttaattctactattcatccatctatcctcttatttttgggacattgttgagctagaggtacaaatggagactactactatatttatattgacctggaggtaattatttgtttttcttcttttcactactatataaattgttaattgttg

SEQ ID NO: 84785 - DNA, 718 bp, Zea Mays
gaaaactttatccgatttggccccggatttagtttcagcagtatcttttagatcacgcaagaagaggactgtacaagaagctttagttaacctccaatggtcagctgatataagggatgatctgacccaacaaggattctatgactatttcaggttgtgggatattctgcaaggggtgcatctctcccctgaagtagatgatcaacatatttggaccccctcggcttctggtgtttattctgctaaatctgcttatgacagattgttagtgggtgctaccagttttgatccgacaaaacgtatatggaaatgttgggcgcctcctaggtgcaattattttcctctggttggcttctttaagccgatgttggacagcggaccgtcttgcaaggcatggtttggatcatccggagtactgccccctatgtgaccaggaaaaggaaacagtgcaacatctcctagtggcttgtgttgttgcttgacaagtgtgttttttccatcctgggtttgagtggcctccaactcctcactcctgggattgctgatgaagtattccaagattggtggaaagcagctgaagcaagagtttgtaaggagaagaaaaaaggctttaactcgctggtggcgctttcttcttggaggatttggaaacatcgaaatgcttgtgtctttgatggggtgcccccaagtgtatctaaagtcattcaggacattaagg

SEQ ID NO: 84786 - DNA, 276 bp, Zea Mays
gtcggtctataatcagcagcagtagaagcatccgcctttttgggaatcagagtaagataggcagaatttagcagcctcaactgatgagcattcccctgatgaagaaaataaagggcttccatgagatcagctttaattaaatgccaacaggttttatagaaatgacccgtgaaaccatctggcccaggcgcttttagatgaagggaagagaacatatgagtttgttccacctccaagctatatgtgtcatatgaagtctttggtattgtgtgctag

SEQ ID NO: 84787 - DNA, 2757 bp, Zea Mays
atttttcaatacacatatagtggagatgataaggaggaatgtcttattggaacttggttcgggaagagaagcattgaggtaatatatgcacacaaaattaacattagtgatggtctcagaaatttaaatccacacagatttatttaagtcaagggattttttttgttgttccttgttgtatctgcctatatttctaataaatgtgtttttgaggcaagttactccatcttacttggttttaggtggagagggtttcagcgttgtcactggctagcaagatggttcaggcttccaagttccaagctatccaggtaatctgacaattattgatatattaagggtacgtttggtttagcattctgaaccaaattcgttgccaaataaactggaacctcaatcaaacgaatacaatagcagaatagattcctaaaatctgtagattcatattgttcaattcagaatcacctcttaccctagatttcataaattattgctatccatgttaccaagctatcatacttttatagaatctacaattcacagttgtttcaaccaagcatattttacctttcccacaaccgtcaccctacaatagctttctcgcaactcatagctaaaaccatatttttaggtctctcatttattttttaacgcacaggcccgactttatgaagggaaagaaccaattcagttctttgtcatatttcaaagttttcaactattcaaggtttgcttcaagttatcagtcaaaatcctagacctattctaaaaaatctcttacttcattgtgatgttctatttattttctctttatctgaattttcaatatagggtggacttagctctggatacaagaactttgttgttgaaaatgatattgtggatgacacttactctgaaggtgggattgccctattccggattcagggttcaggatcagaaaacatgcaagcacttcaggtagatccggtaagtttgtggtcatactttggtttgtcaagatatttgtgagaacattggtataatcttcataaatgagcttcttaatcttgctcatctttttgttagctggcttcgtccttaaactcgtcctattgttacattctacataatggaaacacagtgttcacatggattggcaatgttacgacctcattggatcatgacttggttgagagacaactagatgtaattaaggtatgaatattctttctcataggggtgaatatattcatacttatgcagatttcctcatgattaacacattagtaatttggtatcgatgtaaaattttgactaaaactctctgcaaaggttgtccatgtttctaataaaaaatagtctccgttatacacgaagcaatgctcaacaacacttttgttctttcacatattagtatgtgctctaatggcttaacaaagcagaagacatacatgtgagagttaatgatttgatttctatgtttgatgatataagtctgatagttaccgatggctactagtattgggccaacatattcttggtcttgttgtaatttatatttttcttagtaattaagtaaaagaaaattagccaagcacatggatggagtgcaaatctacatgactgatgtttacttggtttagtttttttgttacaaatgtgtattatattgtagatgtatatcctattgagagcctttactatgttctagttgtgctacatattggtgcacttgtgttagttagattgtatgatggcaaaaaatgaataggtgttcctctggactcagatttagtataactaaagattggatgtttgtaccttgttataatatcactattgatgctgaatcaaccaacacagtggtagggctagattgcctaaggctgcacatggcctagatatgtaaccaagttaggtctaaacggcaaggttgatcagcatgtcgacgagactgatttaatactagttattcgtctaaaaaacccatgaacgccacctataaaacccattgggaagacatgcatgactggggtcccaacgaatctcatcgagtgacgcttgacaacaaggggttagaagaggtaataagtagtaggttgatttccaatcgattgtgtagttggatacctaaatcgtccatgatcttgcaatatatataaaggggtggtcgtaggaaatctcccaatacataatctacaagttttccacgagaacatagaattttggatcggaattatgagaactggacttgaacagggaacatcagaacttccaacgccaactcctgacacccgagagcctcgcaagttagaacatctaacatcttagcctcccaagtggatgtacctcctctgagcctttttgctatcaacagtcaccctccttgtcataattggctcgtatgcttttttatcataatggtaggagctctgcctttcacttaagaagaaataaaatttcatttcacttgtatgttattcatccattttctacatatttgaattcaatatgcttttcctttaccttaacttttctttgtgcttctattttttattgtacagccagaattgccttccaggtcactaaaggaggggagagaaaccgaccaattttgggaagtactgggcggtaaatccaagtatccaaaccaaaaagttgaaagagaaaatgaaaatgacccccatcttttctcatgcatcatatccaaaggtaactgcaagcaagaattttctaagttgaattcactgttcggcatctgctgacacttctctt

SEQ ID NO: 84788 - DNA, 514 bp, Zea Mays
catttcctacagagggcacgacctatttttctacggtggtcccgctaacatagttctaacgtcgtcttctggtacgtgcgtaatcgtactcccagtacggtggatcactctatttatccgatatacagttcactgtagggattccaatgacgaggttccatgtagcagcgcctgtcaggacccatggggcagagttaggggatactaagggtcgtatgtggcgacgactcgtcccatcgttagagaccacgtcattcctccgacgcgtcatggcatcatctaagatggtgtgtggtaatgacgtgccctaccgtgtccggcgtgggataagagtgcttgccttgcctccacattagtcaagtataggcgtgctcctgccgcgcgcgtgacatgaggacattacgttggggcccacaggtgtactagccccgtttgggcctttacttctccgcctcgcagagttgctcggtgggccttggttggccagtcctgctcgcaaagttgctcagcgaga

SEQ ID NO: 84789 - DNA, 606 bp, Zea Mays
ctctgatccaaacttcaacaacaccgcgtcacaaaactcatcccacgaacacggaccatactgaatcttaaaaatctgaaaccaacttttggcattccccttcatgttcaacgatgctgacactacccaaactgactcagggacccgatacaaggtgaaataatcaacacattgatcaatccaaatttgaggttcctccccttcgaatattggaaaaggcatgcgtggtatgggtagatgccctccttcaaaatcctcaaccctacgccctgtaatctctctctgacgactcaatggcacactcgcatacctgcgatttggacctggtggtgcaaccagtggagatggtggagcctcgccacgataacgtccattgtgcatggactccaccgactccatgtcccgcaccatctgttcaagacagagttccgtgagcgccttcttagtttggtccaactgctgcacgaagcgaacccgttcttccatcgcctatcgagccacatcggccgccagccccacttccgccagcaactgttgttgaacttcatccatgcccatcaccttctccgtgagccgatcaagttgcaccatcatccgatcccatcg

SEQ ID NO: 84790 - DNA, 474 bp, Zea Mays
ggagagggtagctcaccacggtagataaggtctgacagtgaatggttgagctccttcgaccaaaggaatggtatggtcacattctctactaggtggcagaccttgaggatctaaaaacaaaagaaactgttgcaagacttcatgcacctgagaaggtatttgatggtgttgtttagtggaagaaggatcattcaccagcataagctccaccataatacacataggcacttggacagactgactatgcaaaataatagtagtccatggtacggaatgctaacaatttctgagctcgatcgactctcatagggttgatagtctataactagtccattccaacgaccatatcataaaagggaagtgataagaaagaaacatcaaaaaaaaaatgcattcctgaacctaccattgaatttgaaacaacttgtgttgacaatgaaaaaatagcccaattactcacctgaactctcaaag

SEQ ID NO: 84791 - DNA, 443 bp, Zea Mays
attgttttctataaacttagtcaaacttaacaaaacctgacttggttcacatctagaattgttttctttttttgagacggagatagcatatactcgtataagatcaccattaaaataactttgtagaatatggaatgctcgctaactttatggcatcaggagataacagaatgcatgatttaacatgatactctgaatcaatgcaaatacagcgataatagtgctggataagaaatgatgctatgggtcatgagtgcatagaaaaaggcaatctgcttattttgttccaaggtatgagaaaacaaaaggcaacatttttatttccagagaaagcaaagtgcaaagcgaagaaactcgcacatgtcctgaagcatatagcatcgaagccagattttctttagtgaacataacccagctagaaggtaaacagaacgtcatgttca

SEQ ID NO: 84792 - DNA, 590 bp, Zea Mays
agaacatacccgggccttaaccagggcccaggcgggggtccggtgccgacacgtgtccagacctggtctggtgggatccggacctaatcgcatgtactcctgctccccgctcaggtggaggcccgatgctgccacatggcttactgcgcgcggtgtaagccaacaggcgaaacctggcataaagcctctgggctacgcgcgtctttgcatttattacggataagacgtgcgcctgtccattccagtgacaggcggcacgcccggtccacattgcgtgggccgtgttgttactcaccattactcgcacgtttccaagaaaagggttactgactatcaatgctgcatggactgcggtcatcatgactcctgctgattactcatgcgttactaaggcggaggatctttgtgtgctgtcagcatttactattcacataatgtattcctaccattatgctcctgggcccgcatgtcggggctcagcatccttgtatgtacctcccttaaactataaaagggaagggacacagcgttacaagggacacacgctcgatacaacttacatacagtggaggtagggtattacgctcctg

SEQ ID NO: 84793 - DNA, 531 bp, Zea Mays
ctacgcgcatgcaaggaatggacgcatgcgggaggtgggctggcgggcgcgctgcggtggtgcatggctggctggttggggcttccagtatgctatgtaagctcatggatcccaatagccataccatatatatactcattatccaagttgtacgcagtcgataataattgattattactgaacaatttttggcaataatcaattattactgatcaggtgaagcttcatcttagatgacaaaaggcacatacatatatatggcagcctagtgcatcggaccgcatacaagacttggtcatgtggttcactggaccgcctacaatgaagatagaggtctcgagtttttggctcaaattcaccggacctcgagggtctggcgcaacggttacctcaatagtagattgttggccaacggctagttgatgtggcaccgggtctggtggtgcaccggactagtccaatgttggccagaagaacaaggctcctgtcacgaccccggagacactgctacatttgaaggtccagtggcgc

SEQ ID NO: 84794 - DNA, 542 bp, Zea Mays
cattcatcttatcttgaaaagattttatcttatttcaatttgatctagatccaacctaatctaacatgatctaatccaaattgagttacttaaataagtcagataatgttggcgacaaaaattaggccctaattctataaacatatcttaccctaaattaataccttgggctaactcgtccgtaaacaacaacctaacctacatcataggttgcctaatccatttattcaaaaaagcaaagtaaaactctgttcaaacctacctacctcgtgtacctcggttatcctagctatatgtccttaactcggatggcaactccaagaagaaaggccaaagaagaccaaccacgtcaaaggaggataagcatcaactcaagtcttcaaagatcaagctggatcgctagaggaatcaagatccagagttcaggatgaagtctctccttatcatacccttgccacaacctccactggtcataatcgtacctcatatgacctaataaatggctagacatacaatattcatatctcccaaatcatctacta

SEQ ID NO: 84795 - DNA, 466 bp, Zea Mays
agtaagcaccctcgcatgcaggaggcttatgtataccgagactttcgtgttctatcatgcacggtttttaggtgagatcaatcgatacatactctttacattctagattgtgcttcattttagatcttttagacatgtaactgttgttatacatctctagataaaagtaaaaaaaaacttatagttcaaattgagtaagtagcatcttgttttcggagtgtctagtttttatcaagtatgaaagtatctaggtcactaattaggtctcgatggttaataacaacactagattattataactaacactagttagatgtccatgctaatgctatgataaatctaaatgtttataccttttaagtttggagcttggccaaatgtttgtgaccatatattgcaacagaagcacacactttgccttgaacaaagtctggaacctaaacaagagtatccatctagcatttcg

SEQ ID NO: 84796 - DNA, 622 bp, Zea Mays
gttcattaaacaaacagcatgacaaaaacaatgcgtgcagcccaaaacaacaattaataaattttagcttctatataattcaagaattgtcgcgttttagagaattgaaccattctaacactttaccatttgttagagttaaattaatcaaatgatgactaacaagtagacttactaatttttattgaagtcatttcgtgcactaaaagtaccatactcaattaacaacgcattctctataacaatcaatattgaagcgcttttcaccaatagtttgcattttaacttagacatcacatgagaactactacttttcatccgcgaccataaacatacacatttagactacaacaagcaaatcaccgcgactacaagcttaactaaagtcatctaaagagtcggctagctagagcaacaacacagtctgctagacagcatacacgtcggcttgtctattattatcaaaattcgagacaatatatatataacaatcacttaacacaatcaactcctacctaacatgagttggctaatgacgtgactatttcccaattaccatcacacaccgcctttcgccatttttggataaccggcactacacacaactattataatacatttt

SEQ ID NO: 84797 - DNA, 391 bp, Zea Mays
gatgtggatgaggaaccactatcagaaacacctctagaggaagaaaatgtactttcatcaaaagtaacatcacgactgacaatcaccttcttaaaatcagcacacaataaacgatatcctttgacaccagaaccatagccaataaaagtgtatttttgagctccaggcactagcttcccattgttaacatgagcataagcagggcaaccaaaaattctaagattagaataatcaactggtttacctgtccatacctcttctggaattttaaaatcaatagctgaattgggagaacgattgatcaaataggaggcggcattagcagcttctgcccacaaaccatgcttatcccataaaccagcattagaaagcatgcaatgaacacattcca

SEQ ID NO: 84798 - DNA, 1025 bp, Zea Mays
gaaaaaaaaattgacatatgcatagtagtaactctctcttcccctagcagatggcttcggataaaaccacgcctaccgcctccgagattggagcagggtttcccctaggagctgaaggagaagccggtggagaagggagtgagacccacctccccgcacctccggagctgccattagatttagcccaagttctagccaaccaaacccgactcattgaagtcctcactagaagtctggaaaatcagcgcccgaatggtggaagaccacaggacaggatgggagattttcttaggctcaagcctcccacattcgctggatccagcaatcccctcgatgctgatgactggctgcacacgataaaaaggaagttagaagccatcggattcctagagaatcagcgtgttcaattggctgctcatcaactttccaggatggccctagcatggtgggataccttcagcgctgccgtcagagatgctacctgggcagaatttgaaactgctttccaagagcaccatgtgccccaagggatcgttcaactcaaggaagatgaatttcgggaactaactcaaggtggaagatctgtcagtgagtacgtgcacaaattcacagaattggctcgctactcgcctgatgacatcagcacagaagccaagaagatggcccgcttttataaagggctcaggccagaactcaagaccatcctagccagccaagatttcctcagcttctcgcacctctcaaacaaagccatacaagtggaaagggcaagggaagaagagaaaggtcacctcaagaggaaattccaagtcctccgagctcagcagcaagactggcaccagagaactcgatcatttggatttccacccaagggaccaagctacaacaagccagctggacccactccgtcatgtttcaatcagcagagtcagagctcctttcaggccccctcagtcgcaagcaaccaaccaccagcaaatgcctgttggcactgcggagaccccagtcacttcaagaataactgc

SEQ ID NO: 84799 - DNA, 327 bp, Zea Mays
ggcgtggaccgtccgcactctggtagatgaacctatgcatcttgcacatgcttttcaagttattatattatgattattgggattctttatattctatttcagtggtttggtggtctgaagaagaagtttgcagggcgttttttgtctaagcatcgtcgtgccgacgacatagattataaccttgccaccgattcagaggcccaatcattagctgagggcagtgtctctttggatactgaagatgcacctcacactcatccggattatcctattgacgtcacaggatggacgtatccaaaggtgaagttttctatggctgaatattcc

SEQ ID NO: 84800 - DNA, 405 bp, Zea Mays
caaacaccggcttccaccgagggtacgaccatcccaagctctatcgcgttaacgggaaataaggtccgctatctagttgatgacatcacaaggcctgtggcatgcacactagttataagatatggtattaacaatcagcgtacaaagaaagtagccacaggccttgcgatcccaggacgcaagttccatggaaacgacattctagaagaatattgcagggtagaagtgacgacagtcgtccaaggatccgaggacgacatgctagacataactggtcccgaaggtatcgagacacttggacaagttatcaagaattttatcctttggcctcgaagggatgtcgaattggttgatccaccacaacagccgtcgtcgcaggcccaaccgtctccgccttctcaaatt

SEQ ID NO: 84801 - DNA, 971 bp, Zea Mays
agtcaggtggacatagctcggagtgttcatgttcccaggtcgcagaccgttcgatcgaggtcggcagaccgttcggccataagacatgtgtcgtctgcaagtgcaaagaaaggggatagtttgcccaaaatagctagtgtcatttggttaaataaaagtagtgctcatgtgtgacagccctcttgccattctttgcacgcattaaacacacttgagtattactttctctcgtgatcttagcttgggattgcattctagtgagtggtttgagtgattctagtgtgttgcatcatcagattgatcttgaggcactaggtgaatcatcaagcgagcatcatcagcttattactcttgcacgtcgtcttctcctagacggcttggtggtgactccgttgaggtctttgaaaagcttgtgaagaagccgtagaggagattacgagagacgtgcacttgcctcgccgatgcggcaaaaaactataattagtggaatcgaggtttgagtgattccttaaccacttggctcaaggagcaagtgcgtgcattgaattcgccacaatttatattagaggtgatccgtaaaacatagagacctcggtaaaacatctggtgtgtccttgttgatttaattattacaatctttatcctttgtacttatcattgtcctgctaattaatttaaacacttgttcatcttaggttgtagagcgaattttagctagatataggctagaggatttaattctattgtcattctaattaaaatcttcaaatgtctttgattttaattgaaaccgactatttactccctctagcggatatccttaatcttacaaccacttggtctctccatccttcacccttgcaagcttgaccgacgatccgtcgtgcgcatgcgccatgacccaccaccacgatgcactccacagctgagtggacatcttcttcatgcccgggcggggggcatgtgccacc

SEQ ID NO: 84802 - DNA, 430 bp, Zea Mays
gaagactttaagcagggggatgcatgataggaagacagatggatgaagcaagctaagagggtcacgtccaaaacgctgaacgtttgtagctttcaaccacccttttgaagaagaagaaggaaaaaaaaagatggtgtcaattaagcaacgacagacttggcgtctcagatgagagttacgcgagacgaacacgaaacgaacagcttttctgttgcatcacaactcacaagtgttacgtttgacctaatcctgctttgttggatcacgcacacgacagccgaccacgttcctcgccggtgacgtgacgtgacgtgacgtcggccgcttcaattcaccagctaagctaagggggttccaccagcaacatggcggtccgttggtaccatgattcctgtgaaatggtcgcgtaacgctgcctgcctgcctgcct

SEQ ID NO: 84803 - DNA, 779 bp, Zea Mays
ctgcggggatgtttggcggcttcggcagttccattgcgcatggtggactcagtgccttcgactgctatgatgttttctccactttcggctcttctgtcacatttgtcctagctttgactggcacaaagcgacttggttgagagataggagtggccccctcaattagcttcggcacgacggccgtttcaatgcgcctaggtcgacgcgtcaaaactttaaccttttttgacctcgacgcgctagaagtcgtcaaggtagcagctttcctcttcttcccttgcttccacgaaggataacagtagtctgggtacacaaacccgatgacatcaaacaccctattcaatctctttttgccccaagcaccgaaagcagttgtcatagcttcatcttcggccttcgagtatgctccaagtagctcgtcgctggttgcctctatagcatccagccagtcatcatttggttcatcaaattggctcctgtatctaaaggtatactttagataaaccaaaccattttggctggagccaacgacagcctccttcggcatttcccatccatgtgcaagcggccacactctataagcaatatgttcttggaccaagtctcttgtgccgatgtaagtacacactgtattaaaagctacttggcacgcttgcacgtcatttccaagtacaataattggcctcatgatgccgaagcgagaccatatagggcgctgaataactctttttatatcttccctttcactcagatcaaccttcacatagaaccattcttgc

SEQ ID NO: 84804 - DNA, 427 bp, Zea Mays
acctctaaaacgccgatgtcgccctcagtcactcggttgttattcctaaagcggtgacgtggctccaaaggattcggctattacctctaaaacgccgacatcaccagtaacggctcggtcgttacatctaaaacaccgacgtggcccgctaccactcagccattacttcaaaaaacgcaaacatcaccaataataactcggctgctactaccaaagcactgacatcacaaataaagcagtctgaagcgtgatccgatgactccaagttactactcaagcgttgcagacagaaaacatcatcggcagtaaatattacaacgatcggcgactgaccagaaggcaaaataatgaacacataagtgggacgaaatcattcttcataagggaagcattacggaacttacaaatcaactcattatgacctgac

SEQ ID NO: 84805 - DNA, 282 bp, Zea Mays
gaagagggggtcggctacggttggggaggggcggggctcccatccatcggattgagatcaaaggctcaaacacgctctcccatctgagctcccgaccccagcggaaaaaatgccaaaagatctactgtttccctaaggaatgcctcctgaaactccaaaccccaatgccacagaacatgaaagaaaatagaaaaataaatttaacttcttttcagaaaattgagatatcacagtagacgaccagaagcatcaacaacctcagaccgtcagaccacaacgttc

SEQ ID NO: 84806 - DNA, 479 bp, Zea Mays
aacttgacatcataacatcgtgtaaacaggttttgatagtgccatatgcagtctgggtcctgaacctgcattttttagagtttatagatgagttgtatgttgcaacatatctaggaatagaaggcaaatagggatttttggaagatccttagaatctgaactgtttggtatcaactaatgggactataattacttatggtcagatataattttaaatctgaattgtaaattacaaatgttcagtaaatatttttcaatgaggatgcataccttccattttgtaataatctgaacatgttttttgcacagtttactcagcgagtgtggcgtgctggctcttaaatatcagaaatctgtatgacacatgtgcacagaagaactataggtcacaaataaatataaatgagtatttgcaaggtagagtacggagtacaggtgctgttcatatcagataattatgtaagtatattaaataaggt

SEQ ID NO: 84807 - DNA, 271 bp, Zea Mays
caactagcattttatgtagaggaaaccgaaggccaaccttcataaaactcttgaaaacaaccacttcatcagcttcaggaagaggaataatgttctcttctccagcccccacaatagatatatcatgaaaatattttcccttcattgcttcaatttgtcccttcttaacggtggattttccaaacataacatgacttggcctccatggctgatcttcggcatcatcgttgtcactctcgacatcaaagctctcgctgtcgcttgagtctcc

SEQ ID NO: 84808 - DNA, 627 bp, Zea Mays
gactccgtggggcaggttgttacaaccacttgccgcaatcctcgtcctcaccgatgagctcgcagactgcttcaactgcccgtgaatccgccgccaatataggcttggccatcggtataagtaccctatccgtggtcccgagctcaccaatcgccgccatgctcgggcaaagccaagagagagagagagaccgagagcgaagagagagaaggagggggaaggggatgccgccgtagctgggctctagggaggggcactgggggattggaattcgccgccaggacctcttctttccccacggaaccactgtgcgccatcgaagctcagcgacgggagttggaagatgagcggtggccgttcatcagaaaatgagcgctcgggattagatcctgggcgtaatggctcatcgtccaatctgggccgttgatcccctgatggacggattctggtgcatatcaaatatccaccacagatcgtgggatcgatggctctgttagttgctcggtttagatctaatctgagctgtcgaatggcgatccaacggtgccaatctgctgataccccttcgttatgcgtcatttgcataagagaccctatagaattttgaaaccaacccgccgtccgaat

SEQ ID NO: 84809 - DNA, 367 bp, Zea Mays
agcccgcatcatggtgaatcacagagtgcatgtccggtgatcgccggaggagccgccacggtgaaagccatctgtcccaagtaccagtgccctttttctctccggccgccagcacctttctgccaaattgagtgccatcgctattgcgctctataaattgcggccactgtgagctccgtagggtagtcaagcatccagccaccaagaatcaccctcagttgatcaccagcgagctcgaattttacagttcccccaaatcggttcaaacacgccgcaagaacacctcgtcgtggccagcacaaatcaggtccgatcatgttgtctttggtcttgttctagcatccctgtgtgttctgataacttatcg

SEQ ID NO: 84810 - DNA, 762 bp, Zea Mays
ctggatcactctaattcagttggagttccattattcaaccaacaaggctcaaaacgctttgttcttgtgtctctctcttgttgagtttgtgcgagttggacatttggctatggctcatgagatccgatccacccttgagagatttcatgagagcaatgatcatgtaaagacaacactctttgagatgtaccgacaagagtatgaaaactttgtgtagttggcaggagagaccatagacactatgtttctcagttccagtcgattatcaaaaagatgtgtgccaacaaggcacaacttccctatgatgatcatgagagagcgctaaagttgctacatgctctagatcgatgggtttgggaggtgaaagtctcgacgatcatcgagtcacccaactatgagactctcaccttcaacaagctattcaacaagctcaagtccactgagattgaccaccacacccgagctaagatcgagaaccctggtgcaccaaccatggccctgatctctagaggtggttctgcttctaacccctcacctgatttgtttgttctgtcttctttgttttctatcttagaggagcagctagagagccttagggatctagagctggcgcttagggccattcgattcatgcggtttcacaacaaccaccagaatcggtggtgtggtggatcgaaggatggatgcttcaactacagtgactccgaccacttcattgccagttgctccaagaagggcaagcacgaggctagctcgtgtgac

SEQ ID NO: 84811 - DNA, 617 bp, Zea Mays
cttttaagctaaagatccaaaaactacaggtcatgcccaaagtagttatgccatgcccaaagtagttatggccatgccacgatgttgtataatttacatattttattaatccaaattattggtcatatacttcatcaaactaaacaacaaatagtgatcgtccatccctccaaccaaacatgactagggatcatttcatccctcaaaccaaggtccacaccatcctcaactggcttgtctcgcaaccgatcacatgctaagtgatcatgaacaatataacgatcaaccttaattttatgttatatcctgaaaaaatacaacacaatcatcacaaacatatataatatttgaagaacggagcctacgagatcaagtaatctagtttgtggctccaataactttttttctggttcactgaataacgtcccaaagattgaattgtctctatgcgcgttacaaaaattggcgttacaaaaactgtagtgatgcaggagatgtgcaatctgtaattgatttagcctcgcatccctttatagctcctccaaattgtgcatcactacatataagacttcaaacgtgtgcgttgcatcgaggatgggcatgcggttccttctata

SEQ ID NO: 84812 - DNA, 315 bp, Zea Mays
cgtagtatgcacacatcttcgagtcgcgccgctccatcgccttgatgactttgtcgacaaccactttggagtcgccccttcctaggaggcgtcgtgcccctacctcagccatgattcggagcccattgacgagggcctcacattcggtgatgttattggtggcatcgaagtggaggcgaatggcataacagagcttgtgtccttgaggtgatgtgaggacaacacccgcgctgcttccggtctttagataggaaccatcaaaatacattgtccaatactctgggtcctccactagtggttgttcctgcacctccg

SEQ ID NO: 84813 - DNA, 403 bp, Zea Mays
cgacgatgacgatgagccttctggcaaaagggcaaagaagagcacatctaaagtctggcaatatttcaccaagtattgggtgacagtggaggtggatggcaagcaagagagacagaggtgggcaaagtgcaatttcaaagggtgtcagaccaagactagcaagcatagagctaagggaaaatttggacaactggtttttggacacatctgaataattaccaccatgtaaagaaaggacaacagcagctcacaaccggtaaggatagtgagacaggaattgctatagttaaaccttacaagtatgatcaagaagctagcttgaaaaagttctatgaagctatgattgttcatgagtatcctttcaatatggttgagcatgaagtatttgtagaatgggtcaaat

SEQ ID NO: 84814 - DNA, 705 bp, Zea Mays
cttggtggcggggctctggcctctgggttctcgttggtgcgtcctccttcctcccgtcagtacgtcgtatctacatcttctatgtccgtctcggtctccttttttgtgtttccctttcccctcatctagggttcgacctcctccttttataggccaaggagggggacgaccaacagtggcttcctcaagaaggagtcatcgggcgatggtaaaaccaagcattttgccctggtgaagccatgtgtgtccatgagctctagggtcgcctggtcgtcttgtattttttatagcggacagtgttggcagcgtagggcccgagcaccatcattcaagctacgtcgacccttggtattcgtagcctgggcctcggtgcggcttgtccagttgtgcccatcaagcggtctacccacaggcctagtcccaatagaacatgagtgcgtcgcagaccaggggcataagggccataaatgcgctgcaatccaaggggttcataggttatgagtgcgctgcagcgcaaggggttcggaggccatgagtgggaagtggacagatgcaactgccgtggctcgactccaggtgtagttaatgcgtctggtcacttatggcgggtcggtcttgggccgagcgagggatccacttgattggtttcccttcggctcacatgaccccctgtctagctctgccatgcccgaccccaggctctat

SEQ ID NO: 84815 - DNA, 419 bp, Zea Mays
ttgatgatgaagctattaaaagaaatgagaaagaatctcatgatgccttagaagaggccaaaagaattgaagaagctgtcgagcgggccaaactgataggtatgccatttataactcggcttcgtaagtttttcagcttcggcactaatagatgtacgtgtttcaatgcagctgagctttgttcgcctcccgagccatttaaccctgaagttgaccctttcatcaaggaggcgcttcatataatcaaaattgctaatgatgctatggacaaagctgtcgacaagctgcttaacgaagctgtcgacaaagtcctaaaggaggactcaagctttgtattttcgatagtttaatgtctttgtgtataactcctggttttgtaagaaacatttataaacaatttgcatgaatattgatgtaat

SEQ ID NO: 84816 - DNA, 1585 bp, Zea Mays
acaaaacctccaggaaccatcaaactttttcacaagaagcactggggatgaaaaagcggaggtgcattctctaatgataccttgctgtaacatagcgtcacactgctgctctatttcatccttcaacaattgagggtaccgatatggtcgtactgccacaggtggagtaccgggcagtaatctgatcttgtggtcatggcggcgagatggagggaggccgtgaggttccctgaaaatatcctcaaaggaatggagcaaagcctccatgagatcacctcctgatgctaaagctgcacactatggtggcagagcaccaattccagtccactgaatgttactgcctcgatataagaatgacatggagagggcctcaaaattccacaaaattgttccgagagtgcgaagccaatggacacctaatacaatgtcaaatccatccagtggtagggtatagaaggatatcgagaaatcagcttctccaataaccagaggcagttgagtgcacacacccgcagtagttacccgatctccgttggccaccttcaccgtcagacctggacgaggttcaacttgaagctgcagctgactgaccacagaatcattgatgaaggaatgtgtcgaaccagtgtccacgagggccactaactgacggccatacaaacaaacagaaagtttcatggtagtgccaatatcaataccggtgagagcatggagagagatgccaacatcatccaatgtttcaccaccctcatcatcttctgttaattccagcaagaaaacccctttgtttgcacatctgtgatcggcagtatacttttcagtacaatggtagcactcaccactagcccgctttgctgctaattcttcactggaaagacgcttgaaccgagggcgttggttgccaacaactgatttaataggcgtactcacgccacgggctgcagggcgcgccgtggagtgtgtgcttacagccagctccatgcgacgctcatatgctcgagcaaggttgattgctgactgcaaattagttggcccttggagttcgacgtctgtcctcaatggctcacccaagccagcggtgaagaggttggtctgttgacgctgtgaaagattgtcacaacggcaagcaacaaggaaaattgacgtgtataatcatccactgttccagtgcgatagagatccttgaggtcagcgaggccattcatgcgcagtggggggccgaacctaagattgatcaattcggagaaacggccccaggtaatgtcgccgtagtcgcgctcgatggtgtagtaccattcagcggcaactccgtcgaggtgcagggacgccatccagacccgttcctcgcgcagtgtcctcatgccgcggaagtagatatcacattttgtcagccacgccagggggtccgattcaccgtcataggacggaaaattgggcctgggccaatgtgagctgtcctcccgacggaaggggccatccccgccgccgccgccgcgcagcccctccttgaagcggccgccgtcgttgggggattttggaacccctgaagatgcttcctccgtgggtggaatttccacgcgggcaa

SEQ ID NO: 84817 - DNA, 638 bp, Zea Mays
cgacaggcttgggtggcgcagcataagcgagcgggagcggcaccgggcggccctacctcacgtcgacgggtatcagcacacaggtcttgtagtgattgaagatagaagatgatgaccgttcgagtgtggcaagggtctctttgcaagaaaatagagagatactagatagagatggtggggggactgcattggatgaaaaatgaagccaccagataatgctctatttgatgagatggatgggattcagggcgccaaaatttgcattcaatgctcagggaccaggggccgtttggttgcagtttgggtgcatgcatcatcaattataagattcaaaagccattaagatggtttgcaacggttttctctaaatttcaccatatattctacccctatttttatctctctcacacccctattttttatgtcatccagattccacccctatttttatctctctcacaccataattttttcttatataccctactacaaccataaaatatcgttttctatacttattcataatccattatcaattttctctcaactaataaatactggcgatggcaacggcagtgctgtccgaacgatgtttataaaaagtaggagagaacaaacggggttttccctttttttta

SEQ ID NO: 84818 - DNA, 553 bp, Zea Mays
tggaagtgtctaaccggtcgtgcgggggcgcgcgcgggcaaagcccattcgtctcctgccagccggcgtcgaacacctagcactagcgtgtttggccatcttccctcacgtgtagtcacctgtgtgatccttatcttagcaaaaaccttatctaagatttgatgcttatactttaagctagttatgctgtatggggtcactagattttgcttactggctgcgaagatatggagggaaaactggtttgtcccagcctaaacccgaggaaaatcttgcgccaagtcatgtcaaatggtttggttttcaaacatttcttgggtatgcctagggtagtttggcgccactttgtcaattagagcatatggttttgagtcttgtagctaatttaacatgtagggtttagttaggggccgaaaatggattagggttttttctattttttcttttgcttctcccacttaattgacttgtctggggcttttgaagaatctatttggggtatcacgcttactaacttttatagggtaaatagtgagctacaacttttattaat

SEQ ID NO: 84819 - DNA, 338 bp, Zea Mays
tacaccgtcggatctgagttcaacgatcgcgatataattatgctagatctaacctcgtccattagatctagatcgacggtctgattttaacgtggtgaaggggtatccctgaatctaatctcagccgcccacgcgatgatcaacggacgcgaccatatcttcacccttcgaccaaccgagacggcggcgccgaacacgcgcggcggcgctcgccggtgagccaccccactacggcgcacaggtgtacgatccccaaattaatcgggtgctacacgatgcaggagcatgggcgaagcaatggggaaggttattaccggcgatcgaagccccgacgatgc

SEQ ID NO: 84820 - DNA, 573 bp, Zea Mays
ccgcctcgcctaagcccgtctcgggcaagaaggacaaaatttggggcaatacccatccgaagtctatcgggggacaaccacattcaatgcgcatacatatcccactcaggttgcgggtgtatagggacaacaagaccgcaatcacttcaaagattcaccaactatgattacacgtgcgaccactgtacatgcatgtcgtctgcaaactcccgatgggacgtgtaatatgacaagggcacagaccaaaccttgggcgcaaactccgcctcgcccgaagcagaaatcgccctcaggacgaaactctgcctcgcccgagcctagtcccggctacctactccccccgcgaatcccgcgagaggccactccttcaactgtggcacacgtctttgaacctcggaacaggtttgctcacaacctcaggctgactttcgcctcgctcgagcccggctctgacctcgaaatctataatggaggacaccccaacatcattaactaccccagagccgatgtaccttttaagaagttttttcccatccttaccactgtgacaaccactatggtatggcaacacct

SEQ ID NO: 84821 - DNA, 533 bp, Zea Mays
cttagatgactgaggcaaatatcgacagacacatttctatcaagggtagaacacttccttctaccctgacatcgtaactccttccacgagaaggtacctgtaacccccgctccttggtgtataaaaggggcagggtcggccgacaagacaacagaggccaagtcagagagctcaccaccacgacgcccatggcttagctagcgaacaccatatacctagtcctttagaacttactacgcataagagacttgggaactctctctgtctcacctgcttgtaacccctactacgagcattgagcaataaggtgcggtaatgctagtcaccaaagattggatgtagggacactttgcccgaactagtataaatcttgcacccactgagcacaccatccatatctagaatgtgtacacacaaatttacttatcagaactagttcgaaacaccgccagttagcgtgccaggtaggggccttacgcgttcttgacgtcctcttcttcaagttttggatggtagttagcgatgacctccgg

SEQ ID NO: 84822 - DNA, 1183 bp, Zea Mays
gcagctccaaatataaccatttatctgaattggttcaatccaacaaacacaccaagtggcctacaatctttgtttgtcccaaatgtggtgtcaaaagtaataacatcactaaatataatgctcatttaactggtactaaatcatttaactggtaatttccctcttctctgtttaatataatgctcattcgaactttacaaccggttcttgtttcagcccgaggatgctttattagatgatctcttggatctttttctctaaaaccagcctttgcacacacaaatctacttgaagtggatactccatctgtttttcttttgttgttatattgttttcttgcatcaaatcctaccataccaccatacgaaacccagaaattccataactgttctacactattaaatttcataccaatacttggcacctaagaaggttgattctccattctacaagaaaaaacacaatgcagttctaagtttggtgtttacttgctcataaaagaacttgcaccaaaatttagttgccaaataaaaccagatgattcgatggaaaaagtttgacattgacttacttttgtggttccatggcagtagatgtttgcctttcacaaaagaaaaaacaagagaatggggaccaagagaataagatggaggggaccaagagaagaaaaggaggataggaaccacagaccttggagtgttgcgagtaagaagaaagggaacaagaaatggaggggaccgagaaaacaaaaggagagggggaccaggagttgcatggagtgttggcgactttttagttgcctcgagtgtaggtgccttttttaagttgtctgtagtgttggcatcttttttattggctggagtgttgacgccactttttattgtactttactgagtccaacgactgagatgaagctaaattcagtgaatttgtgtttgtcgaattgagaggacccggttccgtgcagacttgtacaacatttatgtatgctccctgctgccacttgcatttcccaagccgcttgtcatttccgaggcgaaagcatcgcgtccgtccggtggatgctgtgaaaaataacttataattgttatttattttcttagtgtgcatatgaaattactagtcaaatgttgtgaaattactaagcatttcctataaaatttctgagtcactagactattac

SEQ ID NO: 84823 - DNA, 348 bp, Zea Mays
gctgtctctagccgttccataaccaaacacgttctaaaagaagcgcatagttttacatttgcattttgttttcctgcgtccccactcacaatctttattctaggcatcatctttctcgctcaccttcgagagtttgggttcggggcgatggtggtgacctctactacggctgaattcggccattcaccctctctctcttcgtaatttctatttatattaaatagatctatctttcccctatttcatctaagggtgaaaacggccggtaacggtcggaaaaaacctctcaccgttttcacccgcataaatttttgttcggtcggaatcggtaaacgggaaagtcggaaa

SEQ ID NO: 84824 - DNA, 823 bp, Zea Mays
ctgcccgacttgtgccaagccaacaattctgacttcaacaactttagagtgatactggatgtggaattggtcttctagctgcttctatgtccagatcaagtccgtgcctagcgaggtataccacgcaaaggccgaccttgtaagagactgtgaaaagaatcccacccgcattggatccgacattgaaattgtcctaagctgtgtcaagtatcgagtaacgtgctcgatagagctagctccttctgatcaattaaatttggtgaactcagggagtcgatacttagttggtagagaaatcaaatcatactcactaggatatggcttggtgtagctaattgccctttgcctctaaatcatggcaaactgatcccttagaataatgttgatctgatttgcggtagcatcccctagggccgagctctcatgactcggcctgtgatgtatttgtccaatcacacctgtttctcagcgtctactctagaaactcttgctgcaccaaactgcactaggtgtgttgtgctaacatgatctgggacatacatacatcaatactcgtgtggaatgtggttaggcaacctgttgtagaactggcattcatcagaaccatcacccgtcttataaacaacatatgccggcgaaccaggcggatgcgtctctagggcagtgactgaatatggcagtggcagcctagtctggaatagatttcccctttgtgacttcctaaagtcgggcctgttggagagtactgatgcttcatgatctcatgaacgacgtggatggccacacgctcgaacacattcatcaagctctcagagtggcgatg

SEQ ID NO: 84825 - DNA, 538 bp, Zea Mays
tgtcagtgcaaatgaaaccatcttcggaaaaaaagatactactactcacactagcaagtggttttcagagttgtacgcacttcacttgacgagttcgttgcctttgttaattaaatcaattcgatcgttgacgagaggcggaggtacaggtgtatcatggtatgcatgaagctagagtacaactgggaaccattggaagtgagcgtgtgaaggcgaggagagcacgtagccaagtgggtctggagtctggactctggagttggtgaccactactagctagctaccacccttctgttctgcaactgacgtactcaagcggccaaggttcaggcccaaccagcgcacaacatcctggtgtttggtgcttctcttgcttccaagcgatgacctgccttgacgtgccctgttttgcggcaaatccgtgtagctcaggactgtctggaggtgactgagcgaggcggtgcgcacagcacacaatagatatgaaaggaagatttgtgtcaacattttgcaaattaaacacggtgccgcttttaat

SEQ ID NO: 84826 - DNA, 290 bp, Zea Mays
cctgggaggaaggggtatggacgtatgatcgagctacgaagacaaacttcaaaatgcatgtttggtaccagtactccatgcatgacttactggcgtatgggctattctgcgcctggtgtgttcacggtaagttcccatgcccagtttgcaaggaagctctcaggttcatttggttgaaaaagggtggcaaatattcgtcctttgataaacattgacaatttctccctcatgaccatccattccgcctagacatcaagaactttacgaaaggtgtcgtagtgatagaccgc

SEQ ID NO: 84827 - DNA, 561 bp, Zea Mays
cacgcaatttggctaaattttccatagtctttattttattttgagaaacgatgtggtataatgatgtgcgatgttttacttgagtggacataaacaccatttaggtatgccttgaatagagagaattattggaaacctgttatcacaaaaggtcattagctagcccaataacgtcttcaaccactagttgtactctaataccctctcgtgcgaatacaatgccctcaatatcatagaaacactatttttgtgtggtgttttacttgagtggacataaacaccatctaaggatgccattaatagacgggattattggaaacaaggtatcacaaaaggtcattagctagcccaataacatcttcatccactagttgtactctaataccctctagtgtgaatacaatgcccacaatatcatagaaacgtcatttgaggtttaaaaggtgatctattattttgaattctttatattccaactttttagcaactgtatggtggaaaaaaagttgtcttacaaccttaacctatgtttggacatttcactcacgcaatttggctaaa

SEQ ID NO: 84828 - DNA, 418 bp, Zea Mays
cgagaggggtgattatatatcttagtaggatttgcattgattggggacatgagcggcacggtcttccatcgacgatgatgcacgcgtcgttggaacagctatagtagtaatactcgtgtgcgtggccgtacgtggttgaccggtggtggggtccacgctactcatcctgtgctgtgcccggaccccggtggttttatatgcaatgaattccattgcattgcattgcagtgatctcgtctagctcatcaccaacagtcgccgtcgtatgcgttagctgttccatcgatctggaacagcttgggggcattgattattcgtgcagtggaatatatatgatgctgtcacacggcggtttgttccgtcttctcccaacattttggccgcggcgtggcttccatgtctctccatcgacgatatc

SEQ ID NO: 84829 - DNA, 556 bp, Zea Mays
tgaacttagagctcgatttagagttagattcattgctcgattggggatagttgccatagtcgatttgtagttggatcatagggctacaagtttgctgcagacggattggcatgttctggcacaaaaatccgagatctaggcgttgcaagttgctctatcaggcgtttgaagggagtctgattgtacagtgaactaaacatgatcccaggttcagccccctcatcgccggcggcctttgcgcccggattcgcgccggccgtcgcgattcgtgcctcgggcgagtggatttcgcttagccgtgaaaaaatctcgccgcggatgggtttgggttactgtggcctcgctgtccctcgaccacttgcaccggcgacgtggccttgcggccgtcaccggagtttgcgtccttcaccgccattatgccacgtcttaggccattaaccacgtcgtagtacatcgccttagtacgtctactcgtcgcctgtggtcttgccacggtagcttccacgaaattcacaggccaccgcccccggagcctataaattgagtgtgtcgtcgg

SEQ ID NO: 84830 - DNA, 594 bp, Zea Mays
tttctcttatctcttacgccatgtattattttgcagaaacaaggaagagtagggtgacacacgaacgaaaaaactcttgtgctataggagtacagatatataaaccaccaaagggctcaatgcacatcaatcattgatgtcaatccttctaacatggtatctgagtctagatcctacgctaatcatcttgctccaacctcattgtctacaccgactccaactaggttggttgtccggacacgtgctactctattcctaagggaaaaccttgtgttggagtcaaccaaacgtcatgatgtcgtctcctgattcagcgttgaggcagagtaccacgtcatcgccaatggtgtgattgagacgacttagctgtgtcagctgctacacgagctccacaatccgcgttctcagggcattgttgtccactgatgcaatataaatgttttgtacctccccaccaaccccgttcggcttcaatgcaccaaacacatgaagatcaacctctattttgtctgagagaaggtcaccatcagacaagtccacgtagtctatgtccagatgacatcccagtttgcatacatcttcacgaagggtctc

SEQ ID NO: 84831 - DNA, 487 bp, Zea Mays
ccgcgcccgcgccggacctcgccatgtcgtgccgcccacaccaagccaccaccgaccgattccttgcccgaagtggagcatgccgagacccccttccttttcccctcgattgcccttaatcctttcctccccctgacgcgaatttctttccccattcgtgagcaccgtttatggtaggtggccggatcttcaatcactggagatatccacagttctggagctgattcacccacggcttcgttcctataagaaccacccgatcccccatcgtcgatcacatgcatcggcaccctctcccgtgttctccttccttctgcccacgctcaccgtcaccaccgaaccgccattgctcgtggccgagcacccttggcgcttctccgcccacgccaaggctgttgtggtgatacccaaactcactgctggttctccacgtcttccctggctcggtccagccccacgtcattgcttcgacctcacctgagccctg

SEQ ID NO: 84832 - DNA, 508 bp, Zea Mays
gggccgcctggcggcactccctacgacggcgtggatggttcgtggcacgaggccagactgtccatgatgtcgctgcgggagcgagtctttcctgcgtgctgaccggacggtccgcgctctatgttaaacggtccatgatggtgcagagggtattcttctccacgaagaaccctagacctcgcctcggggagagatctcgtcaaggaggagagttccaaggcgtgccccgagatcgacaggccacccagggcgtctctagttggcgtagagtcgaaggaagatgattgtggcaggtcacaaataaatttaaactaaagctacgctatgtctactcctacggcatgaaagataaatataggtaaatagattagtttgattagaatgtgttcggggtttctcaatcggtcgtatcccttcatatatatagacgggtctagatccgttcttagacgatagtcaacagatttcacgtgattagatcatgcatgagataaggataatcggctga

SEQ ID NO: 84833 - DNA, 693 bp, Zea Mays
gttcaatcgaatgggtcgacgagcatcacgggtatgtgatatcactcaaacgagagagcagaggggacgagctaacctgtatcgcgctggccacggcgaggtgttcttgcggcgttcttcgaccgatttgggggtaatcccaaattggggagctgtggggaacgatcggagctgatagttggtttactggacgcacaattacctagcggaacgtgctgaggcttcaatttataggatgctcgagcggtggtgatcaatttgggcaagttgtgctggcggctggaggggaaaaggagctctgtgcttggaacaggtggctttcaccgtggcaatcactccggcggtcaccggacatgcaccccatggttcaccacgatgcgactaaagcttaagcacgtggcacgaaacggtgacagatcgacggcggcgaaggttatccgatcgaccgatgagcttggggggggaagtacggcaagcttagccgccacgagacccaactcaatccgggcgccaagatttttatctgcccgtgcttatcttctgaccatggtgcacaaatcacgacgatcagcgctcatcgcggcggcgagtcaccgacgacggtgaacggctggcagtcgatcttatgcagatactgtaccatggcatcccttattcagttagcctgaccgagcgatttgaaaccccatttcc

SEQ ID NO: 84834 - DNA, 669 bp, Zea Mays
aggggttccactgtaaaatttccagaccttactgaaaggattcgaacctacattggattgcgggttgatttgtaacaagtgcagggtctcttatgtaagtttctcgggcgaaagggtatgcacggatctcggccgtccgattagaaaataagcaccgagattcaaaaatacttaaaatgaatcggtacgccacatgagcccctagatctagatgtaacgggccagagtcgatctgaacctcaaccgtccgatctaatctacggtccggatttaataactcaaggctcgcactgggtcgcacatcgatagatctatggttcaggatctaatgcattgaaatggtacctatgtcctaatctcgtccgtcatcatccaatccaactactggaatactctcttccccagcagagccaagctgaggcgccccaagcccacggcggagctctcgctggcaccccccgcaatcccctcgttccggtgacatagtttgatgctaccaagcgcaaaatgaaattgactgttaggcgaacacgaggaaggtgcctcacctaaaatgaccacgacaaagaagccgaccatgatgcagtccgcccccacgatgaagctcggacgtcgacgaggaattcacacgaataattagttagagctccgcccgatgatggtgttcac

SEQ ID NO: 84835 - DNA, 596 bp, Zea Mays
ggcgctgaccttggggccccacctgtcatgggcaccggtcgtgcaggaccaccctcacatgccatctccatgacacgcctctgccatgtgggtctctcccatcagccactccaatgcatgtactccaccgccatgtgttccccggtttgccaagtcttcttctcctccagaatcgcgcctcaggctcgctcaactgaagtcgtgtgagattcgcgtggtacttccctggagttcgtggacattgcaactagccttgggggtataaagaccaagccccgccgtgaatacctgcacgtcgccatgaactccgggctagaggaaacgggagagagagatcaaaggggagcgaccgagagagagagttggccgccaacatggatctcattcgtggacaactccccggcccagcgggtgttctaggcgcatcgcaggatgtcgctgcgcatgcgtgtgacctcagcaagcaaagaccaccgccgtggggtcgacaattcctcgccgggatttcggatggccgcagggccaccgcgtgtagtcgtcgggagtataccctcggtgattctcggtatgagagcttcctccaaatccgcttcgtt

SEQ ID NO: 84836 - DNA, 552 bp, Zea Mays
tgaggctatagctaatggtcgtcatcttccgtacgtccgggaggttgcgccttgttggcgcgcatcttgttcacaatggactggaatcgagaaaacattgtatcaatggtcgctccagccaactgcacaaagttatcgtactctcactgatacatctcaaagagtctggtatttacatgaccgtttctctcatgaaatttctcgagggtggactagatctgatgtgtcgtacccaaatgaccaacttgctaaaactgagcaagcaggaggcatgagaacaaagtgttgtgagccttgttgtttgaatcattatactccatctaaagaggagtgattcgagcacactgtacatagaatgcagcatcgaggtaaatctcccacacttgatacccgatactctgaagataccccagccatgatgacgtatggtatgacgactttcaccatgatagcattgtttccgatgatacttctcctctagctatagagttgcaggatactctatggccaccttcatacaaaccaccccaacttctaatgtatgacggtcac

SEQ ID NO: 84837 - DNA, 512 bp, Zea Mays
cctcgttcctgtaggaaattttgcgatccttaacattgactcaccgtctgtcccattgcccatttgtgcgactatgagagatcgaccgaaatagaatgaggactagacatggtactattgttgggctgagggagagttagagagattgcattgtgttggggcattacgccacgactcatggaatctggcatcacaactctatatctaggaatagtttaggaataatgaacaaccctctataaaaggaggggagggccggatcatttagctatctcttttaccattttcatttccatcacttagtctttctcattttagctaagagatctttagatgttttgaacctcgtcatctaagtttatagagttctgaggaagtgtggccataaccacatgttgccatcttggtttttcatttcgtatcacatctgatggtatttgcttttgatttgttttcttctactcccaacccctctactttgagttttgagttgatccttgtcttcacttgtt

SEQ ID NO: 84838 - DNA, 1644 bp, Zea Mays
tgtgacggttgtgttagaactcaaatatttggtgaacagggtgccagaacacgcccctggtgccaacaagtaaaacgttattttttcctgaagagctaattgttttgctgttagggtatagtagtcaccctaaactatgcgaaagtaagtgtgccatgctggtttaaaggcgttttcctacttaagccgatcgcctggctggtagggcatagtggtcgccctaagataagtaggcgcgagcatgtcgcaccgtcttaagtcgtcgccgacttaagccgatcgctctgttagtagggtatagtggtcatcctaagtcgagtaagcgtgagcatgtcgcaccgacttaagtcgtcgccgacttaagccgattgctccgttagtagggtatagtggtcaccctaagtcgagtaagcgtgagcatgtcgcaccgacttaagtcgtcgccgacttaagccgattgctccattagtagggtatagtggtcaccctaagtcgagtaagcgtgagcatgtcgcaccgacttaagtcgtcaccgacttaagccgattgctccgttagtagggtatagtggtcaccctaagtcgagtaagtgtgatgatttcaagtccaatccaatagaagtcagttgtaagtcaagagtctgaatgcctttgaaaacgaaaactttattgatgatgaagtccccatattacagagtaccatgtttcttcgaaaatttttgaggcctcgctagggatagaactttctaaggtgctctatgttccatgagttccccacttccgtgccatccatttgagtaagccggtatgatcctagttgagtgacctctgatacgatgaatggcccttcccatagcggtgacagcttgtgtcgtccttcccccgttagaattcggcgaaggaccaaatatcccactgtaaaggaccggtgttgcacaactttatcatgatagcgcctcaaggtttgctggtacctagccgactgaattactgtgtttaattgttcttcctccaacacatcgatatcttctagcctggtagcttcttcttcggctatgctttcgaaagtcacccttggcgccccgaatattaggtcagcgggcagcactgcctctgacccataaaccatgaagaacggggtatttccatgtagagctcgactgggttgagttctcaggctccaaaccacgtatagcagctctctgatccattttcctgcgagcttttcactcttgtcaaataccttctttctgagtgcttccagtatcattccattagctctttctacttggccattgtctcttgggtgtgctacttatgcatacttaatctggatgttctgctgctcacagaagttgttgaattcagagctggtgaagttggatcccaggtcggtaatgatgctatttggaattccaaacctgaatattatgtcttgtatgaattccactgccttggctgaggttaaagaggcaatgggcttacactctatccattttgtgaatttgtcaatggcaaccagtacgtgagtatagcctccctgagctttcttaaaaggtccgatcatgtccagcccccagcatgcaaatggccatgttataggaatggtctgtagatgctgtgcaggtaaatgttgttgctttga

SEQ ID NO: 84839 - DNA, 799 bp, Zea Mays
caaggataatattatcaaaccaaaatcaagaaagttgtcagctttcccacactattatccaaccaaaaccacaacatcaaaaaggacacaaatttttcgcacaggcaaaatttaggcaggagtagaacatcatatggccaataagcagaggggagaacctccaagaacaagacttccgaccccgaactcatccgctgaaacaatggcggccaggccagaatagaacagagggaagcagccaagaacaggagataatccgtcccctcaactgctcaccatgtcacgggggggcgaagcccaccggccgcattggaactgccatgatccaacaaaagattccgcctctccccacttcctcaaacaaggagacaaggccaaccaaccaaacagcaacacctataaacaagtactaatttatcgccatccacatggacagagatacaatcctccgtcactaggccatggacgggagcagacccagatgcagacgacggagattagattggccagcagatgacggtgagagggatcttctcctcctcggctccctctctctcccctttctctatctagtggagaagaagagagaaaatgggcttctcgaagaacaggaaaagtttgtcaacttctggtcttcttattctctgccggctcctcttctcttgtaggacgccctggcggagtatattgttctcactctaccaaggtttggtggtggataggagaaggcattgattttcttcatcactttgcattggggttcgggtgcaaaaagccataaattaggggcttctctgtg

SEQ ID NO: 84840 - DNA, 1455 bp, Zea Mays
cgaagatggagttatttgctttctccttgatccggaagatgtccaaatgcatggcctcaaacctatacatttgaactattgaacatgatgggggtaatggtatcttttttatttgctattctggtgaacaaactcttgaagatctcccgtagcttcgtcatttgtacacctgcgctattatcccgaagcatgtgccttcgtttatggttgtttcatccaaaggtgctttggtatgggcacctgcaacacttaaaaataaactataaaacaactaataacttggtgttttgaggactttcgggagaagaaggcccccaataggagtcgacaggttggataacccagtcagtcacaagaccatggtcccctgtgtcctaggagggcgaaccgccaccctaggaaaggctgaggaagaccaagagggataaggggaatgggtaggaccttgcaaaaagggaagaacgcccataccatcgccttggatgaccaaccctaaggaatccgccccggtccatagatgtgaagcaactagtggagggagggcaagggccgctgaggaagcccacgaggcataagagccaacatgattgcccacctgttagggtgttctctttaaaaggcgacgcccaaaggaacttatggaaacaaacctatgaccctgaaaacgggagcagatcagtggagaaaaggccttgaggccccatgacatggtcgcatggagtcaaagggcagcacaagcaaaaggaaaatagaaaccattcttatatcctccctcaggaaacgacattaggacgtaatacactagggggacatcgagcgctacgaacgatatcgtctttagacaacctatctacaacatgattggtcgccttctcgtagtcctccagtacatcctctagctcctcttccgatagagatgaaggaaggccaacgatgtcacgaagaccacatccggaccaaagctcctcgatgaacaccaaagtcaatgatatctcggacacgacacgagatgttgtccaagcgcttactaaggaggagccatgagccccgacgtacttctcaactttccccaaacagtggcacattttctccaattcgtcttctagaactaaaaggaaaagggagggaggtaagaaaggagttaaaacagccaataaggaacgatgaacgagcgacctaccagctacacggatgttagactcggcaagctaggcccggagcagtccagcctcagcctcggccgcctttagcgccgcgcgaaaagcctcatggctctcccgggactcctaggggagagggataggctccaatgggcccgaccacaacgaccggacagaaggtgatgcctcccacccgaatgtttcaggggtcgtcctgcgacaagaaaggcaggcgtcagaatcacccacagaaggggaaaggaagtgctcggaggaggaggaatcatacccagac

SEQ ID NO: 84841 - DNA, 831 bp, Zea Mays
gggtggactggtccgactgaagtataccttcagattcagggagaagtttgatgagccaaacgacggctggctaaagtgcatcgaagctaccagtgatgagctacttggagcatactccaaggccgaagataatgctctgtccgcagcctttggaggtcggggcaagaaaagattaaatagggtatttgatgctattggcttcgtataccctgattaccgttacccgcttcgagggcaagagaaaaagaggaagattgccgcttcggtcactccagctgagccaaagagcaaaaaggtgaaggtcctgacccaccggccatgttatattgaaccggctgtagtacctgaatttggcatagggtcctcttcagctaccgaagcaaaacaaactgccctgattgtgcagagcactggagagccgactgtagtgctaaaggtgcctacagtcgggccaaccatatctaaagatgataaggccgaagagccacatgcggaagaaacaatgaaaatgccagaaattctgagccctccgacagaggcaaaactgccgaaggtgcaaaaggcttctgccgcaactcccaagaggaggaggatggccaacgtgctggatgctgtgctggagactacaaaggccttgagccctgctcctagaaagaaaattgctgaagctgccaaaacacaagccaaagctgaaactgggcaagcagaagccgaagctacgcaagctcaagttgaagccgaagctgggccttcagtgcccaccgagacggagcatgccacacctgaggaaaaaacgacatagcagattgcacctgaaaagatcgaagctcc

SEQ ID NO: 84842 - DNA, 1156 bp, Zea Mays
aaaggaagaggaaaaggtcacctcaagaggaaattccaagaattccaagttctccgagctcagcagcaagatcggcaccagagagctcgatccttcgggcttccacccaagggaccaagcttcaatagaccagctggacccacttcgtcacgtttcagccagcagagtcagagctcctttcagggccccctcggtcgcaagcaaccaaccgccagcaaatgcctgttggcactgcggagaccccagtcacttcaagaataattgcccccagctgaaagcaccaggacatacctactccaactcggtgaacggccctaagaatacctcgacacctgcctccaaggcactctcctccaacagtcagcagagcaagacctagtatcagggcagagcacgagttaaccacgtcgatgctcaagaggcccagcaagctccgggagtagtgctcggtgagttccctgtcgaatttactcctgctactgtactttttgattcaggagcatcccattcatttatagccactagttttgtggaaaagcttggcatcccctctacgcaactagaaatccccttggtcacccgaaccccagggtcagaccttctatgctagctcaaatgctcccaagtcagaattcttttaagtggggtagtgttcttggtagacttaactgtcttgccatcccaagggattgatgtgatcctaggaatggattggctaactaagcacaagtgcatcataagttgcacaagcaagactgtccttctcactgaccgccaaggaaaatcagtttcttgtcaggcccaaccgctcgccaatgatccaatgatgtttaatctagcagcagaaaatatatccataatagaagaattcatggatgtattcctggaagagttgcctagaatgccgcctaaaagaggagtggagttctacatagatctcatccctggcactgcgcccatcgcaaagagaccataccgcatggctcccacagagttagcagagttaaaactccaaatcactgagctgcaacaaaaagggtacattcgtcccatttcgtctccttggggagcacccgtccttttcgtcaccaaaaaggatggaagtatgagaatgtgtattgattatcgatccttgaatgaagttacaatcaaaaat

SEQ ID NO: 84843 - DNA, 830 bp, Zea Mays
gtccaccatggagaagatggagagcacggtcaaaggcctggtgagcgattggagcggttttaagaagtggaggctggagatcgaggcgggagtggtggagatgacagaggcgctgaaggcgattcaaacccaagtggatcaggtgaacttgagatcgagtggtggatccccttctgtcctatcgggctagaagccagtggtggtggactcgacgttcctaaagtccttgagaggatcgacaactacttcaacgggagaaccatcggtgctggtgaacgcatcgacaccagcagttctggaacctgcgatgggtggagcgacgaccacatcgtttcttcatcgaactgtagaaccatttcgccgatcggatgccggatcagagatgtcaggtatatcgtagactgggggaggtacttttactcataaccaccaaattccttggtcatacatccccagtctaatggtttagtctgcttcgatgaatttggtcacaactgtccagtgctaacatgtcctagatgcattttcctgtgtttgatgggtctaacccaaagttgtggaggagtcgttatgagacttattttaagttctatgttgtacctcatgacatgtggatcaaattggttgtcacgcattttcaggggctagccctgttctagctacagtccatggaggctagggtgcgtgagctgaactggaatgagttatgtgcaacactaatcaccagatttggtcaagaccaacataccctcttgatcaggcagttttaccatgtaatatagactgctacggtgactaaatacatagaacaattttataagctattacat

SEQ ID NO: 84844 - DNA, 565 bp, Zea Mays
cattcgtgcagtcacgcactagggtttctcgccctccccagtctcctctccccagtcacgcgacgcgcagtctctcaccctccccagtctcctctccccctcgagctcctctcgccctcgagctctccctccccctcgagctcctctcgccccgacagcaggaaccaggagctctccctccccctcgagctcctctctccccagtctcctctccgtcccgtccagagagctctgctctgtgcactctcggtttgattgtgcgaaccccctgctagggtttgctgttagcgccatcggtcaccgccgtcactcgccctcgagctctccctctctccgtcgagctctccctccgctgttgaggcttcttccaggtttcgtcaaaaggtaaggaggtttgagtaccatctcttgccctctccctccgttgttgagctcttcatctagatctaataatcttgagtaccatctcttgccctcttcccctgtcacgatttcttcgtctagatctaagaatcttgagtactatttttagggttgagtaccatctcttgtggttgtgtacatc

SEQ ID NO: 84845 - DNA, 1099 bp, Zea Mays
ttgggcatgaattcaagcttgattcaataggaatttggctactgctgctatggcaaaattatagctggtttgtagctctacaactttggtgcagagggatgataaagttgtcatgcgaaatctagagagaattttccctgaagttgctctgtcaggttaactgaagtggaatgccatgctacagtaactgaagaagaatctcaggttcatcccctcgccgtcgacgaccctcgcgccacgattcccaccggtgaggtgattcgtgctcatcagtgcttggataacgctcgaggtcacgtaaatatcgccgctgttgataagtccggccagtaaacaacttcggccaccgtacaggttgccacggtcgctttggataagctcgccggtgactgccgccttccggccttgtgccacgtgccctggcacctccatcgcgtcgccctgacccgctgtaaccttctgtccatcgccggggagatggccacggtaaccgtacaccaatccactgcgccagtagctccttgtttccccggccgccgcgcgtcatcgctcgaattcccgaccaccactcactaggcctataaattgagcacccccttggctctgccatgtattcaagcagctaacgcacccactcgcacctcaaatcctccaccagagagctctaattttggattctccccaaatcacgtccgaactccgctcggtttagcctcaccgcggccagctcgattcaggttagctcataccctcttctccctcatttgactgttctcatgtactcgtgatgctcatagactcgcctaattggactagaagcccactgaccgccgggaacgcgttcatctgaccgcaatgtccacggtcaccatggccagagcaaaccatgtggccattgatgaaattaggttggggaaaacctcggtttaggtctgaattaggaatcagtcgtcggagagtaccaatccttgcgtgcaccgccgagtctagctcatcggagcacagctccccgcgcggttcaccgtcgtggatcaagcagtgtaaacaaatagaagcctagggtcttttctgcagttgtcagcgactcgtgctaatagtg

SEQ ID NO: 84846 - DNA, 1128 bp, Zea Mays
aaaactctcaaatatacagaacttccgtcttcttttaagaccttgtcggcagcttcgtcttacagtctgttgacaacttcgttaacggcttcgttagcgattctaattatctcgagcgctcccttcagaaatggatcagcttcaggattgtatggctctggagggggagaaagctcggctgcattaaaatacaagtacttattagtatcgaagctacaataatttacgaagctaaactgtaataggtatacctataagcctggtgcgttcaacaacctcttcagctctcttagcctcttctaggacgtcgtgatactctttctcatttttctaatagtttcatcagttatctctcgaccaccctttagccatacatcggaatagaattttccgcttaatgcagtagcgtcggccgaagggtttttaatatcatcagttgaaagtgagaatcctggctcagctatagccttcgcatgttcgcacccgactttctccggattgatacagctccgcgggcactagcaaaggcacaaaaatcccctctgtcactaaggatctcttcaaaggcttcagcttctccattaatccactggttaactccatcgggtcaccgcagatgaaattttgttcttgcgaaaacacaccaactttagcaaagctattcttcaaattcttggcgcattctatagccacatcgtagcatttttctttagctgcacgaagctcgtcaacatttctctgtacccttgatcgttcgatttcagatatttcaagttttatcagctccacattaaaattttcagttgcttcgacaactttcttttctaactcgtgcacttcagctttatgcttctgcttgagaggatagcttagcttcactggattttagcctttcgactaaagatagcaaaatattttcctttgcaagagctttgtttctcaaggttataacctccgatcggaggtttccatgtgctatctgacagcactcgtcctctgcattcttttgagtcttcagagccttactaaggattagaccctgccaaacagtagaacgaacaaacagtaaagtaagaattaccaaaaatagctcaaaaagtcccaaatacgaagccaaaatgtgcaaac

SEQ ID NO: 84847 - DNA, 740 bp, Zea Mays
tttttgagtttctggaggaactgcatcttgtcgccatcgctttgaggtccgtaccccaccgtgatttgccactgagtcgcatccgcgcgcatagaaatggtagtggttaccgcatgcgaagagagatggatgttagataggtcgaaaaagctctcatcagtggcaaggaggatgccgcctctggtttgggaggcaggcagagtcacgaaggagtttgcaaagttgtgtccaatagtgcgggtgaccatcatcgcatcaacatcttgtaatttcgtctcctagaggcagacaatggtggcgccagtgtcacgaacgagatcgcgaacgacgtcatgtctggcgcagttgtttaggcccctaacgttccaatttaaaatacggcagttacgatgtgccataataaaaacctgagacgaatgcctgagagaagacagatgtggcattgcataggtgcttgggtgcaaggtgacctacataggccggacggcgacaagcacaccggagccacaatcagacgcagatggctgaaggcaaagtcaaacagagagcagacgacataatctgaatttccattactgctgacactctgaaggtttacagaccatggatgcgccagtgttggatgagcagctgtaggtggcatactatggccgatggtgacaccaagcaaagtcaaacagagagcagacgacataatcttagggtgtgtttggttcaacgtacaatgaggggtgtaagag

SEQ ID NO: 84848 - DNA, 330 bp, Zea Mays
gcaaggtcgatagtaagagcacacccggatgttgtcaatttcttggaaggtctcttgtttcatggtcatccaagaaacaaaactcggtcgctctttctaccgctgaggtggaatatatatcggccggcaattgttgtgctcaattattatggatgaaacaaactttattggattatgggatttcattcaaaattgttcatcttatgtgtgacaatgagagtgtcgtaaaattggctacaaatcgcgtacaacactcaagaacaaagcacattgatattaggcatcatttcttaagagatcatgttggaaaaggagatatctctgtttatt

SEQ ID NO: 84849 - DNA, 504 bp, Zea Mays
tgtgattcgtgcttggcacgcagtggatatccacggggaggtaaaaagatctcgcgggggagcggatttggtcgcggaggaagcttatcaccgcgcctgtagccgtgcgacgtggccagaccgccggtgttgccgtggaaactccggtgacctcggttatgccacgttgtggctcgttactatgtggtagtaactatggcacactcaggattacaatctttgagccgttgcaccgatgaacgccacgattaaaccaccagtgctctcccctctctccgatcgccagcgcgcgattccaaattcacgagccatcgccctcgggccctataaattgagcatgccatcagctccgctaggtagtcaagcatccagcgcacccacccgtgtctcggattgtcctccagagcgctctaatttgggatttcccccaaattggtcaagaacaccgtactgtgtgagctcgctgtggccagctctccacaggtccgatcatgccctcctcgc

SEQ ID NO: 84850 - DNA, 1335 bp, Zea Mays
gtagagtgtggtcgtgagctgctcgtgttgcgcaccgacaacgacgaagaattgatggtgactgagttcatgttgtactatgcggataagcgcgttcagtgccactactccataccgtacaccccacaacagaacagtgacgtcaagcaatgcaagtagacggttgtgggtatggctcgggctctcctcaagtagaggggaatgtcgggtgtattttggggagaggcggtgttaatagctgtctacatcctcaacctctcgcctaccaaggctctcaatgggatgacgccatacgaggcttggcatgggcgcaagccggtggtatctcacatataggtcttcgtctaccttgtgttcactaaggagcttagccacattagcaaggtcgatgacaggagcacctcggaggtgttcattggctacacgaagggctcaaaggcctacaacatttttgacccaggaacacgacatgtgtacacgacgtgtaatgtagttttcaatgaagggcgaggatgggcatgggacaaggcagtggacgaagacttgactccaatgtacgatgacttcactgtcgaatacgcccatttgagggagccgagtgagtaggcaactcttcttcaccaagcaggtataccctagtcccaagtctccatcgacttcagcgccatgctctccagccatgactttggctacaatgagctcttcaccattatgcactccaacaccaacggtaacccctctgggcacgtcccctcctacaccagctaatgtcgatcatgacctggttgggcttgttaccccactctcccacgacgaggagcgcatcgacatgtgccatgatggtgagtcattgcggtatcgtacggtgaaggaccttctcaatgactagttagtgctaggtcaggtgcctcgcaatctggaggcagagttgcatcttgcatgcgacgatgacgagccccagtctttcacagaggttgagagacataaggcatggcgtgctacgatgaagtcggagatggatgtgattgagacgaaccacacctacgagctcactgacctccctcgtggtcatcgcgcgatcacccttaagtgggtgttcaagctaaagaggtatgaagccggcgcaattgtcaagcacaaggctgtcttggtggcacgtgatttcttgcagcaggaggggattgacttcgatgatgccttcacccctgtggcatggatggaatctgtgtgactctttgcgttggcaactcgggagggttggtgtgttcaccacatggtcgtcaagtcagcatttcttaacgacgactaaaaggaggtctatgtacaccatccgtc

SEQ ID NO: 84851 - DNA, 600 bp, Zea Mays
agctcctgaaaatatatcattggcttcgcagcattcgtttatctgtcacgatgcacggctagggaaactttcagaaatattcagataacttctctgcatagcagtctgcagtccctgttagctactcaagctgggtatcatgcttgttgcttagatatgtggaatgctagctaactcgtgctagattcaaacttcgtccttttttttacttgctggtaatttttgtatattagtacaattttatcctcttcacacatacatctctcataagcctccattcgcatggtcacttctctacgttttgtagttttgacaacaatattcggaaggagaacccatctcaggcagtccatgagaacgaaaaggttaaaaatattatctgcgctaacatgataaagttcctattgtttctaaggctatagatgttacacttcaaaattaatgatgcctctgtcaccttggtgctgctattggtgatgttcctccttgatatgccatttgcagaactcaagaatcacttatccctaggaattctgggctccaaaatctggggaagtttgcgtctgtatcactgttgttgccatggcagcagaggatatc

SEQ ID NO: 84852 - DNA, 402 bp, Zea Mays
cctcgatatatttggaaaaaacattacaatgagttgtctgactcatcatacacattacaagaggaatatttatggtgatacaagataagagttatgcagaaacagttctgctaaacatattgctcagtgtcttgtcagccgaaactcttatctgatgatgattaaaactccatcaaagatgaattgatcactactaactcaagaacacaatgaatagtctatttgtttttatgttatgcaattatcaggggcagatggtctattatggcttattatagcctgaaccataccatgtctgaaaacaaaattaacagatatgtgacccaattctcataagaccacaaatccacctgtccactcgaaacagctgacagccctcagcagccagcctctcacacggtc

SEQ ID NO: 84853 - DNA, 408 bp, Zea Mays
aagcacagattactgtagctactacttcaaaacagcccatagccaaaatgtcatattctatacccatgtaacaattgatccgcactgagattttttccattttctcaataggtttattaatgttttgttagtgtgtcttaatgtttcaaaagcaattttgcacatgcacctaaaattcgatataatgtactgcagttttgcaaaagctatgtcccacttcagtttcagtcagtgttgcaaatttcccttgtctgtccatctccctctaatgattgtgtatggatgctattgcttgtgtctcataggaagttagaggatattcagtagtgcaaatgaatgtatctagaatgctttgctcttttcgaccataggtgagttgggattaaagtttccctaattttcttgttc

SEQ ID NO: 84854 - DNA, 654 bp, Zea Mays
caagcccattcaatgaaagctcgagaagctgatatgggcattcgagtaatatgtgacatgagggagtaggctccgactccgatcttatcggttctctttctcctctccacctcactgctttcttgttcatgctctggtctcttcccactcgcgtgaaatcaagcttctacggaggttggcattcatctccccttcgcccttctcccgttgaagaggagtgactaaggtgggattgttgtttcgtctacaaagggaaactggagatggaccataagaacaagaaccctaagtgggatcggtggagccccaaggatatgtagcatggttctcccgtgtgggggagaaacaaaaacctcatctagaggtggaagcctcctcaaggaagatctgagttcaaagaagacgtgcaagtttcttctcctggtgatgggggtctaacaagtaactccaatatggccttccctcctctattgaatgattcagacttaggtcgatgattgttttgccagaaatgcggtgaagaaggccaccacattaaggattgttctaaatcactatggtgcaagatctgcagaaaagagaaccatgtcacggccaaatgtgtttggtctaaacaaagcaacccgataatatcgatcgtgggcatggcagcat

SEQ ID NO: 84855 - DNA, 459 bp, Zea Mays
ctcgtcgatcggtcggatagacctcaccgctgttggccgcttaccgtcgtgcgccacatgctaaagctttagaccacgtcgcagtgaatcacatcgtgcatgcccggtgatcgccggagagctgccatggtgaaatccattaagctcgtgcgccagtgaccccttttcatctccgaccaccaccacaccaacccaaattcatgtgtcgctgcccctggagcctataaattaagcgcacccgcggctcctataggtaattacgcatccaacgcaccgatccttgcctcggattatccaccagagccttccaattcctcttttcccccaattctgttttcgccactctggtagaactctcaccgtggtcagcgaattccaggtctgttcatgctccctgttctctcgttttcgtgttcttgtgtgcccctgatgctccccaaccccgccaattaagctagg

SEQ ID NO: 84856 - DNA, 584 bp, Zea Mays
tggacctgtaacgcgctggccacggcgaggtcacttcgcgcggtgctttggaccgatttgggggaagtgagcaattcgggggctctggtgaacaattgaaggcacgagttgatggattgggtgcttgactaccttgcggaaccgacgacatgctcaatttatagaatccccgagcggtggcccgtgaatttgacatggcacggtggtggtcggagaaagaaaagagcactgtcgcaagagattggtggctttcaccgtggcggctcaccggcgatcaccggatatgtgtaatatgagctactgcgacgtggtaagacaccaaggcacgtggcgcacaatcgttgagcggcgaactctggtgagctcatccgaatcggtcgtgagttaggcggacacgacggccggagtgaacagtggctcaagttcatccacacggcgatatttactaccctgagcaacaatcagtacttacttgagcacgaatcgtagcgtttggcacgaattcgagcgcgcggctcactggcggcgaggttctctgaacctgggatatttccagtacactgtaccatcacgctgcccattca

SEQ ID NO: 84857 - DNA, 290 bp, Zea Mays
tttatcgtggctgctagaggatgagcatcttcgaaccttgtagaatagaaacggaaaccattgacatcataccgaccataacgtcaggcagttactgctcctagggacaattgtcgaaggtccgggtgtatattgtcatttatatctacataatctcgaaaccaacaaaagaaattaggtcccccatcttttcctctcgacgaatctggtcacgttcacagccagacatccaattttgagaatcaaattcactattagtacaaggaaacaaacattttagtataaaaaac

SEQ ID NO: 84858 - DNA, 364 bp, Zea Mays
tgttgaagttattttagtttcattccagttataaccatcttttgaccatcagaatataacaggaattttagttctatgtcctttgctttagctggtagcctggtaccatgagtccgtgaggataatgagactgttggtagggtttctttttccactcttcttttaaacaataaagcaaatgtaatgtggtggagtggagtggacaaatgtgacatgctcaaatatataaaattagaatgcgcttgggcaccaaaggaaattgtagcctcattacatatcattgtggtgttgttaaactgaccaaattttgaatatcattctttcatttggtattgaacctttcatagctagctttagtattctc

SEQ ID NO: 84859 - DNA, 720 bp, Zea Mays
ggccaccttgccgaaggcaaccttagccaagttagctgagccgaaaactgataaagctgaggagtcaagaatcgaggggacaaaaatattagaagttttaagcccttcggcagaagtgacaatgccgaaggcacaaaaaggtcttgcggcgacccccaagagaaaaaggatggccagtgtactagatgtgctagagacgataaaggcttcaagctctactccagggaaaattgccaaggcttcgaaagtgcaaattgaaaccgaaataaaaccgaccgaagccgaagcttcaatgagccaggctagcgacgaagctgggccttcagaacctgccaaggagaaacccttggaaactggagaaaaggcaccagaggaagaagctatagaacatattttgcttgaaaaagttgtcgctcctactcccgaagcaccttccgaaggccttgattatatttttcgacatgcttcgggaaaaagattatctgaagaagaaatttttgaagctaaacactatgcccaagaactgaagtacccgaaaggggccttagtgtttaatggtacagatgaagatgatttcttgtattgcctcccagacaacaaagaattatccgtctgccgggaaatggccagaagtatggggtttccaaagcttgaagctggcctctatgccatgacgaaggacgatcttgcggatagccttgcatacaatagtctgaaggt

SEQ ID NO: 84860 - DNA, 812 bp, Zea Mays
tctaatacactagccattctcctctttcttggaaacacttgatggcttcggcagttctgttgtagttgctgggctcagtaccttcagttgttctgctgccttctctgatttcggcttttcggtcggatttgtacgagtttcgattgccacgacaggacatgattctgtggcagaaggggcagtttctgcaccttcaataagctttggcacatcggccgtctcaatgcgtctcggtctacgtgtcaagaccttcactttcttcgccttcgacgcactagaggataccgacgcagcaattttcctctttctcacttgtttccaaacatgaaaacagtaatcagggcagacaaacccgataacatcaaaaactctgtttagcctgtttttccctcgagcgtcgaaggctaccgtcatagcttcgtcttcagccttcgcgtaggctccaagtagctcatcactagtttcctctatagtatctagccagtcatcgtttggttcatcaaattggtttgtgtatcggaaggtatacttgagatagaccaagccaccttgactagagccagcggcaacctccttcggcatttcccatccacttgcaagaggccatactttgtaagcaatgtgttcttgaaccaagtctcttgtgccaatataggtgcacactatgttgaaagccgcttggcacgcttgcacatcattcccaagtgcaatggatggcctcctaatgccgaagcgtgaccatatagggcgttgaataatcctgttgggggtcttcttctccagcgaaggtcctcaaggcaaaaacaccttcg

SEQ ID NO: 84861 - DNA, 385 bp, Zea Mays
gctctgaactgtgttctatttctctgttttatttgttgtttatacttgcacttctatatttatatgtggtacaagctgtactcgaagtgcagggtattttaagacagaaacttctattccgctgcaacctactcgaagggtctttcattccactgtgatccagccatcgagtagagtaagaatttccagttttaaagtgataattattattcgcctattcacccccctctaggcgacatccagatcctgttaccgggcatagagaactttcagctggtcagccggcctcgcggcgctgcctgagagacggccagcggcggagacgatgagagccggtcaaagatccgtggagaggcgcgacatcacgacacgagcagctggtgac

SEQ ID NO: 84862 - DNA, 471 bp, Zea Mays
actataaagcagaacttgcagactccttgctcccatctatcaaaccatatccttctctatacccgagcatagagtttcagagcccgaccaccattgttagggtgtgatctagtgtttcgagctcgccatagattcaccgtcatcgagacaagcccagaagcttcactagagtctagaacgccccgaacacctagctttaccaacccgtgttgtcgggtctacggtagccattgacttgctaagctaccttgtcgtcgatgagtcattatctgtcatgccctactataaagaattgtcctagaagcttcatagaaaggcatttgtcctgttccagcttttccccaccctgtttaggctctatgtgtcaggaaattgctcgccgtcaaacttggtcaccgccatggggtcaatcatcgccataggtcgttacctagttactctgctacccttaattttccatcaatgagtttc

SEQ ID NO: 84863 - DNA, 488 bp, Zea Mays
attttgatcaaggctcacaaatttagcaatagacaacttaagccttgtaatctcataatgaaaaagaatttagaatgcttacaaccacaccattgattattgcgaagaccttattgtccaagtaggtgttgttgtccttgatgatcttcctttttcatttgagtgtcctccctttgtagtcgtctctttttccttccaaactcattgaagatactcaagagagatgttaatgacgcaagggagtatatggcgagggatgatttctttagataactaacatgcataattcatcatccacaagtcacatagatgtgaagaaaagtccttaatattagtgcacaccataaaaagagggatatgcaccttctaaacattttgaacaatcttaggaaattttacttcttcatactgaattttaacatcatgacttgaaagcatatcaatatgaaaacaaatatagcaaagccatgaattagattctaatggat

SEQ ID NO: 84864 - DNA, 321 bp, Zea Mays
agccctccgtactcgaggctccaaggcaaacaggggatcaggaaacaggaagagggtgcgggcgtgcagcagaagcaagggcgctttccacatccacagctagcctcttgcgcttacggaaagatcagaggggcaggggcggagcgtctgttgcaaggacgcgcacgagactcgtaagggagaaaccaaacaagtagcagggagctcaatcgccgcggaggggatcgatgaagtcgccgctgcggaggttcaggggcttcggccaccaccacaccaaggaggagcggaggggccaccaccagccgccgccggccaagctcg

SEQ ID NO: 84865 - DNA, 290 bp, Zea Mays
ggcaattctatcttcaaatgatgttagctgagatttgagcgacaagaacttgttgtaagtcatggaggctctcggtttctagctgcctgcacagtgatagctctacgagggcgtcagtctacgacatgtaccttggaaattgaggagaaacttctcccaaagggccgcccatgagtcgattgagagcgatggcagcctagtgtaccatgtcagagcggggcctttgatggctattacgagtgacttcgccattgcattgtcgttgccccccgacgaagccatcgtgacct

SEQ ID NO: 84866 - DNA, 504 bp, Zea Mays
agaaaagttactgctgtggggaaaagaaagtagagatatgtcttcttactgataataataggctgggcccctcgccctcggaaatttggataaagatgcatctgttatttactgtgttcttcaactattcagctcatttgttgggcttaacatcgatttgatgtgcagaagcaggtgatgatttctccctatcaaaggtcagtcagttttggtgtctggcaggcacggaactcagtgcccctggacttgtgcacagctgttgaactttagcccatcatggtgcttctgaatgatcgatcagtcccatcagtctctgttaagttttgtcttctcatctgcacttctgtcaggtcttaataataacccaggatgacgctgagagcgctgaaactgttgaaaggatcaggagctgtttgctgttcctccgtgcctacacacagtactgcgatgtttcagagctgtttggcgatcgctgcagtccctgtcccagcatttgtggcaaac

SEQ ID NO: 84867 - DNA, 303 bp, Zea Mays
tgctttaagggctactccgttcggaggatctggtggttattgtggtcgtcactaacagtgttctaccttggaccaactaggaatgaggttaattaaggaacttaaagggcaaactctgagagcatgtgcatagatccataaaaagtgctagcatatgaaacaaaaatagtgtatagtctactttacctttttaagactggtcgtcgatgagagattaaatgggtagtatcttattgatgtatgtcaaaccttggtgcatgtagttccagaaaatttgtggccttgtggacatgcttccgttgt

SEQ ID NO: 84868 - DNA, 703 bp, Zea Mays
ctctgcccagcctctgctctctgtctggcgatttccttcctcgccggcgatctcccctccccggcggcgatcctccggcgaccttgtgcacagccctgtccttctctcggtgagcagccccttttccccctcggttttcctccctccctgttctgttgagcagaggctcttcttcccacctcttgcgcaaatttcaaatccctgtgaattccagtgaaatcatgtggtgaaatgtgttcctctgtatgccttgaacatccttgtaggttctcagctccttagggagggtttcacatcctcaaataaccatttctccaaaaccctaaatcctcgcacaccacatgctcggtgaaatgcctaaaccagccaaaatgctccaattgaacccaaatttttcaggcactttcacaacacctccagtaacatattcgccaaatttcacgcccatccgatattccaggctttaatttcaccaaattccccgtttcgagcgatcgtttccgagccgagtgcccaaatctcattttcttcgcctaaattcaaaccaaacacacacttcactcatattcacctatataaacctattcatgaagtatcggctcaattccacgtcattttgtgcctcaattcgaattccaaacctccgatggcacttttttatcgttcaaacgccgttttcacgtcgtttgacctctcgatcgcc

SEQ ID NO: 84869 - DNA, 556 bp, Zea Mays
tgtcaatgcatcttagagcaatgggtggaaaaatttggccaattgtcaagaatgagtttgttgtgttgaaagaagatgaaccatcggctagtgacaatgaaaacattcttacaaatgatcaagccatgaatgtattctatgatgctcttgacataaatgagttcaaccgtatcaaaaatctcacaactgctcatgagatttagattaagctaatggaaattcatgaaggaactaaaattgtgaagagtgctaagctatatgtgtgcaaaggaaagtttgagcaattcattatgaaagaagatgaaagtgtatccgatatgttcaaccggttaaatgagatagtgaatgaactcaagggacttggttttaatgtaccagatgtggatttcactcataagttccttagatctcttccgaagaagtatgagaccattgtgaccatgttagtaagaagtgatctatctacaacctctccaaccgaagtattgggggaaattcttactcaagatatattcaagaaatctcaagctgatgctataagtttggcaaagaaagt

SEQ ID NO: 84870 - DNA, 363 bp, Zea Mays
ccatctcctctggctttagtctggtagtgtaattcatgaactcggcagaaaccctccccgaacggttccacccctggctacgaagagcccaaatgtaaacacttaatctaacaatagcattgggggtcagctgatgaaggtaaatcccaaacttcttcagtacaatagcaatcatcttgttcagggggaaccttaaaccaactttaagaaaacttttgaagactactacctcgtcctttcctagctttgggatagtttcctctccaccaaaacgaattaattccttcttggcctcactaaaataacccatcttcaccattttaggaagatcagcttcagaaatggtggactttccaaagtcca

SEQ ID NO: 84871 - DNA, 760 bp, Zea Mays
cgctaagcatgactatagcgtttggagtcagtttatgaagatagatttcaaacttcttcaaaacttcactgatcatttcgtacacgaagtcccgctctaaagaaactcttaaaaaacaacgacttcatcatttgactggtggacaggggacacacttttgtgtcatctatgagggttttggatattagtgtgtatgatgccattctgggatttgactggttaaaattctatagtccaatgcaatgtgattgggaaaataggaccctgtcctttgttcatcaaggagaataaattcagttgaagggggattctgtgttggtgaccgaagttccagaagtggcaacactgaaggtgcagaaatgggtaaaaggaaatcatgtttgggtatttgttctgttcgaacctgttcctgaactagtggaaaatgtggagcatgaacctctgaatgagttactaaaggaatttcaggacatctttgaaacaccaaaggctctaccacccaccagaccttatgatcaccatatccctttacttccaggattagtgcctgtgaatgcaagaccatataggtattcaccattgcacaagtctgaaatcaagaggcaagttgcaaaatttttaaaggcaggccatatagtgccaagagttagcccttttgcctctcatgtgctacttgtgcagaagaaagatgactcatggaggttttgtgtggattatggaaaagttaatgatatgacaatcaaaaataggtttccaatgc

SEQ ID NO: 84872 - DNA, 313 bp, Zea Mays
attgtttagttcacctgttggctaaaaatgcttagttagcacttagcggacatagacttgtaatgtctaaacttaggataacatgtgttccatgatttatgtgtttgctttagtaattaattgtggataggaattcctcctctgttgaactggtgcttgggatgcttttgtgtgataaatagaagaataatgaaaagccgtagcaggttaaatagatgctcgtacttatggggtcatatttgtgttgcgtaaatatacaaatgtttgtcgtcttttagtggtgttactgttgtgcgcccgatgatacgtagtt

SEQ ID NO: 84873 - DNA, 684 bp, Zea Mays
gccgatgataatttatttggctctggatctaagtgttttgagtctgatggtgagtctgggagttcgttttcttggacggaggagtcctcggatgaaggcttggattattttgttgcgttagatgtagccgcagcggagtcttcgccgcgtgtggaggttggcgaggctgctgatcttcctagtgcgagtactgagtataggtggcgaagggtggtgtcgaaacacagtgtgggtgagttttcgcgaagtggtaggcgccgtcgtatggggatggagcgtggccgtcttcgagtagaccggattggtaaacgagaattgttgtcctcgccgtttggggcgagcataggtgagggggatctgcgaaatctttttgagggtgaggaattgaggataatgctgttcaattatagggagatgggtatcatcccgaaggttgagccgatgtagtatatggtgccctcgccgtgtgtatgtaactgtaacttgtattgcaatgtggcctgttggccgttttcgcacgcctgtgctgatccggctgcacccgtgagcgacttttgcgcggagtgtagattgacgtacttgctgctcttgtccgtcggcacccttaggtgattttggcatgtagtgtttgttcggtgaaaagacttcgatggcgtattttattgtgcctgtccagctgcaccc

SEQ ID NO: 84874 - DNA, 531 bp, Zea Mays
caaggccgtgcacctccaacagaggaaaaacaagactggtagcaccggcccactagggaggacaaaaggcacaaactctctagcggcaagctcatcggagtggataacgccggcgcaaatccttccgctgagcgccggcgcatcccatctaagcaagtgatataccattttgagcactcactcagtttgggcgtgctcgggatgaagtcacaaggccatgataaactatggtgacacaaaccaggaaccttaaaggtaaaggggcgcagaaagctcgaaggcgaaagggcgccgtgagtaggagagaagcaagacatggctgctatccgaggggtgaacccctttttaaaggcaaatttccccgctcgcgccccgaagcatcacgggcaaggtctcccccgatgcgcaccagggtccccatcctatgacatgggggccaagcctcacatgtcatacaagctggcccgaagcgcgaagaaggcgaatcgtcgcacaaggagcatgcaaccgccctgtggttatacgcccttc

SEQ ID NO: 84875 - DNA, 639 bp, Zea Mays
cactatctgggccgcaccaaacatcactggaatatgggccacatgaagattgtagcccaggacaccagcattgtttgtagtgctttctttactattgtggttagtgccataccgggcagtgaaacaggtagtgaacggcttataagcgttgatgcagcctcaaatgtcaacttgtttgtggcacaatggcgttggtaaagaacggtttaggtcatgtagatatttgttttgcttggcgcgagagggagcagagttgtgccttagggcccgcagcgtgggaggcagaaccgtgcaccacctaggtgtggacgcctacgctatggtcttaagtagtagtggagatattagaagctctaggctctcaataactagaggaagccttggtcatgcctctggtctgcctgagcaaacataacacgtgcgtggtggaggcccaactagaagagcccgagcgctagccccattcaccccacagggtcacattagatcgccaaccgccctcgttcctgaaagttccctatgtccgggaacaggatctggatgtcgcctagagggggtgaataggcggataataattatcactttaaaactggaaattcttactctactcgaaggctggattgcagtggaatgaaaggc

SEQ ID NO: 84876 - DNA, 412 bp, Zea Mays
atctcaacaagttcaaccatttgtcccagtatgccattgatcaggtcaacactgatctgaagaagagaaattgttttatgagggcccttaatgatcggctgcagcagaaaatggccacctgcctcgacctctcttacagcagggctgtcagcacgacactggcagtcgaagccaagtatgcaggcccgggcaagtcaaaggactatggaggtgacaggcccaaccaggggcctgagaagagacaaaggttggtgatccgaccttttaatcaaaaccgttcttcaccacgtccaccctcctacccctttaatcaacatgtctttatccgtcctgccactgcccccacctcaacaaatcagtcgagtgcccctggtactagtttccctgcactcccgagttcatctactggttg

SEQ ID NO: 84877 - DNA, 542 bp, Zea Mays
ctaataatcgtgatttaatgcaagcgaaactgtatgagatgatctaatctcatccactagtcacgcatccgacgacccaaactacccccaatgaaccgttatatcatgttttaatcctggtcattcatagatatattaatagctactggcaccccacccatctccctgcctttccccaccaccatagggtggcgcctccatgccgtacgacggagggcataccagcgacgtgttgtccggcacattggtgccctgctagccaatccagagggtcatatgagctactcgagacacgacgaaccagatgagtgcatccttacctccaacgtttgcggagtctgcaccgtccatgacgtggtgtagatgcctggcggagggttggctccgacgagaaattcagccatccctaagggtcctcccccgcattagagccacgacctcgctctccaaatcttagcgaacctcccagacctcctgttgatccccgaacatcagtgtgggcggagcgcgacgtaaggacatcttctctcgttctctccctc

SEQ ID NO: 84878 - DNA, 443 bp, Zea Mays
ttcacctggtcgatggcatactgcgacaggtgattaaatttgttgagatattggttgacggtatctccaccttgttgtaacttcataaactcctcttgtttcatatgcagcactccttcggggatgtagtgttcacggaaggctgctttaaactcatcccaggtgacttgatggttgacaggttgaatagccacaaaatttccccaccaggtactggcaggaccatggagttgttgtgcggcgaacaacggcttctgcgtctctgagcaacggagaagaccaaacttttgctcaataacccgaatccactcatcagcttctaggggatcttctgccttgacgaatagaggtggacgggtttcagagaagtccagataggtggtttcacgggggccttgctgaaaaccccttcccgcctgctgctggaattgctgctgacccgc

SEQ ID NO: 84879 - DNA, 1285 bp, Zea Mays
cgcccgtgttggaattggaagcgcctgccgcatcgccgccgcccggggagccgtaaacaagctcccggcgaagaggtttatggtcctttaccttcgttctcttcactcccgagttacggttatatattattagtaggatatatagtctaattaaataggagaaagaatccatcttagatcaaagtaaatttaaattatataatctgatacatgctctaagtcactaaatgttgtctgatcatctattcttcgttcgtgttcactttcgctcaacatcatgattagtatttctttatattgtttacatcataggatagaatgtttttgcttataatatatatatagtactttgaacctcccaataattgttttgtactcggatcaaccagtacgtgcatgatatgtgtatgcatacgtccgtatccatcgatcctcgttagactaaaccgaagagacaacatagcagcagctgttacacattcgacatttccagtgcagtacaaacgacacctttcatcatccaacagctctgagatcatgtatagtcagactaaaccctgatgctgcaaactgaggaattaatgaaccctggtgtttaagtttaactgtgacgatagttctctctgctgtttctgtatcacagatctcggtcgaaagctaaggtgacgatccgagtgctgatctgaagagcaccacgcctacagaggagtgcgatgatcatgaaccggtgacgacagatagttctttgctgctttggcattagatttgaaggccaatcgtgtgcagcagagttaggctgtccccgctgggccactgtgtctgtatgtgttacgtaaaaccagctgcaacagcgtacttgatccccacgctatatatcatccagtaggatggatggaacgcgaaacacagcgttgtacgacatcaacgccatctgctctcgcgcgcgtcttcgcatgctcgaatgaaagtagagatttagggttcggacagccttagacgtagttcggtgacgactaatatgccaatacagaaacacaacccgaccttattagtaccctacacactatcatcaacaaccattccccgcgtgccgtacgtcaggccggtctgttgcgttctttcgcggctgcttcggcatgtatgcaacagccttcggaaacggggccgagatgaattagaaatactggacgtactagattgaaagggtaactgatggttacacttctgatgatagactacagacaaatctcttagcagtgtaggcgtccacacagagccgcgttct

SEQ ID NO: 84880 - DNA, 710 bp, Zea Mays
cgaccagtgcccttgggtagtgtggttcctctggtgttgttcatagggtcgtgcgtacctatagtcccatcatggtatattgtcgtccgcgagtcatacgagttctttttgtcggtcttctgctgatatcctcgtggtagtgcgtggagggtcccacaggtcagtcgcatggagcactcacgcgtcatgcggtcttgactgtcgtcacgagcctgcgccacttattggtgtgcgtaggcacacacccggtatggtgtatcactcacgcactacttcgtatttgggtcattgtagaagctctaatgctgagatactttatgaatagggttgtaaggtcctttgaggcttgtgggagtgtgtctgggaccgtactcaaggatgtgcggtcattgtcgttagtagccactcggcgtgtctgcggcctgtcgttcggatgaccaaccagggctcgggatgtcatgtatagtcctagttagtttggactttgcgatgtttgacttgggttttcatcttgcttctcttacttggtaggtacctggtcggtcgctccacctcgtgatcctgctcggcaaggacctgatcggtcgctccactccgtgcacttccttggcaaggacctggtcggccgctctgcctcacggtcttgctcgaccaagacttgattgctcattccgtctcgtggacttgctcagcggggacctggtcggtcg

SEQ ID NO: 84881 - DNA, 675 bp, Zea Mays
taggtcgttagactagttagaaatagaaagcctagtctgttaaaaacatgctaattttgttcttacaaaattattttattaaccttacctctttaaacatcaactaagttgacattttctcttatagatggttcgtactattcaaaccactcggatcaacaccaactacatccctccgccacggcaagtttctgtctacacagtagtattcgaggaaatcccagtggatcttcctcacattcgtgtggagaacagagtaattctgtaggacagctcggaggagtttctgcctacgcccaccccgttggctgaatcactagccttcgcagctggatcatcagcttcaacaccagcactagcagtcaaagcccctgcccctggaggcgacgacccggatgactctggtgatgacgatgaagacgacgacgaagaagaagaaaacatcaatgatgaagccaactaagaattgggaacctacgtccgacccctacatgagacaaggcgagtgtacgagcctcctcgggcttgctactacatcactcgcattcatgtcagggtgatggatgcaagtgatagagggttcaggactctgttagctcatgagtctctgacgccactatccacctacgctgcttcggtcagcgatgctgctaggcgaactctctggtccctcag

SEQ ID NO: 84882 - DNA, 653 bp, Zea Mays
aactcacctttggtggatgaattgaaccgagcactagttgagatcgacgacctcgccaaggatcttgaagacgtagcagtgcaaactcagtgggaggtagaaaatatggctaactgtcaagtaaacgaacatcgacgacaagaggaaggagtagaggagcttctgatagaagatggttcagaaccagctactgatagacgaagagtcacctattaactatgaagaccttgtgggctacaacgatggtcgtgactactcaactgatgacacatatccctactagtgtgtaggtttaacttaagtagaagtattgtagcatgtacggtaaccacgtttgtatgacgaaaactaggaaaggtggcagggttggtatgatcatgcttttgggggatttcaatgttctggtctatgtaaactgaaaccatttcagctagtataattattattctgttatgttggagtatgtttgcattactttatatcatgttacatgttcagttctgttcatttatatcatgtttgatctgcctctgttgcatagaatggggagtgattggaaccaggtgatgtctcaatatggaagcttccttagccagattgacgagcagcctatgggaactcaacattctgaatttccagttgatggccaagcc

SEQ ID NO: 84883 - DNA, 380 bp, Zea Mays
cttgatcagtagccccttgtgattgtgatggttgtgtttgtgtcccattcccatcattttgttgagtgccagtcccaactgattccatacccttgttgccttgtccaatatgtctttaggttcatacatctattaaaaaggaggaaacacacagtaaggatatctatatcctagctcacagtaacaacgcattgtaagaaacacagtaagacacatgctgactgctgacgtgcccatatatactatatcacaattaataggccacatttgatatttcacattaccatatcctacctactacaagcctacaacaattagagtgtgctgtaaaatctagtttcacattagctcacaattaacagaatcaaatccgctaaaat

SEQ ID NO: 84884 - DNA, 421 bp, Zea Mays
catggatggaagctttgtgggtgagattcgcggccatggatgcaagcccagcgcgtggagaaaggcagaaccgtgcactaatttcctctgtggacgcctacgttagttacataagtagtagtagagattaaaagagtatctaccagcattaaccatcagtttctgcgacaaagagaagatatttttcttagctgctataatttttctaattgaaaattgtacagacggagaacagctacacaaccacaggtaaattttgtaaagataggactgccaacttgttagcagcatcatggaccatattataaatagaatataacaaaaggtagagcgtaccatataataatttacaatactgttctttttataatatgtggacataataatattttattcaacatgttcaccttctgtatctaaa

SEQ ID NO: 84885 - DNA, 532 bp, Zea Mays
ctacttattaagtaagcaatagtagtctgcctctgacgcgttctgccgttctgccgttctgccgtcgttagtcccgcgcaacaaaataaacagtacatgcacaagtttatacaccatgttctgttccatctctctcaataagcaacatagaatccacagctgcccttataagccatgtttcttcactctcaatgcccgatgtggcactaataaaataaatggcacgcgcctgtggcattttttcgtgcggcccaatgcattttgtggatctgaggcccattcatttgcagccggcgtccagcccacagagggagcgtgcgcgtgacctagcctcctccattcctcgcgatgcccgagtccgagtgggaggtacgacggtggaggagctccgttatcggcgtcgaagcgcggtcccatgccgagtccaacccgcgccgctgcgacctctctctcgaccgcgagtacgccgcgcgccaagcgagagccagctgctctacgtcaagatccggtaaaccttacctcccagcaatgg

SEQ ID NO: 84886 - DNA, 392 bp, Zea Mays
gagaattgtaacggatagagcagggtcgtaagctggtgtggtgtgcgttgtacctgggtgcaaccaagtaccagcatgagggcagtttagataggttcaagaaatgcgtaatatcctaggttttcttgggtgatatagaatgatgaacacaaatgtgaagaagtttacaagctttaagtatcatctgagcgccatgacctcctagcactctatttctgcttgattttggtgagagttctattctaatggtctctagttcatctatatgcttgccctttgaagatcgggaatcccgaagtctaggatctttgaaccccttgggaatgtctcgaaccctgagattgggatctagttttgacccttcgaccctttcttacattgctctgctcccc

SEQ ID NO: 84887 - DNA, 406 bp, Zea Mays
gaaccttaggtgtagcgaaaattagcaccaccatctcctttctttcttttatcccgagagcagcagacgagtcgtacgtatgtgagcctggtatgtatatatatagttagttctggcattgttattctcgacggatccatgttagttgctagcatctagtagcgcgtacagctggtagctcatctgacaatactggacaaccttagcttgctacacacaccacaacacctctcacagcacctgtcatagcacacatgtcacagtacatagatcggacatgcttgtcacagcacgacaccatgggctggtcggtgccaattaccatataacgcacaacaggtcgtggctttcacctccttacgatgaaccaagtgcgccggttgaaatggaggctgacgccaattac

SEQ ID NO: 84888 - DNA, 433 bp, Zea Mays
gtgattttagtttttttttaattagttcaagaatgaagggtattttctttcattatccttggtgggtgattaggagagcatgggtatacgtaggtacaaccacatattatgttggataaaagatgggtaggttagggcaagaatagcctagggcaagacagtttatggtgagaaaggactccttgttgggtggtaatgcacctgaagattgtgcttgacttccctccttccttgacgtggttgatcttgttctttttctggtcttggtctcattgcttcggggttagtgtatatcatcgagattgggggaaatatggttaagttagatgtggatgagatagattacatgatatagatcaaaatcttgtttggtgttagatggaaatgggcagattatgcaatccttcatgactctactggttgggttaggtct

SEQ ID NO: 84889 - DNA, 690 bp, Zea Mays
gactagaaatctcagtcatacattgctcaaccagatgttagcacattgctctctttgttgctgaatgacatgaagcaaactatgagataaaaggacatgtagaagctagcaacatgaagttgcgagtataccgagaggttattctgagaaaattttcactatgttggtgtgaaaacaattgtgtgttcccgtcgaaccactttgctcgtcctatctaggacctttatgcttgtgttgcatacatctctcagaattgtaaatactcatagtcgctgaattgactagagatagtcccttgacgagtatggcatacattataagtcaaatggtaatggtcagtcctgaatggacatataactggggttttgtagcagaactacataggattccaccccttggcatgcttatcataatcttactctaccagaagtaaaaagagtagaaaaatagttgtgaaatcccacatcaccacagagcttgaagctacattagacattaatttgtccttggttcttggcgttggaagagccacaattctcgaccacaatagcgttagtgatggcaatttgtgataaaaatataaagatcttatggagacctcttgtgttatccctagtcctgatgactctttgtatgagagtagtactatctgttgttgaagacggatcctaggcggataccagttttgtt

SEQ ID NO: 84890 - DNA, 492 bp, Zea Mays
cagaggcacactctctcagccagcgctctcttcactctctgtctctggcgattcactcttcccccgccggcgatctccagccaccggcggccaccgtccccgctgggctccggcgacctcgcccgtgctcttccccctcggtgagcagctactctcctctccccttctctcctgttctctgactgaaaggcagtggagcccctctttctctccctttgtgcaaaattcaaattcctgtgaaatctggagatttcttgttgtggaatgtgttcctttgtatgccttaaacatcattgcaggttcctagctccttcgggagggttttcatacctcaaatggccattttcctaaaaccctaactccccgcacaccatgtgctcggtgaaatgcccaaaccagccaaacttgctcaaattgaacccaaatttttcaggcaccttcacaatacttccagcaacatccttgccaaatttcacgccaattctagatccc

SEQ ID NO: 84891 - DNA, 384 bp, Zea Mays
cggatgacaaaactgcagcagaacgcatcgcaaggcagtcagctcactacactctcattggggaagcactatacaaaaggggcgcaacaggagtcctcatgaagtgcattctttcggctactgggaagcaactactagatgagatccacgtcgggcaatgcgggatacacgcagcatccaggactctggttgggaaggtcttcaggtctggtttctactggccaacaacaaagagtgatgcagccgagttagtccagaggtgtgaagcttgtcaatacttatcaaaacagcaacatttaccagcacaacaactgcaaaccatacccgtaacatggccatttgtgtgctggggactggacatgattggacccttcaagaaagctc

SEQ ID NO: 84892 - DNA, 864 bp, Zea Mays
cgcggagtaagcgcggaaactccacatgtgtcttcctgtcgacgttcatggtgtcggtcccggggaggggagtcggtgatgtgtcgtctcgaccgtccccggatcgggccactggttgaggctgctgcagacttaactcgggtggcgtgacttcgagccgggatgccatggtcccgatcgtactcctcccagcgccttatctcgttttcgtgtcatcggtcgcgcgaagcgttgctggagctccgttcgtctcgccgactgttgatggcatgtcgcaggtctctcggggatgagcgaggggtagaagatgattagctgcacgagtaagcagacatcgatagccttcagcatccggagtccacgggaggccatcagttatctgagccagcactcctccaacttcgctcgacgtgttcattgcacaagcaaagtcagggtttaggtttcgagcaaagagagggttctctcggcataaccttgcaccctgttcagcttattctcgatctcggtcttgagcttgacggtggtcacgtcggcgagaattcctgctttctctgaatacccgctcgtctggagtttctcccactttcaagacttcatcacgagatacgggctgcactggatcccgctccccagcttcgtgatgtcactgaatattccggcgtctgtttcttcgtcaccgagcttctcgctggggaggttcttctcccggcatggttggctcgtcatcggagatgggagatgactccaatctccccctgatgaagaggatgtcggggtagaacggagttattgcggtggcaagttcctttccgtccttctttgagggcgaaggtggcggaaagatagctcgacgggcctccg

SEQ ID NO: 84893 - DNA, 731 bp, Zea Mays
ccgtcggggcctcataggtaggccatggagcggcgacgggagctagggaaggtgcaagggcaattcatcgggcgcgagggaccgtagaacggtggcaattgctcgccggacttcacaatctgccatcgttcgtggacagcgcgctaccacctcaaacaccgatgtgagcttccactgtgtggttcgcttttgtgtctgcttcatgtagaggcgatcggattgtgttttggggctatggtacacgggataaaacaacctctggccatgacgtcgccacgcagtgctctgcgtcaccgtgctaggccttaggaggggagggtgatggcctagatgccatcaatttcggatgggcgatcaagattaagtgtgcataatgatcgggcagattcaatctgtgtcgttggatttgggacttgtgatcgagaatcatgggcggatgtgacgcgttcctggctgtcaattttagatcctgtggcaatcgtcggatggagtcagtgatctaattagtgccattgagattaattggacgactcaacttcaaatgtaccccttcgccttgctattttgttaaagagtccctgaagtttcacagaattaactcgccatccacacaagtggaaatatcatcgtagtttagtccaaattcttataaactcgaccctgagcttttcagaatttgtattcgtcttccaacttccttcatgaataaaagaaaaatccgagaaattgat

SEQ ID NO: 84894 - DNA, 536 bp, Zea Mays
ctggggcccatcggtcagcgagcacactagggaatggtctctagcaactatggcctgccggtcagctagaggagataggtaacgtctaccttggaagaaccgccccagatgaagcctgcggcaacgagcccggggtcgggcgtggtagaacatgacaagaggaccgagcgtgctgaagggaaaccactcgagtggatccggcgcttggcccaagagtgacccgtcataaatgaccgcctgcattaactgcgcttggcactgagctagagtggaggcataggtctgcctcccactcatgacctacaaaaccctcgagccgcagagcactcttaacctatgagcccttatattgtggcgcatttatggaccgcacatacctcatctagcgacgcactcatgacctattgggactaggcctgagtgcgcagggcgctggcacggtgcaacaagacgagccatgctgagccccaggctacaaaggctaggtatcagcatagcccaaatgatggcacttgggcccctagctatccgccaga

SEQ ID NO: 84895 - DNA, 648 bp, Zea Mays
tgaagacaagggtgttcaggtcattaaggaaatgatcaagcagaaagcagagaaatacaaatgcttccggcaggacaacaaaggaatcctgtggtttggagatcgattggttgttcccaaggacccggagctcagaaagaagatattggatgaagctcacctttcaaaattctccatgcacccgggcagtaataagatgtatcatgatctcagatccttatactggtggaccagaatgaagagggaaattgccaagtatgtatccgagtgtgacacctgccagagaatcgaggccagtcatttgaaggcagcaggccctttgcaaccccttcccataccatcttggaaatgggaggacatttgcatggatttcatcgtgggattgcccaataccccccgacaccatgattctatttgggttattgtggatagattgaccaagaccgctcatttcctgccagtgcacaccacccataagacagagaaatatgcagaaatatatgttgatcagatagtgcgtttgcatggtattccaaagaccattgtatctgacaggggagcactgtttgtggcacgcttttgggagcagctacaagaatcacttgggacccatgcaataaggagctccgcatatcacccgcagacaga

SEQ ID NO: 84896 - DNA, 387 bp, Zea Mays
tttgaacaagataaccctgatgatagattaccagatatgatgcatgagttattcacatctgaagaaggtgcacggaagtccaagtttgcagttgtcttagatgagatgaagtaggcacttcacccaggttcaccattcacaaaatttgcttttgtggttaagttacttcatatcaagtcattttatcggatcagcaatgtggcgttcaatgcaattttaaagttattatcattgtcattcccgcaatgttgccttccatcatcttataatgaagcaaagaaactcattcgtgtattaggactcggatatgagtcaatccatgtgtgcccaaataattgtgttttgtttcggaaggattatgcaaaaacaaatgaatgcctagtgtgt

SEQ ID NO: 84897 - DNA, 674 bp, Zea Mays
gtgattcgagctcgccgtgaagattcatgcaggggatgagttcatactggccctgccgtacccacttgctccgtggccggttgagctgtcatcgccgggagccatcattcactgctaccatgccacatgattgttggttataccacgtcgttgtggtcatggcggggcagtaagttactgccctgagtcgttataccgccgcacgccacgatgatcaagtcccagtgaaatatctcgtcgccggcgtccatgctctcgtctgaaattcacaagtaattgggccgatccctttaaattgaagactctccctgctccacctatctgacgtgcctagcccaccgctcacagcttcatttcatccaccatagcttgagctcactgaatttccttgagaacggccaccaacgccgccgtggggagcctcgccatggccgaaccatttctgattagttctcacttccctagctcccgttctaacttcctctgattctccagtagcttacggtgcgggccgactgaatgctaccgcagtaaaccaccaagaacaccacgtcatcatcgcagaacgctgccacgccatccatgtcgactcactacccggttccttcacttgtaccctcgaccaccgttcttgagtcctgtggagtcactgatgcttgccatgccttgtattt

SEQ ID NO: 84898 - DNA, 480 bp, Zea Mays
acaccatcaagatggagaataaacggaagagggaggcatacgcggtggctctggtggcacacaaaaggcatcgttttcaaaggaagagggagaagaaggttgcatgcctggcccatgccgtgccggggaggagcatctccccatccaccaatacagaggacatggccttcggcgggatagggcccctagcgttcatgggcggctcgtcttgtcatggtgacccagaggctagctctagtgtcccggcccagaaaaaggacacatagtggatcccactacacttgatgcgcctatggagggtcgtgaggaagggatgtagactacatggtcgtctaccatgcctgatgcgctggccagacatggagaaggtggggctgcactagtggtgccatagccttcggcatccattatgccatcgaaaggctacgagggcaaggagtaggtggcaacacttcctagaacgccctccatgccggcggc

SEQ ID NO: 84899 - DNA, 554 bp, Zea Mays
atcaatggtcctctatctcctccatcctctaaagtaatacaattcagctgtgggtgtacaagggccttgcacttgtgtcctagcacatatttttccacacctctaacacaaatcatttgctcttctatattcttttaacttcttggccttccacacccccttgtgattcttggttctccttcatgatgcgtggcagaactgttcttgctcatgcactcttcttcaccgagggagcttgtctgttttgccacttctcatgtttcaaggacaattgtgctgccatcgaaactgtcttaggagactgagtttccaccacaagcttcaactcatgtttgaggcccagcataaactgagttactagtaatgtctcactaaccgctttgtcaaatagtttgatgtagtaaaccaacttctcaaactgaattttgtatcccagcactgatccaatctgtcacaaggttagtaactctagcatcttatcagaatgtgtggatactcaaactcatccaatatcgacatcttgaagtgaaagcactccataaattcgactgaat

SEQ ID NO: 84900 - DNA, 528 bp, Zea Mays
gcatttttcttcctctgagctctctgttctctacgtttgctctctctctccagcgatccaccctctcaccggcgtccactgctctccggcgacctcgaccagtgcttctctcctcccctcgctcggtgagcagcctcctttcttcctctttcttctctctctctgtgttctctaggctgagcacccctttttccaccccttgagttcaattccaatttctgtgaaatccagtgaaaccaagtggccatatgtgttcctctgtgtgccttgagtattcttgcaggttcctagctcctttgggagggttttcctacctcaaatagccatttcaccgaaaccctagaactctgcacgtcacgtgctcggtgaaatgcccaaaccagccaaaaatgctccaattgaacccaaatttttttcaggcaccttcacaacacttccagtaacatgtttgccaaatttcacgccaatccgagattctagtcttaaatttcaccaaattccccgtttcgagagatcgtttctgagccg

SEQ ID NO: 84901 - DNA, 409 bp, Zea Mays
gccctatttgacggcaacacaaacaacataagcacagcccagatgggtcgggctcttggagcatgctaggttttaccccacattggtaagcacctaagtaaggttttggatgattttggcagtggcagatgtattggcgatacatagacgtgagctcatgatgaagctaggttgttttgctgtggtagctcacatgagcttttctgcagaaatggaaagctttaaaaccttggtttgcagttatgtatatagtgcttagcattgtgttgattatatacttcaaaaggaaacatatcacaatggttgattggtgtatgataaaatcaattttagtgctcaagaggtgtctaacctattggatccttatgttttattggtgtatgtgaaataaaaagagactgtaattttt

SEQ ID NO: 84902 - DNA, 507 bp, Zea Mays
gtcccgacattccagaagaggtggccaggagcctggatgcaagagtggttttatgtgaagaacgacttaattaaaagagaagatataaaggggatcatccaacgccctatctggtcttgctttggcatcaggaggctgtctcttgcacttggaaatgacgtagaagcatgccaagctgcgtataacacagtttgcacatatattggcaccagggacttagttcaggagcacattgcttatagagtgtggccccttggatgtggctgggagatgccgaaggaagcacctactaggtccagccaggatggtctggtttacctgaagtacacctttagatacaaatatcaattcaatgagccgaacaacgattggctaaactgcattgaggcaactagtgacgagttgcttaatgcctacacgagggccaaagatgatgccttgacagtggccttcggagggcgaggcaataagagattaaacagagtctttgatgttattggcttcgtg

SEQ ID NO: 84903 - DNA, 463 bp, Zea Mays
gtttaccttcggcaatctgctctttcgacagctgcttccccgaagcatgtcgcacgataaagtccacctcttcaacaggtacttcgggagcaggaactttcttgggcacattttcttcttccaaggtcaaaggaatagattctgaagcatatgcctcgataggagctgatgtcccagcttcgacaatatctagtgtcatatcagcttcgctagatttctttgggatttcatactttctatcaggagatgaagcaagggtttgtacttttgaagattccataatagcgtctagtatgctggccattctcctcctttttggagttattgcaggaattatggacaccttcggcagctccggctcttgtggcaggcgcagggttttcggttgctctgccgacctccttaattctggatcttcagctgttttctccttagcttcggcagaacgcttcggcacttcggc

SEQ ID NO: 84904 - DNA, 1016 bp, Zea Mays
gcggactgaagcaccggcccgaagcgctggttcaggagtttcctgaagcgcccccatggcgacgtgccctcgtcctcctggagttggatgaaccatagttgggccacatcctccaggttgtacgacgccatccacaccttctcctctggcatggtgcgttgttggcgaaaatacgactcgtaccgatcgattgatgaaaatcagtgggtcggacttgccgtcgaagcgcgggaagtccatcttctggaaccgcggggggcgatccgtgtggtgtggcccatcgtggtggatactggagtcggttgacgagtcgaccttctccttcatgcccaccatgtcggtctgcatctttgacatggcggtggtcagggactagagcattgtcatcacctcggccatggtgtgttgatcgccatcgcccatggttgacggtgcggacgttgccgtggacgacgaggaaggagatggaggcggcggttggaatggtggtgaggctgcgatgaaagattgggtggaggtggtgggagaggatcgacgagactgagataccaggttgtcaagggcagtgagcccgagggtagggggacctcggctacgtagatcgtaaccgctgtccgtgatggccggccgggttatacccccttgccgtcgttcttcgtcggtgggttattcccctaccgccggcttaggtagatgaagagagaggattagatattaatatctttcttaattcccaagtatttgattacaatatatttatagcctccggctcaaccaaaagaagtaacaaactccactaattaatgaccaaccaaaatagctaaagatctccatatttatagcctttcggctcaaccaaaaggagtaacaaactccactaattaaggactaactaaaatagctaaaaatctcctttccctcctaaccgctgctggaggccgtgccctgcgtgcttgtcgtgcacgcagcagcacgttcttgggctcggcgcacgtcacgggccctacggcgtctga

SEQ ID NO: 84905 - DNA, 582 bp, Zea Mays
gtcggctagggttgggaaggaggggggcacccatccatcggatcgagatcaaaggcccgaacacgctctcccatcagagctcaactgtaacaccccagcggaaaaaatgccaaaagatctattgtttctgtgaggaatgcctcctgaaactccaaaccccaatgccacagaacatgaaagaaaggagaaaaaagaaatttaacctcttttcagaaaattgggatatcacaagtttgcacaaccaagtgcccatgaatctagcaatgctaaaaatgtacaacacatcatagaccatgctagtaatgcttagaaatatacaacacatcattggccatccaaccctagtacttagtgacatatctagagtgggtgaaagtaatcaagaggggagagagacaaagcacagggagaaaaagagtaggaatatacacccaacatacacatcaaaggcagaaagcctagcacatctttggaaaagaacaaagagtcattgtagttgcgacactgaacaaatcaacaccacaagctacaaaagtatggacatatccgtaggagttacgactcagaaagtgaaatacaaac

SEQ ID NO: 84906 - DNA, 935 bp, Zea Mays
aatatggctggttaggagttatcccttcttatttatggagcctattacacattcctaatcttcccttagatattttatgctaaaccacttaaccctagaggcacaatggtctaagttctcataggtgcatccaatgactataggctcttcattactttgcttcagctcgatgtaagcttcgtgatgacgccacatgcatgtcgcctcccattcatgctataactcaagtaggattttgaggcccaaaccactaaacccctcatgagtagtgtatctaatatgctccctccacaatcttggcacatgtccctccaatcctcgaccacctaatcacttctataaggtccctacttgacttggtcaacatggtctagtccatatacaattgcacttgtcaatgtccctacatgtcataatattctaaatagtgggctaaggcatttagcgatcacccttattaaatagctaatagtgggttgaattgggctatagcggtgtcggtgtttcgaactagcaccgatgagtaaatttttgtatgctcgttttaggctcggatagtttgctcagtgcgtgcaagaattatattggtttggacaaaatatccctgctcttgtcttcaatggttcacactactggtacatgatttcttgtagtagaggttacaagtgggcgagagagtgagaaacaccaagtctctatatgttgtttcactctcttaggttcttctttgttgcctcggggtcatggggttgtggtgcttgttgtgtcttcgtcttctgttcgggtcccagggggcgcactcggttctatctcgggtctctcctctctctctctctctgaggtcggcctataagaatttatcttagctttttccttgaacaaaataatggttctcaacaacttaaggggtatttggttcgcacctcctaaacttt

SEQ ID NO: 84907 - DNA, 323 bp, Zea Mays
ctaatgtggtgtcttcattgtacctctaaggttggcatccctcacaaccatgttggctacctgccagcatctagatactatgtatcattcatgcatcgtgcgtcgaagtagctcttcaatgtttgcctacaatcatgtgttcctcatgtaatctacaccaatgaatctcgtcttacaacagtcctagacttctctcgtatatcaacttatttgccacctacatgaggagatttttatgagcatggagaagatgcaaccttgccttcttactttaatgtgcacatcgatggtgactcgatccatttgtaggttcgatagtcttt

SEQ ID NO: 84908 - DNA, 460 bp, Zea Mays
ccaagttctagcgcgtgttgtcactcatccgagcctgctcttgccttggtcagtgcacaaaacctcttctcctccctataagctatcgatcttgtgtggggatcataggatttggcctactggttccaaagatatggagctctcaattcaggtctgtctctcaacctgagcctgaggcaaatcttcagttttgtcatgtctagggttcgaatcccaatgccatctttagatatgtggtagaggggttagtttaacacatttttgttagtgggagcttagcgttttgagatagggattaaggtgaacgcgctcggttttgagttagaggctgaaattcagaaatctgaattttagatttctctaggaagcctccaattgagtggcttgtttgaggttttcaacaaactattttggccaaacttttataacctttattgtagcttagtttgtgtgtttcaac

SEQ ID NO: 84909 - DNA, 506 bp, Zea Mays
tgaccattggttgtgttgctcctgcagatccatcattagggatgaagttcttgtaatggtggccactatagcttttgggatgggtattgataagcctgatgttagatgtgtaatacactatggatgtccaaagagcctagagtcttactaccaggaaagtgggtgatgtggaagagatggactgccttcaatctgctggctaattaccaaataagtgatattacaaaagctgatttctattgttctgaggcaaaaaatgtaggtcacttttttgcatgctggatgttttctcacacagtcataccatccatgcagcgcagtgcttctgctatgtgtctactttttttttcttaatggtttaattcatcaaacaggaaacccagaggaaagcaatcatggattccttcatggcagcacaaaaatattgcttccttgctacatgtcgtaggaggttcttattgcaatattttggtgaagaatggaacattgactgtggtacgttcttt

SEQ ID NO: 84910 - DNA, 397 bp, Zea Mays
ttgcaacgacacctctcaatatcatttcaacccctttcaaaacattctcctcagatatgtgcttatttgttactcgggaagggttgttcaccccaatatacagatatgccaggtaaaccctatccttcaaaggttgaatgttcttgaagacaaagtcgatgacaacggcctcggcagtcaaacctctgtctttcaaaccagctatctcagcaagcagaatcttggcttcggcaacctccaagtcagttggggcctcaacccaacttggcacttgaacatcaagttgtctcgtagaacgagcaggtagagacttgttgtgattttccatagtgaaccactcaaagcgccatcccttgatgctatccttcaaagggatatcaagatactcaactttcct

SEQ ID NO: 84911 - DNA, 1334 bp, Zea Mays
caaacttgagctaaccccgatctgtagggtccgcctcgctaggcgtatcctcttctccatccataacagccatggccaaactccatggccagtcccccgctcgcatgcaccgatttgagctccatggctcaaccgcccatgcagagtcgtcgggttctgttacaaccacccgttctcccagctggccgccaggtgcggactccatgggccatataaagtcgtgcccgggtctcctgttgtgtggtgagtggaagccgagggccgccgcggttgcaagaactgggctgtggtgcacgccgaagcgaaccatgggctaatagagcgaaggtagtgcttggagttcgaaggaaagtttgccagagttcacgtctcgtggggaacttcactgtgtcgacgatggccagcctcgtcgttgattgtgtcgatggccagcctcgtcgttgattgagcatcgcggccaagtctgttgtgaccgggattcttcaacacgttccacctcgaggtatggatccaaatgctagcagcagcatctctcaactacttccgcgtgatgcgatggtgctgggtacgtagatgtgcttccgctctctgctgcatgccgttgtaggccatcctattgcctctcacgccctgaaaccgggtctccggctaaccacctagcttgcggacaaactctcgccgacgaaggttcaccgtgccgcgtggacagcttcgccttgcctcctaaccttcggtaatgccccttggatcaattcgacaccttctctgcattgcttagcacctagttacgcttggaatcaagccctggcatgataattgggtgctccgcggtcatggcgccgccgtgggtagggccggcgtgctgccgtattccggctgggaggaagaaaactggcagccattggattggaagttgacggttaggatgggttatgggaaggatgtaccgtggaccgttgatcgcggaatggacgtatcggattagattcacgtatacccgttcgactcattaaatccagggcgtagatcttggatcctagggctcgggttgcgtaccgatttgtgcgcggccagatttaatcgtgacctttggtttggatcggacggctctgaatcaacgataccccttcgccctggctttctttctaaagagaccccggaaaacttgctattcaacccgcggtctatcgcctgggttctctgtgtcttggtgcactttgcgccagggcccctgcacttcctaatattagtgggcccagtccagagtattataaaacagagaaaataatttataaatgggtttttaatagataaataaatgctagaacttgttt

SEQ ID NO: 84912 - DNA, 862 bp, Zea Mays
ggtttttcggtttggtttatttgggttctaaagattttgatttctagataatagtgttggcaccttttttgggccaaacaccaatgatcccaagatattgctcgtggggaacgagaccttagggacctctctgcaaggtagtggacaatttgtgttggtcatcagaccgttcatgatgtgcgcataaagccgaggaaagaacccaacccctgcaacctaggagggatcccattagaggggaaagatcttggtgttgtcttgggatcggcaagtaacccaggacatctctagacgatttagagtcaaagagaggttaagattgagattgagaaactacaactagagttgcactatatctactccaaaggcatgctaatatagatagattggttcgattgtattttgttttctcaatcaattgtagcccttcatatatatagggggaggcctggacccgttcctaggcgagatccaatggttttctgcaagtttgttaggataaccacgcatgggataaggactctcgactgagttattctaatcatggaccgtctggcccgcggaccgtctaggccacatggctggaccgtccggccgtctaggtgccaaatatggttctcaacacacgatcccctcccttttggaggaggttggtgaatcaaaaacaccttgtactactagcctattttgggaaacaatagattctgcaacttgccttgttcccgaaatacaaactctagcccgatgcaagtcatcggctcttgtgatcaaacaatatagccatttaatagacctctaaggcacaaaggtcgtttaggattgcatcctcttcggccatggctatttgatcaatatgtgaaaa

SEQ ID NO: 84913 - DNA, 418 bp, Zea Mays
gcgatgggatggctttggctggacgccgccgagacctctcttccgtcctcttcgtccgtcccgtccagcttgcctcatcgcattggcgaacgttgtgaaaggctatcggtaagcagcagcagccaggagcttgactttacagaagacgacaatcgcaatgcatgcaagtgaaattgttgggtcggttttaattggatttcttgtcccagtttttaactcgccaatatcttaaaatagtgtagaatagttttatccatatggaactatctacccatgtaaacttttatcatctattttcgtcaatacactattatgtcaacatatttaataaccttaaaattcgtgtaaaatcttggttaagactggcgctagtaaaggacaaaggaggtcccggataggtttaccgcgcgcgggaaga

SEQ ID NO: 84914 - DNA, 441 bp, Zea Mays
gtaaaattcaggacctgactgttaaactttttctactgcagaggacggcgggttgattcatgtatttgccagggcctcatttacaaaacgtctctaccgaaggggtacggggcttgcggagccgatggatcaaccgcgtgcttcccagattagattggcgcggttaaagaaccggtatgctacacgagtcctcggataggagatctacggtccgagacccacgtgacattctaaccgccagataacctattgacagcccaaaacgcttccacccagaccaacgcccagatcaaatctcaatcgtttgtcgagatccgacggccacgcggtgactcccatcaccccggccagagacggtggcgtcgcgctcaccacggcggtgtttcacccgcaaacacgcctaccacatccaatcagccccaaactcgaaattgactggtg

SEQ ID NO: 84915 - DNA, 534 bp, Zea Mays
agtaggagcagtagttttgtttttggtgaatgataatgtatttatgaccaagtcataaatggtattgagacttagttgtctatcatgtctctggttttggcgtacgcagcaacataattttcgccacttgacatagaggaaggactttctcatttccttcaaccgcccctagtattctggccccctaggaggtagtctcaaatgtttgaggctagttaccaccaaaccagggtttagtcatgcatatgactcaaggttgatgtttagtagcgcacccatggaattcacactctgttctctccgatccattaagacatgcaactaggcttgatgaacagagcttgggaagccaacccttaagttaaatgaggtctgggcctctagggagccagatattagggcacctgttccacagtggtgaagtgtgtaggcttagggtataggaccatacttaacggctacacggatacggaccacaccaaagaacaagcacctttccttcggacctggtccacagtgatccgaacctctttc

SEQ ID NO: 84916 - DNA, 761 bp, Zea Mays
tgagtttgccggtgtacctaccaaatccattgtttactactcggcaacgagtaccttatggcaagataagcatcagtacgtatattatggttgagttgtacctaatttgcattcctcattaacaagtcaaaaactgttgaggttgactttgtactggtgaacaaacaagggtgagtcagacgcaacaacatatggcccggacaaaaccacctctatatgagtggtagcaggataaatttttgctcacgaagatcacacttctttgtctccgatcctgttgacgattattccctacttgaaggatgcctagcttgcactcactctcgcgtacctggagaggtttgccctgtttctataaacacgttttatgcagtgacgaagggcgagaacatgtatctctaggcatttgcagtagttaaaaccctagccattcaattacaaagcacgcatcccattttcgacggtcaacttaatccaaggcaattcatagccagctacggaataacggttgtatcagaaggtgatgtcgtcctagagctgacaaagttattcatcatggtggttgaaggtctccctcacgactagtaactctttgagaccacattcgatacgattttggagctagatcaagaccgagatgcttcctatttaaaggatagcagcccaaacctaagacggctgggaccctcatgaattgcatacaacgagatgacaaatcactcgtcgtctatcttcaaagattcatccagtttagggcctag

SEQ ID NO: 84917 - DNA, 326 bp, Zea Mays
ctaaatggagacaagaagacaccgagaagaaggctgcagggttgccgacgctgtccgagcaacttggtgaaaggacaactaattagatctgtgctagaaaaccaagggaaactgagtctggtgtatcttttgatgatcccactgtcgaagaagcggcaaaaaacatatatgcaattgcagctaagcagagccaaggaacatttaagccgcaaagggagagagacattctaacggctggtctcggtaaccctgagcatcctggtcgtgtacgaggaatctcatctaaggatggaaggaaggattcggaccacaatgggaaggtctgt

SEQ ID NO: 84918 - DNA, 686 bp, Zea Mays
atacgccattgatcaagtggacacagacttgaaaaagaagaattgtttcatgaggggattaaatgatagactccagcgcaaaatggctacgtgcctagacctcacatatagcaggtctgtcagtacaacactgtcagttgaagctaaaagtgcgggacaaggaaagtcaaaaggaaatgcgggtgaaagatcaactcagggacctaaaaagagaacaaggttggtaatcagacctttcaaactaaattgttcttctcctcgcccacccatatatcccttcagacaactcatgttcattcatcctactcctgcctctgaccagaacaatcagccaagtgcccctggtgctcgttaccctgcccttcccagtccctcgagtggttgcttcaattgtggcaagtctggacatttcatcaaagactacccctacccgaagcaaaacaaatcaaactttcaacagacttccgggagcacaaatcaaggaatgggaaacacgaccaaccctctagcgagaagaaatatgaagaaaactggacgagttttttatacccaggtggctactacaccggacagcgaaccggtgatgatgggtacgtttctcgttgctaaccacccaacagctatccttttttattctggtgcatcgcatacctttatgagcaagacttttgtggataagcattgca

SEQ ID NO: 84919 - DNA, 825 bp, Zea Mays
gttagggccctagaagacctagttccctcgacgagcgactcactcgacattgctggggggtctcgacaacctctggctcagccccccacaaggaagtgacgagcagcgaggcgcgctgcaacgcgccttcaccaaaatcgtgggaatgctcgatcctgacccagactcgatccatgaccttcccctcttggggttggaagacggacttagctccccatcgagtgtgtccaaccacagcttggcccatgaatacctcatggccaactcattggagggccgctccatgctcgcggagagccctggggagactcccacctatgctacgatacgtgtcacagtgtccaccttgccttggcttgacttgtctcctcaaaaatagccattagagtcgagcccttcttggggtggtcgaggccacacaaccgaaagacaaggattaccacgatggcaaacatgacagttactatggggagatgggtggatgaacaccgcaactaccaacgctcattgtcatctgtcctgcgacagggggctaaccacggttccctggggtgagccagaatgtcctggccaccacagcgcttctagacaaactccccaagtcagaaactccgagtgaacagaggactcaccaggatattcggggcctcctcggccttgtcgttcagcagcaagccgagagttctgtgtcgcggcgccaggagccaggcaccaaccaatgtaccacgtccacgacgatgggaaataatgccttatcgagatggttgtccaagctcaaggaagccacagaacgaatcccaacttgtcgatgcctaaggtcggata

SEQ ID NO: 84920 - DNA, 728 bp, Zea Mays
ttggtgccgaggttcttgtccgtcagatccgctggtaacttgctgccagttgtatcgtcccttcggtaatgaaggcgcgtcagacttgggaatcagtttggggacatatcaccctgctacaactgttaatgagtaacaaatagaaaaaagaaagatcatcactgctcatccttgttggtgatagtgctcttcgatgccatggttttttgaggatctatggctggcaatagcagcattgtggagggcagcaacgctggaggacagcgagcagtgatacagcaacgcgggaggacagcgagcagtgaggcaacaactcagttagagctaagaaccaagctggaaagctccctgtcctgctcgtggctttttctaatagtaaaatgatgtttgtgacttggtgttgtaactgtaaactggttcaaccaactattactctaccctgaagatctccttcagaagaaagttaagggaaagctattaatcacgaagaactctatcgaaaacagtaatcaagtgaagaagatatagcatttaccagctgtagagccgaccaaggtcgctacgggcttgcagcctgctgcttctcgaatctacaggcgctcaaattaaaatacgaagaaactactcaactgggcaggccgacaggggtatgctgctgctagcgctcgacggtcgaggctccccaggatgtcacgaggacgcgagtggcgacggctgacggcgagcac

SEQ ID NO: 84921 - DNA, 406 bp, Zea Mays
tgacaatggcatggcaagccttagcccaagtcctaccaagaatctctcttgagctcctacccttactcgtccatggaccagtgtctaccctttgttgacgtggtctagagcttacaccaagattgtagtctctaacctgctctcggcttgagaccgggcccttgcaaacatcttaggcagtggaccagatcgttgagttcccgctaactcgacccagatctaccacatgtatcataccatgcaccaactctttgtttgaattcatgctcctctctagacgcatgtagtgcagcctgaattttagcatcataatcatcaccttgttcttcatcataataagttcttgctacttcatctgctcgttgactctagacaatcctttgcctcttcttttcctttgtcttgt

SEQ ID NO: 84922 - DNA, 315 bp, Zea Mays
atctggtggtccggggagatctcatttgtatgcacgtgtgtgaggtggtggggatcttgtgcggatcggatcccgtgcgcctcaccatgtgcaccggggtgtggcacgatctcagccagtcgtaggacgccacgtgtccttgtgttggaatccgaggtcggttttgcaaagaggcccctgtccttaaaggaaattaactcggcagcgtgcatgtgcaaagtaattacatcaaggtccctggaatttacattatagccctggaatctatgttaagtgcaaaacaaatattaaaaatgccataaaacttatgtaaca

SEQ ID NO: 84923 - DNA, 287 bp, Zea Mays
attcattctagtcttgctggtggcagggtggtgggatctacattcattctagtcttgctggtggcagggtggtgggatctgaaaagaatacacccatccattattccattgttttgctgtacatttgtaccaagcaaacagtctcgggaatattttaacgatacaaacacaaagccatgcacaaaatctgcgtctggttgaaaccatccgaaccctgcttgacatataacaatataacttgatgcaatgtatttaacatacagagatgttgtttaataggaatgtga

SEQ ID NO: 84924 - DNA, 670 bp, Zea Mays
agagaaggggagccgccgcatgatctgctcaccggcatcgtcgctccaggtcgggcgggcagactccgggagtctccagaacacgtcggatgcgttcgtgacctcatcaagtgcgatcagtggcttggggtccgagaattgctcgctggagccatttctccgctgcggatcaacttgtgcatgtagccggctgtgtcgtcatctccatcatcggtatgatgccctccatagtgtttgggtagagattggtgctttcatcttttcatcatgtagaactgggttgggtagagattggtgctcggtggcatgagaatggctcactccggcgatagcgctgccacgggtgtcttcacaccgccgtttggtatttatcacggggaagaatggatgagggtcatggatcgacggatgaacgggccggatcaaaccagggaataccggttcagtccatggttccaccaccgttgatgcgcgaatcagtggatggggatttgaatccggcttgattgaattggggccgaggatctaggatccaacagtccatagtgcgtaccgtttcgtgttaggaagaacctaatctaggccatagacttttgatcgtgcggatcacgatcgccgataccccttcggccagggacctctgtttgcaagtcgtccgactaatcacgat

SEQ ID NO: 84925 - DNA, 372 bp, Zea Mays
tttgcaaacatatctaaattttaacacatcttcatagctaggggttgctccatgtataccatttattctagatgaccatacaagtatgtattttatacatcaatatgggatggctcccttagctcgaagggtctcaggttcctccgttgcgtcactcaagcgtcgtctacatgagcacaagaagctcatcaacaatggtgaagatcaagacccagagtgccccttcttattggtggaggatcatattcaattccttatggatttttcctttggttttcgcttccaaaaggacatttgcaagcgatttgcttcaatggtaaatcatccttctctttctcctattcgatctttcttcttactagccacatttcg

SEQ ID NO: 84926 - DNA, 755 bp, Zea Mays
gaagagttatgtcagcgtggttgagatgctcatgactagatttagatggttgacttccatggctagaaagtcacactatgcttgggaatgatatctctagatgaccgggcattgttgtgctagccttccatcgagggatgctccaaacatgtgctcggtgtacgactggtgtcactttccattgccctagttgcatctctctagctccctaggggctaaaaaatatttggcctcatgcatgggtggtgacatgctgcgactttgatgtgttgcacgtggaagatggtagtgcatgctgttgaggtgggtagaaaaaatagtgtgttttatgcatatggtgcatcttcatgttatgtgtatacatagctggatggttcagggtagagtgtcagatggtctaaatggactccgaatagttcggtttgtgtcgtgggacggtccacgaatggggtgaggtgtctgagattattcctgggatgtgtggccatgtatggcgttgcctgcatggcatccgcgtagattggtgtagggtcagactgtccggcaaaggacaccggacggtctgtgatgtggtcgaacggtccgagataaatctcggatggtccaaccgtgcttagagtcggtcgcacgtgaggtggcggcggatgtgatggtgctacgaaattgttcatcggcataccatacaatggctaggccaatgatgacccatttataaccgatgtgttggggtaaaggtggctctatgttatgttcat

SEQ ID NO: 84927 - DNA, 850 bp, Zea Mays
gtggagttggatcctttcttggtgggatagctggggtggtagtttgggggaaatgagggtaaggttgtgtgttttggtagtgagggggattgctgttggtatgaagtgtgggcgatggtctttgtcggctagtctggaattgatctggccattctttccttggcctctttggtgacggggcaatccctagttgaatgcccgacgtcctctccatggaagacacaatatgaccttcgctcttgtttggatcctctgtcgctgcctttgtcggccctcgccccccttgttgagtgcttggtatgctcttggttgcaaggcgtcccttagctaggttgctggtgatgagtgatgctattgatttggggttgttggcggtattgcggctgctggtttcttgtccaggatcgctgttggcttgcggagtgtcctttggcttccgctgtgtttctagctttctgtagtgcaactcctcagagcatgcaattcttttgaagagctggtacaactcttggagtgacgggtgggtccttggtgcagtgactgtataagtgtcgtgctcgaaggtcgctgatggcgtaatagactgcgatgtggtcttcgatcgatggcagttgtgacttgagcaggaggaatttattgtagtaatctcaaagactttctttctcttgctgcttgcagaggcaattatgcgagggcattggtgtctggctggtagccttggaagttaaggaggaatttattttgaagggcccgccacgagtcaatggataggggtggcaatcttgagtaccatgtcaatgctaggccttctagtgctatgatgaaagacttcattgttgcattatcgttc

SEQ ID NO: 84928 - DNA, 985 bp, Zea Mays
atggaagtatttggtattagcatctgcttcctttagccagcttattcttgaccttagcctggccatagttcttctaaaggaggccagcaggaaggattgcatcttgagcttgtttttgagccaattcttagccggtgaaagcagtctgtggtcttgggcaatttcaaatttatgaaggaggtcctttgcaagtgccaactgtgaggcaacatgacccactttcttagtactccagctttgcagccttttagaagtctctttaagctttctatccagggtcacaagggggcaatgcaaactacccatagaatcccatgcagactgaacagtatcaagaaacccatcaattttttgccagaatgcttcaaagtggaatcttttttcccaaaggaattatcatggagtcccaagagtaaggggcagtggttagaagcctgagaagcagaactttgaagcagcacatttggaaaaatagcctcccaatcagaagagcaaaaaactctgtccaactttaccaaggcatgctaatttgaccaagtaaatttcctgccatgcaattggatttcctttaatgccagatcattaatagctgccctgaatctagacatcattgccctgttcaaatttgagttatttttatccgaagccttataaataaggttgaagtctccagcaatgacccaaggtccagcacaggcagctctgatttccttaatctcctagaggaaaagaattttatctgcatctgactgaggcccataaacgcaagttaaccaccatggtgtgccatcatttttacagaattgaatgaaacgcagtgattatctattcttgttaaccctatgtgaccaacattcctcctccaagcaaccagaattcctccactagcacccaacgaaggcatgaagacaaagtctgaaaacttaattcccagggtagagagaatatttgtacgagtaatctgctgcatttttgtttcttgaca

SEQ ID NO: 84929 - DNA, 965 bp, Zea Mays
caagaaatctagtagcattagaaatatccggatcccacatgagcacccgaccaaaagaaccaatagcattctgaatgtgctcgtgtgaccagaaatccaagggaaacccaaggagcagcaaccaacattcatgattaaaaaataatgctcgttgattccaagccgcattgtgtctaatcacagtgaaagtaaagcccaaagcttgttgcggacccatggccacgagattgtccctatcaaaaaatgaatcggaacctcaccaaagcctgacccaagtgggagcgctgaacactcctaatctgaacatgtctaatctccaaaaggtactctcggacaatgccagcaaaaaattggaaattgacctcatgctcaggtagcggttggaccaggacaattccccaatcatcatgagcggacggttgcgggcgagtgatagtacgtaccataatctcccgatgatcaatgggttgcgccgtgaagccatgagggagaaaagggcccggatcaacacgatggaaagccattccctccgagaatccagaggtcgagtccttttggctcgccgcacactcaccacgcaggcaagggcaaagcaatggtgggattgaccgcggaggaggggtggaagagggttttgcgcacagtgcaagttcggtggaaggcgaagagccacctcttggaagaaccgcctgagcaaactcaccaaagttattaaaaaaaggcgggtgagagggcccacctgcagacgaggggcggacggacctgaaccacagctgcggggggaattcccaaacgacgccctcaaacttactggggaaggtaagaaaatcccttttataaatctgcccaggaaatccgaataaaaaacaatgtgattatctgacatacatagagaaggaacttgctggttttaggtctgttgggctaacactttccccaaaagctagcccattaggggattggac

SEQ ID NO: 84930 - DNA, 800 bp, Zea Mays
ctttactagagtggtctggccacggacgagccgttctcggcggcgcgacggaccgaattgggggaaaacggcgtcgcggcggctctgggtgaaattgggagctaggatcggggctatagggccgtaagaggctgtgttttcattacgcgcaatcaatttgggcgaagatggagagggtagtgcgaatttgacttcgactgagcttcactggtggagatgaaagcacctcgccgtggctccttgctcaatttataggcacgacggtccggtgattgatccgcggccatgaggtgcgctattaacgcatggcaaccacgtaagggagaggcacagtgaggtgaatcaaagcatgtgcgacagcgtggcggacaatgctgagtcacggcgaccgccggtgaggtaactccggccacatgcggctgggttcgcgaagtcgtgccacgtacgagttaccctttccccggcgttatccatccaatactgcgcacgaatcgggacggcgatcaacgtcggcgagctgagctggcgttctgatctgctcagttactgtaccatggcaattgttcttcagttgccagaaccgaccatcttctcccatcttgatctccggattcttattagaaacagagcaatatcctttactaagatttgttcaccatgtatcagcctacaaactagctataggattcataggctaaaaccgagtggattaaaaaatatggcgcctcaaacttggcctcacctcactgggaccatttctaacctagggttcagtttcagttttctaatccagttctgac

SEQ ID NO: 84931 - DNA, 498 bp, Zea Mays
agtgctcgtacactgcgacggaaaataaacctcgtgcatgacaactttgatagcacttctccatttttgggttaagcagttattgtaagattagccacacaaaggaaatttgggcatgcaaccttggtcatcaggaaaacaaagtaccaagaggaaagcaaaagggtgagccgattaaaactgtgaacatcttggtcatcaggaaaacaaagtaccaagaggaaagaaaaagagtgggctgattcaaactgtgaacaggtaggcactggtgtctaagtctgtcatttgataaaatatcagataaattaccatcagtagctaaccataacaatgaaacaaccagcaccataagttgtgcaacttcattgaatatgaactaatccaagtgttgtgccatctaacagattttagctttcaataaccagctatacaagtccacctaagactccaagtacacatgacatacgaaagtcagagaagacaataataattttacat

SEQ ID NO: 84932 - DNA, 592 bp, Zea Mays
atacatctaatgggtgtgcccaaggggtgtatgccctatgtagagtgtttatcgcgttgtcccgaagtagtaatttgatgtgacggaggggtgtaatcatttgcctgagcagttacttgggtccaaccggtgtcgtgttacgcgaaacgatgccaattgcctaactcattttcaggcggcttgaattgcttattgaattcttgcgactgttcggcgagcggggtaggaagtggacggtcacccctcggcctctttaaatagcacgctggccctggctattttctttactcgtccttgatcacttgctctcttattcttcgtcacttgtccacttttcgcacgaccatgggcaggggcaagaagggcaagggacgacctcgccgtgccgacggcaagcacaagcgtcctccaagtccgccctcggaggattttggtgactcgaagtactcggaggaagcttcctccaagtatgatcggtcgcttgctcccgcatccccatggcgtcgtccaaggactcggacgactccatggggctgtccaccgcggcccgagcgtactggcgctccatcgagcgtcccgggctcggtgggtc

SEQ ID NO: 84933 - DNA, 424 bp, Zea Mays
aaagcctatctagagttatacttgtcgagctcaatacaagtgacgagcaaccccgactctcataaacggaccgcacacggcacaggaagaggaagccctcggtgcgctgtcgttaccaagcctcacatagtcacatcccacacgaagctgctttgattcttcaccaacgagtataggtgtacatttgggtcgggttaaagtcgtggcccatggatggactcaagcacgacccgttaagacatgcacgaaataacccatatagagtcaaaaaagactcatatattcattaaaacacacttcattgcacacttcgtcacattgtcgctcgtaagagccgatgtcagctgtcgtcgtcggtcctggcacacgcggccaccgaagctagctgtcgcccgacactcttctgtcgtcgtctccacctccc

SEQ ID NO: 84934 - DNA, 783 bp, Zea Mays
aacattgcctcaaacttaaaggtgcatgatttttgcttctttgtttgtgcaaactacaaaactaaaattttattttgggtcagtcctaactcttaatttatccatgcacttagctccccggtgtacaggaggcatgattataaaagttaaaagtccaaattactcccctcacctatggacaatgttcacataactccctaaagtatttttagttcattttaccccttcgctcctttgagttggtttagtttacctcttaacaaaatttgtgtttttcatttgtttaagtacaatttgagttcagttcaaattttgttgcttagtagctaatatcataatttagtctagaaaaatatattatgatttgctgcacccagatcaaggacaacatctagatacatctcatatgtgtgctaggattaagttttatacatgacaacttaggatatagaaaccagtgtcacaaaatttattatataagtatggtgtctttacaaaaataactaaataatagaaaccaaatgacaatgacgacaacgacgggggctacgacgttctcgctaacaagccacacgctggttgaccggagcaacgacaaccttgacgtcatcaaagtctacatagtagtctttctcttgttgacctgattctaaacaaatcttgcaaggttgagctcacctacggtgggggctcagcaagtgtggagtaaaagtgtagtgtaaggcttaccgagaatatgactaaagctgagtaatatcttttaattaagttggtcaaactttt

SEQ ID NO: 84935 - DNA, 613 bp, Zea Mays
tcagcatcttagggttgagacccctcttaaagcttgcaatcttcttggcttcagtgtcaacgaactctggtgcataacgtgacagattattgaaggagtgtaggtactcagtcatggtctttgtaccttgggtgagtctcatgaactctgctaccttcatcgccatcagactagggggaatgtaattctcacggaatgctgtagtgaatagttgccaagtgatgggagtgttagcggggaaagtggtgcgatgatgtgaccaccatatccctgccgacccttgtagttgatgtgctgcatactctgtttttagttcttcagtgagcctcaacaggcaaaatttttgttccatcatgttgatccactcatcggcctcaagtggctctgctgcttccttgaagattggtggctttgtatccacgaagtccttgaagttgctgtactaattgacctcgttaccaccctgatgggttccacggcgggtgttgtctgctatgttgtgcaaggcggcctccatgttccgttgcatgccttccatgttcctctgagcacccaggaatgggcaaagaattgctcagcggtaatgggcggtggaggcgggagtggaatttct

SEQ ID NO: 84936 - DNA, 296 bp, Zea Mays
ccacagcaggaattcttctattggtgacccgggtggagtcatctaggcctcggtacagataggtcgggtatgccctgtccttcaatggctaaacattcttgaagacaaagtcagcaaccacagcctctgcagtcagacccctctccttcaacagtccaacttcagctagcagaactcctgcctcagccacatcctggtctgtgggggattcggtccagctcggagtgcgaacatccggttgtctccctgaccgtggggggagagaatttccgtgattctcaacaataaaccactcc

SEQ ID NO: 84937 - DNA, 536 bp, Zea Mays
gttgatttagttgacagattgaggcaaatgacaatggaattatgggaaaagaggagaaagattgcagataagctctctggcaatattcttcctgctattatgagtcaacttaaagctaagactagagctttggggcaaatgtcagtctgcaaaaatagacacaaggctgagatttttggcagttaccaggacatgacaccttggcgtcatgttgtggacttgcatgaacacacttgcagctgtagagcatgggaagtgactggaaagccttgtcgtcatgctctggctttcctacaaacggagagaaatgttgatttggactcatttgtccatgaatattactcagtggagaggttcaagattgcatatagtggtacaattccaacaataaccgacaagtctcaatggcccaaattaaacttgggtttcaagttactgccacccaaattgaaaattgggccaggaagaaaacgaaagaacagatttaaggcaagccatgaaccaggtgcaaggaaactggacaaatgcaaaacatg

SEQ ID NO: 84938 - DNA, 350 bp, Zea Mays
gaaataccatgatattttcccaaggtatcacagagtctaaactccccatcatttttcattggagcacctgcacaagggtgtcactctcccttgatccacacaaggaccaaatgttctctataggttggttctttcccactctagcacactaaaccatccacaaccatgtacaagtcaagttgggtcacccataggctctttgaatgatcactaaactcccactcgccaccaaattgcctagatgatatcgatcaccaagagtaacaagcatagactctcacttgatctatccaatgctaatgagaataatggatgcatagtagctactttcaaggcaataatgaggttgt

SEQ ID NO: 84939 - DNA, 953 bp, Zea Mays
ctccaataaggactaccaggaagtgccgactctgcaacaccttagaaatatcgaggcattcctaattctggctttactttaagcttttacttttgagcaattatattcaattatttattctaatagaattattatactaagtataagattggaaccttagaggtaaaattcttgatcataagatagaaaaacttaaatccataagggatggactgagcttgttgataacctgataggctttaatttattaaaaatagaaaagcctaatttatgcctcgcttggacatcttgatcattccagttttctcaagggtggtggcattggtagggattctagatgaatgctcagtttagatcttgctcgggcctacgataaaggacaccctcaggcagaatttctttcttgaaggcatcgctgaagaacctcatgctgcttcatctccttggtcaacctgagcaatgcaaatatccatggcacaggacttgggcgaaagccttgccaagctcctactcggctgatgatgattacatttttggtgtcatccacctctctataaaggcatcatcgaagaagcttgtatgccttggtgtttaatttttggtgtttatatttttgttgtatttgtggttgtgtcgaatccccttgcgggctcacccaattcacaataaaaaatttgcactatacatgcaaaatacaacttgtgggaatgacaattaacatggtgtcgtccaaattatatgttgatccaatcatattacttcgaaaacactacttgtactgaactttgtttgtggtgacaggccatgttcaagtcggctgcaaaagtttaggtcgtctgatgtatgaaccaatggtggcatcgtcaagggaaactgtcaggagtagaatttaagatgcactatatatgctaaggtatctatggacacctcaagtggttgacataggattactt

SEQ ID NO: 84940 - DNA, 866 bp, Zea Mays
gacaatgttcaaatccctatacctatacgttccttggagcaggtaataattttaatcacaatattgatttgtggctctacataaaaatgtgtttttggtttatggatctacataaaaatgtgttattggtttatgtttttacataaaaatatgtgggcggctataggttaatttgcaggtggacgcggatatgaatgagagtggaggccatgcacaaaatgtagatgctagaaaggtaacaatggtattaaagtgaatgtgggactgcatattattatatgctgaaaaccaactataattttgaattgcagaaactggattttgctgttgatgggataagcttggcaagaccaaataacgcaaaaccaaagggaagaacaatcaaggggagtgaacaaaaggttattaaattgggcgcgaaaggtacaaagaagaagaacaggaaatgccagaagtgtggaattgttgatggtcacaatagtcaaacatgtttgtcattggaggagaatagagtttgattggctagccttgctggacgtaagagaggacgaccgcctagatctaggaacaaggttggaagtaacgctcctcattggaatgagacgacaacttcaaaaaaacacgcagttgatattgacaacagtgagtcacccagtgagtagtatgtggcacaaatggtgtatcgtatgttatgcgaacatattgtttgaaatgaacggtataatggaataatataagcaaaaccagttgcgtgtgaaagcgatgtctataaagttgattgttggagtctatgaaatgtgacgtatattttctactaatgttgcataagtgtgactaatagaacattatatacaataggatatgag

SEQ ID NO: 84941 - DNA, 467 bp, Zea Mays
ctttcattatgcaaagttgagagaaaacttggcccaaagttgggctatcagtcagcctaaacctaaattttggtattcagtgacatcagatgaactttgggaatcttttcgaggatgatccagtaagtgtttggctatggttgctataacaagaatgtagctggatcatagggctgtaactttgatacagagtgatgatcatgttactacacaaaattgggagcaaatccccctgcaaattgctctgtcaggtgttctgaaccacatgctgatggtacagtaccatgaacatgatccagatgcaactcccctcaccgccgacgacccttgcgcccggatttgcaccgtcgccacgattcgtgctcgccagtaccggataacactcccgggtgaaagatcctggcgacggataagtttggattggatcgacggggagttcaccgcacccgctcggattgcagctggcc

SEQ ID NO: 84942 - DNA, 952 bp, Zea Mays
ttcacatatcgataagtgagaagggtaaggaagctagtcaaaccaactaggatctgtttaggtagttggactgtgacaagatagttggaatatagggtcataggtaaagtaagggagttagttgaaatagtgactaggagacgtgtaaaatatcttatgtgtataacagattaaataaaaaggtcggaaagtgaaagaggtagacaatagcggctttaacctttgatgcaatgagacaactgcaaatagaaacaaagtaggaagtttgattgacaagagcctcaagaacggtgtggtgaatgtgagaaggtaaggggatagacttaccttagtcaagcttgtcgtgggtgatttggtcttgaacgtaatgcttatgacccaagtaggccacgatgaaagtgctaagacacttttctatgaagacttagatggcatgaatagagctatatctattagtaagaagcttttcataggatatcttaatggacatgtaggtagaccaaatgcaggtttcgaggcgattcatggaggttttgggtatgatagtaggaattgagaggaaaaggaagtcttggaatttgcggtagcttttgaccaattgatagccaacacattctttaggaaaagagagtatcatttagtgacctatactggccaacactctcagattgattgtatcttcacaagaagagagaataaataagcgtgcttggattgcaaggtgatacctaaggagtgtattttctctcaacataagcttgtgatgtgggtcttttgttttcaggtgcatgcctgtagggataaacaagccagaatacaagaattaagtggtcaaaacgaaaaggggagacatcagaaatcttcaaagaaagaccatcaaagagggcacttgaaaggagatgacacaaacaacgtgcatttggaaggtgacctcaggggtgttagtcctgaa

SEQ ID NO: 84943 - DNA, 492 bp, Zea Mays
atttgcgtcaggaaataattaattaagggagaaattgcaacataaaacatgttttattctatttattatttgcaataggaataaataaaataagtaatatggaacacacatataaattaaaattgtagcgaaacttgttaattaagaacttatggaaaaactactgtctcgtacgcgattttcaataaatagattgaaaatggaaatggataaaggacgcatgcaacttgtacgaggcaagcgaatttccattttgtccgagcgttcagtcgttcacgcatgcacgacagctctgacggcctttcttttctcactcgaggggagcggcagacgttgtctccaatccagtttacccgagagcatacatgcaagcattttttccctttatcctctctcaagttttaacccgtcagatccacttttttcggtagcactttgaccgggctcccctttatccatgcgtgggagtaggggtcatggcacggaggcagc

SEQ ID NO: 84944 - DNA, 412 bp, Zea Mays
cccggccatggtggagatggagatgagcttcttggtcattacagaggtcgagattattgaggcttggagtttggagtgtgtttgaagttgaacctttcgaactgaagcgggaagctgcgggtggaggcgcttatataggttgacacttgagagcagccatcgagaggcacacggcgacacggtgcacagatacagagcggcgccaggtgggagatcggaaagagaccggtccatgcgtccttttacttccggattgtggaaaacgtgtggatgcgtggagttctgggtcctaaaagattccagttcgggcacgggcagtgcgcggcccgtgcgcggtgcgagtggtgctgacgtgttggcatatgcagctgatgctctagaggctcgctcatctcagtgacagggaccggag

SEQ ID NO: 84945 - DNA, 512 bp, Zea Mays
ggggtatcctcgattctcagtcgttggatctccattctacaacccagattagatccgaagcctaaccgaaccggtacgcgccgagggtcatcgatcaagccatctacggtcatgattaatgtgcgaaggggtacgtgacatggactatccgattccgatctgacggcaacaatgccatcattaataccacgcgatcccgatctttagatcaaagatgtacaatccgtgttttaatgagacacgatccaatctaacacatcggtcaaccgatcaatggcatgaatttctccgcgaacaggtatgcgcaggaactaatctacaccattgattatcagaccaacggtgcccacgacttctttctcaacctggactcccaacgacgacgcgcagggccctcattgcggtgcccccaccggcgcatgcccaagccccacccaaagccctaatcttagcgtaaatgggataatcacatagccaagagcttaacaaatccgaggatggcttgcttaccg

SEQ ID NO: 84946 - DNA, 551 bp, Zea Mays
ttgtaactcctctgtgctgctttcgtgtgcccgttctcgtcttgtgtgtgtgttagtgttgcgactcgcttttgtgtgtgttactattccgtccttactactgtgctcattcgagatcattttgggtaaggcgtgagggactccaaagtgtggacgcattgtggggttagcctttgtcgcacaaacagtggacgccaaattttgggtaccgacaagtggtcaggtgggcccaagcacttagagccaaagagaacatcggtgcacgacaggacattacatgggaactgtagtgtcttgttctgtgtgccccgtcccgctataggacgggagtacttatagggccgtccgggggaaggtgacccaaagtacggccctactcgggccaccaactgcacccacagaatattcgtataacagggtaataacagtatctcgtcttcatctcgtggtgtgcaccaattaatacacccgcaaattgcaccgacgggtgggcctccggacgagtctccgagtggaccggtgacgagtgggtcacgctgcgtagtcttcgt

SEQ ID NO: 84947 - DNA, 1010 bp, Zea Mays
cttcagcatgtacacacccattgggatcaacttcagcatgggcgcaaccattgggatcaacctcaggaaggacttctgctggcacttcatcacaaaccggcgccgaaggacccgcaccatgatccaagctcgacaatcgccgaagccgcctcttcttccttttctcttcaactggtgcagtaggccggctcactcgacgtggacgctttggacggacctctttgggtttccggatcctctccattccaacaagttcttgcccgtctgtgatagccattggctcggcatgtgccgagtcagatgattccccaaccaacaagttgagcacagcatctatctcctcgtcgttcgtgctagctgacatctcgaaatgattatgtctctcaccctctaggagactccatagtgggacaattaaagcttcaatgtcttcaggggagggtcgcactctaagacccagaccaccatcacgggcaggaggattagacacaaactcgaaaagggatctatgtgatggcagtttctaggcaggataagcaataggagcaccagcattcgaaactctgcccctcaagatcatattcagtcggctcagcagatcggtattgggaattctcttgtttgtcacccgggtgccatcattgatgccgctgtacagatatgccgggaattctcttgtttttcacccgggtgccatcattgatgccgctgtacagatatgtcgggtgccatcattgaaaggctggatattcttgaagacgaaatcggcaaccacagcttcggtagtcagacctttctacttcagcagacagatctcagcaagcaaaactctggcctccattacctccaaaggagttggagactcaacccagctcagagtatgtacatctggttgcctccccgaccgaggggggagggactcgcagtggttttccacaataaaccactcaaggcgccaccctttaatgctatccttgagaggaatgtcaaggtattctgttttcctcccg

SEQ ID NO: 84948 - DNA, 435 bp, Zea Mays
ggcacagaagtctctgtgcctggttataacttcatcaagggcttcaacttcattttcaatatgatcaaaggccctggggatgtcttcggccgaagaggtaatctcttcagaagcagctccaaccgagttgaatatccccttcagccgattaacgcaccgagtggcaaaatcagcacacttgttctgaaggttctcaaaagcttcatgtaggttcgtatttctttcagtttcagctttgacctttgcttcgagctcctttgtctcgtggttaaagcgctgtgaactttcgtccaaaattgttcgagctttgtcaagttcctcgctcaacttagtattttgagatcatacttctgcgagggaaccttcggctgtttgtagcaggatgtctttttcctttagagaagcttcaagttattttatcctctaagcctttaa

SEQ ID NO: 84949 - DNA, 594 bp, Zea Mays
caagaatccatctgtggccagtgcaattcgagttagctcgcgtcttccacttcctcgtttgagtattctcaggtacccgtgatgcttcccgacctatccaattgaattataccgtcattaatcgctcggaacatgcggttcctttaagatcctccgctgtcgccgtgggcagagagttgtagagctccaattctgaaattgagtgaggggaaatgcgcgggtagagtccgatttggggtccgctactcgggagcaccagtcctggctccctccggccagtccagctcgccggagctcggccccatgtttggtgcgaggtcgtggagctccttggagaagagatagaaatcgaggggcttatctgcaagttgtcagcgacacggtagaatagtaatcaaacccatctccagttagttaaaaccccaagagccctgttgcaaaaactccacagcgggcgcgggcgcgcgcatttcttctggtcgtgggccgtcctaggctggattcggcccagtattattcactggtttccattttcttttatttccagagccaaaacaattttagaaaatggtagaaaaatgataaaattgtgaa

SEQ ID NO: 84950 - DNA, 529 bp, Zea Mays
aagccgctagaaaagggatacaagcatttgaaggcactgtacctcaaagggtatatcaatggtaaacccctcaacaaaatgatggtggacatcggagcaatagttaacgtcatgctatacgctgtgctgcattgtttgggtcaatctactgaagacctgatcaagactaacatgacattgaatgccaccaatggccagccaatagtagcaaaatgggtgctcaacatggaattgacagttggacacaagaccatccatacatcattatttgttaccaacagacatactgtgtacaccgtcttcctaggaaaggactagatccatgccaactattgtatcccatcaacaatgctccagtgcttgatttagtgggatggagacaaagtggaaatggtcctgatgagaacataacccgctctgatattaccatgttaaaggctcgtgctgcgaaggtgaaactcttccacattgtaactacattagatatatttgaagaattgatattgcattgtaaatattgtgttcttgc

SEQ ID NO: 84951 - DNA, 817 bp, Zea Mays
ccagcattgtccgggtagggccggtttcgggtcgataaggtgcgcgcgaacctgagtatcgtgctcctgacagcaatcgggggccggagttggtagtttgaggacaatttctcgccgccgattgtgctccgccgcagattgcgtggttccgtggacggggggttcttctgcgccactgctggtaagttttccattcccgtattcatcatcatgtgcgcttcacgccaacgctagcgggctcgggggtagtgtccttgggcacggaacagggggttcaccggtgtatcgccgtcgtggtcaacacggctgcagccgtggtgtttctgggaagaagatgacgggttcgtggccgtcggatcgtctgatctggtttagacggctgggtctacccaggttgaggatggcgcaggaccgtaggatcttaagggacgactgcaattagatccgggttcccttctcgcgcggtcgatctctgccctccatcggaaatcgatcgtcggagagcgtgtcttcaccgttttcgaatccggaccgtagttggctaatcgtagggctgtagcgtgatcggtggagtgaatcgatcttggccgttgtccatcgatcggacggttgcgggtgaacgtcggctcaggatgaagatcggtctaatcaggggcgcacactaccgatcttgcggccgagttctaacgataccctttcgccatggtaaactgcaaaagagccctcggattgtaatgaaatcaacccgccgtccatccggcttgattctgagtcttaggtcttttatgcgttagacccctgtcttctctaataattg

SEQ ID NO: 84952 - DNA, 985 bp, Zea Mays
gagaagtagaatgtctgcaacgggagatcgtagagcgtgatcatgctatcgactaggttgtgaattcacgatccatagcctgggattgtgaggtgaatgctcaagcctgagtgattgagttaagtctagccttagaaaacttgcaagtgtataacaacatcttgcacgaggaagtgtgtgtgttatatgaccagctacatccaaatgtaccacccgaagttgcagagatgggtgctggtgcagaaagagcaggtgaaggaggaccctactgagagatggacatctttggaacccctccttctatgaacatcatggaagatcgccctcctaaagctagtagtgtatctggagcgacctaggacgtggaggactagagtagtatagtagtaggtggtttcttttgcctagacttaataaggaaagtgggtttgtatggactaagaatgtgtaataagtaagagcttggaataatgtggcaaaggttgtgtaactgtattgtataataataaagcatgttttcttcttcagatgccaacaaggacccgtgatcatgatggggcagggacttctagggtagtggggaggagagcccaatcgcgccacctgtacctccaactttggcagagggcattgctgtactgctaaacgctactactgacaatacctggattctccgagagatggcaggaaatcaaatccatcagcaaggaggtcgaggccaaagtcaagctccaagagacactacctatatgaagttcttagaaacttgtcccctgtcttcattaaagcagaagaacctctagaggtggatgaatggatctgcgtgatggaacaaaaatttggactgattcgatgcatggagactcagaagcccctgtttgctgctcaacaactatgaggccctgctagtacatggtgggtaaacttcgtagccatttagcctaaaggtcatctcatcatgtgggcaaagtttaagcaagcgttt

SEQ ID NO: 84953 - DNA, 430 bp, Zea Mays
tgcgggaagagttggagccttatcactggactgttcaccgcaccacttaccgcgcgaccggccaaagtgttctcgccggagttcgccctttgtagccgtgccatgtgcttacgcttgttatcgtgtcgtaagacatcgcagtggatagcccgtttaccgccaggatctttacctcgtgagcgccacgatagttatgctccgatgactcacctccgctccgaccgcaagtcatcccatctcaaattcgcgaaaccctcgagtggtctctataaattgagtgttcagtgtgctctgttagcttgttacgaactcagagcaccgctcctcgccccagattagccaccgtagcgcctgaatttggattttcccccaagtcagtttgccgcgccgccgtgaaacaccccactgtggccagccattctcaggtctg

SEQ ID NO: 84954 - DNA, 374 bp, Zea Mays
ctctcgctctcgatcctgagcctgtcagcgatcgcagcggtgagagttgcgtctttctcggtgtacttgttcgtcgggagtttcccccacttctgaggctccgtcccgggacacgggctgcatcggatcccgttcctcggcttcatgatgtcgccgcacatttcggcatctatttcttcgttgtcgggcatcacgctaggaaggttcctccccttgcatggtaggctcattgtcggagatgggcgctgactccaatctccctggatgaagaggacgtcagggtagaaaggagccggcatgacggtgttcttcttcccatcctcctttgagggtggaggtatcagaaaggtggctcggtgtgttctccttccctg

SEQ ID NO: 84955 - DNA, 621 bp, Zea Mays
tatacatctcatcgagatcttcattttttacataaaagttatcttatccggacattgtatcaaagagttatgccttttttctaagttgatgcttgtgacgacggtttcggtggcgtgacaaaataataccgacacaccaacatgagtgtcgtgacaaagttttttttttacgtaagatcaatgtgacaaatcttaccaaattcataggatggtaagaatgattttatcaatgatggatgattttgttcaagacttggtcgatgactacgagggtgacgatgatgaggatattggtgagacaacattggatggatttcattaactgcgtgtagcgactctatgggagccctaggtatctagacaacttcaaagagatgatgcaggaggcaaaagatccgatctgtacggactgtccaaataaatgtatggtgttgagttttgatctctagatgttgatgttgaaggctgatttttagatgcatggtctgacactagcttcaatgagctgttacatctcttttgttctttgcttccggaggataacaaaatgaccgacaatacctactaggcaaagaagttgatctggccaatgatgttgggtcttcaaaagatccatgcttg

SEQ ID NO: 84956 - DNA, 1471 bp, Zea Mays
gtcaaaattttctatggacaactcttgcagacaaatgagagcagacaaagttggagaaggaatatcactactccccccactgactaggtaatgccgactatttttccgaattaaggggatttcatcctcttcttcctcatcctcgtcaacaatacgaacaacatacccattggggtcagcgtcggccagattgcacccattgggatcagcatcatcaaggtcacacccattggggtcagtgtcagcagggtcacacccattggaatcagctcctgtaaaaagttccactagcacttcttcagcagcaggagcagaagggccgacatcctgattcagtcatgacactcgtcgaagcctcctccttttcttcttcttcccctcggcaggagcagttggatgactggccgggcgaaggcgctttgggcgagcaccatcagatttttgagcagtcaaggtcttttcaggctcggggacagttgcaatagctatggtttcagcagggacgaaattagatgaatcctcagccaacatgtccggcatagcacttatctctgcatcactcgggtttataggcatctcaaagtgaacttgcctttcatcattggggagatcaccaagtgaagcaaccagagcctcgacttcttcgggggagggtcgcattctaagacccaggccactatcgctagcaggaggattggacacaaaactgaaaaaaaagtcttggaaggtggcagattccaggcagaatatgcaacaggagcaccaatatttgacactttgcctctaagaatcatctccagttggctcaccaaatccatagcaggaatcatcttgttggtaacccgggtagaatcagtgacaccactatacaaataagccgagtatgctctatccttcaatggctgaatattcttgaaaacaaagtctgcaactaccgcttcagcagtcagacctctctccttcaacaagccaatttcagcaagcagaaccctggcttcggttatctccaagtctgtgggggattcagtccaacttggagcacgaacatccggctgtctccccgaccgaggggggagggacttgccatgattctctacaataaaccactccaagcgccatcctttgatgctgtccttgagtgggatgtcgaggtactctgtcttcctcccacggcgcatctccaaactcgcaccacccacgagctggtgctgcccccggccattccaggccgacaatgatataagtactttcacaagccaaaatgaggcagacttccaagataggcttcacacaagtgaacaaaaacagaaacttgcagaatagagttgggattcagatgagtcagattcagatgatagaaatcaaggagaccgtgaaagaaaggagaaataggaagagcaaggccgcggatgagaaaaggaatgtaaataacggactcgtgggtatcctcagtcgggacagtaaccccacg

SEQ ID NO: 84957 - DNA, 1233 bp, Zea Mays
cgctagggtgggtgttcgcaaatttttgggtccctcgagttccgctagtgaccatacttgtagccttcgaggcgtaggtattcacagtctcgaccagcttccccgtcaggtcctttcgttcacgttgcgaagatggggatgaattcgtcccatcgatgctttccccaaggtatagccatgggggtctctggttacgttgtcctgaggccccattcccgtagagggtgcctcagggaagtacaagcggtgtgatgttgtgttttgcttaggactcttcgatagaaagttgcagactcaaagcatgttgtagaaaagggaaaaacatagttggtttcgcgatcagagcttccattcattatcctgttgagtctgtttttcgttcatcctacctcgtccagttcctggtacacttcttgtcctaaaagttaccaacgggaaacaagcagaagggaaaggaagagaggaaaaatcaggagaggggagaccaaggtatggtctaggttctctcctccgcttaccgtgtttgtggccaagagcgttcttaacaacacattttatttataaccgctcgagggtttcacaaagagggcgcagagccgctccggtcggtcatctacaatgtgatctttgggcacaagcatgcacggcatcttgtcctaccgagactgtcgacaaagctatggtggtcggtcgatcctccttccccttgtcgttgggggcgctactcatcatcgctccttgagggacctagatccaagtccaagtctgtgcagagcgcgtcgaagatgaggtccccgccgccaccggtgatctccatgaactctaggtcatccattgtggggagatggttgtgggacaagggcggcgattaccgccggggcatggcgcagttgaggtggaaaggcgccgatgccaccgcggtagggcgtcttcccttcgtcacacgtcgcagagaactctatgtaggacacaaagaagactgattgatcatcatatgagggattggcctcatatgaatcacaatcttccatcttattttgtcggtctcagaaggcgaggccggtatgggccttctgtgctgcctatacggggcgaggctgagagtattgagggccgccgagacgatgccagggctctcagacggggtaggtcgagcgggcatcgccctgaccgtgtctccctaccgaccgatggtgaagtcgaggctcccgaaccggatggacgctccggggg

SEQ ID NO: 84958 - DNA, 506 bp, Zea Mays
caattttttttgggatattacactctatcccccatgaaaagaattcgtcctcgaattcgaccactctaaacaaaacatccaaggtaccccatatagcagcaccattcaaaacatgggtccattattagtcttaattaacacttctacctcgactaattgtctaaggaaactacaccacctaacatcaagcatgaaccaacatgtaatgaagctcaaaccaagtcatagatgcaatcaacactacgatttcacaacatcgaatttggatgcatccatacatcagcatcaatgtcttaaaacgacactcttttatgaaggggtaatatgcacttaagcaaaacctttaccaacttcaacaattcattttaattcaatggtgaaacatccacaccagatgaatgtataagaagatcaaacacctcacctcacagcaccacgaaacaagtagttctattgaaacaaaactcctaatcttcctaaaccttgttcttgccataatgaaaaga

SEQ ID NO: 84959 - DNA, 449 bp, Zea Mays
ttgttagcatcgtcattgaaaatatagtttacctagctagcgtctatcgtctgattggtttctcgtaccaacttatcttggaccaccgcatgtattgactttgtttgaggttatgtttggttggttgttcttggttgacgcagggcacataagtggatgcaaaataagctattttaaagttattaatttgcatatgtccgtacgcgcaaaattactgtttctagccagccagggcgcgtccagcctgcgccttcacgcgcagctatatatccgtgtgattggatgcctggacgtgtatagccaagctcgcatggtacggtcaatttctacgtatctgtggatgcagtcaaataagtctagagtatatcggtgcgtgtgcgcaagtatgactagatgcagcgaaccaaacacgagtcgagcctggctctttatatgcgggcaaccaaaca

SEQ ID NO: 84960 - DNA, 329 bp, Zea Mays
cgtgctcgcgcccctacgcaaattgcagtccctctgtgaaatgcccctgctccagctggtcgatcagctagccctacgcggctatacgcctctacccagcccagccacgctcggcccacgccagcctttgactccgtcatgccgaccggccggccggcgacagcgacatggacatcgggggcaccgcatggacggaacggaaactcgtacaagcgacggcgagaggccggccggggatggagatggaggcgatgaagctagtgatctgatctgaagtcgtatcaagacagtgcaggcgtatgcgtacgtctctctatgcgatgcatgca

SEQ ID NO: 84961 - DNA, 721 bp, Zea Mays
tggagactgaattctgtgtgattttctcagaattcgctcaaggcttctatagttgaattgtagctagattattgatcagtaactttgttatagaccgattagtaagttgtcacatcgaaaattgagaataaggctactcaaatcgtgctgtcagaacgactgatgatgatcaccatggtacagtgcacgaaaagatcttcaggttcactgcacttcgccgcggtgacccgctcttggattcgcgtcggcgccacgattcgcacccaataacgcgcagataacgactcctggtgaaaagatcttcgtcggggatgaacttggggcactgtttcgctctgtcacctcatccacttgccgacaacgtggccgagcggccgtcgtcgaggtgtatgtcgttctccgtgatcatgccacgccgtgaccctttcaccacgtcgttgccagccataacagcttacctgtgaccaccgtagcttctcagctagtgagtgccacggtagaacgccgcagtgactcagttcctctctccggccgtcagcatgctttcttcaaattggacgccaccgctgatggagtctataaattgttgccctagtgagctctgctaggttattacgcatccaaagcactagctctcacctccgatcgtccactagagcttcccaattcctcatttcccccaaatcagtcaaaaaccgccgtgagagtctctcaccgtggc

SEQ ID NO: 84962 - DNA, 1381 bp, Zea Mays
aactaaggaagagtcctacgcactatttaactgggtcactgacacttgcgagaaggcccttgcacttctatctcttcacagcttgtagtccccgacggcgaacgacgctgggccacgctccggcgagcttgcaccggccgatttactcgatgaccggcgccctactttggcagagaccgaattcaagacctaacgagggtttcccctcaaccaattttactaatggcgctctaacacgcactgtccacggtgacagcgggtacaataggcaatcaagcaagttcccgttgatctatggggtcctaatccaattggctggggcgtggagcatcaggaggatccacaattgttgaaacaagacagcagagagcatgaacagacctgggattcgctgaccacggtgagggttctaccacggcggcggaaatagaattgggggaagaaggaaattctccggctatggtggctaattgaaggcggtaatgggtgctctggcttcatgatagtatggtgcaacatgccaggccatcaatttataggagcgcaaggcggtggtattcaatttcgcgatgacgcgctggcggccggagagggagaaggctactggcgcagttgattcgtggagaataccgtggcggactcaccggcgatgatcggatggctaacgtgagtcacggcggtgcggttaaaggatggaggcgtggcgcaaccgcggtgagtatcgcggattctgatgacggccgtaaggccacgtcgccggcgcggggaaccgagggacagcatggccacagtaacttgaacccattcgcgacgagatctttttgctggcgaactcaatccacagcccagacgcatgaatcgcgacgagcagcactaatcccggcgaagggtcaccggcggccagctcactgaatctgcggattgtttttggttactgtacccatcacgatctccttcagtctttctgacaaacagatttgtgacgccaaaatcttgaattttcgcataagaacttactaatccgtttgtagcaaacctatagccctaagatctagctataaaccgactgtggtaaccatgctcaaacatccacgggatcatcttcaaaatggcccccaaagttcatcctatgccactgaataccataattcaggttttagaccgactgacaacccaactttgggcacatttatctcaaaatacttcatggtaccagggcttaatctctatagcaaagttgttccccttttatagctctacaaacttgatgtgttgacctatggcaaaatcttcataatttggaagatatagggcttcaaagttgagccaaatgcactgaaaatcagacttaactcattagagctcaaatgtggctttttgc

SEQ ID NO: 84963 - DNA, 499 bp, Zea Mays
attgaaatttgacacgttcactactttgtcccacttcttctcatatgcttccacttagttcgattcttccatccaggccatctagtgtgacgatagccgcaagtttgataatacttccacttggtcctttctcctttactatgtcatttttctctagatgttgtgcccctagacctcttcgcagaatggtaaaaccgagagtattattcgttctattaataatgccattcactctctgctttttaaagcttatcctctagcatactactaggtcgaaggcctccaaaccgtgacatacttgctgaattgtctccccacaaacaccatcagggcctcatgcccccatgttgccctgtttggtactccccctcctatgaacaccttcgtgtttttggttgcgcttgctatcccaacctttccacggttgctccccacaaacttgcacctcgtttcgcttggcgtgtcttcctcggatactcttttgaccataagggatacc

SEQ ID NO: 84964 - DNA, 359 bp, Zea Mays
ccggaaggcagtacagaaagtcatcttcatcagtgccattgtacaccaaggatccttttgggtactttaattccttggagtaatgtttagcttcggcaatttcctcttctgacaattttttacctgaagcatgtcgtatgataaagtctagctcttcagtagattcttcgggagtaggagattcaactttcttgggtgcgtcttcttcttccaagaccagagcggcatccaaatgtccttgttcaatattttgtctagtttcaacaggctctgtttcgatgggcactgaaggcccagctttgacttcaacacgagttgtagtagcttcagcagcctcctttgcagaggcaggagttggc

SEQ ID NO: 84965 - DNA, 569 bp, Zea Mays
gaaaattccgaggaaggattcacataggtgaacgaacacgacaatttgaagcacaaagttgctattcagatgcgtaagattgagagaataaaaatcaaggaggccacagaagaagggagaaactggcagagttaatcctcggatgaagaaagcatgaaaataaccgcctcgtgagtatcctctatcgtgacggtaattccccgccagatccacaaggagcataactctttggacggcagaacaccgacttcgacgaggtggagaaggtcagttcaagaaataacggaagcattgttaccatagaaaggaagttgtctgttgggatcaatcggagggatgtctggcatggcagcaccctgttttctcttcctgggcgccatcgcgatcatgcaggcaaaaagctcaagaacagcgcgacaaagagtgggagttcgagaggctagaatgcagcggaggagaaacaaagttagggttcatgcaccaagaaaccgttgacgaagatataagcgagcgcattaagtcaagcgcaacgtgacaggctggtagctcggacttgttttcggcataac

SEQ ID NO: 84966 - DNA, 324 bp, Zea Mays
tatgaaagcagcagtcgtaccacaagaagctactagcgcatagaagtcaccatggccagttatgacttcatcgaggacgtcgacttctttctcaatgcattcaagtgctccggggatatcttcggtagaaagactagcttcttcggatgcagctttgactgaattgaatatacttttttgccgaacagtgcattgggatgcaaagttgaaacatttattcttaagagctttgagtgcttcactcagctttaggtttttctcagcttcaaccctaattgtcatattcaaagcttcggtttcacggctgaaccagctagagttctc

SEQ ID NO: 84967 - DNA, 621 bp, Zea Mays
gaaagtggtgtgggtgtgtggctgggtctgtgtgtttgttgctatatgcagttgtgcctgtgtgtttgtattgaacttttcgctactatgtctatgtgccttagtgtctgtgtgtttgccttcatgctatgtgtcaagttgtcaactatgtgcctgtgtgtttgtattggacttttagctaccatgtgattgtgtgtttggtgctatatgggtttgtgtgaacttgattaaactagcctattatgtgcctatgtttttgaattcaaaacttattatctatatgtgttacttgttttgtaagttcagaaaaatcaataatacccggttcccgaactcgaaattctggataattatttctttagggctattttgggtaacattttcagaacccgaatttataattacctagattactcaacccaaaatttccaagtaacttgattactcagtcctagctcgtagtgaggggcagatgcacagggggcaaagtaggcgatgcccccctcaatttttaaaagcctcttatagctaatattaagtatagaaaaaaataattttttgggtgggccaaaacagtctcgtcttaagtctgctcgtcagatcgatctagttctccctggg

SEQ ID NO: 84968 - DNA, 789 bp, Zea Mays
gtacgctcggaccaaatgcatggtcgtctgtagattctaaggggtgtgtagttgtacgtcatgctacaatgcgaaccaaatgtggtcggatacaagcatatattgccctaaaattgttgggtgagccaattcagagaacctttcgagcgaggtgaaatcgagcttgctgaatcaagaatgttgcacccgatggtcgtcgaggctactagtggcggcgtaggagtgaggggctacgagaacaatggggctagtggcatcaagaagttgaacaacaatgatagtgtcaatgagaaataatgaggtggatgagaacgattgagctagcggggtgtgggaggcaaacaacatggtgttggagggtatggtggtagtggtcgagtaagtcgaaggcgatgtcatgccataccttagcatcccgtagggaaagccctgtggtatggggtccaccgacgaggatgcttgatggtacattcgataccttgatgtcgtaccgtgatgataattttaattttgaaattaactatgttgtcaactggtgacttaaatgatttctgcactaatttgtcctagaaagaatgtaattgtaacgtttatacgttaaaaatgtgtgctatataggagcactatatactctcttcattgcaaattataacaagtttgagttatcattatatttagatacatagtaaaagcagtatatatataaagctaaaatatcttataatttagaatagaggaataataaacataatgtttacgtgtataattatttattttagtttaatcaac

SEQ ID NO: 84969 - DNA, 648 bp, Zea Mays
taacaagccaagtatcacaattcatataaaggcagaaacaaatgaaatggctgtgattgctcctcattcttgttgatagaaaatagaaggaacactatctagtgcccaaagacagaacaaccaaatacaaagccacacaaaatgtgaaagatgcaaggaagatggaatgagtcatgctaacttttctcaccatcgtattccactcagtaggtactgatggaaacataaatgaccacaaaaaaccataaatactatacaatggaagataatgccataaattaagcaagcataaacaagctaaaaaagaggagtgtccacaatgctctcacaacaaggaactgggtgcatgacattcgaggtgctatcaccctaaatgttctgtatgatttcctcaaagtttgggacctcaccgcagactgggctttacatccggaccatgaggataagtacatctggctgctctcaagctcaggtctttattccaccaattcggcatatgctggtttctttcttggagcaacaacatttaaaccttgggagaggatttggaaagcttgggcacctggaaaatgcaaattcttcatgtggcttgtggctcacggtcgctgctggacagctgaccgtctggcaaggaaggggctgcctcac

SEQ ID NO: 84970 - DNA, 306 bp, Zea Mays
cccgacactaggaaaagtgcatagaatagaagtgcacacatcttcgacactgggaaaagtgttacacaacaaatatgtcacatgatgaattgatacatgggtcattgaactcaaagtgtacgacatcatcttcaaaccacgaacaactatcaaggcctaggtttttagtgactttgtcatagaatcgatagagatacagatactgaccgagtcaaggcccttagactactagactatcaactttgacagatccctacaactcaccgaagtagaagcagtgatcgtggttacttcaccaaaaggtga

SEQ ID NO: 84971 - DNA, 742 bp, Zea Mays
gcctggtggccgcgcgtatcactgcctctgccatatgggaccgcctagtcatttgcttctcccagccaccaccacgaccgaatcgcaacagaagaatccgagtcctcgccgcggtcttcgccggccgcgcgctggcataaccacctccccgaaagtcgtgggcatcatctgggtgtcgattggtccatccctcgatacatataagccctagctgctgccctgggtctcttcaattcaccggaacagagagaaattgggggaaatactagcacggtgcttgggtcgtcgtcgatgtccgtcctgcgccttattccagtttgtggggctggctaggaaactccatggtggcactggggatcgatctacgtcaagcgcctgcggggagacgatcctgtgccagcgtaatttgttgttgccatcccttgacgccgtggattcactgtgcactgcggttcgccacttcgtcacctccatctgtggtgaggccctatccatcctcttcgggttattgccctctgcgtttaacttaagaaccgtaggttatcgcgggtcggggcgctgcaattcgtcgctgtggttggtgctcgactgcatacccgctgtgccccgtggccagctatgtcgcaactccttctcggtgagtcgtcacctcctggttgttccttatcctctgccctacgtgtagctcgcttccagtgggtggattagatgcctgggcgtcgaatcggctgctcgccggtgg

SEQ ID NO: 84972 - DNA, 714 bp, Zea Mays
acgacacggaagggcgtgtcccgcagcgaagtctggtaggcggtgttgaagacgaactccgcccaaggcagccaacgtagccactagcgaggcctgtcccccgtgaggcaccgcaagtacatgatgatgacgcagttggccacctccgattgcccatctgactgacgatggaacgtcgcagtcatgtgaagcttggtacccatcaggcgcatgagttcacgccagaacatcgacgtgaagaccgagtccctgtccgacaccatggactgaggcacaccgtgtagccgaacgatgtcgatgaagaatgtctgggcgaccaactcggctaagtacgggtgcgccaatgggatgaaatgacagtacttgctgaacctatccaccacggtcaatattacagaattgccacgaatgtggggcaatgcttcaacgaagttgagggcgatgtcagtccaaacgctctaaggcaccggcagaggaagtaggagcccagccgggtgcaagtgctcggacttgtaccgttgacagacgccgcatgcgcgcaccaagtcctacacgagttgcttcatgttaggaaagtgaaagtcgcgccacagacggtgcaacatgcactgaactcgctcgtgtccctcctcatggaccgccaccacgatctcctggaccaagggggaggtcggcgggatgtagagtcgcccgacaaacagaatcatgttgtcg

SEQ ID NO: 84973 - DNA, 597 bp, Zea Mays
caggagcttcaggcctagctaaagccactgctggacgccctttagaggcttcgggagcacagtcttaccgcggtcggggtcattgccgccttccaccgaaggagggtactaccactgaccgagcgccgactttgcctggacgagatgacgtcggacgcctccgtggaaagctctcagatggcttcggcctccttctccaccgatgagctcctctagcaagtgaaagggacggtggggaggactgactacaccacccccgtgccgatgcgccccgaccaaagctacgtgtatggtgaattttttggtttctccttctgcttctagccctccccttaccatctcaccccttccatcccttttgcaggggtgtgaggctatcgaactgctcgtcccgctgttccaaagcatgcggttggccgggaggcgcgtcggttggccgccaaggagaagcagaagaataaagctgcagacaagaagcgggcccgcaagaagatgatggcccatgacgctttggataaatgtcgctgggcaaaggcaagggagggttgacgctggaggcctctcccagcatggaggatgatgatgacgacgacgacg

SEQ ID NO: 84974 - DNA, 760 bp, Zea Mays
acgggaagtcctgctcaatgaagctcacaactcagcttactccatccactaaggaaccaccaagatgtacctagacctcaaagccagatactggtggagagggatgaaaaaggagatagcacagtatgtggcccggtgtgacacctgccagcgaacgaaggccgaacaccagaagcctgcaggcctactgcaacccctcccagtgcctgaatggaagtgggaggaaataggcatggattttgtaaccgaactgccctagacgcaaaaagggaatgactctatctgggtaataatcgaccgtctcaccaaggtggcccacttcattccagtaaaaaccacttttagaggagccgcccttgcccgaatatatcttaaagagatagtcaggctccatggtattcctcggaagatagtgtcagatagagggacgcagttcacctcaaaattttggaagagccttcagcaagctatgggcaccaagttagatttcagcaccgcttatcacccccagtcagatggtcaaacggaaagagtcaacaaggtcctctaagatttactaagagtctgtgtgttgacgttcgacaggaattgggagtccagtttgctgtacgccgaattctcatataacaacaaccatcaggccagcatcaaaatgtcaccatttgaagcattgtatggaagaaagtgccagacccccctaatgtggtccaatgtaggggaaaggatactagaaggacccgactttgttaaagaagccgaa

SEQ ID NO: 84975 - DNA, 840 bp, Zea Mays
aaatttgtatagctctagtgttgtcacagtgaagaagcgtaggcgcgtcacaagaaacgcctagatcagccaagagccaacgaatccagataatcttagcagtagtagtagccagggctcgaagttctgcttcagtactagatctagacacaacagcttgcttcttggatttccaagcaacaggagatgatccaagaagaatacagtaaccagtgatggagcgacgatctataggatcactggcccaggtagcatcagagtaagcatgaagctgaagtggggaatttgagtcataaaataaacattgtgttttgtcccccgtaaatatctaagcacacgaagtaagtgcccataatgaactgatgtaggagcagagacaaactgactcaagatgtgtaccgcatgagcaatatctggcctggtgacagtaaggtaaactaagctgccaacaagatgtctatatcgagatggatccttcaaaggtgtcctatcagtcggacgaagagataagtgaagatccataggcgtggcaacaatgcgagtatcactatgaccagaacgatcaagaaggtcttgtatgtacttggcctgagaaagataaataccattttgagtctgcaaaacctcaatgccccaagaaataactgagtgcccccaagtcagacatttgaaattccttactcagatacgccttcacatgagcaatatggtctggatcatcgcctgtaatcaacatgtcatcaacatatagtaatagtaatgtgcgtcctcgtgaagaaacatgaatgaacaatgcaggatcatgatcactagaatagaaaccacaagccttgatgacag

SEQ ID NO: 84976 - DNA, 445 bp, Zea Mays
gtctccaacgtcgacaaatacgagcctaagcaggacccgggaggctggttggccgtttataaaaccgctgtccgggccgctggggcaactgaagatgtgatgactgcgtatttacccatcgcccttaggcaagacgcactacaatggctacgacacctaccgcgacactgcatcgatgattggagcgacttcagtcggtgttttatcgccaacttccaatctctctctaacaagctggcgcagccatgggacctcaagtccatcaggcgccgaggggatgaaacactccggtcgtacctcaagaggtttcaggccatgagaaattgcatccccgaggtcgctgaggcagcagtgattgaggacttctaccggggatccaatgactcggcctttgtccaagctatactgcaaagggaaccgaccacctccgagcagctgttctggg

SEQ ID NO: 84977 - DNA, 419 bp, Zea Mays
gtttgtttgtgggatatggaaatcatcccctgaactgcgtaagcgcgagtatgctataccggcttaagccgtcaatgactttagccggtaactccgttagtagggtatagtgttcaccctaggttaagtaagcgtgagcatgttgcaccgtcttaagtcgttgctgacttaagtcgattgctccgtttgtagggcatagtggtcaccccgagttaagtaagcgtgagcatgttgcaccgtcttaagtcgttgctgacttaagtcgattgctccgtttgtagggcatagtggtcaccccgagttaagtaagcgtgagcatgttgcaccgtcttaagtcgttgctgacttaagtcgattgctccgtttgtagggcatagtggtcaccccgagttaagtaagcgtgagcatgttgcaccgtc

SEQ ID NO: 84978 - DNA, 582 bp, Zea Mays
gtagttcataaggtgaaccctagggaacgtttacatactccttgcactgttggttatcaattcgaagacgaacaggccgatgatgtttatcaagaagaagaattgccaactacttttactatcgatgagggtgttgcactaaactcactagtcggagaccgtaacgatgtcactactgatgagtgtgttgcaccgaaacgaaaacgaaatccaaggaacaaaaaagccacattgcgagctttggatcgaagaagagtccttgatcgtgattctgatgaattttgatgtgtaatgcaaaatttcatagtatgtgatgtattatttgatttttattagttcacttaatttaatggagctaatacatttaatgtttttctattgaacaagatgagtggtaggaaaccaaagcacactgctagggggtttcttaatgcggctagcaggatactccctggtgcacgttcccttttccaagggagttcttctagccagagcagacaggtggcgtcgctgagacacgctcggccagaactacgtgatacaccaatcactctacaacggagtaccgatgtaaatgtttat

SEQ ID NO: 84979 - DNA, 465 bp, Zea Mays
tgggcgactggtggtttcaggttcctatcgatccacgtgcattactgtcgatcgtctgttcacttgtcttcatttcaggaaacagtgtacacatcaaaagcttttcaatgaatagtatggagagagctatatagccgccggcggcccgggatctagttagctagctaattaagcggctgcttagcggagattggcttgtgatgcagttagatctaaccaaaaaacagggtggtcagtgggtgggtgagtgagtgagtggataaacgtgtggggtctccgatcgtcgtgcgtactggcggcgggccatggatgcggccacaacctgcgatcgcaatcagctggaaatccctggagatggaggtgccggccggccggctgtttggtcgctaggtacccataccgccctgatggtgctagtgctacctctcgacccctctcttatctcttctgtcctcacaattagtc

SEQ ID NO: 84980 - DNA, 709 bp, Zea Mays
cttttgtccctctgttgcatggcttgcactggaaacttgggttggccagcagggacttggtcattaggggtggtcctgggatgatggtagctgaaggcatccatgcgctcatcaccgggttactcaggacatttgaggccaagggttgaaacagccttgggtcctatgattgaggatgtacatactgtggaacatacagcgagaagtacgaagatgtactattcacctccttgggttgggaagactgagatgttgccaaagcaatctctttctacttgttgatggtatggtggcaagttcttgtagtgtggccttatcttcaccacaaaataagtagaatggttttcttggaggtgcgatggtcctggcaccgaagcttcgacctgctcgtcctcctctcagtaccagaggacgagtcgtgccatgagaagactgttgctaagagtttgcctattgctagcttgattgagcctaagattgaatcaccttttcttcaccttgcattgggttgtgaatgctccacacatgccttgggtgaaatcttccctcgaagcccttggcgactttggtgtatctatgcaattcctcctttctttggcagaagtcattgtcggcccttatttattcatccgtcttatgtagtaattcctccagagagtgtgggggctgccttgcgaagtattgggctactagtcctagcccgagcccc

SEQ ID NO: 84981 - DNA, 691 bp, Zea Mays
aaagaatcctaagactcattacacagtcgcaatggattgcaggttgaattacaggaaatagatggtttcttatgtaaaaactctcggccgaaagggtgtggtgcagccctaaccgtccgatcaggcgccaacgcgcacaattaaatcgagcgccaaccagagttgagtttcatttgtgatcgctcgatcgatgaccgacggtcaagatctgcccacgcattaatcctaatctaagtcgttcgctactgcaccaacggtccaaattgcattgtacgaaatggtacgttgtgttctaatcatgtctgcctgtgccggatcgaacggtccgaggcacgccatcttcctcatggacatccacagcggcgccgcccgaagcacgagggtgcacgaccggactgcactctaatccgcgcagcaaggccctaaaaacctaatccgaacctctctacgcgatgcctagagaaaaacagaatggatggtgctccgattaccttggttcagggtgcagactctcctgtccacgcggtggcgcggtcccgtggcggagacccaacaatggcaaaggattcctatcaagccgaggcctcattcaccctgcttctcccccgagcgcgatccgtgtacactcccgaacatccgggactaggctacgggtgccgagcggcggagatggtggaattcgatggcggcg

SEQ ID NO: 84982 - DNA, 350 bp, Zea Mays
agttcttgatgtctaggcagaatggatggttaggagggagaaattgtcgatgtttattgaaggacgaatatttgccaccctttttcaaccaaatgaacctaagagcttctttggaaactgggcatgggaacttaccgtgaacacaccaggcgtagaatagcccatacgcccgtaagtcatgcatggagtactggtaccaaacatgcattttgaagtttgtcttcgtaactcggtcatacgtccataccccttcctcctaagcacgtaccaattcatcgatcaaaggctccatgtaaacgcccattttattccccgggtgtccgagaattatcaacggcatgaatatattc

SEQ ID NO: 84983 - DNA, 606 bp, Zea Mays
atttggacaagatatgaattaaatatgatttatacaagttttacaatttttttatactcaaaatcaatttctaactctatttttcttgttttatttaatttctggactgcgcgcaccaataccaggaagcacaggggctaatccataagaatccctagacacagagcgctatatgcaggataccgggttgattttcctatactagggggtctattttgcaaagtggtcacagcgaaagggtatcatttgtttctggccttcggattaggtttggacggcccagattaaatctttccaactccgaaccggtacgcaattgcacccgttagatcaaagatcaacgctcacaatttaatgaaggcgcgatctaatcttcaccatgcatacaccgatcgacggtcccggtcacccagtcgaactggtactagtagactaatcctagccgttccccagggatcttgtggccacgaaattgccttccacctcccgatggacacccacggcggcgcacccatccatgcggcggcgccatggctgccgaacacccgaactctccccacacctccatactctacacgcttgggcgaaaaaccacgagaagtctac

SEQ ID NO: 84984 - DNA, 714 bp, Zea Mays
atcgaaagcttgtttccgacttatctcggaactaatgagccgtcggtgtgttgccttgatcttcaagtcttcataccacctctaggcccaagtcagctagttggcccatgaattcagccatctagtctacttgggtcctttcatgacccatgctctggatccacacgatgaggaactaggggatatttatccccacaagcccctgacgcttgagtcaaatttgagacaattatcttgaggctccaaagaataaaccatgggcttattatggagattaccgatgtctgcgcaattctatcgagttaacagaactcctttttttaccaacacttccctccattgggtgcaccgcctatgtgcacttaatgggtgcagccccaagctttgagtaacaatcaactcgaggtccaaaaagaaatttcttttgagtgtgtgaattctctaggcccctaagtggtgttttggtaattaacaacaactgattgtggactaacagttccttgagtgataagattgcaggactgaaccacaaggtacaacaaagttcttgaggaatcataaccattgattgtggatcaagtgaaggcaaaggtaaaacttaggtttttgcttttgtcggtcagcaggtgtttagagaagaaactgactggattagtaggatagacagtcgtactattaagaggggtcaatgaacttgaatggtgtataacttag

SEQ ID NO: 84985 - DNA, 771 bp, Zea Mays
tcttatggagggagatgataatacccgcttctttcatctctatctaatggcaaacatcgtaaacaacacatctttagattagaacaagaagatgggagaaataactagagatgataaattgaagtcgtataaaagcaatttttatatagtgctatttggactactggataatattgattttttttctagaagagctaactggcgatttatctcaggtcagtcaagctgggaataaactcctaacctcaagttgataataaactcataaactcctaaccccggatggtgacgggggtggatctggggccccactgtgatctggcacggccttcgcctacacgttgcacctttgaccccacgaagtcacacccctaactacgtgaggactcggacttcgctgcatgggaaggagtttgagccttcgagatgtgtacgtggggctacagtgagccccccttgatcgtcgtggcccttcgcttcatcccctgcaaaagccgcggttgaagaccctgacgttggtacaagtcgaagtacccttcgcatcctgtacctgcaccaaaacctatttgatcttagctggattagtctgatcgattgagcgctcggtcttcactccaataggatggttgcgtgagatggatccaatcgcatgcacgtctaggtcattttttggcgatgtggagcgttcgaggggccatgaatccccgtcacttttagggctagattggaaacttaaatcccctctaggattaccaagtcccccctcaatcc

SEQ ID NO: 84986 - DNA, 764 bp, Zea Mays
cgttgctagaaactgagaaaatatagaagacataatcttttagagtatgttgttaaggatagagattgttggagacaacctaagcttgccagcgtggcacacacacggtccgagggtggtgaaaggcctctggtgctcctcggctcaattcgaaaagatcgttggaccataacggccggaactgctcccttcctcgtcctcgttcctcctttgcatctatctgagaatggctaagaaggcacatcaatgagcaggaaaactattttgtgcattgaaataacatgttctgaattctgtgtttttaaataaatggccataaatgcagaagttagagaaataagcccacatttaaagaaggcaaacaaaaatgcccataattcatcaaatcatgcgcataacacataatgcgaacacaagtttgatttgtcccttctggtttgggttgatgatgagtgattgtcaacatgagttgtactttggtgtgagtcacgaactaaccagagtatgagattatgtgtatgtgcaaccatgtctttcgacttctggtgtgcaggtgtgcagtacaaggatggtggtcgacgacgaaggcgaagatcttgcgggttcgtgtcaatgggccgggagcgacgaaggacgagcgatgggtcttgatcgaggacctaagaagccgagtgactagccgtgatgactgacacttgggacacgcaccagtgtgaggacgtgatagagcggattgtgtcgcaggcgtagccgaggactggtgg

SEQ ID NO: 84987 - DNA, 437 bp, Zea Mays
acgcttgcacttcattcccaattacgattgatgacctcctgatgccgaaacacgaccatataggacgttgaatgatgcctctcacatcctccctctgattcagatcattcttcacgtaaaacattgcttaatccaagagacggccacttcttctaaaatgtaggcacggtataatttgcctcaaagcagggcatgaagttgtagcatccgaagttattatggtactgttcttttccggttgcctttgtctggtaagataactcgtgaatattgcagaagcacctagcatccggctctagtccctgactcctcatagcccatataaaaactcccactttgataagagcttcgggggtaagttgatgaagatatatctcgaatgtcttcaaaacctcaaccaacatcttgggagcgggaagcgaagcccaactttcatg

SEQ ID NO: 84988 - DNA, 359 bp, Zea Mays
ctaaaagttagtgtattaatgattcttccaattacagaatggggagacatatatgcaacaacaaatgtaccattgcatcaaccttccttgccattgcagcgtgatcaagcgttggcaatcataaacaagttgtcaaacaggagagttagctcttcgagcagtgttgtgagcgagatctcttacaatgatgagccggccctgacaaggtcacactccatgatatctgagatgcagttcagcagtggtagcagtggaaattctgtttacaagagcttccaaagggataatttgcctaacaactctgatgaggcatcagtttcagaaatttcagaaaatgtaaatcatctgagtggtcaggt

SEQ ID NO: 84989 - DNA, 545 bp, Zea Mays
aagaatgtacgaaagatgatatgttgaggcaccaagttgatatatcctagtgaagagaagttgacataacaaacctagagtttgaagaggatgagatgaacatatggtttggtttaagcatggatggacaaaaaccattggtttaagcagtggtaaaatattgacttcatcagtgagatgagtagtagtcatagtggatggtatgtgactctatgtatgtacaacctacctacctagcaatgcttgaagaagttcattatgacactagcacttataaaaggcccaaaataacctagcaatatcatcgatgcattactaataccattggatgaagaactttatttttgtagtctaaaggggtgcgtaagtaggatgagcacaaagaagaggaatttgatctacgggctttgatttttgtaaccatcaatgactttcatatactaccaaacatatcagggcaatcaaacaaagaatccaatgcttgtacacattgtttagatgagactgacaacaacatgtatttgaatcactattagaaggttgtt

SEQ ID NO: 84990 - DNA, 321 bp, Zea Mays
ataaagaagataatgcatggaatgatagccgagttgtcaagaccatcgaggcatggcatgacattgtccatgaccttgctgtatacgtgagtttgttttgcaacttgaatcggttaatgaggaagatattggttggattgatagatgtgtaatagacatgtaatatgggaagtcatgggtggacaatattgtctttccatgttcttgtaactccagctattctatccttcggcacgtacgaaagggcacacaacaataaaagatcacctctcacttctcggtcgtgttgtatctaagtctccccagagtgttgggagagca

SEQ ID NO: 84991 - DNA, 333 bp, Zea Mays
gttcaatacaatgcctctgcgcctggcgaaagaaatccgtcgggggttaccatggggcagcgaattcctcactggcattgtgtgttccactgtgcaccgccaggcgtcgtggacaggaatcctaggagcccaatcgccggtaagaaggcctcatctacgatcgcatttgtctctactgcgcctagaatctattcgtgcttaagaaataagaacggtgtcctgggcagccagggccttctccggtgtgattgtgcggtgcgaaggggcggcgccgccgcacactgggttggggtggagaagtcggtctggcgccgtcggattagactggtgcga

SEQ ID NO: 84992 - DNA, 876 bp, Zea Mays
actattccaatgtctcactaacatttactcggaggccccgcatttctatttcttcacagcgcccggtccacgacggtggacggcgacgagcatacctctggcgagcctgtaccggccaagatacgaaatgaccggcgctctagcttggctgacacctaattccaccccggcgaccttaatccctcaactaattgcactaatctgggtcggaatctctctgtccacgacgacagcgaaaaccgagaacaatccgacgtgttcttggcgatccagggcagtctagttgaattaaacgggtctacgagtagcaggggactcaagggaggctagaacatcaagcaaagaagcttgaactgacctgcagagggtcgggcacggtgaggcgttcacggtggcgtggaaacccgatttgggggaagtttggaattcgcgagctacagtggctaatcggaggcgagggctggtgcactggacgcgtaacaacctaacggagctcactggggcattgatttatagggtccatcagcggtggttcccaatttgaagaaaccgcgctggcggccgagaagaggggatgagtcaccggcgcaggttatcgtggctttcaccgtggctaagcctccgacgatggacggatgttcttcaatggtttactgcgacgtgttaaagcccctaggcacgtggcgcatggtcggtaagcggctagcgccggccagggtcatctcgacaagtgggtatggtagccaatccggtgaccgcgcccgagcttatcctggtgccaagatgttttcaccgccggccgatatctgcacatagagcgcacgaattgcgacgccggtgaggatcacgacgcggagttcaccggcgacacattca

SEQ ID NO: 84993 - DNA, 597 bp, Zea Mays
atcccctcccctcgcaaagagccatcaaacaatccactccctaaagggagtgttcacacaaatagctcgaagaccccccctgttcaatccttagagccacccctacaaagccaaagtttggatcagcttgtcaagaggccaactgtccaagtcccaccgagtcgaggactcatacacatcttcgccccttagacccacaatacaagaacgacacgagaggtcaatgccttgataccagcattaacgaggacctcacaagctaacatggcttagtagtcctatgaaatctttgaccattatatctacaagggtactaggtttccgaccttgctaggtatagggcggaacctcatagcatgagtcatcatgtccaacgtcgtagctatcgtattcgtgatgtaggtgcctaggatgtgtctgatcggccgccaaatatgattcaacgtgatggctcctgcctcatggaggaatccaatctcagcgaaaggatggagacggtggtcgagtcccatcttggtagtggatgggcaaagttgtatcgttgtagctctaggtgttaggagtatgtcctaactcaggtatgaccaggccttgagt

SEQ ID NO: 84994 - DNA, 1110 bp, Zea Mays
gaccgactaagtccctgccgggcaaaactgaattctgtgaattctggcccggcaccacgagcccacgtcagctgcgacgggacacagtgtcgcccgaagcacacacggtagtcgtaagcgcgactatacgcctcttggacggtacgagtgcacctccactacccgaagggatcatatagcctcagctagaggagacctcaacaccaaagctttagcagtgaccactataccaaaaaagataagacaacgagccataccgaatggatgtgtccgtgtacgcgggagggtgatgcaaggctcatgacaacaaggaaaagcaatgtatgatcataccgcaaggctgacttgcgggacctgccacgcactgttacaagcacattagcaacagactcgatagaggggcgagcgtgacggacgatgcccctcgtggggcattgccaccatgaccttacaagggggccaccacgacgatcgaaaatctctctctcaaaggtagggatggcaattctgcccgcgggcatggatatctgcgggttttgtacccgatgggcatgaatacgggtaagaaatctcgcccacgggtaaggatacgggcaacacttctcacccgcgggtaattgacggatataaaatttcgcccgtgggtattacccgttacccgcttaatttactagcccatcaaaatatccccatgccatcgacccacaggccacagcccagacgatcatgtttgtggaattatgtttgagacttatgtttgtggatgatcgatcatgtttgtggactttaaagtttgaactatgttccttgccattatattatgtctgtcaagttgttgatgttcttggtgaaatgaacatgaccacatactcgtatggtattttctggcgggtaacgggttgccggatatccgcagatatcctgcaggtacgggtacgggtcgaaaattttacccacaagctctcgcgggcacgggtaagcactagagacacggatatgttggcgggcgggtaaatggcttaccccgcactttacccgacccatcgccatccctactcaaaggtggatgccaatgtaaagcactttccttaagaaataaaaggaaagccc

SEQ ID NO: 84995 - DNA, 595 bp, Zea Mays
ccccgggcctgggatctttgcatcaccgtggccgccaagccagccatgttcttgtccccaggccccggacagcgatgccagcatgtcgctgtgaatccatctgcagtcaatgcgagagcgacctgttccttccgtggtaatagcgaatataagtataatctgtcggaccggagtcgtgatcttttgcctcccacctctggtgagcaaagccgtaaagtcgtcatgcatgtgccgtgacgcgccgacctggagaaccaacaatcattatcactcttttctatttctatatattaagcacggaaggaaagatcgcgccatattagtccacatcatcacttttcttaagaccgttggatcgttgtcgaacgaacaccgatcaagctttcgacggctcccagcaacaacgtttctaggctcttcttccttccacgaatcatttctaggctcttcttcctcccataaattggccagcgcctctctcccacattcccaccgctctatgaaatcctttagctcccgcctgctcgcccatggtcgccgccgaaacttgtgccacccgctcgtggttccacctctttcccctgcttccttctcc

SEQ ID NO: 84996 - DNA, 512 bp, Zea Mays
tcaaaaaggtattcttgacatccatttgaaaaagcttaaacccctttgaagcagcaaaggctaaaaggatcctaatggcctctaaacgggcaacaggggcaaaggtctccgcataatcaatacccactttctggcaaaactcttgagagcaaccaacctcaccttgtttctcactaccaacccgtccccactctctttgtttttgaaaacccattttgtacctatgggatggtagtttgaaggaggtggcaccaaaacccaaacctgattcctctcgaaattttctagctcctcatgcatagcattgacctagctaggatcaaacaaagcgtgtccaacatcctggggctcaaaagaagtaacaaaaactgagtgagcaaaatgagacatctactgataccaagagcgagtaactcacatatcaatctcaccaatcatctattgaggagtgtgatcacgctaaacatgtcgtggagccgtccttgaagaggtggcctccccctcaataacag

SEQ ID NO: 84997 - DNA, 391 bp, Zea Mays
gtctcttaggcatctatgttcctttcacccaccacctacaccttttgttgtagcactagtcactctagaagtggtctttgaccctactaagttgaagcacatctaataaccagctttgtctacaaattgaacaactagctttgccaccctaatggcccacctagaccaaatcatcttctcaaattgctcatttgtccttagcttccatttagcatcactgtcaacaactactacatcaccccacacataatctaactagttccctagatcgtcaaagtggccatatcatcaaggaattggtcaagaaaacatacactcataccatcaatccataagtcataaacattaactagaactttgaggggaccataatccaaatttgtggtaaaac

SEQ ID NO: 84998 - DNA, 463 bp, Zea Mays
aagctcgtcttgtagctaaaggatttaaacaaagtatgaaatcgattacgaggacactttctgtccggtggtcaaggccattactatcagaactcttcacatctaggtgtctcaaacaactagatgtgaagaatgtgttccttcatggcattcttgaggtaggcgtttatatgaagcaaccactagagtgtgaacacaagtctctcattgtatttgcacgttagataaagctatttatggcttaaaatgagcactcagagcatggtactcaaggttaagcgagaaattacaacatcttggatttataccatctaaagccgatgcatatatgttgatgacattatagtcactggctcttcataagaagctgccgctgccctattgatgatctttatcctgatttcgcattaaaagatttgaggtggcatacactatttttttggaatagaagtacacaagtagg

SEQ ID NO: 84999 - DNA, 756 bp, Zea Mays
catccgaccttttacgccggaccgtctggatatgcgtacgtagagccgagagctgcacaatacggacaatttccacattcatcgcaacaacattatggtgccccaccagcaacacattatattcataccataccacctcatggacatagggctgaatactgttcggccacaagagagcctgagaggtatagggcaggactggtgacattaataggacacctaacacacacatcaaacatccctgggaggaaagccgacagagtgatgtcaggcaacctgagaattccacccacaaactcaatggatgttcgccagacatggcggagaggatcagagacgaggtagtcgggatgttcagggacaaactcaatgttagtgtgtcaggtacagggcaatcgtatcggaagccttatagccaccgattcgacaccatgccgtatccatagggaactagaataccagacttctctaaattttctggtgaaggtgggaaaagcacacacaaacatattacccaattcatagcacacttgggacaattggctgatggggaagcctaccgcgtttgtttattcttgttgtcccttaccgatactgcatttgcatggtacgcagctttgccaccaaactctattaactcttgggaagaattagagcagaaatttcatgaacacttcttctcaggagaacatgaattagaattggctgacttggcttcagtccgacaggggcctgaataattggttgatgactata

SEQ ID NO: 85000 - DNA, 563 bp, Zea Mays
ctcaatttcctgttcaacactcagcaaacttgtcagtccttaaactgtgttgtcattcaattcaccgaaatccacaaaagggctagatgcacttacaggttcgtgtcctgcaaaaaacgtaccaccttccacccagctcctgaggtaacagcaccctggtgcggtagatctccatgtgcggcctaggggcccacttcttaggcgtcgcctaggctccctgcttatgtgtataaaatagaacgagaggcttttgggtctggttatgcttaccgtgttcttgcgctaaggccctagtcttcttcttccttagaaagccttgtggtcctttgctcttttttgttcccttgcggtttccacctgctagccctatggtcatctttcatccgttctttaccactcgaagttggctcgagggcttggaggcgaaagggttccttccccccgagccgatctcaggctggcatttggaggaaaagggcggtgctctagtgcctcacgatggcaaagttgtggtgctttcctccttctacgagcatggcttcaggctccccttgcatccgttc

SEQ ID NO: 85001 - DNA, 459 bp, Zea Mays
ttggaaaaaagttctgtctttaattagaattcagacgactgggctggctttgtaagtttcttttgaccaattaatttaggattagggaggactctacacttgcaaactgaacccatcatcgggaggactcgacgcctgcaacatgaggattgccgcactattgcgacagtcaggtggtgtacggtgctgtcaagaattggacgtctggaagatgaaaattaccactccactaatagcaaccttgtatacacaaggtgttcagtaccatgtatacactgctagttaacacaagttgttaagagcatgttttttagtccacaagtttgtagagtaccatgcagtccctgtattcagtccagtacaagaaacttgaaaaaaatcaatatgtgtattggcctgagcaagtgtttgagtgtgcagaactgcaacttgcaatcaagttaagctggtagcgatgac

SEQ ID NO: 85002 - DNA, 351 bp, Zea Mays
cggaaggcgatcaggcggttggtttctacgtgcccatcatctcgaaaggaagccccagaacgcggaccggaggaacaagaggcgcaggttcgtccacggcgcgcctttgcctcttggggccagcatgccgaaccagtagctgcagactctcgtggccgtatcctccgaaaatctccacgcacacatgcattgtgcagtagtgcagagtagctagagaatccgaacgcacgatatactgatgatctgaggagcacgaatccagcgatcaacgtacgcgcaggagagggtccgtccgtctgctcgagtaggcgtcgagttcgatcgatccggcggcacacgcgcgcgcctagg

SEQ ID NO: 85003 - DNA, 761 bp, Zea Mays
atcccgtcgaatatcgccaccaccatgaaaatagggttcgagagccagaccaccattaccgtgataaagttgaaccgtggccagtgatgttgacttgtggtgtcgcttagccctcgggaagcaatcaaatgtggtctcctgtgttcgcctcaagtaatagcaccactggggtgtgggctgggcgccctgggtcaacgaatttctcaccgaagttcatgagggccgcggagccattgtccatcgtgggtagtggagtctgcaccgcaaagccaggtgaggtcttatcccatagatttgtagtagtttccgccccgtatagcaccgattgacgtggggttttgagtcccagagcctcgagtagcgcgtctccagtggggaactatcgtaatcgctgggcggcgccgccgtgttgggttcagaggaggaagaaagatgatggccgttcatctaggtttggacggcgtggattaggacacatgtgtaccctttcgcgtttttaaatctgagccacagatcggcaaagaatcgaatcaggtttagctcgtggcgtggatggtcttttgatcgtagatccgaaatcaaatgaccagtgttgttcaccggttcagatatgtctcgatctaatctagaccattagagttagatcggacaactgcgaatctgcgtaccccttcgtcgtgcttctgttgctaaatagaccctgtggtttctatgattcaacccgccatccactccagtaggaaatccattacatataggtc

SEQ ID NO: 85004 - DNA, 382 bp, Zea Mays
tgtatagtagataaggttttgggtaactgaagtcggtacgctaccggtccatatctttcaaggataggaaaaggaccaatatactggggtgcaagctttcctttaactccaaaacgcgatacacccttcattggtgaaactttcaggtagacataatctcccacaagaaagtacaagggttgtcgtcgcttgtctgcataactcttctgacgagcttgagctttcttcaaattataaattattctctgaaccttttcttcagtctctttcactatatcaggcctgaagaagtacctttcacctggttcagaccaatttagcggagtacgacatcgtcgtccatataaagcttcgaagggtgccatcttaatgctttcttgat

SEQ ID NO: 85005 - DNA, 274 bp, Zea Mays
ttgggattgtgcatgcccatttgcagccgatggatcttgtcggttatcttttgtttggacatcgtgtgatggaaaactagcaatgacagatttatcaaacgcacgtgctaatctcatataatcttcttgacacccccctaatatttgttgcatttgttcttgttgttcatctacataagaacgaagcgcttggatgtcatctatgttacttacatgtggcactacaggaaaaggagggaaaaatatcgaccgttttaagaacgtcggtgtcgac

SEQ ID NO: 85006 - DNA, 637 bp, Zea Mays
ggaaaacttcttatggcattgtaaagagccagtgggtcatgctgggggtattttaatgggtatagatctggatgtctttgatataggggccattgatgaaggggatttctatgttaagtttaccttgtgaaataaacaagacgacttcaagtggtcgttggctacagtttatggttcggcgcaagctgataggaaggagatgttcttggcagaattagtccgtcttggtagtcaagaaagcttgccgctggtcataggtggagattttaatattctaaggtgtccaagtgaaaaaataaagataattttgatcaacggtggccttttcttttcaatgcggttatagatggtcttagtttaaaagagctggagatgtttggccgacgattcacctaggcaaacaatttggccaatccgacttatgagaaactcgatagagtgctggttaccacagattgggataaaaatacccattatctatggtcctatcattaaatcaagatatctcggatcatacacctttattactaaatacgggagagtcctgctcgagcaattcccaacatgcttttaagtttgaactaggctggttgcttcgggatgggttctacgatttagtacaggaggtatggtcgaa

SEQ ID NO: 85007 - DNA, 521 bp, Zea Mays
atgcaatctatttctgtgctggaaccatgtttatttctaaggatgtaatctgctccaaacccagaggtttgtacaatggataatcaaatttagatgatggtatgaagttttcaactctctgtcgactatggccttggctctggatgtaggtggaagtttggattgcgctagtttgtgcctgatgatgtgaacatgcttggttgaaaatcagtttgtgtgaaggatctaatatatggacatgtacccgtcccgttggatggctggtcatgtgctctccaagtaacatgtactagaaactgaagggtaggtagaaccatcagtacgttgctggtggatggtgtggtgaggtgaggtgaggtgggtggtttgggcgtgaagtttctgttgcaatgtactaggtgcatgtgcatatccatgcagcggacgccatgcctgcgcttgctcacggccgggcctatgcaactgaactgagtagcggcaggctgctgtggctgtgaatggttccaagcgtctaaactgtg

SEQ ID NO: 85008 - DNA, 338 bp, Zea Mays
gagaggacagttgcgttacttgtccggcgatgacgttttctacagttcacacagcagcttctgcttccactcagttttccatcagtgggatgcgataagcaagatcaggagtcagagccactaccactagaaccataataatctgaactgtcaacggggcgagcatgcgtagtggcagcggtaaagctgtgctagagcgagcgagagagcgagcgcgacgtccacaaaccaccacggcacaacctgagcgagtgcagtgatctcggtttcaaaaggctgtatgaataccctacaagtgtcaagtgcgcgtgccatccgattaaaagccagcaccattt

SEQ ID NO: 85009 - DNA, 490 bp, Zea Mays
atgacttagaagtacattaccacccggggaaggccaatgtggtggctgatgccctaagtcgaaagtcgcaatgcaattgtgtggtgatggattctcgcgtcagcaccctatgtgatcagttgagtaagatgaggattgaagtaattccttctggtaccttatcttacatctccgttaaaccaaccttgttagaccagattattatggcccaactgggtgacaagggagtacaaatcatcaaggagaatcttaagcagaaagtggagaagtataagtgctttcgtcaagacagcaaggggatattgtggtttgaagatagattggtggttcataaaaatagggatctcaagaagactcttggatgaggctcacctctccaaattctccatgcacccgggaagcaccaagatgtaccatgatctgaaacctttgtattggtggactaggatgaaaagggagatagcccaatatgtatcggaatgtgacacat

SEQ ID NO: 85010 - DNA, 302 bp, Zea Mays
ccagatgcagcaagaacgccaggagatgcgtcaggaaagagaagacatacgccaggagctacgccaggagagagatgagatacgccaagaaaggagggcgcaacagcagcttcaacaacagcaacagcagcaacaagtgccattgcctccaccaccaccaccagttccacctcgtgataagcaccgggagttcatgagccataagccacccacatttgcaagctcacctgatccactggacgcagacgattggttgaagtcaattgagaagatgctgaatattgcacaatgcactgatcggg

SEQ ID NO: 85011 - DNA, 472 bp, Zea Mays
ttagggaaatggcgggtcagcaacaatttcagcagcaggcgggaagaggttatccacaaggccctcgagagaccacttatctggacttttctgaaactcgtccacctctattcgtcaaggcagaagatcccctagaagctgacgagtggattcgagttatcgagcaaaagtttggtcttcttcgttgctcagagacgcagaagccgttgttcgccgcacaacaactccgtggtcctgccagtacctggtggggaaattttatggctattcaacctgacaaccatcaagtcacctggaacgagtttaaagcagctttccgtgaacactacatccctgagggagtgctgcatatgaaacaagaggagtttatgaagttacaacaaggtggagataccgtcactcaatacctcaacaaattcaatcacctgtcgcagtatgctatcgaccaggtgaatacagatttgaagaagaa

SEQ ID NO: 85012 - DNA, 697 bp, Zea Mays
gaaaaggtcattagctagcccaataacgtcttcatccactagttgtactctattacactctcgtgggaatacaatgccctaactatcatagaaacactatttttagtttcaaaggtgatctattgttttcaattctttatattccaactttttagcaactatatggtggaaaaaatgtgccttacaacattaacctatgtttggacagttctctcacgcaattgatgtgtggtgttttacttgagtggacataaacaacgtcttagtataccttgaatagaggggattataggaaacatgttatcacaaaaaggtcattagctagcccactaaagtcttcatccactagttgtactctaataccctctcgtgcgaatacaataccctcattatcatagaaacactattttactttcaaaggtgaactattgttttgaattctttatattccaatttttagcaattgtatggtggagaaaggttccttacaaccataacctatgtttggatagatctatcacgcaatttggctaaatttcccatggtctttattttattttgagaaacgatgtggcataacgatgtggagtgttttacttgattggacttaaacaccatctaggtatgtgttgaatagaggggattataggaaacctggtatcacaaaaggtcagtagctagcctaataacgtcttca

SEQ ID NO: 85013 - DNA, 1339 bp, Zea Mays
aaatggacctcatttgagttttattctaagtctgaaaatcagtgaatgggctcaactttggggttttgtaacttacaaagtatagggtttttgccctaggtcaccacatcaaaattgtagcccaactatagaagaacaactttgctcaagagtgtaagcacagttgttaagaaaatattggagataatcaggtctgaagttaagctgacaggctgttatggtctgaattttcagactgacagtgacattggatcatctttggaaacagtttatgactaatctagcaagattttgcccatggctgctgtaacaaagatgaagatggtataatggacaacaactttgctgcagagcttggtatgggttatcatcaaaaatcaagagaaattgtgacctgaacttgctctgtcagtcaagttctttttgaattcagagcactgtttgccatcatctgaaaatatcgcgcgaggataagatcttggacctcgccggcgataaggacgccacggcggtcgggatgggctggcggccgcggtaaatacccctggcaacgtggcagcgaatcaccgaggtgtcatgctccggtaaaacggcgaccaccgcgctgtcaccggaatccgccgcacggcatgctcgccagcgcaaccggggaaatccacgatcctcatccatcgccggtcagccgtctataaatagagcgcgggcacggcttcgtcaccacattccgcacgccagcagctaagcacttgactcgagctcgccaaaaatacccgcgcagccccaattccctctcttcttcgttcttgctccgccgtgaagagcttcttcgtagccagcgctcctctgttcagtaatgatcaaattgctctttgttttagttagtatgtgatctattgttgcccctggatgcaacaatttggagtttgaccgaagccccttgtcggaacgcacctaggtgccgtcaaacaccgccgtgacccccccactgtcgacccgttcttcgggccttgttctacccaaatcaaagaatgtccgtagacccaagtgcacccatgaacctttccccagcctcaattcggtcatcctcgccgtcgtttgctcggaatgcgttcatcctcttacccatccgctcggtcaccgtggaccgattgattcgtagtcccaaccataaaattgatttgggggaaatgatccgtaggagttcaattgtgttcctgtcgcttgggaacttcagccgtcgcgtcatctggccggtctagctcgtcggagcacggctcccgcgcggttcgccgtcggggacttggtgtggtaaatgaatagaacgcgaagggtgtttctg

SEQ ID NO: 85014 - DNA, 327 bp, Zea Mays
caactttcaattctcccacaaatgtagcagaagtccagcaagaattcatacaccagcggacaccacacctctccttccttcccatcctctcttcccagtagagtaactcctctcaccagtggattcctgatatctaatcatactttcagtcgcatgtattcacctaccagatcctccccctctccctctatttctattaagacaccgatatccccctattgctttgccatcttcttgttcatcaaccctagaggcatcttggtcactcgaacccagatcgggatccaattaaactcaacgtcatcaatgcattttgcaccatcaaac

SEQ ID NO: 85015 - DNA, 618 bp, Zea Mays
tttggatccgaggacctaaccaactagtgaaataatgtcgcgtgccctatacctagatggtgatgcaagttgacacaagtattttatcttggttcggctagaagaggccctacttccagcggagggggaggagacttatattactcgcacctaagtgcttgcagtagggtttacaagctgagcgggagagggaaggatcccaagtccctgaggatgattgaggcaaatgccaataccaagtggaggagaaaactcgtgaagtgttcgcctgcccctcctgaagctgtagggtatcctatttataggcctagaggggagctacttggtagagtgtgcctatgaggagacgtctttatattctatagatggtatggccggtggtatggtcttgtaccttatcgttgacttgttcctgcttggttcctactgagagccgagggttcggtcacatacccgaccccccccccccccgcgagtggttgcccatattgtagtggttaacacagtgctaagcttggtaaaaggcttcttaagggatgtgtcatctccactgtatctgatgacgttgggcgtcctccgtcatagatatcgagggcagaagtgggctcgggcgaggcg

SEQ ID NO: 85016 - DNA, 862 bp, Zea Mays
aggggccggcgtgacacagatacaacaattatgatgctagggctcttcatcgcccacatcgcacgccataaagagcacgaccacggaagcccatacgacatatgcacatacggacaaatacaacttcactaaggtaggacaccccattttaacacagcacggtagctccttcctggggaagctaccccttggcctataaaagggagaaggtcagccaaaacatggacgagaaggacatatgaacatacataaaggacacggacgacgagactagaataccgagtgccgaagccatggcgcgaaccaccgcgacgtcgaaggcttagcatagaactccagtcccaatagctttagatctagccactcataagagacttaggagctcatccttctctcgtccgcttgtaacccctactacgaacattgagcaacaagatgtcggtagcatgagctaccgatgactggatttagggactctgtccgaaacaatataaatcttgtgcccaccgagcacacaatccggaccacagaacgcatacccacaaatttacttgtcggagctggttcgaattaactgacagttaacgtgccaagtagggggcttcgtgtgttctcgacaacttctctaagctccggatggccgaccacgacgtcgtcaaggcccccggaacgactgtccatactgagagcctcgacttcatcatcaacggtgaagagcagatggttagggacttggaagctcgacccttccgcctagcaatctcgacgccgtcgtcgaggctctcggcggcctccgtttctctccgtagaggcaacgtgaggatcgaagatcgactcgccctccgaggcaacaagataagcc

SEQ ID NO: 85017 - DNA, 358 bp, Zea Mays
aggccctcttagctgttgtgcagcaaacagtggcttttgcgtctctgtgcatcgaattaacccaaacgtctgttccatcactcttacccattcatcgacttctagaggttcttctgctttgatgaagagcgggggtcgagtctcagagaattccaaataagtagtatcacgcagtccttgaggaggagctcttaccctgtgttgttggaactgattgcccgccatttcacgcaagaagcgcgtattatcagcggtggcattgaccagggcagcgatagcctcggccaaagtcggtggtactagtggcgggttaggagtatcctccttagcgcgggaagtccccgcaccatcatgtgca

SEQ ID NO: 85018 - DNA, 641 bp, Zea Mays
agttaagcttatttgttaattttaaatgttcttatggccatcattccataagatcattgcactcaagcaaaaatccaaatcaaacattatgcaaacatcaccatcacatggttgttattataataataatatcatagagagtttcatcgtataatcgcaaaattgaacttattgcaatatgacttataaatctagagtagtctggtgatagaccctggggctccatagtgaatcctcttgcggcgcggggacacagctgtggtagggacttgggattcgggtggatgtcttccgccgagctgagcctcgagggctacaatcttggcatgtacttcttcaagttctccatgtacccttcagagatctagggtagcattgtctagatcagtgttaagacctgccaccacacctacaagggtgttgaggcgatcttctccaacttcacctggaaaaacacttgtttggctttctccacgaggatgtagaggaagatgcctatgctccatgttgtgcagctactaccgataggtgtggctgagggaccacagagctcttctacaaccattgctgaccgaagcagcgtaggtagatagcggcgtcagagactcatggctgatggagtcctgaaacctatgtctcct

SEQ ID NO: 85019 - DNA, 667 bp, Zea Mays
ttgatttctttttttcttgtccttcctgccccacctttttaacagtgcatgttatctttgcctttttctaatttttttataatattattcataataggatgagaattgcaatttatcactaccgctaacctgcttgagttagacacgtgttgcattcattttcttcttaaatatacatcaggtaccactgtacctatcttcagcttattctatctagcaaacattaactctatactttacactcattcattcacttttttagtagtgcagttctgcatttcagatttcaggttaaaagaagcatagcaagaagccatggtagagtccacaccattgctggtttgcttgctagacacaaacactggtaaaaactttcactgttgctggcaaagttaagtatttttagaaattagataactcaagagtcaattaaatttgtggtaaaagtcacacctctagagaggtcacacttttatttgatataattccctgctacaaatttaaacttctttttatggttactgcaataacacaagaatttgagcattaaaaggttaatctggctcctaaacagatgttacggtacatgtggttgacaaaaaaatgcataataagtattcagaatatttagtaattctcaataagataaattcattgagcatgataa

SEQ ID NO: 85020 - DNA, 438 bp, Zea Mays
ttcatctttggagccgattgatgggtaccacaaattccttcatatacttcggccatggctaatatagcatcatctgggcctaagcacttaaccaggacgtcgttggctgttcggcggtaaagctcatcactcatcaaaacatatttgaaagctgtacgccgaatgttcttatctgtcctaacattgggacttcgtaaataattagttatgggcgtcctccaatctcttgcatcggcttcattatcagccgaatcgattaggagaactttcctggtaaccccggacggtccaacgtcttcacgcggacggtccgcgacctggggatttggccttgcactggttatcagattttcagtattgtgaaatttccctcgctttacccgataacctgatgcatcttgtgtcaaattgttagctctatgattcccaaccctggag

SEQ ID NO: 85021 - DNA, 941 bp, Zea Mays
gttccaaacaattatattttattgtgttggccgaagcatgcgtcatcaggacctcagcaaggacatcagccatgtttcattgacgtgtggggtccaggcatcagacttctcttcttcgggttcatggccgtagcatatcgtagcaatccatggggagtttgtttaggaaaatcagttgcaaccgtccgctacgtccggctcctcactgcataaatagaggagattttcccctcagatctcaaccccgtcaccttcgtcgcaaagaacgtagagagagagagagaaagattgagatcacgttgtggcactgggagcaaggctgcgggcgtcgacaggaatctttgagggaccagggagaatcactgttgggcatccgtgtggtcgtagtcttgcctagtgagtaagaccagccagagccacgggagtccacactgtcgttcaagctacgtcgcggaactactaactgtctggcgtggtcagcatctacaccgtgatcacgagtaagaaatcgccccgttaatttgccacgggattagggttgtttagcgcctagccgctcagttgtttaggctccagaatgcgcgaccgagttgcgtagcaatggcgccgccgtgggtgcagccttgccggctccgccggtgagttgagcgggggatcacgtacacaatcgttgatctagggtccaacggccagggttaaaaataatatatacggttcagctagggtactatgaaccattgatcatgcggtggatgttgtagattagatcgagactctttaaaatcggagccgtagcttttgaatctggtggccaccgttgcataccggttcacttaaaatcgcgatttaatccgggtcgtccggatcagatcgggcggctaggaatagcccgtgcccattcggtcagaaccttttacataagaaaccctggattcttgcgg

SEQ ID NO: 85022 - DNA, 380 bp, Zea Mays
tgattatgtatactgatgaaaggtgttgttgggttgcattctttttttatagggggtactactgcgccactttcaagtgttacgagcctaggatgtctccaatggtaacctcaactctgacctatgtgtaggcaataccctttatcaggataaactacatctcgggggagttgtggatcccgtccctaccacccgttgaagaataagctattgcaagaagcatttagagtcatatatgctactaggagcacccctaaagtcaaaacaagaaagttgttatgttagacatgaattctgcagtactaattaaattatccacatttgttggccatgatttttaatttgtattacaccgtccacattatttatcaagggttttg

SEQ ID NO: 85023 - DNA, 473 bp, Zea Mays
gatggatataagccgaaagctgtcgtaaatagcttatttttgacggtataagccttatttccgacgtacgtaatgtgatttgtcttcttttgttgttgaagatccggaggccagtttttcgataaaaaagagaccataaagaagaagaactaagttgttaacgaaaaagaacaaaggaaacaatgcctgcaactaaccatatgcaagcatgatgagattcgagaggcaacacgcagtcacgcacgcacagactgaggctttggatttttggcagcggtcgcacacaaggggatcacggcaaggggcacatagcacatttggcaagcaagcaatcgcatggattccatttggagcgacgtatcagaaacatgacatggagatgcttgtagcggcgagcagaccacacgatcaacgatgccgatgcaagactctactaccacgccgtctttcccctctctctctggttcctttcc

SEQ ID NO: 85024 - DNA, 470 bp, Zea Mays
tccacagtggggtcccagggtcccaggatagagcatacccgagccttaatcaggactcaggcgggggtccggtgccgacacgtgtcgtaacctgatctagtgggatccggaccttatcacatagactcctgctcctcgcccaggcggagacccgatgctgccacatggcctactgcgcgcggcgtaagcagacgggcagagcctgacataaagcctctgggctacacgcgtcttggcatttattacggataagacgtgcgtctatccattccagtgacaggcggcgcgcccagtccacgttgcgtgggtcgtgctgttactcacacgttaccatagcaaggacaatgactcaccattactcccgcgttaccaggaaaagggtcactgcctatcaatactgcatggactgcagtcatcatgactcccgctgattactcatgcgttactaaggcggagggaatctgaacggc

SEQ ID NO: 85025 - DNA, 602 bp, Zea Mays
tccgaatcttctggccttattcatatcatctgtaaagagggggaaatggtcactagagctgctttatactctgagccatacaatcggaaatgtgcctgttttttcacaaaagctgttcaattgctcagatcaatgtctgtccagctgattagtgtttattttgctgtttggcattaattcttactgcctattttggcaccaactgctgatggtctcaattgattgatgtgggttgcatgtaattgtgccaagttgttttgttgacaatttgtcatagcattctgtttgtgaaagtgaaacaatgatttattacatgcaaaatttccattctcttatgctgtgctatggagatgttgtgttgcatattcattgtctggaggcatcatgcatatttgcattttctgactggaggtcaaatttcacacatccagtcagcagccaaaatttacacaaaaaccttgtgcaatatgaaaatatctagtaggttttgctgctgattgtttgctggattgtgggcacgcagtgaacacgcacagtattgtttttcacatcctgagctacggaaatgattttttggtgtcatccagctaattgatttgatt

SEQ ID NO: 85026 - DNA, 271 bp, Zea Mays
ataaaattccccacaagttttatattcaaatgataattaaattccaacccctaattagcccaaaacagtccacaagataaaccctgcaatctgtttttggacagcagcatatccggattcaaacaacgatatcccctaaaatataactccgaatcgagcgcgtaagtactcgttggaaaggtatgacaaagctctacatgattatcatactgattatcactaattacccacgaaaaattcccagaaactgctaatactactgctgttcgcc

SEQ ID NO: 85027 - DNA, 553 bp, Zea Mays
cacaatatgcacaatttttgcacccatcacagaggcactatgccgccccaccagtagcatattataatcatgtcatgccacctcatacacatagggccgaatattctttggtcacctgagagctcgagagatataagcgaggaggggtagcactaataggacacctaacacgcattttgggcatccctaggaggaaagccgacacaataatgttcgacgacttgaggttttcacctataaacttaatagatggtcgctagatgtggtggaaaaatcagggacgaagtagccaagttgttcaaaggcaaactcgacgttaatgtgtcaggcacatggcagtcatattggaagccttataatcacctatttgacactatgccatatccgtagggaactaggatatcgaatttctctaagttttccggtgaaggcgggaaaagcacgcatgagcatataagccagttcttagcacgcctaggagaattggatgatagggaagcctactgcatttgtttaatctcactatccctaactggtaccacattcgcattgt

SEQ ID NO: 85028 - DNA, 573 bp, Zea Mays
cttatccttagccatgaggtggcgagtccttcatcatcggagtcggaggatgagcaatccaagtccaattccttgcggatgtgcgcctcgttcttcttcttgtagaacttattcttttctttcttccccttcttatcttggtcctagtcattttcattatcaggatagtgtgcaataaaatgaccagacttactgcacttgaagcatgtacgctatcccctagatttgttcttgttgaggtagtccttgcgtcccttcaagacagtcttgaagcacttgatcaccaatgccatctctgcttcatttaagtcgtccgcctgaattagtgccaccttgtcagaaagcacctccttattacccattgctttgagagcaacaggttgtggcttgtagtgaggaagagacctgttggcaatgtcatcgacatacttagcctccttggccatcattcgcccgttcacaaatttgctaagaaattctttgggcaacatatttgtgtacctagggttctcacgaataaggttcacaaggttaggagaaatagtggtaaatgacgttagcattagtcgcacg

SEQ ID NO: 85029 - DNA, 776 bp, Zea Mays
gtgcccagctgcacccttaggcggcttttgctcggatgtgtcttatggaaaagacttcgcaccctgtgggtgatgtcgcgcacttattgtgcatgccaggctgcacccttaggcggcttttgctcagacgtgtcttatggaaaagactttgcaccctgtggatgatgtcgtacacttattgtgcatgcctggctgcacccttaggcggcttttgctcggacgtgtcttatggaaaagactttgcaccctgtgggtgaagttgcacacttattatgcatgcctggctgcacccttaggcggcttttgctcgaacgtgtcgcacatgagggcagtctaggctgcctcttgcggtgactgttttgtgcatcgaatgtcgaagaccattgccacaatcttttttgacacccacgactatggtactagcttgattgattatgggggcttttggtattatattacatggctccgtctcattaaaaccctcacccccgggaggaaaagagtgcgggcctgagcgatattgtttgaagaattacaaaggcacttgggccttggatcttaaataaaaaatttgcgtaggttgtctatattccatgaatgctctaagtcttcgccagacgatgtggctagcctgtaagcgtttggcgatgcttttgtcttgactatgtatggcccttcccactttggctctagcttgccccgggactctgttatgatggtccttgtgagtactaagtccccttcattgaattatcttgggacgacattgttgtcat

SEQ ID NO: 85030 - DNA, 649 bp, Zea Mays
taatgaagctcatgaatgttgcaaaaacaatcagcatccagctttatgccttgacttctcaccgtccagataaaatccccactctgaatagaacttcgggggtaagttgatgaagatatatttcaaatcttttaagaactttcactaacattttatgaagaggaaaaatgtagcctagacttcaaaagcttcgataaacaactacttcatccttcttaggaagtgggatagtagcgtctccaccaaacctcataattgaaacgtcatgaaaatacttaccttttatagcttcaatatgacctttcttcacggccgacttccgaaagacgacatgacttggtttccaaggacgttcttcggcatcatcaacatccccttcaaaatcaaaatcttcgctgtcttcagagtcatctgatagcccgaccaatatttcatcagtaatctttgtagtattagccttctccatagcctcttgaaatttagcaatcacaacccctttgctcttgttatcaccacccattgtgcagaagcacaggcaatcgaagttgtgtacagagaaatatgaaattcagtcttcggaattattgcaaaacacgagagctattttagtaaaaacaagcgaacaatgtaaataaaatgtgcagactat

SEQ ID NO: 85031 - DNA, 708 bp, Zea Mays
gaaattttgacttgctatagatttaaagccactccatccccttcaattcatatgcatggtttgagatgaaaatgcttaattgtttgtctgatggtgtgtgctgcatgcatgctaacgtcgatgactcacggcagtacgtacgtacctgtggaaattggggcacacagaagaagaagaagaaataaaaaaggaaggacgcggacaagttctggtcgcagagtccaaggatgaactggccggccgccgggcggctccatacatgtctggtcccaagcagcagcagcatccaaagtctcatctaaaagctaaaggggacagggagctccatcaatagagctggaattcgatggctgttttggagcactgtctctagctggctttaattgggagaggactttggcatatgatgtgatggcgacaagtgattagaaaagctagcgtagcataaaaagcaagcaaagacatgttcacatgcatatggccatgcaactaacaagaattctctcacaaagcccccctgatgaacattaccaatgcataaccagcgggaattcatctaccttccttagcacggtttgcaggctctttccctgggccatggctgcatgtatacagcaagaaaaacgcgtctccacgaatccttttttctagtagtagcctcggtcgtcgttgcattgctaccgatactagcatgcatgccatgacatg

SEQ ID NO: 85032 - DNA, 364 bp, Zea Mays
gggatccccagccgacgcctgggattggatctaggaaatgatggcatggttgccgttgattctctagccagcggataggattagaataggttcagatttgatatgatccgtccgatcgaattgggcgcgcgggattaaatctatgcatactggttcacctaaaagagttgatctaatcggggccatagatggatgatcgggcggataggattcctcgataccctttcggcctgcgcattttgcagaagagaccctatgcttttagctattcaacccgccgtcctatgcggctgttcaccgagtcttaggaattttacaccgtgacccccgtgcttctctatttttgacgcccagtctagaaaat

SEQ ID NO: 85033 - DNA, 579 bp, Zea Mays
attgttttaattttttgtgggggatttttgcgtgtatattacatggctccgcctcattaaaaacctcaccccccgggaggaaaagagtgtgggccggaataaaactgtttggtgaattacaagggcgtgttagccctgaggattcaaacaaaaaatttacggagattgtcaatattccatgaatgctctaagtcttcgtcggatggcgttgttagcctgtacgcgctgggggacgccttcgtcttgacgatgaagggaccctcccactttggctccagcttgcctcgtgactctgtccgagttgtccggacgagtacgaggtctccttcgttgaattctctcgggacgactgtgtggtcgcgccagacttttgtttgagcttggtatttgttgagggcttgcagggcgaagacacggtctccgtcgatgaggtccttcgaagttggttcgtctacgtcggggacggctgaagtgcttgtccgtggtgacccatgttttatttcgtgcggggtcatggcctccgatccatatagcaggcggaaggagtgaacccagttgcccggcactcggtcgtgttca

SEQ ID NO: 85034 - DNA, 817 bp, Zea Mays
ggacaaggcatcatcttcggccctggaatatgtcccaagctgctcgtcgctagtagcttcaatgcatttcaaccaatcgtcatttggttcgtcgaacttccctctgaatctaaaggtatatttcaatcgaattaatccaccttcgcaggattcagcagtggtctccttcggcatctcccagctatccacaagtggccacactctgtaggctttgtgctcttgaattatgtcccttgtggcaatgaaagcacaaacatttctaaaacccttctgacatgcttcaacgtcactttcaatagccaccttcggccttcggaggccgaagcaagaccagatggggtgctggataacttccttaatatcctctctttcaatcagattatttttaacataaaactattactccatctaggccccgggccatctttgccggtatgttggcaccgggtagcttgcattagagcgagcaatgaatccgtaacaaccgaagttgttgtgatactgttctttgtcggtggccttcgtctcgtacaaaagttcatgcatactcacgctcggttctagcccttggcttcttacagcccaaacaaacaagcccattctaattatagcttcgggggtaagctgatggagaaagatctagaatatcttcagcacttcaaccacaaatttgctcaacatgaaccgaaggcctgccttcaaaaagcttcggtaacaacaacttcattttcctcaagagtaggggcggtgctgtctcctccaacccttagaataaacatgtcccgaaagtatcttcctctcatggtgtcaatatgac

SEQ ID NO: 85035 - DNA, 429 bp, Zea Mays
atggttgtatgggcccacaaatgtcaccttgaattcgttcaaggaacttgagtggttcaacatgaatcttaagaggagatggccttaagattagtttttccgttgcacatgatgtacatataaaatcatatggattagggaatttagcagactttaaatcatgaccaatgcaattacctatgattttctgcatcatccctattccagggtgaccaagacgtgcatggcaggtcttgaatgaatcgacattctgaaaaatcactttgtacgtaacatgaggtactggttttatgtatgtgtagtacaatccagatggaagtgaaggtattctttccagaatgttagcgccgtattcagaaggtttggaaatgaggagaaattcctcattattttctgtatgagtagaaatatgtaaaccacttttccgaa

SEQ ID NO: 85036 - DNA, 394 bp, Zea Mays
caaggactatgatttggaggtgcattaccaccctggtaaggccaatgttgtggcagatgccttgagcagaaaggcccagtgtaattgtatgagcatggatgtgggagtgaccaccctgtgtgatgagttgtgcaagctgaacctggaagttgtttcttcgggtaacctaagctatatctcggtggaacccacgttgcaggagcagatcataagggctcaggttgaggataagggtgttcaggttatcaaggatatgatcaagcaaaaggcagagaactacaagtgtttcagacaagacagcaagggaatcctgtggtttggagatcgattggttgttcccaaggaccctgagctcagaaagaggatactggacgaagctcacctttccaaattc

SEQ ID NO: 85037 - DNA, 458 bp, Zea Mays
ataggactggccgtagaccacagccctgaccttaaaagttgccttaacaagaaaacacctcttacccccaagaaacactcttccccttttcccgatattaatagacctttattttcgtctaccagatggaaaacccctggttgattaggatctcctattgctcagaggaggaaggcttccctcaccttcttcggagttgcgcgctacgcttggggatccgcaagaagcccgaatatgtctggaaggagtaccgtgaaaatggaatagaaaagtgctctatggcggtctacttaggagagagccagaactacccaaaccaccctcccttccaaattaccttcatcgggcacagtttcccagacacttgccagagcgttgctcgaaaagccctcaaacaactgtgccaaaactatagccgagagatctctgagacccccctccgatatttcccacccagc

SEQ ID NO: 85038 - DNA, 624 bp, Zea Mays
gtgcgatcccctttcccccgcggctgcagccacaagggtgaatctgcctcgccctctccctatcatggttgggcgcaagtattccaggcgccaggcccgtgatgtgcaccgcgacgcggagcgcacagaatgcgcgaggggcatgcagggagaagatcgcgccaccggtagataagatcattagtagagatagatttctactagtgttcctatattaaaggagctatttggttagttgctagattaaaggagcctatcactccagttagttgggtcggtcggcatgtatatatacggggagacgatcaatcaataaaggcaaccgagatattactcctctagtgtcctatctctctctcaatcaagcatgcggctaagggactaaccttgccagagaagacggatcaaggctaagaactacgtagccaaggtccagctacccgagggcttaatgcccttgacaacctggtatcatgaccccgacgatcctcgccttcccaaccaacctcaccacaagccgccgccaccccacctccatctgcgccgccaacatcttcatcgacatctgtcgcatcgtgtgccaccaacatggatgacgtcagtgacctcaaggacaccgccaag

SEQ ID NO: 85039 - DNA, 680 bp, Zea Mays
cgagcatgtctattagcccttgcacatagtacgacagccctagcacggatctcggtggctcatcatgaagtacggagccaaccgccactgggccgaacggtctgagctgaggaccatacggtccggccgtgtgcagattcgcaggtttgtcccagatcgattgagagggttgtggttgtgtcgtgaatgtattcatcggcataccgtataacttttgggtttgtatagacccattttaaccaatgcttttgatgaggttgactctgcaacctcatgtgatggaaaattaggcacgacagattttttctattgtacgcgttagtttcttaagcgtgtcttcgatcccgccaatgcgttgttgcaacctattgccttgcagatgtacgtaatgttcaaggtactggaggttgtttgatttacttacattggggtttgatggaggtaggatggatgacatctcgatctctccttgcttgataatcttatggtgccgatccatcttaatgtgcttcaggtactcctccgcatccttgatttcttgtgcctcttgtcgcatcgtctcttctctctgtcgcctcatgtattcctcaatgttgctgggagaaacgttagtgcgatcctttgaaccagccatttatggccgatctttgctaggtcacaccaaaattttcccccaacag

SEQ ID NO: 85040 - DNA, 541 bp, Zea Mays
cagacctctttcttgagctttttgaataatacaggccaggccatctgcaacaaggttaaacaaaaggggcgaaaaaggatcaccctgtctaacacctttatgagtagaaaaatagggaccaatcaaatcattagttttgatggccactttaccacctctgatagtcttcataacccaatcacaccaaatatcaccgaaaccctttttccaacatacaatgaagaaattgccaattaactttatcataagctttttcaaagtcaattttaagaatcaccccactttgctttttttcctcacttcatgaagaatttcattcagagaaaccacaccatccataatgtacctccctttaataaagccatactgatactcactaatcactttagtgatgcaggaagcaagtctattagtcaggactttagtaatgatcttatagcagacattcaggagacagataggtctaaaatttctcatatcaatagggttatctactttaggtaatagtgtcactaaaccaaagttaagccttttaatgtca

SEQ ID NO: 85041 - DNA, 710 bp, Zea Mays
cacaatacaagcaaataaaatatagagctaaacaaaattgtttacgaaggttgcgtataatgtgactttaggggcttgaacaacccaccacaatccacgcgagtataagctctagcgtatctggcgtcaagcgtgagcggccatcagggccacgacaacacaacaagccttcgtaataagcgcaacaggcacaattatggctcggtaatcggggtacacgataagtccacgcaacgtgcgcaacaggcgcaattgtggctcaatgatcacggcagacagacagtgccgacagggcatgcgaaaaatacgcgactcagcgatggcggtctgactcaacgggagcgatccgattaatggagagcgcgacatagcaatcacatgacgcagccaagttcgaacgacacgaatactgcatcgtgttgccagggcgcagccaatgcatagctgataccataactcagacgattaataacgcagcttgatcgacgtgtctgagtacccactatacaatttaatcgctcatcgtgagtttaaaaactcaacacaatataaatatttagagcgatttaagaatgcacaatatatccttcgtatctttctgctaattatttactacagaaataaaagcagaaaaataataccacatttaatccataaacataacacatctagtgtaaaaaatgttcccatatttaagcacacattttttc

SEQ ID NO: 85042 - DNA, 457 bp, Zea Mays
cactagcagaccccactcgatatcgtcatattgtgggtagtcttgtttatctgttgctcatgatgttcatatgatgggacaccaggcctgatattgctcatgctgttcatatgttgagccaatttgtatccacaccaacttcagttcattatggtcatttgcttcgtgtgcttcgatatttacgtgggacacgatccagatgtttactctatgcttttggtagcccacttcggctacatgcgtattctgatgccacttgggcaagtgatcctgttgatcgttgttctactacaggttactgtattcttcttggatcctctcctattgcttggaaatccaagaagcacgcggccatatctcgttctagtgctgaagccgaacttcgtgctcttgctactaccactgctgaaattatttggctccgctggctattggctgatcttggtgtatgttgtga

SEQ ID NO: 85043 - DNA, 471 bp, Zea Mays
ctctcttcatgctcaggcggcaaccctcactagcatccgggaaaccgtcaccgacgttctcgcgcccgactccactcagtaccctcggtggtgcgaccaggtcctgtagaccctccgtcgctacgccctcgccgaccacgtcctctccatggtcactgacccgttggaggtttggctactgatggatgaggtggtgctttcctggatccatggcaccctcacgactgaacttcaggacatcgtttgagtagcggacgataccactcaccggatctggggtgcacttgaggctcagttcctcggcaaccgccacacttggatcctgtaccttgagaccacttttcgccagcttgatcagggcgatctctctatggatgagtactgctgccagatgaagacgatggtggacactctccgcaccctcggggcccccatcaccgatgagagcctcgtgctcaacctcctccgcgg

SEQ ID NO: 85044 - DNA, 580 bp, Zea Mays
ttttgtcattggcaacttgattagcacatgatctccaagttcttatgtggtgccctaagtctttacccttgtgaacacagcttctagtgctaaagtggctctagccaaggtaacacctggggtgttacaccttcgccgcgtcgtctagggaggtggtagccttcgaagttgctttcttgggaaccatcttgggaatggtttgtcggagcacgaacgatgggcgccaaatgttagaactcactgccatgtgaccaagtgagtccaagcaataggaaacgagaacgctttgatgttcagcaacacgaatgattagagaaacggtgttgttcagcctgtcccgtcaagagacagtgcaagggtatttataggtaaccaggaggacggtctcacccttataagtacaattatgcctctggttacctacgttcttcctggaatattcccccatcaggggctattataggtcattacagcatggttaagtacaacccggactaacacaccatcaatcataccccagactagggcttacacgtgggcccaaacaagccaacatgccgctgcatgggcccacttcatt

SEQ ID NO: 85045 - DNA, 286 bp, Zea Mays
aacaaactttattaatggagattaccctgttcttaacaagaatcaagagaatgggagggtgaaaggtggttggttcagtaaaacactaaagatcaaaacactgtaaatatctgaagaacgctgataaagatctaaggcactgtagaactggatgttttcgagtgatctggtgaagggaatcgatcgcggggagataacttcaaacgtggcaccatcccgcgaacctagccgtgcgtggccgaagatattgcaccggcggtcgccgtggctcggtcacttctgccgc

SEQ ID NO: 85046 - DNA, 672 bp, Zea Mays
gctataatccgaacaaacctttaaagatagttttgcagagatttgcctgcctctagtgtacattggaacaatgcttgtgtcgtcactcgtttctcttgaaagccttgaaagcttgtgatcagctggctctcatgtattgatctaccctagacaaagcgatgaatactcggtctgagatatgcctcttgcgacaatgatggattacatggctagtactaccatatttccgcgaagaatggattagttgattcgtagttcatgaaaaactgctttgggtcaaactgcccatcataagaaggaagtcgggggtggcttgtatgcaacatgttaggggactacttgtagatcccttgaaagtggagatgcgctatcataattgtagatccttggacgaaggtgcttgtgttgagacatccactttgctcttgtctttgttatagatcttcttcccttctcgtatgataaagcactttagagtattcatctgcctgtctccgaagctgagcagccaaaaacagcttctgcttttgtatctccatctgcctttgtatcgcttctagtccctcaatctttgcatcaacatcatcctactgaaccaagagcctcatatcttttctcttctcctgtcttaagttgctagatttgatctggttgatgtcatcattgtaatct

SEQ ID NO: 85047 - DNA, 950 bp, Zea Mays
ggtgtttttttgccaatagctcaaaaacggtacgtacgaaggtttcatgcatcacaaagaaatacattacattaacatacatacaaaaacttgatgtttagttctttcaaaagacgaaagctatatacaagcattaagttctcaaatatacaaagttttagtcttctttcagcactttctcagcggcttcatttagcagtttgtcgatagcttcgtcaacagcttcattagcgatttttatcatatctaacgcttccttcatggccaggtcagcttcggggttatatggctccggtggaggtgaaagttcagctacattataaaaaatgtttgttaattccgaagctaaaaacgaattctgaagctaaacctcaataaaggtacctataagccctgcacgctcggtagcttattcaactcatttagcttcttcttgagcgtcatgagatttttttcattttttctaatcgcttcatcagctatctcacgggctgcccttcatccacacctcggagtaaaatctcccgcctagcgtagaagcttgagccaaagggtctttgatgtcttccgccgagaaaacaaatcctggctaaactacagcgttagcatattcgcagccaactttctctaagatcgacatggccccccgtgcgccagcgaatgcgcaaaagtctcctcggtcacttaaaatttcatcaaaggatttgacttctccggtgatccactagacgactccatcagggtcgccacaaatgaatttttgcacagaagaatatgccccaactctagcgaagccgtccttcaatttcttggcgcattccaaggatatttcataacaattctcttttgaagcctgaagctcatcatagttcttttgagctctagacctttcgatctcgcaaatttcatgtttcactgcttcgacttcaaatttttcagcagcttcagca

SEQ ID NO: 85048 - DNA, 943 bp, Zea Mays
tccctatcttctctaccaacgctggcggcgcggcggcgaactgcgcacggagtaacgccgacaagcgactacaaggtgacctcgtccaagaaatcgagaacgggatgtggatgcacggagcgggtaccggcgaggtctgaccccgacgctccaagcttggcttctatcttgagtgggcacaaaacaaagccaaggatacaacgaaccaactcaaggtgactcaccagcggtcgatgcaatttagcagacttctcgtcgccgtgcggcttggcggcaacaatgaactccggcaaaccattccccctgccagtgcgtgagctcccatagcccccagcattcacccgtgaccaagaattccaggcggattcatagggagatgagcatggcgcgcagcagattccaaggctccctgcacccgcatctctttctctgtattagccatggcgcagctctagctctccgttctaggggatgaggaggagcacgcaacgatcctggttttatataggagcggacgcagcatcgggcgatgaatccgggtgattagcggtgattgcggccaggcttgttacggagaatttcgtctcctggtcacgcgacgcggaagagacgggtccgactccagggccccacgcgccagcggaaaggctcgcgtgcaagtgacgtgaaggagtattcaggggattagcatgatgatgcaatgcttgcatcatgctgatgtaagcgcggcaagaggaataaaataacaagagaaatgaagaggacgtcggatgggctacggctaggtggtcaagccgaatgggtcggtttcttttcctttttttactattttctattttccaaattcctcttttttttagttttcgaatttcctatttcaatcagattgaaattcaaatttcaaattatattcaaatagagttcaaacttcaagccaatctag

SEQ ID NO: 85049 - DNA, 568 bp, Zea Mays
tgtgatggtggtggtggtaaaggttggatttcttggtgttgctggtacattttatggttttgttggtggggatggtgatgttcattgtggaattggtgctggtgatattgttagggatggtaggtgtgggcgacaactctttggttgtccgtcggtttatttctagccatcctatctttggtggccttggtttcagggcaatccctggtgggatgtgtcgagtcttcgccatggaaaagacaatagaacattcactgttgcgagactcggcctctgcctctacctctggtgttttcgcctcttcctattgcgcgtggtactcgtggtgatgatcgatgtctccagtctgctgctgattagcgatggtttgcacttgggactggttacggtttggtcggcctgagtccaactgtgcaggcctgacccatgtcctactggactgcggagtgtccttaggtttgcgatgtggttcgacttttctctggtggagctctttgaactgggcatacttttcgaataactaatataaatcttgcaagtttttgggtgggtatcttatgcagtgact

SEQ ID NO: 85050 - DNA, 574 bp, Zea Mays
ccccaacagccgccacagtgccgcagactgccgagagattatcaaactcgcaaggcgtgtcagcaagcggcgcgagcagtcctccaaggacggctcaccgcctcgtcgctggcttcacaaggaagaggtcgacgaaagggctgcgactgtggggggacaggacctcggctaccagtcgcccgagagaaaccttaaggacattttcgccgaagaaaccgactccggcaacgacgacgaccgccacaagaagttgtatgtcatgtacggcggaagctgggagctcgtctcccgcaggagtgtaaagaccctgcgatgggaggtcctgtcggcagtcccaggagtccccaaagctgctccgcaccaacgatggaggagcaccaccatctctttttgggcactcgactaccccgacaacatggcgggggccagcgtactaccactcatcaccgcccccattgtcaccaatatgcgactgcatcacgtgttgatcgatggaggggctggcctcaacgtcatcagccatgcggcgttcaggcagctgcaaatcccggggtcccggctggggccctcccgc

SEQ ID NO: 85051 - DNA, 639 bp, Zea Mays
attttaggaaactagcaaaattggtctcatgattttaccaattttctattgttttctacaaatctcccaagtcgacagtaaaaagaaaaggataaaacatgaatagtaacgggccgtattcagcccgagtcggcccaaacccacgctaaaaccgagcgcgcccacgcccgcgttgctctttttgcgtcgggatccctagggtttcaaacaatcacgatgcgcctcctggtactattctaatgtgtcactgacatcttcgcctagacccttcccttctatctctcttacgacgttatgccccctcacttgactccggtcgaacacctggcttcggtcgcgattctcgtcgccggcgacccccatcactggaagtaagcatactggcatcaccccagagactccctaaatatgccaccgatactaatttaacggtctcgccctcagaccttgtctgcccgcaacgatggcggggtcagaactccagcaagtccgttctgagcaaccgaacatggtagcatttaaattgagggtaggacgagtatcactaactcaccagaggtgtggtacgcatgtgaatttggacgaagcgggcgtgggagagtgggtcagtgcgcaaggtgtccacgacggtgttcccgg

SEQ ID NO: 85052 - DNA, 499 bp, Zea Mays
gagcctgcgcgccgttgaagtcgtgcgtgcgctgaatcgggcgaggttgaagtcgtgtgcgtaaatggcggagctggcggagcggttgaggccgtggtcgtgggggaggaggtcgaggtcgtgggcatcctgcagagcgccgtcgctagagtggaggcggcaggcgccgtagcctagggtgtagaaggcaggcgcggtataggatgggctgaagaatgggccgcaccatcgttgggccgcatacaccgctcgaacacaggcactgctatggtattatttgattagtgccataccggccacccagagcattgaaacgtgacttataagcgttggtgtgtgttggttgttgctcagacacgttggtgtgtgttgtttgttgctcggactaatgtctctggttgcaagaacaagaatttttttggcgcggttctgagcagaacgggttcagaggcagaacggcagaacggcagaacttgtcagaggcagactactattgctt

SEQ ID NO: 85053 - DNA, 962 bp, Zea Mays
gcgagggacgggattgatggtggtggcgcgagtgaaggagagcggcagcggagacccgagaggtagggagagaggggaggctggggttgtaattctgggacgggattgacgatggtggcgcgagtgaaggagagcggcagcggagacccgagaggtagaaagagaggggaggctggagttgtaattctgggacgggattgacaataatggtggcgcgagtgaaggagagcggcagcggagacccgagaggtagaaagagaggggaggctggagttgtaattctgggacgggattgacaatggtggcgcgagtgaaggagagcggcagcggagacccgagaggtagggagagaggggaggctggggttgtaattctgttgtaattttgtacacgtgacgtgcgtacggcgtcatcaggcaggcaggtagccggtttcgacgtggacgtacgtccacatcaattcttgtgtggcaccgttggcgccctgtacgtacgtaccttcctctagctagcgatgttcaacgtgcatccttgtcgtatggcatcatgataaaccgttaatgcgtatggtgcaccggccggcctttacgtcgtaccttgtcatgcattgtcccgcacctagctagctattagctagtcgctgaattcatggagagtaggcatgtgctgctagctgcttgtcctcctactgcaccactcgtcattacatgctgccgctgtgtccgatcgatccatccgtccgtgtagccgtcgtatacatgtactccctcccctcctcgattatctgtcaacgcattcgtgtacgcatcatgcatgaacccgtactagctagatcgagtacgtacgcatcatatcgtacaaagcaacaacacgcgcgcgcgctggccgccgaaagaagcggagggaacgatcgacgtcttccgccggacacatgtgctgcatgcatccacatcagccggccg

SEQ ID NO: 85054 - DNA, 639 bp, Zea Mays
actactggagctgctctaacagatatgacccaagtaggtggtatgatttagtttcacaaaaattccaaccatttttagtatcccatctagtaatttatatgctttgcaaacacaaatcaagcatgttcatcccaggaaacagaaaaatgaaccatgtaaacctcaaatcatgtaataagaagggatatcttgtttcaggcctcaagttgtaccaccaatttgcaccagtaattttagttggcatctatgtatcatgtggtatgtcagtcctttactttggcattgtaatattataggcttatgactggtaaaacagcagccccagctgctctgatgaatctagtgcccaagggaatatgataccatgcaacacagtctggcataccaagatgctggatgaagatcatgcagtctggcatccaaattcaaagccaagttatcagctaataatctgatcttgtccttcaaagccaacaaatttgatccatagctctaaaaacatatcagcgcgtcgtcgcaaagtcaaagctaagcgacatcgctcctccgcggccagcaccctccatagtaagaccaactccatccacccacttgtcccaagatcaatcatgatggatttcacttattgtgggcaaagaa

SEQ ID NO: 85055 - DNA, 352 bp, Zea Mays
cccttccctgtcaacaccctcgatctcaatggtaaagaagtcttggtctggctagaggtgaccgataaaggcaagggaaagggtgtcctcatcggcgaacctcgggttcccgatgaaaacaagaaaactctctctaggaaggtatttgccgaaagaacaccagacaagggagagacactgaagatcaccattaagtcctccaagcctagggggcaggcacagacaagcggcatggccaaggctcctattctgcgcatcgcagacagtccagcctagaggcacagatggtctagatcactggctaacggtccggccaccacagacagacagtccgacatcgactagagccagc

SEQ ID NO: 85056 - DNA, 572 bp, Zea Mays
gtccgagtgccgggcgtaggcggcgaagggcggtggcgaagcatagagtgagtgaagtggatggtggtcggcttcgtgtgggcagggccggtaagcaggaattgttgtcctcgccggtaagcagtggcgaagcgtagagtgtaggtgagggggagttgcgaagtctttttgagggtgaagagctgaggataatgctatttaactattgggagatgggaatcattccgaaggttgaaccaatgtaaggtgtgatgccctcgctgtaccagtgtaactatagtttgtatgatgaggctgtgcgccttcgcgcatccggctatgtccataggggcgttgtgcacttggtctagcacgtttattatgtcggtccggctgcgcctgtagtcggtctttgcgcgaacagtttctcgatgtagacttttgcacggatgtaatgtgccttcgattttgcgcagtcgttgtgctagtccggctgcacccttaggcgacttttgcacggatagtcttttgaagaagacttcgattttgcgcacttgttgtgctactccggctgcaaccttaggcgacttttg

SEQ ID NO: 85057 - DNA, 310 bp, Zea Mays
gttgtagtaagattgtagctggatcattaggctacaactttgctatagaacgatggccttgttgccatgtaaaatcaggacaaaatccacccaaacataatctgtcaggctgactgaataggattcacaatggtacagtgccctgaacaagatcgctggtgcagcgcaccttaccgtcggcgaccatgcgcctagatccacgccgccattgcgattcgtgctcatcagtgaccggataacgctcctaggtaaaagatcttcgcttgggaataaccccgatggctggccgccgcacccccttgccttgcgg

SEQ ID NO: 85058 - DNA, 317 bp, Zea Mays
aacaagatgtatcgcgatctcaaatccttatactggtggaccagaatgaagagggaaattgccaagtacatatccgagtgtgacacctgccagagaatcaaggccagtcatttgaagacagcaggccctttgcaaccccttcccataccatcttggaaatgggaggacatttgcatagactttatcgtgggattgcccaatacctcccggcaccatgattccatttgggtcattgtggacagattgaccaagtcagctcatttcttgccggtacacaccacttacaggacggagaggtatgcagaaatctacatcga

SEQ ID NO: 85059 - DNA, 622 bp, Zea Mays
aaaaagagaagccctcacagggagacactcccgcgggggctgagggctactatcgggggaatgacccttagtcctcgagacccaccggtcagagagtgcgctgatgaaaggagcccctaattgtttgggcccgttagtcagttggggaaaacagatacggaccctgaaaggacgcaccccggtcaaaccccgcgacattaagcccagggtcgggcgtggcaaaacctgacaagggaggccgatcgtgtcggaagggaaccactcgagtggatcccgctcatggccctagactaactcgccataagtaactgaccgcacttaacccgagccacagtgcgacgccagtccgcttcccactcatgatctacgagcacctcgggccgcatagaactcatgacttacgaagcccttggattgcggttgattaatggcccacacacccctcggtctatggcacacatatggcctatcgggctaggccttagtacgcacacctcccacggggggctacacgatgggctgcgccgaaccctagtctacggaggacaggggtcgacatagccataatgatgacgcctgggaccatcgccgcccccacctcatccgccacagtaaatatgag

SEQ ID NO: 85060 - DNA, 290 bp, Zea Mays
gctgtatggccttgtcgtgatagcgcctcagagtttgctgataccgtgctgactgaatcaccgtgttcaatcgttcttcttctagtatatcaatatcctccagtctggtagcctcagcttctgctatgttttcaaatatcaacctcggtgccccaaacttgagatcagctggtaccactgcctccaaactgtagaccatgaagaaaggagtatttccatgcagagctcggctaggttgagttctcaggctccaaacaacataaggcaactctctaattcactttcctgcg

SEQ ID NO: 85061 - DNA, 281 bp, Zea Mays
tctattaatgcgacgtaattatttgttatgagctatgctactgatgggtttgtttggctatataatcatatattcactgcatctcatacagtaattatgttgaaagaatcaaatatccggcgaaatgaagtcaatatgtaggggctggcgctaaacaaaaatactaaatgaataatcgtaaacatgttcagttatatgcataaacagcatcagatttatgcataactgaacaaatataggcaacacattaacactggataaacaaagataggcgcattcag

SEQ ID NO: 85062 - DNA, 895 bp, Zea Mays
ctcgggtggtaaacaataggtcagtaggtattgtcggtgtcattggcaaatggggatgattcttgttttgcgataaaatttgaaaggcaaagaacatgggtaatgtgtcgatcaagttaatcgataggtttcgtaaacatgcttgtgatgcttttatgtgcatgataaaatcgatgcattgtcgtcgtagtcttaggaaattttctgaaatgcgctagtgctctactgatgggttgaatgtacttgagatgtattacaatagctgggtgtcgcgcaggttatccaaagatggcgaaaggtggcgtatgttggtaattgggaaatagtcacgtcattagccaactcgtgttaaacaggagtcgattgcgttaagcgattgctatatacatattgtgtctcggagtgctatgataatgagttagcagacttgttagatggttttgggttaagttcgtggtcacgatgaattgctagttgtagtctaaatgtgtgtggttatggtcgcgggtaaaaattagtagtgctcatgtggtgtctaagttaaaatgcgaactagtgggtgaaaagcgcttcgatatacatatatgccggatttgatgatgtggtgaatgcgtttgttaaatgaatgtggtaattttagtgcactaaatgacttgagtaaaatttgtaagtctacttgttagtcctcatttgattagtctaactctaacaaatggtaaagtgttagaataattcaagtctctaaaacatggctattcttgaattgtataggagctgaaatttactaattgctgctttggactgcacgcagtgatttctccgtgctatgtgtttgatgagctaaattgtgttttctgtagatatgtgctatagaaaagtggtagataactttatt

SEQ ID NO: 85063 - DNA, 347 bp, Zea Mays
ccggacatttacatcataccgccaagtgaagggcaaccggccacattacaatacaagtggtagattacatacacacagcgaagggtcaccagacccaccgcacaaataaacacaattgcgccatcttctaccacatgacaagcgagggcatcacacattctacatcggctcaaccttcgggataatgcctgccgcccgataattaaacaacattattctcaattcctcacccacaaacaaataccataggtccccctcaccaatactcgttccaactgacaaagacagcaagtcgcgttgattaccccaatctacacgaagacgagttcgctccaaccccatccgat

SEQ ID NO: 85064 - DNA, 431 bp, Zea Mays
cgggtctgggggtcacctcaccttgggcctagttccctttcctggtacccaatgggggcctgtttgcaaatgtcggtgatacgtaagcccagacgttaaccgcttatcggggcctgtcttcgatccatgtgtgttggtgggtcgacctttcttgattcaggcgtgtctcttggttctagcttctcgttcgcccatcaaggtcctatgcaccccttcctcattctgttgctgctgccctccgtcgtcgctcctcacctgccgcgaaccccttcctccaccttccgtcctcgggattgattgtaatgcctcgaatttgagagttaaatttttctttctccagcactcaccaaattcgggcgttacccttccttttttcctttttcttctcgctatgccttgccccttttcaaaattctaaaggggggttaacg

SEQ ID NO: 85065 - DNA, 404 bp, Zea Mays
ctcgggtatcagtctcccgagcgagtcctcaaggacatcctcactagagactccgactccggtgatgacaatgaccgctgcaagaagttgtacgtgatgtatggcggaagctgggagctcacctctcgtaggaacgtgaagtccctacgccgcgaggtcctttcggcgatcccaggggtctcgaaggctactccacatcagcggtggcagagcacctctatctccttcggggcatccgactaccccgaaaatatggcaggggccggcatactaccactcatcaccgcccctgtcatcaccaacatgaagctgcatcatgtcctgattgatggtggggctgggctcaacgtcatcagtcacgctgcgttcaagcagctgcagatcccaggatcccaactaggacc

SEQ ID NO: 85066 - DNA, 963 bp, Zea Mays
gtgctttttgatatggtctactgcttgcagcctgatcttttgaaattttttgattatcttcatcctcaaccaaagccatggttcgtactgaccccatttttacttcttctatggttatggcttcatctccgtacagatatttaaaaggagtaaaccctatggatcttgagaccaaagtattatggttctataccactttgatcagttcttctggcctttttccctttggcagattgaaatgtgatctcattattcctagtagaataattccatttgctctttcaactaagccattggactttgggtgcctgactgatgcaaagtatatgtttgtgccaacttgattgcataaggacctaaatgcttcggaatcaaactgagttccgttgttaactgttaatgcctttggtactctaaagcgacaaatgatgttttgctggtagaatttctaaattgttgccaaaattattgtggccaggcttcgatccacttggagaagtattccattgctaccacatcatatcttagatttccttgcgctggtggcaatgggccgaccaaatccataccccgtctttgtaatggccatgttggttgaattaactgagttaatgatgaaggttgattttggtctctaacacttctttgacaattgtcatagtttttgaccaactctactgcatccgaagcagcctttgaccaataaaaaccctaccaaaacacctatccaaaaagtgctcgagatctgatatgcgcaccacataagcctgagtgaatttccttcatcagttctggacctttggctcttgagaggcatttgagatggggtgagcaaacacattccttgaagaggtcccctatatagttctatatggtcttattttggcttgcatcctcttgatataagcttcttcatctgaaggatgattgccctagaggaaatatatgatctctattctccca

SEQ ID NO: 85067 - DNA, 629 bp, Zea Mays
gcctggtgcacccacccagcgacgcgcgcgtccacagcctcagcgacctgtagctttcttgggtgtatgcatgtcgccatgatggcatagcaagctagctactagtagctagcaagcagatgcatgccgctggctatgctgttgctgtgcatgcatgcatgattcatgcgccagttctcgatggggttagccatgcatgcagcagaccgcatcgtttggtttcgttttggtttgtcttgtccgctgcttgctcgaggcttctttgtccgcttgtcacctggcaccttgcatttcatatcctctctccctggtcacctctcgagtgtttcgggccactcaaagttttcagagcaagctcatgatcgacgatgtgatggaccacctcatatcacgcaatgctacagatgcagaagcgcgcgctgcattagcaattagcagcagtaacgtctttcagtttcagcatatgctttagcttctctggagcagtgcagacatgctgacatgctgcatacatgggtggatccaggatcctgcgagagggggtacagtgctgctcatcatgatctccatcctttcgctcgtctttctccttttccatccatggctgtttgtataaattcaagagatgc

SEQ ID NO: 85068 - DNA, 440 bp, Zea Mays
aataccatatcttaccatatcttataactagtgtgcatgccacaggccttgtgatgtcatcaactggatagcggaccttatttcccgttgacgcgatagagcttgggatggtcgtaccctcggtggaagtcagcgtttgagctgctggaattatttgcatctgtggagtggtcatctgttgaatagacatcgcactcgccatcgccaattgctgcatcaattctagaggaggattcgatagcatttcagacatcaggcctttgaactctttcttggcctcctccttaaaataattcgccatctcttccttgtatcgatcacgtttcttgtacagaccttcccattgtggtccgaatccttccttccatccttccttagatgagattcctcgtacacgaccaggatgctcagggttatcgagaccagccgttagaatgtct

SEQ ID NO: 85069 - DNA, 669 bp, Zea Mays
ctgggccacccatttcaaatcgacggccccgaacccttctcctacccagggaccaaaccgcggcggcgctgccccccctacggcggagtcatcgctggcgatgtcccgcacggcaaaccatgactcccaacacacgactaacccacgcaacgtgaaatggagagctaggcggattctaggacatgattctcacccgtgtcggtgttgtggagggtgcttgccgtggcactccttgacgtcggcggcccaaccgaactccgtcgaggaattcagggcacacgatggtctcactcgcgccatggatcacccgagcaccacccttgacccccgacaaacaccattgaccaaacgcttggcgtagatcgatggtttggctgagatacgtcgatggcggcatctcctgcttctctctacgctccctcatctccctctcggttcggcgatggtacacacggtcaatcggttctatgcgatgcaagagagctgagagggggcaagttttatagggtcagaggcgagcccgaggtagtcccgttgcatgcgccagctctgatggaatggggatcttccaccgtctgcgcgctccattctgttacggcccgcacgagggagacggctctgatggaaggggcccaccggcagtgtctggtccagtcgcgaggacagcga

SEQ ID NO: 85070 - DNA, 826 bp, Zea Mays
tgcatactcgccttgttgccggcaccgcgaccggggctgcagccgaggtagtcccaggttcaaatccgtccctgttggcagatgttggaaccaatgtttacaagtcgggcgaccagctggtcgagctagagcagcgaccaggcgcctaatcgcgattagggcgacgattaggtcgattaatcggtcctggtcgacctctggtcgtccgttagtcgtcctatagatttatggacatatgtatatgtatataacttatattaactatataagcactgcatttctgcaataatataggcataattagtagcatactagcagtaattcagtaaaagtgtaaaactgaatccatccaaagtccaaactgaaagtaatataggtactgcagggtgactgctcaaacagaggtaatctgaactcagggtgactgctcaaacagaggtctgcaggtgcaccttcaggtgctagtgctaccagtggtaatagagggaagggagactgggagataatcagagaagggagagcaggtgctaccttcagatgatgagctcatcttcaattcttgactaggtgacagacgtcggagcactggggtactggacgccggtggcagacgctggacggctggagcacttggagcagagacgtcggcagaaaccagagatgacagaggagaggagtagggtttactggtggctgggagggttactggcggctgggagggtttctggcggctgatttactgctggaggggcggactactgtagatgggccaaaaactagagtgaagcacagtaccaaaattgcgacgacaaaaaacaaccaggaa

SEQ ID NO: 85071 - DNA, 388 bp, Zea Mays
cgtcattcctagctaaaacattcatagctcctgttaatatccaaatcccagttagtaggtagcatatgattgtgttgagtaaagtgggtatattgtgcctattaacatcgcaaggcgataaaatgagtttgaataataatgataataaataaacacgaatttggcagtttgatcttcatgagcaataaccagatggtgtagttcaaacaagatgaactaagtttgatcttcatgcagcgcgcttgtagttcgtcttgttgagagctattcccggcatgatctcctaagtgagcattcgatgcatgtaggctaaacgactgaaaggataaacatgcatctaactaaccaaagtgcaagacttagcaactaataacaatcacgacataga

SEQ ID NO: 85072 - DNA, 504 bp, Zea Mays
ttcaaagattagtattatgacggaagtccagtattacatttttatctcaatggtaccttaagcatttggttttgcataaatgcaaatgctataatacaattgagtacaggaatagtttgatttcaagctaatttggacataataacaacgataaggtatgcggtatatgataaattacctcaccaccatttattgggccattgtagcatggttgaagtgtgagagcacgaagtaggtacggtttccagtgtccagcaaggaaatcacttctgaccatctcaatgctgttttggtagtgctgaaattgaacatgatgggacaaagcatgaaggcattttcaacacacttatatatacataagttattctagcataatacaatgataagaaatgtttgaacctcaagcaaatttcgcaaaaatggctcttcgttgaagtaatctctgcgaacaaacactaatggtagcttgcaggccaaagcctcacttgcagttccatatccaat

SEQ ID NO: 85073 - DNA, 503 bp, Zea Mays
gaggatttgacatgaaactggtaaaggccttggaaggaggcagattccaggccgagtatgcaacaggagcgccgatgtttgacaccttgcctctgagtatcatctcgagccggctcaccaagtccacatcaggaattcttctgttggttacccgggttgaatcagccaggccacgatacagatatgcggggtatgctctatctttcagtggctgaatgttcttgaaaatgaagtcggcaaccacagcttccacagtcaaacccctctctttcaacaacccaacctcagcaagcagagcccctgcctcggtcacctcctggtccgtgggggatttggtccagctcggagtgcgaacatctggctgtctccctgaccatgggggagagaattcccatgattctccacgatgaaccattccaggcgccatcccttgatgctgtccttgagtgggatgtcgagatagtcagtcttcctaccacagcgcatctccaaactcgcgcccc

SEQ ID NO: 85074 - DNA, 642 bp, Zea Mays
gttataccaaagttatagggcttggtttggagaataattttggttaaggaagtctggtctgttgttaaggggaattgtgagatccaagggcttaaacagtgaggagtggaatggagctgcagtgcttttcacttaacctcagagtttggttttagaaactggataagatcctctctctgttgtactccacccatgtgctcgaattgggatacatccctgaaaatctggggtctctccatattgtaaatatccagggtttggactattgtggggggctgtgaacagtagagtccttatccattttgttcactgtctctagtatgggacaggaaggatatttgtgtgttgggcttgttgtgacctgcattttgtgttgggcatccacgtgtattcaccatgcaatgttggcaccttgagagttatctccaccatgtgttgaacaaattcagtgaaccactgctctgtcttcttgtctattgctttagggcacaatctagtgaagagatccctgctctcgagctcttgctggtcccttggtacctctgcagtttgtgttacggtttgagttcccctctcaatccccaggtcgatttgcccttgttcatgtggttctcgttccgtgctctccaaaggttagtgaag

SEQ ID NO: 85075 - DNA, 561 bp, Zea Mays
ccagcaatcaataccagagcccacttttagtggtataagcatctatacagttaatgtgcacaagaatgccacaattgcacgccaaaatcgaaagcgagcacttaaacaacaacaattgttgaacaaaggtagttgagaataaaatataatgtactaatccattgtattttagcatcatggtcttatatttcattaactgctacacaacacctaagcatagaatgagaacacccatgttcggtgtttacttctgtatggagtatatagttgaaggtatgtgaactgtagtttaaattttacatctcatttttactgccataactacctaccaaagtgtattaaagaatatatcttacaacttcatatcgagatagttcccattatggaacaccagattatgaatgccagcattgctatgctttattctgtcatgtagaaagacgttccatgactctaaatggaattgttcaatattataattgctgcaaggggacaatctatcaatccattcttatacgcctagacctgagccattagcgtcgttagctagattcgagaaaa

SEQ ID NO: 85076 - DNA, 646 bp, Zea Mays
gcagttgtgcacttctgatggagagagaaagagaaacattgcaattgaatgcatcagttcatagagtgaatcagagagagcgctcacctaacctttcaagatgtgaaggaagaggatcctttgcatgtgttatgttcgacgaaaatagagtggcgatagacgaacgggatattgaagaagtttgcttgcatcaatcggtcgtggcgaatacatggtcacagtagatgtatctccgatgttgctattgagcactgtttgtggcactaggcacggctggatggtctagccctgagggctggatggtctagccctgaggaccggacggtccagcctatagactgtccgcccttaggcacagacggtctgcgattagatcagatcacacaactaattccttttccgtttgtgttgggaaacgcctagggacggatctagacctccccctatatataagaaggggtacgtctgattgcaaacaccaacaatcgaaccaaaatcaatatatcttctgtatttttagcttttgccctaggagtagatagtaacgtagccttcttcacctcaatcttcacatctcttcgactctacgtcgtctggaggcgtcttgggtgacctgccgatcccaagacaaaccataggatctctc

SEQ ID NO: 85077 - DNA, 368 bp, Zea Mays
ggccaccgctccctaggcctgggttgccctcgaggcccagttcattgacaaccaggaagcccgtgctctccacctcgacgccgcttttcacctgctctcctagggggaccactccattggagtactacgtcggataaagggcatgggggactttcttgatgaccttggcgagcccgtccccgaccgcactctcgtcctcaaccttttgcatggtcttagtcggtgctatgacctcctgaaggctgtcatcaagtggacaatgtcgttcccccttcgacgacgtctgtaacgagctacttctcgagtagctcaccatggacgtcgagttcccggcgcctgcaacggtgctctacgacgcgtcctccgtc

SEQ ID NO: 85078 - DNA, 347 bp, Zea Mays
gcacaagacagtgagcagagcgaggagctcaccgggttttatggcattgcgaaccaggcggcacagatcggatcggcacacgcgaggggatctcacatcaactacacaggttgttggggcttgctgccgcattttgtcgaacatgtcaagggtgagttgcagaggaagagacaacgtggccgttgcagctccgcggcctacgcgatggtgcgcaggggaaatgctcgggcatcggccagggacgaactgcaggtatccttggagctagggaagagcagtgtcgttggtggtgaagatggtggtcgaggcggagccaccgtggtcggagatgcagagcgccgaaggga

SEQ ID NO: 85079 - DNA, 835 bp, Zea Mays
gtatagtacatgcgaccaactagagcggttgtcattgaatcacttgctctagaataaatgcaatgatgctaattactagtttactaccttcatccaagggttgccatctagatcgagctggttcggaaatgatgtaggtgggccttggatccaagtttagatgcttataggaatccacacagccacaaagtcggtgagtgcctttgtcttcactaagtgttgaggggcaaaatcgaggtcaaagtccactagttctgtcggtcactttgctattcatctggtagcaatgttggttttatagcacgattctcagtggaaaagaagtaaccattgagattgtgcgtgcctggaaatagtgttggagcttccaagacgtgctaaagaccatgtactacaacattttttgcatctttgtgtacatagccttggcatcatggaggacttcgctaacgaagtatattggtcgctagatttagcgagtagcatggtgagaagggcttggctcaagaggctcagggcctggagggataacaacctctacaagaacacatattgcagtggtggcagacgtcctatcctaggcgactaagagaaccaagagtagaagtgtcttattgttaggagcatctagggcccttagattttaggtcgttcttacagacgctaatggctataagaactctgcttcgaggacgagatcatacagcctagaatggtgggcttctaccttagcttagacctgttcaaacgtcgggtcgagtttaggtcgggtcgtgggtgttcctagtgtcgggttggctcatgcttccctgttggatgtgtcattggatgtgtc

SEQ ID NO: 85080 - DNA, 439 bp, Zea Mays
gggcggttgcgatgcgtagagtgagtgaggtggatggcggttggcttcgtgtgggcagggctggcaagcaggaattgttgtcctcgccggccgttgcgagtgtaggtgagggggagttgcgaagtctttttgagggtgaggagcttaggataatgttatttaactatagggagatgggaatcattccgaaggttgaaccgatgtgaggtgtggtgccctcgctgtaagtatgttactatagtttgtatgatgaggtcgtgtgccttcgcgcatccggctatgtctatagggacgttgtgcgcttggtcgggcgcatttattatgttggtctggttgcgcctgtagctggtctgtgcgcggatagtttcttggtgtagacttgtgcatggacgtaatgcacttgcgttttggcgtgcttgttgaattagtccggctgcac

SEQ ID NO: 85081 - DNA, 567 bp, Zea Mays
gtaaagtagtcatcgccggtggcccgaggaatggggtctttcctatgccactgaccaccggtcaccttcagcattcgtgaagatgtttcctagagatcaggcgaagtcataacctccctaggcctagcacatgtccccgccaattcctcaacataaaacctagaggccctcaccatttccctctccgtacctttcgcctctatcttccttttccgagtcgctgcaatcatagccttcccctttgaggttgcctctcctgaccgggtcttcaccttcttccctcggtcttccccagcatcagcagaatcaccctccgggtaaggatcgtaccacaaaccattcagttcgaaaatttgattcaacctgatgttggaacctcgtatatcccagctccttatcaactctgtcattggtgaatatttacaaagaattttaatagcctccgactccacttccctaatgaaggcagtcgcatcctgccctcgcagatcaatgtcaaaagcagggctctgcaccatccgaccactcaaaaaggcatcgggcgaagcttgacttcgcccaaattcc

SEQ ID NO: 85082 - DNA, 834 bp, Zea Mays
attgaggttctctttgaatagttgaggggtgcccaggtgttctctaaaattgatttgaactctggttatcatcagttgaggattcgtggggaggatatggagaagacaactttttgcaccaggtatgggaattttgagttcatagtcatgtcttttggcttaactaatgcccctgcttttatggaagcaatgaataggatgttacatgagttcttggatgactttgtggtcgtgtttctggatgatattctgatttattcaaaaacggaggaagagcatgagcggcatctccgtctcgttctaggtgctcttaggaagaatcagttttatggcaaattgaagaagtgtgctttttggttgtttgaagtttctttcctgggtcatgtgattaattagcagggcattgcggttgatcccaagaatgtcgctgctgtggtggagtggaagagaccctctagtgtctcagaaatctgaagtttcttggggcttgccggatattatcggtgtttcgtgccaaatttttccagcattgctagcctttgactagactattggagaagggtgttctttttgtctggtccaacgattgcgagctcagttatcgggcattgaagaacaagttggtgaacgcccctatcttagccttgtttaagagtggtaagcgtttcacagtttatacggatgcttctcgtattggtcttggctgtgtgttgatgcaggaaggcagagtgattgcttatggctcaaggcagttgaggaagcatgaggggaattatccgactcatgacctcgaattggccgcggtggtctttgccctaaaatcgtgtaggcatt

SEQ ID NO: 85083 - DNA, 437 bp, Zea Mays
cttgatccccgtgcgctctaaaatccctatcctgatgacattctcctctgttgtctgaagtcctcccacccctaggagatgagaaggacccaagatcattattcttcttctcagtaggtctacccacatagctgccaacgtcccactgggctgaatcacgatgaccaccatagccatccatggatgacatatgtgctccactacctcctttgccacctctctagaaaccccctcttccagtcttcctaaaacatgtggtaagatcttgatgatgatgcccttgatctgttggatccgcatttcttttatcattggggcccctcgggagttttgcccttagatcttgttccgtgatgttctccgaatctagaaggtcatcatcctctatccattcgtcttgccttctgttctagctgctccctccttgttctcttctc

SEQ ID NO: 85084 - DNA, 308 bp, Zea Mays
ttataaaagcaacttgtagttcaaacctacccccaaaacccttaagagaataaaagaaaaaggaagaagaagtaaacctcaccccaataagtctaacttgagaacttaatcaattctccctaagacttaaaaagaattcagtggaaccccaaaatttaatctactacttaccttagctaagtctaacccaatttaccaagtataccacccaagggtcttacataactaaagttaaccttgtttaactcaagtagatcatacacctccaaaagttgtaatttctaaaagcacatatcatatcatgcata

SEQ ID NO: 85085 - DNA, 293 bp, Zea Mays
cttagggtggaccgcgccgcctagctagtactagtagtgtagcctgagtcgacattaccgccaatgcaacatgcatgtattccggtcgacggtgtgccaactgttagctacagtctactcctccaggtacacgtacgtgcatcatatccccggcggccggcgccgtgccactagtgtcctgttcatggcggttcgacacgtacgtgtgtgcctgcacgtcgttcatggagctagctagtaggaagaacgcgatatattgacaacgatcagctagttacgttcttgctgactgg

SEQ ID NO: 85086 - DNA, 402 bp, Zea Mays
cacaaccaaaaattctcaaatgactgacactaggtttctttccatgccaggcttcgaaaggagtcttagagattagagcttttgtgattgacctgttcagtaaataaattgctgtcatgacaacttctccctagaagacagatgggacttgcattgttttgagcaaacatgtagccatttgaaccactgtctgatttcttctctctactactccattctgttgtggggaatatggagttgtagtatagtgtttgatcccaccttcactacagaaaatggagaacagatttgaggtaaactcaccacccctatctgttcttaaagctttcagtttattctagactcaacctcagccctttgtttaattctcttgaaacattctaacgcttgatctttggattt

SEQ ID NO: 85087 - DNA, 792 bp, Zea Mays
caggcggcggttcggcagttccaccgcgggaggctacggctacagttgcttgaccgctgaagtagctgacgcgtgggtccccgtcagggaggtggcagctacaccacacgcaacctatccactttctgccgctcgctcaacgaacacgaacaacgagttcttagcggccacggccagcaatgccaaacacggttttcgtagcgaaaaaaaaaatcaatatttgattgacaccgaatacgcgcccccctcaatttagcaaattctaaaatcataaattcttcctacttcaatcgcttctatgttcatgatgctcattcttgctcaaactacatcctatagctagcttgttcaatcttgtgtggccatggtgatccccaccatcgcaacgctactaaaatttatctatcacttgccaatgatgcgaagcgatcatgctcccatacccatacttgaagtactcgattccacagaaccaagaactagaatgtctttccactttggaaactggtggattacggagcaatatttctagaaggtggcaaaagagagttagagcaaatctactggtaaaaccctagggcccgaaaaccaaattcttggcctttggcctcaaaagatgacagctcacaacaagtcagcaatagagaaagccaactctgccatacaaaccaaacccctcaaccagcaaggtcataaaactgaagctcatcttacacatcagcaccatgatactccaaccaaacacgcagaattccgtaggaaaagagtcaataataaactaagaaagattgg

SEQ ID NO: 85088 - DNA, 748 bp, Zea Mays
caattaagctataacaatgatggcacgtatcttgccttgagcttgactgatatcatgcggcaaagggattagtacgtgaatgtatcaagattcagccgatatgatttttatgtacattcaggagttagtatgtcctgctaggtaccgctactgacttgtggtctggaaaggttccattcactattggcaaagggatggaacattggaacttgcttatatgattgtctctagtgcaagtgggagattgttactgatatgcccaagaagcaatcatacacaattcagattaggctctaaatgggattagaggtttaatggggtgcaacccattaacacgctttataaatatatggaaaggtgatagggttaggccactccaccacatgtgcaaaccctagtcgttgcattcttcatacctagtcgcgagaccctcgctgcgggcgcggtggtagcacaccagcgcacggagttccttcttcatatgtgtggactacatggaggtgcagctgcaagtgttgtgatgacaaactgcggaggaggagacgatcgtgatcagctacttcctctccatcaacgtgcgcctacgttggatcgctgctccaactcgtcttccgctgtgctgcgcgtctagtggtaacaatccatgatctcttacttgcaagtttcctgcgtgacgtggtaaatgtgtctagcatatttactattagtactatcaattctttgtagggttccttaacactccccctta

SEQ ID NO: 85089 - DNA, 559 bp, Zea Mays
agggtgtgtgctaatgcaaaacgagaaagtcattgcttacgcatcacgcctactcaagccgcacgaacagaattatcccacccatgatttggaattggcagccatagtgcatgccttgaagatatggaggcattacctaatcgaaaacaaatgccacattttcaccgatcacaagagtctgaggtatatattcactcaacctgatctcaacctccgtcagcgaagatggttagaactgatcaaggattatgacctagaaattcactatcaccccggaaaggccaacgtggtagctgacgccctcagtcgaaaaccattcgaaataaagggaaccaactttctagaagattggaagaaaaaatcagcacaactaaatgcatgtctgggaatcaacgacagtctcgaagtcaaaccaatgctagaagacctcattggcaaagctcaacgtctagactcagaaacagcaaggattgtggagaaggcccgcaaggaacaactcccggacctcaggacagacgaccaaggagtcctttggttcaaacatcgtctgtgtgtacca

SEQ ID NO: 85090 - DNA, 727 bp, Zea Mays
tggtcgtcgcgtgcgaggttggagaagcagaagcagaagcggcagcaaagagaagtttggtatcatcgtgacggtggagtaggaaactaaaaatggaatccaaatttcactgtgctgtaatcaagttctttgtttcctcaagttttatttcgctgaagcatgtatacaagagcggtttgtttgatgaatcagtttgaaatctttttatttctgctgagcaccatatttgatatgtaggcatgtagccttaacggtgcgtgggataacctggacgatctagatcagatttcatttgattggttggcaggctgtctctatccagcctgaccgcgagcgttgactacgtgcatgaaatgattctagcatgcaatagacagcggaggtattttttcatccacctgtctatatgcgtggagaagaaacggagatgtgttctaccgatttgggctagcgcgagccacacgctctagacgccggcaaccaatcacgttgattaactcggtcgggagtatttatccgcgcgtgattatcctaatctatccgtgagagtctgttggatctcgcctaagaacgaattcagacctccccatataaatataaaagtagtacgaccgattgagaacaccgaacacattacaattgaatcaatctattatcttcattatcattcatgtattaggcgtatgtgtagcgtagcctagttgtagctttcaactcatatcttcac

SEQ ID NO: 85091 - DNA, 1380 bp, Zea Mays
cggcagtgtctcactaaactatctatatataccagggcatgttacctgaatcaatgttggaagtggttggataattatgatgcatatttgaaaaccattcatattgtggtcgtctctgcaatcttctaggccatctggaagtctagaaacaaagtgtgctttgaaaagacattaataaaatctcctaaagatatcatctgtcatatgcatgtgcattgatgaacttttgggcaggtttaaacaagaaggagctccaggacttaattcaggagggcgctaagctacttgttacttgttagggccgccagcatcaagttagctagtcctgaggataatcagaaagatgaaaactccgaagaaatcattgaagattgatgcaaccgagcgaagtcgttaaattctagaagcgaagttgttgaattctgaaagtgtgcttggctggtgtctgctgggattcatctttattttcatgtttggtggatcgatggcccctgtgtgggtgtttttctgttgtctttagaccttttggttgcctccgtggctgaggtggtttcaagtaaaattgggtgctggttggttgaggatagtctctgaatcagggaggtactctcttttggttaaactttgaatgttggtgggtcatggacgaatagcctaggtagtagtttgttccttgggatttctgttatgcatggtatgttcggatgtatttctgatatgaaaataatagaaatgaggtctcctcggttcaaaaaaaaaaaggagcagcactgctgtcaaactcgttccaatatctctgcgacatgttactgttgtacaatgtgacggggcttctctgaactgagcagagcagaggcttcaggctttttgacgtcatcacatagaaacctgatggcaacttttgctatatcctccattttggacgccatactgtccatcctctccctaagactaactcgaacaaaggtcatgcaaatcaaccagcaatttaagcctttggctagcgtctttggtttgcctgttcagacatatggcacacgctttcaacagcaccgcaaaaagacagcggtagtatagtccaacaaatgaaacagatggcggggtcatgttcttagacacagaaaaaggaaatgtctgccatagtacaagctattattgctttcctctctctttccattctttttgactagctcgtttgactgcctgttggaaggtgttttgtactactacaatagagcttgtaggtagctattttagttttacctgtctatttagctgctctgttggagttgtctaacaaaattgaacggactcttgttagtgtggcggactggtggtgacgactgacagagtttgtccgggccgttgtgttgaatttgg

SEQ ID NO: 85092 - DNA, 309 bp, Zea Mays
gtgacaatgactactcatgaactcattgccttgtgctagttgccacaacaatccaccatgcaaaccaagatcatgagacaattaggcatcccacatgacatcaacgagagacatttcagcaagcattggagttgcagtaccttatgcaaccaccagaggccctagcacctcgtgctctagctttgttgctagcattttggcgcatacctgaggtgcagagcacatttcaggtgatagaggcagcaccccatagcatgtcatccccgaaccttagtttccaactagagaagacccaccacgcttcaattg

SEQ ID NO: 85093 - DNA, 477 bp, Zea Mays
aagaatgcataaattgtgatatttaagtattaacatatttatccatctatctaccttttcattacagagactcaacatcagatgcaacccaggagatgttcttgcgtccattcagatatcgaatgaaaggcaacgtcaagctatagtcagaaaaggattctctagtattcttgacatgacaattgatgcaattggatgtcgaacacttctttgttggctcatgcaaaagctagaccccagagacatgactcttcgtattggttcagacaaagaactcaaaatcaccaagcagactgtccatcagatattgggtcttccaaatttgggtggtggaaagccacttaatattgatgaagcgaacgctgcggcaacacttcgggcctccttgaatattagcaaggatgaatttgttatttcaaagctccaggacagattgaggctaggccaggatgatgatctttctatcagatgtttttt

SEQ ID NO: 85094 - DNA, 444 bp, Zea Mays
atttgtttgtgacggtggattactggttagtaatgtgcacagcattgttttttttaactctaaaatataactggttttgaattcggggacgctccgtagtgtatgggtaatactaatatcacaacttgcagtaccaatgctatgtcagatttgtgctgtttaatttgtggtaatacaaatgctggagtttagaatgtggtggttgaacagccattgtttcagcagttgtttaggtactttactggtttcgctttcaaggcttgaagagattgaattgagggcctgatgtgccattcaaaataaacatttataatcactgggtcacaagtgggcccagagcacaggtcttttctggggcaggtcacatatttcattatgatgttgaggaactgtagtattctgtagtgtcaagctgtaacatttgtgtgcagctatgcttgactg

SEQ ID NO: 85095 - DNA, 639 bp, Zea Mays
ggagttgagtggatcgtacataagcggttgtacgaaccaagtacacatgaggcagagcgatgatggaagaagttggtggaggcatcccaatatatggtggcagtggcaaatcaacaatgtagcgaaaaggcatccccaagatgctaatgtagttgttgtgaatgtctatgtagtatgtgtgaggtcaacaggcggtggacgacacaatccccatcaatgatcagaaaaactaaaaattgtacaacaacagtgggatctaccatgtacaactcatgggtgcatcgaacaatatctcacatgcagacacggcgagtgcacaacactcggagaggcgagctactacaaccaatgatggcacaacgggtaccaacgacattgatggatatgatcacttttgcccatcaacaacactcatgatctatctgccttcatggccgcttagggtcggggtatgcctccacgtgataggaatgtggctcaatgatgagcccggaacgaggcagtaacgacctagcgatgatgaccacatgaggagatcccgatcttctgtgcaacagctacgacaaaaaaaatcatttggatcgatacgatcgagtgttaaatggtagcgctacccccacacatatagatagatctctc

SEQ ID NO: 85096 - DNA, 487 bp, Zea Mays
cctcctccgagtactcggagtcaccgaagtcctccgacgaaggactcggttcacgcttccgtttgtcgccggagcgacgcggcgagccctgacctttcttgtccttgccgatggctagatggaagagaagagagggttgagaaagaaacaatggatgatcagaggatgtgtgataacaacaacggagcaaacaagctatttatagaggccgatagcaactgttcatctcctaccacgcccaccgaacagtcgcaagtattcaataagcaattcaaatcgcctgaaggcgagtgaggcagcagacgatgcttcgcgtaacacgacaccatttggactaaggtcaactgcttgggcaatatgattacacccagcggtcacgtcaagttaccactccaggacaatgtgctaaacgctttgcgtaccaagacgtcccttggtcacacccattggaaaacacccattgggtgggggacatccaggaattttc

SEQ ID NO: 85097 - DNA, 568 bp, Zea Mays
ggaggacaccagtgacacacacgctgcatcctcgcgcgcccctgtgcggcttcccgtgccacagagcgtgccggtaagcgcgcccttgcagatggactggacgacgcccaacagcggctcgaggaaatgccagcaaggtaaggtgctctctgaatagttatcgtctctactttctaggagttggagctgaacagcacttacggagctaataattttgtgtgaaacacagaatgttatttttgattcaagggagcatgatgcaagcttgctgagggtcattgcttctgaatacgaagttttacattcataatattgattgactgttgctcaagcaaatgattgtgttcctgttacctggatgtcctttcgtggctatattctatacaatttattaatcaacttaactcattgaatgcatagttgtatatacaatacaaccaaccgtacttttctttgaaggtcgtaaacttattttggtgttgcagattatctgaaacatatgggattgtccatgtgaattaagtgttataatgttttcacaaaggcattccacgagttgcaatattac

SEQ ID NO: 85098 - DNA, 605 bp, Zea Mays
atgatttcctatactgtctcccagacaacaaggaaatatccgtctgccgggagatggccaaaaatatgggatttccgaagcttaaagatggcctctctgccatgtcaaaagatgacctcgcagacagccttacgtacaacagtctgaagatacgaaagtgatgaacttaaaaatagattatcttgtcttgtattctcgtgctgattctatctttttgtagggcttaattcttagcaacgctttgagggcgcaaaagaatgctaaagatgaaagctgccagatagctctcagcaaccttcgatcagaagttatcaagctgagaaatgaagccatggaaaaagataaaattctgctttcattggtggacaaagtgaagaaagatgaagcaaaatttaacgctcaatccgaagctcataaagccgaagtttgaagatcttcggaaaaaacttgccgaagccaatgaaaattttgaactgcaaaagtgaaacaggaaataagtgaatggtcgaacactagactagagaaaaatgttgaggagcttcgcgaatccaaggagagatgctttgaaaaatccttgggttgtgtaagaaaattgaaaactagct

SEQ ID NO: 85099 - DNA, 733 bp, Zea Mays
ggaagttctcattcaagacgaagttccactagctagcatgggacctgagccgaagctagctactgaaaaacgccgaaaaaggaaaaggatggcttcggtcttccgtagatgcacccatggatgagcacaaagctgattctccaaagagcgagataaacgaaggtgcgctagtcatggtttcaccacagtcggccgaaagtgtgatggttgtatcgttacctaggctagctgaaaccttcaacattaccctcgaaagtgagaatgtccccgaaaatgttgaaggggataaacatgagaaagctatagagccagcagagaaaaaggaatactttgaaaagtaaacacaaatcactacaacacgtacagtttataatgccagaagacaagcaagtgaccaggctgctcgaatatgtaattcgtcacgctatcagtaaaaagcttacggtagaacatattgtcgaagcacaaaactttgctaaaggttaaggtatcctttggtggcaaccatctttggtggtggagaagatgaatatctatactgttgcccggataacctggaaaccgaaacatgtcgttacatggcaaaaaatgggtttccaaagctttagagtggactagccgctatgcccagtcgggatcacgctaactacttggcctagacaagcacgaaggtaacaatgctatttctgcttcggtgaaaggtcccttgtgggttttggtgtttggatgtcaa

SEQ ID NO: 85100 - DNA, 595 bp, Zea Mays
gcccgaatacgtgaaatggagtgctgacaaagggcgatgatgctcaaccttttttggaattgcatgccattgagcgatcatgtctggaagactgtttaatcatctctttttgtttgtggttgtgcctaggattgtcacttggatatatgacaacagtcatagttccactcaaaataggatgagtaaattgggcaccaaaagaagaaaggagggcatgatttatatgattgaccgaaggtgatgctgagcccttgtagaatggtttatgcagcgatatttaatgaggtcatatgtttttgtttcatactacacttgataatatgttatcatattcacataaactacaatgcttcatatacataagttcttttttggttcatattgatttatggtgactattcgttatgttttagcaattgggtaatgagcttccaaagcatgtgtgtttcatgttgtgcttcttggtggtggctaaaatcatgtaactgggctgtttaaatggcatactaggtacttgttacttagtctatttttctagagtttatgaattactgaacacacactcatttaaacctgcatctccctttcttttatt

SEQ ID NO: 85101 - DNA, 610 bp, Zea Mays
ttgggtaagtgcctgctttgtaatttggtggccaaggggaggcctggagttgtggtgcgagagggcttcgctcgtcaaggtaattgagcccatgaaaggaaactggtgcgaaggctggtatgtggaagtggcgaaggttttggttggctacactggctggctacagatggcgggggtcttcatgtcgcatttctagcaatttcttgctccagctctctatctttttgctcctcctctaggatcatttgccttactctagcctgcatgttggttcgctgcctcttaatagcgtgtatctctctctgtttttatgcgaagttgttgtagtttgagttgatatttggctaagatgcccaggacttcgtcgtctttggtgatgtcatcagcctccggggggtaaaacctggcggggcgtccaagggaggtcctcagaactgcacgtgcaaatggtgccttcgggagtgggagggtgttcagttcggggatgcttgctgtttattgctccgtcgttgttttcgggtgcaacttgaggggtgccatcagcgagggccaccctgcctttcttttcgacgagggtcgcctttgcagcatcgtttaaggaggtggtggc

SEQ ID NO: 85102 - DNA, 504 bp, Zea Mays
ctgggggacagcaccagctcgttggcggcacaagtctagagctgtgtcgcgggaggaaaatagagtacctcgacatccccctcaaggatagcatcaaggggtgacgcctcgagtggttcattgtggagaaccactgcaagtccctaccccctcgatcagcgagggagccagatgtccgcactccaagctggtagaatctccaaccctttcggagataacggaggcaaaagtaggggtctgcttgttgaaagacagaggtctgactgctgaggctgtggttgctaatttcgtcttcaagaatatccagcctttgaaggacagggcgtacccggcttatctgtatagtggcatcaatgactctactcgggttacaaacaagacaatccccactgaagatctggtgagccgactggatatgatcctgaggggcagagtgtcaaatgttggtgctcctgttgcctattctgcctagaatctaccaccacataggtcattttctgaatt

SEQ ID NO: 85103 - DNA, 409 bp, Zea Mays
cttaaacgaatttataacttaatctactttaatatatatagatcgacatgaatattagagtatccaaataattcctcgtgtatacacaaagtaaaaaccaaaggcagaaaggcatgtctcggcattgggccagcgagccagctggaagaggaaaagagaagcccaggccgtatccgtttatttttctaactcacgggcccataccgattcggtgccgagcaaggagcaacaacatctttttatttccgcgttgcctttattcgcgctgtcttcctatctgtcctacactacactcctgcctgcctgcctgaccatctttctctattttctaccctttaattaattccctctcatagtatctcccttttcctttgctttgcatcttcctcgcctgtcctactcctctctt

SEQ ID NO: 85104 - DNA, 938 bp, Zea Mays
tttggtgttcccggtggcaaagtggaagcgtggggtggtggcgagagaaatagagcctgcaacctgttcgacgagttgcctgggtgtcgttcactcggctgggtcgtcggcgcaggcttctttctccatcgacgatctgcggcgtttcctcgctacgacaccgcgtggaagcagcagtgcggaacatctcagttctgcttggaggtatggcccctcctgtgttcgatgaaatgccccctactacagtgaggatgtcattgcccttccaaggtgctttggaggttctggttattcagtgttcgatgaaacatctactgggaaggtggtctgggatgaagaagtgttacttggttccgattcacttggtttttggcagcgcctagctcatggagtggggaaccagatgcccaacgattgcaagcagaatgttgtgcctgatgccccatggttgtttgttgaaatgtcacagcaagtaagtacatactcaatgtccagtgaaatgggtcttacagtggcatgggatggggagatgcaagctgaaactcacacgcatgaaggattactgcagcaacttgctcaaggtgaagaagccttaaaagaatcatctaagaaggagggtgacgttgaagatgaggccagcaggcctgacccaccgagtgaggcaaccgcagtggttatgaatggaggaaacagggatgagtttattcctgctagtgtggtcagtgtgcttgaggatgaccctaaggagcaggatgctaaaaatgttgatgctactagtgctgacggtatcctttctcaagaattggctccaaaatcaatcaatgaaactaatggtgcaggcgagattgtaggcgtcgctagggttgatgatcatgaagaagaggttgtgggtagcgacatacttgaggctatgacagatgaagtggatgaggaagaag

SEQ ID NO: 85105 - DNA, 376 bp, Zea Mays
gagaaatacagttctttgggcctgaactgattcaagaggcagaagaacaagtccgtataatttaggagaatttgagggtagctcaaaccaggcaaaagagctacgctgataatagaagaagaccactggagtttgaggaaggtgatcatgtgtacctcaaggtttcaccacttcgtggaatgaggagattcaaagtcaagggcaaattgtccgctcgctttattggaccattcagaatctttaggcgagttggggagatggcataccaactcgagctacctgataatctattggatgtgcataatgtattccacgtgtctcaacttaagaagtgtcttcctgtccctgaggaacagttaccaatggaggagctcag

SEQ ID NO: 85106 - DNA, 677 bp, Zea Mays
atggcaccaggcgtcgtcatagtggatggtccaaattgcttctgtgttgcagtagttgtcggtcgaagacccaatccaatcgactatgaagtcggtgaggacctgtgatttggttgttgttcttggctcgaaggtgatgttgtagccgaagcgtttggctgcccacttagctattttggcggatgcctcatgagttttaaacaaatcacgaccttgatctatgggactcttatcttgtgcgcctcgaagtagtgcctcagtttgcgtgatgccataaggactacatatgctatttttcagctctgtcatgttgcactttgaattggtgaggacctcagagacaaaatagatggggtactgttgtagtttaccatctttgtatctttcctgtactagagcagcattgaccacattgtgcgaggctacgaaatatagtaggaggggtgatgcggggcctgagctgatcaatgttgtgagcatgaacaagtactcctttagcgatttgaaggctgcaacctactatgggccccaagcgaagtctttcaccctgtgcagcgttttaatgaaggggagactccgctctgctgatcgagagatgaatctattcaaggcggtgaaccttcctattagcttttgcatgtctcgggcagactacggtggtgtcatgtccaatatag

SEQ ID NO: 85107 - DNA, 613 bp, Zea Mays
aagctagagtaaaatgcccctaaagtcaggctgtcaagcaaagtaatgagatattcagactagaacagtgcactgaacaagatcaacatcaccacacatcacgccattgatctcgcgccgtgattcgagctcgccgtggagattcgtgtagggcttgaagtatatattatcagggagtgaaaagatcggcggggaaggaacttgggtacagagccagctgatccgtagtgcccacatgctcggcgtcgtgactgtgttactgtcgtcgtgatctgtcggtcccccttgctatgccatgcgtagtcttgtttcaccccgtcattgtgagcgtggtgagtggtgaaacaagttcacgagtcactatggtacctgcgcgccacggtgaatacgctgtcatgaaatatcctaccgttgtcgtaggtgatcttatcccaaattcacgaagccagtgaccggtccctttaaattggagactctccctgctccgcctctctgttacgcacccaacacaacctcagccagcccctctcgaccaccatagctcaagttcatcagatttccttgaaaccggtcaccatcgtcgtcgtgagaagccttatcgtggacatgtcat

SEQ ID NO: 85108 - DNA, 1442 bp, Zea Mays
ccactgcatcagagatagagcttgttcgggaacaacagctccgcaagacctcaattgggcggatactccgtcaacaaaatcctgcggtcatagacagatgagcagaagaaaaataattcgctagtatgtatagagcaaaaggccaattcacctggagattagaaaggaatagtggaagacctaaggcaggaagagctggtgcatggcttgacgatggaagatcagtaggaacaacctcgagagcactacccggggtgacctcgacccaccagtagacagcaggttcctggcgtctggctcgctgacctctaaggcgacttggccagttaaggtcatagaagcatgtgctgctgtcaccccctcggaccggattggggatgacccgatgtggacatccatggaagcattagtgagagagagcatgcctgaacatcctcaggggctagattatgactagcactacccacaggggctggatcgctaccagcaacactctcgggggctgggaagctgccagcgccaccctcgggggctgggtcttctacatcagccacctctaaggctgaaggcacctcagccacctccataggagttggatgactcggatcaatgtctttgcatggaagactgccctccaaggtcgatgatgcgcggggcaccacccgggctacctcttgcccagtggaatcaagcgttgaaagtccaccatctgggacctctgaatagatggttagattgtcagcttcacgaggcttcgatagtatgtcttcaggaatgacctcttccagtgcctgatcaaaatctgatatcgaaagcccctgaagaatgacaagtgccgatagagccggagagggaatatcactaccccccttgctgcccctatagtaacggctgttcttgcggatcagtgggatttcttcttcttcctcctcttcatcctcgtcaaacatgccgccagtagcccacgcatcatcacagcctttggcgtcagcctcatgaatggcgtccgccaggacatcgtcagggatcggtacagaaggaccagcatcctgatccaagcacgacagtcgccgaagtcgcctcttttttttctcctcaacaggtgcagtcagacggttcactcggcgtgaacgcttttggcagacaccttccggttttcgaatctccacctcttcaccaaattcttgcctagccgtgatggccatcggctcggtgcgggtagagtcggacgattccccggccagcagactaagcaggcatccatctcagcttcatcagtgtcggctggcatctcaaaatgagtttgcctctcagcctcgggaaggctccaaagtggagcaatcaaggcctcaatgtcctcaggagagggtcgcactctatgacctaggctatcatcacgagcaggagggtcggagacaaattcagagaatggcctatttggc

SEQ ID NO: 85109 - DNA, 518 bp, Zea Mays
gaaatgttagcataggttcatataatcaaagtctagcttgaattgttggtacaataagtgtaattacaagaatagtttagagcgcaaaccacatgagacaagatatggcaataataattatctttggggttcagttgcttgccagtaacctacgtcctcgttgtggcgagttcaagctagatgattcacacactaattggcattacaagccaagcccacaataagggtactgtaagaatcactctaaagagccactccaacaaaccattgttctatattatagttgctctttgtgaatctcacacgaggaattatcataagagctcctcctctcaacgatcacacatactctaggttgtctagatgatgacaatcaccaagaataataagagtagaactagcccaagtcactcaactagtaccacaaaatgcatgaactcaacataatgcactaggagtgctccaaactcacctaagtgatgaactatgtgttgtaagtgagtggagtatgtttctca

SEQ ID NO: 85110 - DNA, 389 bp, Zea Mays
ctaggaagaacacccaactcaaaaaaatctaatccagacaacctcctttgcagcttctgaatccacgatatactcaacttccgcgcgttgaatctgctactgtatctcgtttggaactcttccaactcactgccacaccattgagacaaaaaaacaaaactagattgtgatcaagaatcatctatgtctgtaagctagcatcgatgtaaaaagttataacgagctcttcctcaccaccaaacactgagaacgcgtcaactcatccttaattcttcttaagtacttaaacatgttcttcataattgtccagtgagcttcaccataatttgattgataccttatcgtaacacttacaacataggagacgtctaggcgtgtacatagcatgg

SEQ ID NO: 85111 - DNA, 472 bp, Zea Mays
caaggtgaggtacttggtctgatgtaacctttctccaacaactcatccatttgcttcttgagttccaccaattctggttcggacactcgataggctctcttggaaataggggcagtgcctgggatatgctctatggcaaattcaactttcctttcaggtggcatgcctggtaactcttgaaggaaaacatcggggaattctaaccaaatcctaattgcctcaatcggattggactctttgttgtctactggtaaatggtgacagactccttctagttcaggcaagtatagcttggttactacttcttttcctgatggggacaccaacttaactgttctcttgtaacaactgatagtggcttggtttctgtgtagccaattcatccctaggatgacatctaacccttgagttcacattactactaggttagcggggaagcatatcccccttatttcaatccttagattcggac

SEQ ID NO: 85112 - DNA, 490 bp, Zea Mays
cctttttatgagtactgcaaagagtgtggaatcattcatgaaactgccgctccatattcacctcagtcaaatggggtagctgaaaggaagaaccgaacggtgtgtgacttagctaatgctttgttacaaagttcgaggatgcctgacatctggtggggtgaggcagtactaacggtgtgctatgtcctgaacagggtgccacctcgcaaccgtgaggccacgccctatgaaggatttaaagggaggaagccagatatttcacatcttcggacttggggctaccttgctaaggtgaatgtccctttgacgaagaagagaaagctaggccctaagattgtagattgtgtcttcctaggttatgcacataacagtgcagcttatagatttctagtggtccattccgagacgagtgaagtcgctgtaaatgtcataatggaatctcgggatgtgacattctttgagagcattttccctatgcgggataaggaag

SEQ ID NO: 85113 - DNA, 969 bp, Zea Mays
caaatagaaccctggttagaggacttgaccctaagtagtggttaaaagggtaaaacttaacctaagatgagaaaacctaaagaccttatggaaagagtcataaaatgaccctaagaataaagttgaatcacatttatacccctgggatactagaaaccctaaatagagccctggaaaaccctaaaactaaaacccaggggcttatgtgcaaaagtggtgaacctttggactaaagtgtaaaaactactatgtttgaacatatatagtcatttggttcacaaatatgtgaatttgcaagttaaaccctaagttttgggcttatttgcaagaatcacctcttaagcactataaagcctaagtctgaaatcagtgtgttttcttcaactttgagcccttgtatcttacaaattaataagaatttgccctaggttaccacaccaaacttgcagaccaaacaaagtataacaactttgcttaaggttgtgagcatagttgttaaggaatatttggagataatcccacttaaaatcagactgtcaggctggctgatggctgaaacttggtctgacagtgggatgggtcaatctttgaacccggatttaaacaagatccagtgcaagtttgggtatgattcccacaacaaaattgtagctggaacatggggctataactttggtacagaaaacttgcttcgtcactgcaccaaatcgggagtaaattagcgctaaaactgctctgtcaggcgctctgatgaagcagtgccatagtacagtgtccaaaatgggttagattgccagcgccgcgtactcgccgccgacgacctccctgcgccacgattcgtgtcaccgccagtccatgtagtgttcggagtgagtggatagcgctcagggtcccggaaatatccccgccatggataggattacacaccagagcttaacgctgcgacgtggccgatctgcctgagccgcc

SEQ ID NO: 85114 - DNA, 628 bp, Zea Mays
atttgtttgtcgctaagcattagagtcggcagtcctgcaccctaaagccatccagatcaggatgcatggcagctggcttctggtgggcacttcctaaattttcggtgagcaaaatgcttagattctctcagaaattgtgccttcaggagttttcagtattatgatgtggttatgcattatgttttctcaatgtctgggtggaaactttgaaatgtctactatcacttgtagcattgtccaggatatggaacagtcaaggtgttacagaagataatgggtggtgattgcacttgtactgtgcttgtcgatagtacatattaggtgcttgttgtcttcttccaccttctagacatttggttttgttgttttcaggttaattacatcttttgatgaagttagagtttaccccattcctgtaatgctttacctggtcaagaacttattgcaggtatgtccagttgcccactcattctgttgtatgattttttaaaaaaacaaaaacaagcaaaacataaccatgtttcccggcttctgtggttgtcagtattatatctttgaatatgtggatgcaccagcttaccagattctgaagaacttgaatattatcagcactggtgtcctgtaccgt

SEQ ID NO: 85115 - DNA, 660 bp, Zea Mays
agggagtcacagcgacacggcagaaaagctaggccacgcggcggaggaccgacgaccggagttggagaagaaacgcgagctgcggatgcgctggcaagcttccgcgcggcagttcccggtgagggcacagggtcaccgcttaaccagaggtcgccaccttggtaactctttgccacggtgccaagaaactttaccgcgaccaccgacgaccggttacgccgcggtggcgttcttatcgccggcgaggtccaagaccttatcctctgcgcgatattttcagatgatggtaaacagtgctctgaattcaaaaagagcttgactgacagagcaagttcaggtcactttttctctaaattttccttagcaactcatccaaggctctgcatgaaagttgtagtgctacataccagctacaactttgctacatggtgttgtcacaaaaaatcactggatcccattcaaaatcgggctcaaagttcatctcataacactgttattctgaaattcaaacctcaaacagtctgacagcccatctttgattgggtttttctccaaatttctcataggatcatggtttgaacccttaaacaaagttgttcccctaagattgatcttcaactttgatgtggtcacctatcatgaattctcactattttgaaa

SEQ ID NO: 85116 - DNA, 474 bp, Zea Mays
gtgatttatgtgttctagttgcctcccgaggcactgctatcatttttgcggaggctggtgaactcatttaaaatccattaataaatctaccttcaatatttctccatccgacttgaacagaatgcctaccaaagccagaagtgtgggtaacagattcgttaccaaaatatggacgaagggtggaagagaagttgatggtgatgaagcgagagcactactcaacaaagtatactgaaattatgtccgttcatcttctcctccctcctcttttttattgccaggtattaatgtggtatcgctttcaggttgatgacggcgaggagtgacgaagtcgaagctgcaatctatgaaggagccctgaaaaatgcttgaggatctttgttttgtaaaatattgaacttgatgaaagacaatgggagatgatatgtaatattttgtaaatatgtaataacaacttgtaatattaccttttgt

SEQ ID NO: 85117 - DNA, 590 bp, Zea Mays
tgcaaaacattggcctcagccaggcccgtgggatacggccaaaaggcgcgttccacgcgagccaggctgcgctcggccactcgcgctctcctcgtgctagggtttcgccgccgcctcctctcccctcccatctctccctctcacgtctcttctccccctcgagctctccgtcgaggtccccccccccccccccccgcgagcaagctttcgcgtctcgtctcccccgcggcgagctctcgcgtcttctctccctcgcgttcgagctctcgcgtctcctccctctcgctgttgtgacactccttccaggtaatctgttcttttgatttgtagtagtattggtagttcttggctgagatatgatatttatgcataaaaatagctcttgggtgagatctgttcttcgtctgatctagtatagttgttcgctgagatctggtagttgttggctgagatatggtagttgttggctaatttctctcctctgagatctggtagttgttggctgagatctgttcttcgtctgatttgagctctccctcttgcatgcacccatttcacccctctcagatctggtatagtttgctaatttg

SEQ ID NO: 85118 - DNA, 416 bp, Zea Mays
acgaatttggcctttgtgcggggaatgtcgttcgggcgccgcccgtatcatggtcgggggtgttcggctgcgtggaggtcggcgaaatcattcccctgtgttctccttgagttccgtttagggctagactagtttgatttgggcaggcctcgtcggccatatggcgcggccgtgggcattccctgccagagggtgctcggctcaccgggagagcggaagaaaggagaaagcaccagatccgttgatctcaggatgaacggcccggggtcagatagggtttcgaccgtgggatggttgttgtgcggctcagatcaaacggtagtatacctccttcgcgcattaggtcatgaccgtcgatttcgtgatcaacgatcctcggcgcgtaccggttcattaaagactagattcaatccagg

SEQ ID NO: 85119 - DNA, 428 bp, Zea Mays
gtaccggggtaaggacaatgcataaatgaaataagagaagtccttttattaatatatacagtttgtcgtacacaatttagttccagaaaagcaagaaataaaatatctaaaagaaagtccaaaacacaatgaatttagtggcccaatctgcatcccaaaaaaatatggatgttactgtgtatactcgattttgtttttcagtttcaactaatgtatttcccattcagataatcaagccatataacaattttcaccaaaaatgaaatatttagtcacagttgtacccttcagaagaagcttttgctataactaaaaaaaggtcagcacaactttcaccatataataatttcctttgtcaaatacaaatatatttgaacatcgaccaatggccaaacaaaggagttagtgttgctcatcttatgtcacaa

SEQ ID NO: 85120 - DNA, 680 bp, Zea Mays
gagacgatacacgggcaatcaaggtcactgaaatgacagaagaggtgagcacatattagtcacatagtcataagtatatgaaatgtgaataaatacatacacggagagatatgacacagaaaacaagacatgagacgatcgagaggtcaaacgacgtgaaaacgacgtttgaacgataaacagtgccataggaggtttggaattcgaattgaggcacgaaaagacatggaattgagccgatagttcatgaataggtttatataggtgaatatgagtgaagtgtgtgcttggtttgaatttaggcgaagaaaaagagatttgggcactcggctcggaaacgatcgctcgaaacggggaatttggtgaaattaaagcctggaatctcggattggcgtgaaatttggcaaaagtgttactggaagtgttgtgaaggtgcctaaaaaatttgggttcaattggagcatttttggctggttggggcattttaccgaacacgtggagggcggggaattagggtttcggagaaatggccatatgaggtgtgaaaaccctcccgaaggagctaagaacctgcaggaatgctcaaggcacacattggaacacattccaccatttggattcactggatttgacaggaattggaattttgcacaaaaagggagaagaggggtgctcacagc

SEQ ID NO: 85121 - DNA, 553 bp, Zea Mays
gtcccttcccacgcattccgtccactggaaggggaagagcgagttgtctcatgctcgttgttgaagatggaggttatggcgagcctccttttctatggggtgagcccatggtcccctgctcattacgaaggatccatctaggggtgtgtgtcccatcttttctctattccttcccacgcaacccgtccgctgggaggggaaaggcaagtcgtaccatgctccactcgatggttgagatcatgacactcagcgggccctgatcgacttatctaaatgggcccttctttttgcggggcgagcctcctagtcccccgttcattacgggtatttgtctgggttgcactttgtctttttaatgctcttcccacacattctgtttgccagaaggggaaggttgagccataccatggttccctcgatggtcgagatcatggtgctcgatgagctacaaacaggtaatccgagtgaggccccaactcctttagcaagagcaaggtacggggtccgctggtgaccatcctcatgctcctaggtttcgattcatatagttgcc

SEQ ID NO: 85122 - DNA, 821 bp, Zea Mays
gtttttaaagctacctcatgccacaaggcatttgtgagaatagcatgatatggatgctagctgtcgtgtattttgcgttggtctttatctttagttgatgaatcatctcaagtcttgcttggcgtaagagcccttggttttgcacctccttttcttgttcttggatgtgggcttgtttggtaaagtgttccttcttgtcgcaattataataatactagcatataacctgtgctaaagctacgatctcaaggaggaatcgacgacgacgccagtggggaggggaagggaagggagtggcggtgtcgtgggggaagggggaggctggggacgtcagggtcgcgcggagcgggagggggagggatgtgggatgatctaaataatattatccgttggttttgattgggtaagggagagggagttatccagggatatgcactgttggttttgatgatgtgttaagtctgggcacaatttgtttaggtgagttttgcaaagtttaatctcgttaattatatagtgctatagatttatatctttgttctttttgcagttgtgaataggatgcattcatcttattgtgtgttttgttcggctttgtaaatcgatacaatatattcctaaaaacctacatgttcctttaattcaattcagattcacatcctaccctatgtttcctaaattcctgccatgcatgttaccaagttattatgctcttacagaatctatagttgtcagttgttttaattaaacatattttagctttcccatagccctcaactcacaacaagtttctcacatctcacaactggaatgagtttttt

SEQ ID NO: 85123 - DNA, 1315 bp, Zea Mays
taaaaatacaaagaatttgcttagggtcaatatatcaaacttgtagagctcatgtaggagtacaactttgctatagggattaagccttggtgtcatgagaaatttggagataattagatccaaagtcgggctgtcacgcaaccctaagtctgaatcctcactagcagtaaagtaggatgaacttagagctcgatttagagttagattcattgctcgattgagcatggttaccataacaagattgtagctggattatagggctagaactttgttacagagagattaaccagttgccacacaaaaaacggagattaatgccctgcaaatggccctatcagatagactaaatggtgttctgattgtacagtgactgaataagatcgcaggttcaccccccttcgccgccggtgaccttgcgcccagattcacgccgacgtcgcgattcacgcctggtcgaacacggataacgctactcggtaaaaaatcaggcaccgcggatgagctcaccggagaccctgttccgcccggccgccgtgaccgcttgactcacggccatttcagataagctcaccggagatggctgcctgccaatcggatgccacgtgccttgaagcttcacacatcgcagtaaaccactccatattgctggctcgtcgccggtaggcctgccacggtgaaagacacgcagctcttgtgcaagtgacctctttcttctccggccgccaccgcgccatcccaaattcaccggccaccacccccggagcctataaattgagtgtgccgttgggtccgtaaggtagtcaagcacccaatccaccaaactgtgccttcaattgctcaccagcgagccccaatttcggatttcccccaattccgtccaaaaccccacgccttgtgacctcgccgtggtcagcgtgctccatgtccgctcatgccccctgctctttcgttttagtatccttgtgtgtccctgatgctctcggacccagccgactaggctaggaccccttagatcgacggaaacacttcatgctgtccattgtgcccgctattaccgtgaacagggtgatgtagagctcaaatccagcaattaagcgggggaaaatgtttgttaagggtccatttggtgtctgccgcacgggagcatcagtagttgggtaatccggccggtgtaggctcaccggagctcggttctccgccgtgcgacgtcgtggaccttgggtcgtaaagaattagaacttggagggctttggtgtaaatgtcagtgactaaatcaacagtgtcgcgggctctttcggattgttgtcaaagccag

SEQ ID NO: 85124 - DNA, 414 bp, Zea Mays
ctttacttcaacccttctgttggaaccttaccgatcttacccttgattgttttctccactttgtcgtttcacgagtcttgtcttaactatatcatttgttatgctttttaattattatcatatgcacccttgacacctctatatcctacattgatgtttgtctcatacctgccatttaaaatcgcccctcttccgtctcataccttctttctcttggtcgtatcctcttctttggctcgcgagtttgtaacctcatcctttgttgtgcttttgcttcttattgcctttacccttctcatctctcaaccttaccttggtgattacgctatgttcgttatctaaaacctccaatctcccaccttagttcaagtgtggtctcttacttatctcacccgtggttatatcctatacttt

SEQ ID NO: 85125 - DNA, 793 bp, Zea Mays
cacgatcgcaagtacagtacgaccgtaattagcggagaacagttatcccaccgttccattccccttcacttcaccccccgccgaggggaaagtgtgatgattagcagacttgcagcttgtatctcatttataaatacacaaaccccacccagcaggccagcactcaagaaccgcaaggaggcgcctttccggcgttgcccttgtttttttcccctctccaactcgaggggttttcgatccggggggcggttcccggcgagatttttgacccggcccggtgcttggttccattgatctccgtctgctactccttcctcctacttggttgccttgccttcccggtccctgatcggagcctgtcgccggcgggcgggcgggctgagtttactgcccgttactggggggacaaagagcagaaggaacagagagtaaaaaatcttgggccttgatcggatccgaggacggggcaatgcggtaataaggagcggccatcactgccggagtttgatccatccaaggagaagaaagaggaggggaggccgcgctttcctttctttctggtgagcgttccggcctccgcgccgcccgtctctgttcattctttttagccttaaagctactacagtactaggcaacaaaagcggtcgcggaagttgccatctttttttttccccttcccctttcatcattgctgatggcgtcgactgcctgcctgctcacactcacgcagaagcggaggcaactcccgaggcgcccgccatgctgcgcaacagatcgagaagggcggttggtg

SEQ ID NO: 85126 - DNA, 479 bp, Zea Mays
aggcaggtccatttcgaggtacctttgaatccaagtgatgcagagataagagccatgctggatatgttggctgaagattcctctgatgtagcccctgctgaaacactggctgtagcacccatcccagaggctggtaaagctttggatattcagaggtctgatagtgttcgcccgaagcgtcctcgccaagccaatcaaccaacttctcctgctgaggggaagaaaaagaaaaagagacgtcttcgccgagtgtcatgtttggatcaggatgctggtccttctgctcctgctgctgatgaagtgccagtgccagtttttgctgaagctgatcccaatgggtgtgacccgactgatgctgatcccaatgggtgtgacctagatgatgctaaacccaatgggtgttatccggccaaagctgaccccaatggttgtaccatccacattgttgatgaagatgaggaagaggaggacgaaatccc

SEQ ID NO: 85127 - DNA, 501 bp, Zea Mays
ataaattcaatattatttctcaaagaataaaaggactgactaaattccgtagtgccatatttatggtttacaaatcttgcccccccctaaatagaatctcaacctcgagattacgccaaactaggaaaaatggggaaattctactcgcaattcatcttcttgctcccaagtggcttcatcttctacatgatgactccactgcaccttgcacatcttgatcactttgttcctggtgactcgggttagagtattgataatcttgataagatacttcgtataggtcagatcaccctgcatactaagttcttccattgggagttactcttccaatactcgaagacacttattcaactaggatacatgaaacacatcatgcacaattctagttggttggccaattgtctaactcggtttaggtttttgaagggtccaataaagcgagagaacaacttccatttgacattaaatcttctcatactctgaattggtgacactttcaag

SEQ ID NO: 85128 - DNA, 1292 bp, Zea Mays
taagctgcgacactactttgacgaccacaaagtcatagtagtcaccagattcccaataggagatatactccacaataaggaagctgttggaagaacaaccaaataggcatgtgaactcggagctcatgatatagaattcagacctcgaactgcaataaagactcaagcactggtcgattcatgttagaatggactgagcactaggtcccagaaaacccagaagctgctgaggtctagaaaatgtactttgatggctcattaagattgcagggggcaggagcagggatccttttcattgccactggaggtgaccaactcaagtatgcgcttcagctcttgattccagcatccaacaatgtcgtggagtacgaggccctggttcacgggttgaacatcgccatttcactaggcatcaaaaggttaatggtatacgacgacttgctggtagtcatcagccaggtaaacaaggactaggactgctcaaccgactcaatgaacagatactgcgctgcagtacgaaagctggaagacaaattcgagggtttggaatttcaccacgtggaaagggaccgcaatgcagcagcagatgcactgtcaaaattggggtccagtcgggcccaagttccacctgggattttcgtccaagaggtacagcaaccgagcatcaccacagagcaagctaaggagtgctatgctttataccaagcagaagcagatcccaatgactagagggagccaatcatcaagtacataaaaaacgaagaagaaccagatgacaaggccatggctgaacgcatcgcaagacagtcggcccactataccatcataggtggtctaatgtataggagaggtgcaggagaagtcctcatgaagtgtgttcactcggctatagaaaggcagctgctggatgaaatccatgcgggacaatatggcgtacatgcagcatcaagaacattggtagggaaagctttcaggtccgggttctactagccaacaacaaagaatgatgcagcagagctggttcagaagtgcgaggcatgtcaactcctatcaaaatagcaacacttgcccgcccaacatctgcaaactattcctataacctggcccttcgcatgctgggggctggacatgattgggccattcaaaaaagctcaagggggatatactcacatactcgtcgctattgacaggttcacaaaatggatagagtacaaacccattgcctctttgacctcagcaaaagcagtggaattcattcaagaaataatgtttaggttcgggatacctaacaa

SEQ ID NO: 85129 - DNA, 587 bp, Zea Mays
ggactctgcagttttggatgatcctctgtctttgagctctttgcttctgtttcttttaccaaagtgacaatagctttgacagtcacaactggtattatctcggaagccaagagggtagcttcggcatattcaacaatctccatcttctctatagttggcactgcagcagtcttctataaagagtgtagcttcggcctatgagtcaaacccttagctctatttggcttcggcgcggcggaagaggacgtagttgtcattttcctttttgacccttgttttcgagcgggaaaacagtagtcaggataaataaattcaatcacatcaaaaactctatttagcctccttttgcctcgagcgctaaagacagtggtcatggcttcgtcctctgccttcgtataagccccaacagttcatcactagtcgtctcaacaacttcaagccaatcatcattcggctcgtcaaactaacttctatagcgataggtgtatctcagataaaccagaccaccttcgctggagccagcggcggtctccttcggcatctcccagtcattaacaagcggtcacaccttgtaagcaatatgctcc

SEQ ID NO: 85130 - DNA, 1456 bp, Zea Mays
cgcgaaggcgagagctaaagggcacttagcgcctcaagctggccctgttgaagaccctgcagcggcgtctgctccggcgcaggtggaagggacacgttagggttgttaggttttgggtttctttttgggatactgaaggtcggttgctgtgtaggttctgacgtccgggcctacgcaagcaacccccgatgatgttgatactaatattttgacggctgcgaatgcaacgccttttaatggaaatgtgtttgagggttctgaacctaggtcgtggtcctcagacggggaagattttgggagccctttttcgtgcattgaggagtcttctgaggaggatttagactattttgttgtgttggatttggccgcattggagtctccgcagcaacctgatgcgcgcgaagtgtctgccaccccggccagggcgacaatcgaagacacacgcgggcgaagggtggtgtcgaaacagagcattggtgggacgtcacgaagtggaagacatcgccggatgggtatggaccgatcccgtcttcgactagatcggggtaatcaacgcgatctactatcctcgacgtccggaatgtgtattggtgagggggacttgcggaatctgtttgagggcgaagagtttaggatgatgttgtttaatttctgggaggcgggtcttattccgaaggcggagcctatgtagcatttttgctggcctcgccctcgtgttgagatggtgagtgaaaacgttgtcctccccctcttcgcaatagagagtgagggcagcaaaatgtgatttgtattattgtgtgatgtggccgccaggccttgcgctttatgtatgtaacctacgatggcatattgcgtgctgcgcttattatgagattgcttcgatttgtaatcgtgtttgcatgacacttaggtaggatgagcacttcgcttcctgtgggtgatgtcacacacttgttatgctcgcccggctgcacccttaggtggcttttgctcggacctgtcttttagtaaagacttcgcaccctgtgggtaatgtcgtgcacttattgtgcatgtccggctgcacccttaggcggcttttgctcggacgtgtcctttagtaaagacttcgcaccctatgtgtgatgtcgtgcacttattgtgcatgtctggctacacccttaggcggcttttgctcggacgtgtcttttagtaaagacttcacaccctgtgggtgatgtcgtgcacttattgtgcatgtccggctgcacccttaggcggcttttgctcggacgtgtcttttagtaaagacttcgcaccctgtgggtgatgtcgcgcacttattgtgcatgcccggttgcacccttaggtggcttttgctcaaacgtgtcttttagtaaagacttcgcaccatgtgggtgatgtcgcgcacttattgtacatgcccggctgcacccttaggcagcttttgctcgaa

SEQ ID NO: 85131 - DNA, 541 bp, Zea Mays
gtcgagcttgttttaaatctcgtgcccttttctgcgagatcactgaaccgcttcttctcgcaaatggcatgccgcttgcgtctgctactgctactactactccggctaccgtctacctttttgccttgcctcgtcgcaccgtactcggaatggtccacatgtcatctcctcactctctctctctctctcgcaactgcatctcccgcctgagccgcccatgacgtgtagattttagtaaccgcccgctcgacgctcctattcaagctgcaggcgcccactcgacctcccctcttccccaaactgtgccatgctcacgtcgcgtcatggtgggagacacctcgcccggcctcaccgtctccgaacgagccacacccagcgatgacgtctcttcccacgcccatgctctgccattcaatatactggtgagtactctcctcccttcttccctacgaaatctgtacaatgcccatgaccagcacgcccttgcccagctggcgcggcagcccgctccctctgacctccggcgagatgagcacgtcca

SEQ ID NO: 85132 - DNA, 599 bp, Zea Mays
tgaggaagaacgtgcgggccgaggaatggtcgaattcacaaccattgtcgcactaaactgccttgatggaggagccgaactgcgtgcgcacatacgagaataaattagtgagagtagtagaggtgtcggattttagccgtaaaggagaagtccagcagaagtgagtgcaatcatcaagaataataagataatatttgtatccagaaacactgaccactggagatgtccaaagatcacagtgtattaaatcaaaagggcgagatgcacgggaatttgacacactaaaagggagtcgcacatggcggcctagctgacacgcatgacaaacgtgagtgtcatcacgcttattacatgaaatggcatgataactaatgagtttggataaagcctcgtgaccgatgtgaccgagacgacgatgccaaagtgtggcggaggacgcaacagcagtgagagcggtggtgctggtgggtgttggcgagaagaacgggtaaagatctcccatgctattgcacctggcgatcacgctccgtgtctgaaggtccttgacagaaaggccaaaaggatcaaactcgatagaacatttgttatcagtggtaaac

SEQ ID NO: 85133 - DNA, 446 bp, Zea Mays
gacccgatacatataatttacatattttaaataactacttgcaataattaaaccaaaaacatttgtttcaataaatatgattactatcacatacaatgtagacacttgcatgaaaccaatattgaatgggatttctctagtgaagtgattgtttgacaaatcccaaaaatattgaaaggccagcaattctctacaagtgaggtattgatcagcgttattcaaaaggaatagatgtacatacaagacatgaaagctcgtacagttccctatggtttctggtattgtacccatcaagctcgacgcctcttcacatcactgagataagtataaacaatctgaattcaataaagggcataacttgctccgcaaatataaactaagggaggcacttcacgcacaagcaccactaataagaattgagagttcatgagactaataaaaaggca

SEQ ID NO: 85134 - DNA, 628 bp, Zea Mays
aagaaatactgagtactgagctgcgaaagctacgaatctaaaaccaaaaatgtacaacaataatgacaggagaaataataacaagagaacaaatgaaagaaaaactcgtttttttcatcgccataaggaatggaattggttccagacttaaagctatcaatttccagctttgcataataacaatttcagcgcgtgactgaagaagtaacacattgtatttttctgtttccaatcaatgaacaaatgcacttacatcaggtaacaaaggaaaatttgttgaactttaaactacgaaaatgttatccccgttcgtttataggtggtaccagtatttatttattccaaccatgggagcatgggacaaactgatgcccttcctagcccatgcctgtgaaggatccagataactttgcctagtatccaggtgcccacaaatggtgttgtcgatatttcagacgaacgcagagttggagatttccacagcaaaactaaggaatgaatatagatgagttaaacgaattgccactagactggtgcttaaggtgaaataatatttacctctttgcgggctaggtggcatgcctcgtactgtcgctgcctcgcgctggtctgttgtctcccggccact

SEQ ID NO: 85135 - DNA, 290 bp, Zea Mays
atatggttaaagagatggaagaaaacgttcaatgaaccatacataacttgaaagaagcagaagctcgacaaaagagttatgcagacaaacaacgccaacccttgtacttccaggtcaaagattatgtgtatctgaaagtatcaccaatgaagggtgtatctcgtttcagggtaaaagcgaagcttgcacctcggtacattagtccattccccattcttgaacaatgtggaccaatatcataccgactctaattacccaaaacattgtctgcagtgcataatgtcttccat

SEQ ID NO: 85136 - DNA, 647 bp, Zea Mays
aaagaatgccacttccgggaaggatgctgctccagctgctcccagcgagcccgtgctgaagaggaaaaaggtgaaggtccttactcaccggccgtgatatattgaaccggccgaagtgcccgaatttggtggcgagacctcttcggctactgaagctgaagaatttgcccccacacagaggaatgaagaaccggctacaatgccgaaggcatcaccagccaaatcaggtgagccaaaggccattaatactgaagaggcagaggtcgaaaagacaaaaatattagaagttataagcccttcgacagagatgacagtgccgaaggcgcaaaaggatcttacaacgaccccaaatggaaaaggatggtcaacgtactagatgtactggaaaaaataaagacttcaagctctactccagggaaaacagccgaagcttcaaaaacgcgaattgaaacaaaacagactgaagctgaagctgcacaaagtcatgccgagaccgaagccgggccttcagagcccgccaaggagaaatccttggaaatcggagaagaaaaagcggaaaaggaatttgcagaacaaattctgtctgaaaaaactgccattcctattcctgaagcatcttccgaagctcttgattatattgtacgaca

SEQ ID NO: 85137 - DNA, 413 bp, Zea Mays
cagcaactcgaatcatgagcggactcatccaacggccaaggacatggacacacacgacatggggcatgacaaccactgcccacgcccacgcaagcacgttaatgggctaactcattactgagcttttaggatgggcctgtgaaaggccttttaggctgcaacgtcctctaaattccgttctctttaggggaggtcacttgtaaccgttttccttcctaggttataaagggggaggatcggtccagacagagggggacacagagaacaacactcgacgacttagcctggtagcgaacgaccgatatgtagatctctagaaccaacatcgctaagggacttggaatccttccctctctcacccgctcgtaacccctactacgagcaattaactacaaggtgctagtagcacgagc

SEQ ID NO: 85138 - DNA, 691 bp, Zea Mays
ggcagggacgtgagacatggggctggcactggaaatatactctggatccaagaagagaagcaagaacaaaaccaagaaccctaaacaccctagatacaacataagcagaaggaattgaagaagaatattggtgagaacaacatcgactactagtgagaacagggtggcggtggctgacggacgtgcgttcgtggggaaatctcccacgccatcggggttgggttcatttcccgggtcgaggcgataggtttttgtcgggatgtatcgggctcaaaaccctgtgtgggctaaccgaacacaacttttgttccaggctaggattaaatccaagcaaggttgttccacgtggatccgtccacgaccccggcagggaatgggctaaacgaacaagccctacaggaggacgcaaggcactaggcaccgcacgtttgaagtgtacgagtgtgtgtggggggtttattgtagactcggcccacgcgcaagtttgactgttctcctagctcgaaggcgaatctatggtgtagttgtttgattatggagacataatgacatgagtgaaatctctattatctttattgattgaatgtcttctttatatagatacaaaagagtgtatggaagaggcaagtccaaaaggttccttcaaggggtcaaatccaaagggtgtcttgaagggatgagatcatttctc

SEQ ID NO: 85139 - DNA, 659 bp, Zea Mays
atcgactaaggttgattctgtacttacacatgcatcatgctaagaattatgctaataacattttcccccttaaaaagatgccgccacgcacaaggctaacggcacgcaagtcaacgggaccgattggagtgcctcggcatcaactggctccccgacatgaaagcagtagcagtggaagtaatcaccccatcggagatcttgaagctcgagtgagtcgacttcaagcggcgcttcaacacaggaccgatgcttgggtcgccgacggagatagaatcaatgaactaagaagggacatccgtcacctgcaggatcagcttgctgatcgagacttagcacttgactgggcagtacagtctcgtttgctagcatgcgctaaggaagcaagggctcaggcccgaattaaagaacttagctcaactgtcgacaacctgcaggtctactgcaatacgttgcatgaggaagtccatgtgctatactcacaattacaccctagtgtgcctgcacaccctgctgaggcagaagccggaccctctcacgttgcgggacgcgcgctgggtggggagttagacctttttgagccccctccttctttgaggttggttgacgtctggactcccacacctgacgatgaggccgccaagagtaatggaaagcaggat

SEQ ID NO: 85140 - DNA, 420 bp, Zea Mays
cacagagacacctcttaagttgagacacatggaatgcattatgcacatcagatagattatcaggtagctcgagttgataggccatctctccaacttgcctaaaaactctgaatggtccaataaagtgaggaggcaatttgcccttaactttgaatctcctcattccacgaagtggtgacaccttgaggtacacatgatttctttcctcaaattccagtggtcttcttctattatcagcatagctcctttgcctggtctgagctaccctcgaattctcgcgaattatatggacttgttcttctgcctcttgaatcaattcaggcccaaagaattgtctttccccagtctgatcccaatacaaaggagtcctgcacttcctcccatataaagcttcaaaaggtgacattttcagactggcct

SEQ ID NO: 85141 - DNA, 499 bp, Zea Mays
gaagttagagaggctattggtttgtactctaaccactttgtaaacttgtcgatagcgacgagtacgtgagtataccctccttgagcttttttgaacggtctgatcatatccagcccccagcacgcgatgagccaagttataaggatattttgcagatgctaggcaggtgtgtgttgttgctttgataggaactgacatgcttcgcatttctaaaccaggtctgccgcatcctttttgctgttggccaataaaaactagacctgaaggctttccctaccaatgtttttgatgttgcatgtatgctgcattaccctgtgtggatttcatccagtagctgccttcttgtagccgagtgaataaacttcatgagaatccctattgcacctcttctgtatagtggaccccctatgatggtacagtgggtcgactgagttgcgatgcattctgcagctgtcttgttgtccgattcttcctcatttttatgtacctgataattggc

SEQ ID NO: 85142 - DNA, 444 bp, Zea Mays
atgtggtgatgaatccacctttcctaagcactgcatgctgttgatggttgttgacctctggcgtcctgagatctgcatgctcctctgccctcattaaaatcttacaataagccgatgcctatttccctctttcccccgtggagtaatttctgcctgagtctaagacccggtgttccctaccctacttcaattttgtgcaaggcgatgaaatcacttaagattttgtgaaccagctggtttgcaggcatgtattgtctatggacgtttgagaaatctgtcagtttttttgtgtgggatgggagaaagtttgagatgcttgtttgcctttcctcatatggagaaccatgtaaacgcgagaaatctgagctgcatacaagtttgtgggaacaaatatggatgggccaaatgcccaaacatcatgtttctgtgatcattccaaattga

SEQ ID NO: 85143 - DNA, 434 bp, Zea Mays
gtcaacacattcaaataacattttttcgaagaagaggtttgaaggagctaaaattcttttaatccccttctactaaacaaacatagaaaatatatatttcttcaccgttagataattgtttttttttctctgaactagcatatagctcgtgcaaacactacaatctcaaagatgagagagatcgacggcagcggcgtgagtgaggggatgggcagcatggtcgtgtgggaggctggcgacagagtcacgaggaagggagagagatgaagaatgatccaaataattttgtccattagatttgtataaggaatgagctatttagcaatctgaactgtcggtttttacggtatgttgaatctaggtgtaatttgttcggtggatttagtataggttaagtatgttgaagtgatttggtttggtgagttttgtaaaat

SEQ ID NO: 85144 - DNA, 1142 bp, Zea Mays
gggaaacaatatacactaaggaaatatatatatatatatgaataaatatatcatttcaggctagtactttaatttaagcacttgatccctgtgtgaaacccataaacaaatttgaattcaaattatgaatttgagtgggaaaaacaaaacaggaataaaaaaggaattcctagcgcttgggccggatccaactcactcggtccactaaaccgcgttactgcacgccccacttccctttatcctgcctcggccacgcatggctcctctctaggcactgactcgcgggcccgcttgcctatttcactgtcaagtgggtccaggacaccatattcatcttccactcgagctacgtaacagaacaatgagatcgccactgggggtcggcacgtaccctgatctccaaccaaatcgcgagatcctcggttcccatgcattcctcgggctatataagggcgtggtcacaacctcctccactcatccatgggtggcgtcgaccgagtgcatcagggcgaccagtgcaatcgtgtggattgggggtttgactgcactcaggtaggccgcgcatcgcatcatcgggtgggattgtgatcggagggcatgacaattcctcaccgtgatggatacaccaccatcgggccgccatccatcgtcaacagagcatggcgcagcattattcaaggtgagagcctctccaattgcatcgtgtagaagctcgcaaattgggcgtttgggtatcccggccagtgcgccaccgtgctatggccgtgggcgtcgccgcgcttcggtagtgcggtgaggaatggggaagaagggagcatgggcgtgcgatgtgaaaccaacggttgggattagagttgaggtgtaccgcttcgatgttcaatcatagccattgatggacgtattcactgtggggattagatcatgccatagtatatgtgggttgtggatcctagatctaacggcccacgttgcataccggttcagtagagacagcttttaatccgtgccgtcgggatctggtcgaacggctgtgatcggttgacacccgttcgctgattttattttgcttttgagcctcggatgaattagctaatcaaccctccatccctctctggtcgaatacaattacgattagatccttg

SEQ ID NO: 85145 - DNA, 294 bp, Zea Mays
ggaggaggctgattagggtagacatttgtatatatatcgaatcgaagagaatagtacgtggtctgggccaaagcccattacatgagtactacacagaaaacaaactaacagtactgtttgcacataagtatgcagtttaggaaaccaacctgtatcagtggtatgactagaaaacaaagaattgctggatattgtttcaagagaatggtaaaattactattttgttctcagcattggcagggattgaacccacaccacacagctgctttcaaatggctcacgcaaagtaattat

SEQ ID NO: 85146 - DNA, 511 bp, Zea Mays
tgatcttcgtttgccagcacattggttcgtagttgaagtcctacggaggtttgaggttcaaattcatcaattgacactgaatgctatggcggcactggtgaagtatgtgtgggatgtgtcgtcatatggtggggaactatctattgaagtcttcatgaaaaattactatctacactgtcaaaaaaggaagataggtggaatgatttctcagtttgggccctgcacctttacgccgaggactggaaagacctcggctggtattatcgagattgttccgtgtgtgaaaaataagtggggtaactggtgggagttatggttttatgtggcgccaggcaacgtcaaagggttgcccagtttgccccctgccatcttgtactcgcattgttatgtggcgtttccacagtttaaggtggcgaagggggatcaagacgaggaggcccttcgctatgcagcccgtctaagcagtggacatgacttggtggaagagttcatcgcctgtggagtgtggccc

SEQ ID NO: 85147 - DNA, 695 bp, Zea Mays
cggtgacgtggtagatggacagagacacacggcgggctacggcgaaggtttgacgatggtgagaaccttatccacgggcggtgagcaaaggggaagggattacggctggccggagtggcttctaggtcaccggcggcgaggatccccttaccccacgatgctatcaatccgccccgagcgtgaatcttgacgccggcgacacgaatcacggtggggagtcaccggcggtgggatttttctggcgctggcgatcagatccacaatagtcactgtaccatggcgatggtcattctgatgaactgacagagcaagtttaggtcacattttctcttaatttcaaatggcaactcatccagtgacctgcagtaatgttgtagtggtacaatccagctataacattgctacaatgtgctcccacaaaaagtcactggatcttgcttaaaattaagccctaagttcatgtcatcccactgttaatctgaaattcagactgaatcagcctgacagcctgacttcaggcttaattatctccaatattttcttaacaactatgctcacactcttaagcaaagttattctcctttgttaggtctacaagtttgatgtggtgacctagggcaaattcttactgatttggaagttaataagctccaaagttgagcttacaacactgaaattcagacttaacatgaaat

SEQ ID NO: 85148 - DNA, 586 bp, Zea Mays
gcagaaaccagctaaggtgattctagaatcgaataagccagatttggtagcttagataagaacacattttattgaagggtttttgacccgtaaggccttatttggttatgagtggatttaagggtattgtaaaatactaaatccctttgtgatatcctagccccgtaaggtgattccagacatcgtgccacaggaggatggtcctaccatcaccaacctagggcatagaatgacccctgtaatagaccaatgttataacgtctttccaccagaatgaaactttcacctgagaagcgtgagggatccgacctaggcataatatgagttcagacaagatcaacccaggggatgtcatgcctaccgtagaatttatgtagaaacttatgaaatagagttatgttctggatcttcaagttgagaacaccaagaccacctttgttcttcgaacgagttaccttgtcccatgcaataagagagtttcgataatcagattcattgttttctctccaaagacaatcccttccgatgcggtcaatgatattgatcacgacaatcagcagcttaagggtgcacatagcgaaaaata

SEQ ID NO: 85149 - DNA, 647 bp, Zea Mays
ttgcatgtgaacttcatcaaacctctgtacaaaagttgtagagctatagttaatcttcaactttgccacaatgcttaccatcaaatagtcactgaatcccattccaaatcgagctcaaagttcaccccatcacactgctactgaaaattcagtccagggattgcgtgacagcctgactttgagctgaattatctccaaatttctcacaagaacatggcttgcactcttaagcaaacttgttatccattaataggtctataagtttgatgtggtgccccagggccaaaaccctatattttgaaagatacagggctccaaagttgagccctcaacactgaatttcagacttagaatagaacttagttgaggtccattttgcaattaagtccaaaatccaatatttggcttacaagtccacacatttgtgaaccaaatgacttaagatacttatttaacttggtttttgcactttagtccaaaagtggactaattttgcacataagcccctaggttttagttttagggttttccagggtttcaattagggtttctggtatcccaggggtctaagtgtaattccacttaagtcttgggatcattttatgactattcccctaaagcctttaggttttctcaacttgggttat

SEQ ID NO: 85150 - DNA, 445 bp, Zea Mays
ccaaacccctttgattttccatgcccggtattcttggcttccactgccagtgttgtactaacaaccctactgtaggtaagatccagacatgttgctattttccgttgaagtctgtcattaagtcccctcataaagcaattcttttttcttcagatctgtgtttacttggtcaatggcatactaggatagatggttgaatttgttgagatactgcattacagtatctccccttgctttaaccggatgaactcttgtttcatatgaagcactccctctggaacataatgttctcagaatgctagcttgaattcctcctaggtgatctgatgtccagccggttgaactgctacaaaatttgcccaccaagtactggcaggccctcttagctgttgtgcagcaaacagtggcttctgtatctctgtgcagcgaatcagcccaaacttct

SEQ ID NO: 85151 - DNA, 639 bp, Zea Mays
aggcgaaggcgtgggcggcggagatgcgcgagctggcctacgacatggaggacagcatcgatctcttcacccaccacgtcgaccacgaaccggccgacaccgccaccaccggcgtcaagaggttcttcctccggatcatccggaagcttaagaaactccactaccgccacaggtttgctcaggagatcaaacaactccacgaccttgccaacgaatcgtaccggcgtaggaagaggtacaggattgaggagggcggttcaagcctcccgcacgcggagatcgatcctcggttagaggcgctctacgtggaggtggagaaactcgtgggcatccagggcccaagccaggagatcattggacagctcgtcggcgagaacgcagcggagcggcggagggttgtcgccgttgttggatctggaggttcaggcaagaccacacttgccaaacaggtgtacgagaaaatcaggtgccaattctcttgtgcagcctttgtgtccgtgtcgcaaaagcccaacatgaatagcctcctgtgggagttgttatctcaaatcgggaaccatggtggagatttaggaatgatggcagtaggatattgcagtgacaaacaactgatcgacagactaagatcacatcttgaaa

SEQ ID NO: 85152 - DNA, 645 bp, Zea Mays
agtctactgaacccaatcaggaccaaccagggatctctctcccaatgtctcccagcacagaggggagatacactgcctgccatataaagcctcaaatggtgccatcttgatgctagcctggtagttgttgttataagcaaactctgccaatgcaagatgatcctcccagctacccttccatgacagaacacaagcacgcaacatatcttccaaggtttggatcgttcgctccgactaaccatcagtatgagggtggaaagcgacactaagtgaaagcttggtacccaatgcactgtgaagactctcccagaatttcgatacaaatttggtggagtctcgatcagaaacaatggacttaggcaccccatggagcctgattacttccttcatatacaagggaaccaattctgaagctgaatttgtggtcttcatgggaataaagtgcgcagacttagtcaagcggtccactaccacccatatagcatccctgccctaaggagaacgaggtaagcccaccacaaaatccatggtgatatgctcccacttccactctggaatttccaatggcttcagcaaacctgcaggcctcttatgctcggccttcacgcgctgacatacttcacaggcggccacgtacttagaaac

SEQ ID NO: 85153 - DNA, 571 bp, Zea Mays
ccctgatcattcaatcaacgattcagcagaaaataaccatccaaacttgttcaaatttttgcacaacattcacaatgagtagcactagcaattccaccaatcaaatttgtgaatccattgcttaattctagatcagagagaaaatccgaagaatccccaaatttgatgaaatccatgagattatgaaataccagtatgaagacatgattgtcgaacttctcacaagcttccggacagtccatgcgcaacttcacttcaccgttcgctcacaatcgacaaaagtgacctttaggcgtgtggagagtgtgagaggagaggcaacggatgaaagtgacaagttgactgcctctgcccgatttaactgcctgtcgcggacggtccgcgtaggggcagcggatggtccgtgccctagtaactcagactgtctgctctgctgactcggactgtccagatcctgatacggcggacggtccacggcttgatactcaaatcttcaaactttgtccactttctgattttgaatttcaaatctgatttgatgctcatatatggacatttcaaccaatccaag

SEQ ID NO: 85154 - DNA, 272 bp, Zea Mays
cttatctatctatttaagcaatgttcctctgctgtttctatgtcccaattaatagttgatcatttgggtaagattaatgctattggaaccctatttgagataaatagaagataatggactttaataaaagttggagcacctaagtttatggatttaagcacctaagtttaaggacttaaaaccatgtaatgatttaaccccaccactgacttagacctggttagtggataatgaataactttgtgtagtcctctaccctagacctagggaac

SEQ ID NO: 85155 - DNA, 769 bp, Zea Mays
gtgcgaatgacacgtgatgacaagacacaagagaaagacgcgacaacatggctatgctcatgggggtagataagggtggacatagggtagacggacgtcatcggagttttgacgacgtgctgcgagtaagcgagcatgagtgaacgctgcgaggatgtggtttgggctgttgtacacgtgcggtttggcaaacacgacatggcaaatgacgagggtgaggcgtgatgagttgtgttgcatggactctacgggcagggttgtgcataaggcacgaccacgagctaaggcacaacaactaggctcagcgtagagagatggcgaggtgcatgtggcatggtcaaaggctgacacatgacatagagttgtgggcacgcatgcgctagatggggtcgagatgggggtagacgaacaatgggagtgggttgtagggatgtcgacgaggtcgggctaggagactcagccacactggccacagcctaacatgaaggggcatcgggtgcgtggggcacgctggcctggggctagggcagcggccccgagcgcatccgagcgagctaggccacgcgcgttgttgggtggtggggtaggacttggcggggcgctgggctagcacagcggcataggtgggcctggtcatctgagcatgccgggaaggggaaggaggagtgtctggccgagaggaggcgaaggggtgcgggctgactgaccgagaagtaggtagagagggttggtttctctttccccttttttatttccttttatattcctt

SEQ ID NO: 85156 - DNA, 346 bp, Zea Mays
aatttatttgcgaatggatggagtatgaaaatttcctgttttccgtgtttgcttgtagaaataaattgattcacgtgaaactcctgtatattttttgtcaaattcctggccgtccacacactttggtgcctgaaatgattttttaaaggagtcatcgattttcagatgaggaacgaacgatcgacagcagtacagcacccccacgttctccacgacatgtatgatgtatcagccgggacagggttgtctcatcaccgtgcatcatgcactagacagtgagcatgctgtgtgtgctggtgtgtagatgtaaagtgccaaattgccaatacaaagctggttgttggcg

SEQ ID NO: 85157 - DNA, 446 bp, Zea Mays
ctggggcagcccaaggtgaggtacttggtctgatgtagtctttctctaacaactcatcaatctgcttcttaagttccaccaattctggtccggacactcgataggctctcttggaaataggggttgtgccaggtataagctctatggcaaattcaacttttctttcaggtggcatgcctagtaaatcctctagaaacacatccgggaattctgatactactgtgatagcttctgatggctcgatttcctcaatatgggtggtgatatggtgatagcttcctttccttggtccagataagaccaactccactaacacttcctctcctgataaggacactaacttaacagtcctctcgtcacagctaaggcttgctcgatatttggttagccaattcatccctaggatgacatctttggttacatctcgggtacccattactatccgg

SEQ ID NO: 85158 - DNA, 509 bp, Zea Mays
atcaatatgaatttaatgcaactagaatggattaatccggagttaaaaccatcaagttatgagtattttatggatcagttcggagttaaaaccatcaattcggagttaaactaagaatcgaattctgtatttattttataattcctgaaggactcatggactgtggccactatattggtaaaggttagggtcagttttataaattttaggacctgttagtgatgatcttataactactcaggagcgtgggttaattcaggcggaatccgaggactcaaatgcaaaatgtagctagtaaaggggtactggccaaatctggtcatccagattagatctcacagctagggttatgtctccccatacgacgatttggtacgcatccagggtcatcggatcctgatccaatggtccaatagatcccgaaccctcatgagctcccatccctccgattgaagatctacggtcacaacttgccttggccgaaatgttacgcccgatttaatcaccgc

SEQ ID NO: 85159 - DNA, 443 bp, Zea Mays
ttccaaccggtcggccatttagtgcgatagctgaccaccggtgtcttcatgtcttttcgataagcaaagttgtagcagccgaagttctcacgcagcccgtcttccctagccttcgtctgatagtgaagttcatgcactcggcagaaggcttcggcgagtggctccaccccttgacttcggagggcccagatgtaaacattgcgcctaacaatggcgttaggggtcagctgatgaaggtaaatctcaaaattttccaacacatctccaatcatcccgtgcaagggaaatctcagccctgctttgaagaatctcttaaagaccaccacttcatcattttctggtttcgggatagtttcttccccaccaaagcgaatcaaccccttgtcggcttctctgaagtagcctagcttcgtcatcatagccatatcagcttcagacacagt

SEQ ID NO: 85160 - DNA, 336 bp, Zea Mays
aagcagacggacagattcatgttcagtatggtgtcgtggaaccagaagaccgacgcataaattcatgtcatatttggtagtagagctctacccgctctagatttatcaaaatcctatttgcatgcagcttgtgcgtcaagtcaactactactacaattaggagtagtactatacagatatgcatacgcatcttcttaaacttactatgttactatctctaaatcaaattaaacatgcatgaaatgtacctaaatcgtaacaactgcggccgccggcgtcacgcgcaattaatgaggcgagcttatttgttttgggggggaaatgcatggtcgtccc

SEQ ID NO: 85161 - DNA, 640 bp, Zea Mays
atttcattttacaggctcaatatcactttctctcagtcagtcaagtcgagcaacacacaagaacctcctgtcccatcgttttgctttcagcgatactgttggtccgcgagtcggtgtccgcggtacgcgaggtgttgcttcaggattgctgttcatgcaacacggccggtgcccagcccatacgcgtgccttgtcttgtcgtatgggtatgacgttccggaggttcacttcacatctggcgtgtgacgtccataaggactgccgttctagatctgatttgaatgatggcatgcctatccagctcccatgaatgtcctcacgcagtcacgctctccggcgcttcgctcaaaaaaaaaaaaagttacacaaaaactctaaatccatcaaatccatattatataggaatgttggtccaagtgaaattaccttgccaccaataaaagatgtttgtcgcagtgaagaggagaaaattgagatggaggagataaaactgacgccgtattatataggaatacaaaggttgacgtcgagatctatgacgccaaggtcgcgacatagaccttggcgtctatcccctaccacataggcgccacgccaccaccacgtcctcgaccgcatccgagacctaggcgtcaatagc

SEQ ID NO: 85162 - DNA, 467 bp, Zea Mays
cttagcgtcatgcggatggtccgaccaccactactagacagttcgggctccttgtcctaattgtccaggagcaaccaaagacgcccgcaatcatgacccaacaccttcaagccacaacgaatcaaaataggtacgtggaaacaagacatagattaggtacatggttagctggttaaagccaaccttacttttgatcaacttatttctatgtatgtcaacaataaggctactctgagggattcgccaatgaaaagacctctttcaccaacattggatagacaaacaaaaggaacatgaccgactaaaaccgcccaagaggttgtccagctagttccacacatgccactaacaccatggagaataccacttgtttatccacctcatccatatccaccgcctacaaatccactatacacattcacaccaccatcatatccacctatatacctctccacatatacacccgc

SEQ ID NO: 85163 - DNA, 1195 bp, Zea Mays
ccctaacaaactgaacaactactaatggatccattagcagaactaaccaaaattgggtgacccaatctctgcaccgaaagaccagcccgcgacacaaaatcctctgaaacaaacgaatagctagcgccagagtaaaaaagagcatgggccacaaacgaatcaactgaaatcgtacctgtcaccacgtctccttgctctctgccatccacagcgggtagcacataagctccggaaatacccgcagaagaggaagctcccggagtgaaattaacagaagaaccccactgagccgctgggtgaggtagacgcggagctccaaactaagatggcataggagtagtcggtgcaggagtaggcgcagctagatactgaggaaaaccctgcaccggcacgaactgagaagtcccaagcacataaaactgctgcggaggaagtggaactgaaaattgctgctcagctcttgacatcatgttgacagtgccctgagaagaggaggaagtcactggctcccatctgagcttcccattgggattcctcctacacaccacatccttgtggtcttgactgcagattgaacacctgccgttccactagcactctacacggcgatgcgcatcaccacaacggaatcacaccagccccagcctgggcttaggaacagcccgaaacctctgagtacttcctcccgaagcacccgagttagacgatttcccacggtagggatggtggcgctgatgctgagacttgcccctcttgtgggctggacctccagtgttgcccctcctcgcgtcctggccacgatgctgatcaacacccgatgacttctgcgactccatggtatactggtgttgcatctccacacccagtgctagctccactgtagtacggaagtccaccaatggaaaggctcccagggcatgcctgatggaaggtttcaggccctgacggaactggctcgccttctccatctcattataagccacatgagggacaaagcagaccatcttgttgaagcccacttcatactctgtggtagacttcttctcctgcttgtaggactgcaaatcaatcttcattttctccaggaaggtgaccgggtagaatctcctttcaaactgcctgatgaagacatcccaagacaggactcctggtgaggaggagtgcgctgcctgcacgcctctccaccaattttgag

SEQ ID NO: 85164 - DNA, 313 bp, Zea Mays
ccactccaacaccgaaggatgatgaagtagtagtttttaaaagtttttttagagcaggattatggttcccgctgaacgagatgattggagaagttttggataattatgaaatctatcttcatcagctgacccctaacgctattgttaggctcagcatctttatctgggcccttcgaagccaaggaatggacccaaatgctgaagctttttgccgagtgcatgagctacattaccaaacaaaggccagagaagacgggctacatgaaaattttggctgttataacttcgcgtatcgcaaggatacgaaggctcc

SEQ ID NO: 85165 - DNA, 447 bp, Zea Mays
aaaaatgatgggggttctccctaggccttatatacacgaccgtggggcattccctacacacacgctgatcacactcttccggcttatctcctagcaaatagcgaactaacttagcttatcttaaggaaaacccgatggcttcatcccgatctatctccgatgtttgagggcattgggcgcgggaaagacgaacgactcccttaagattacacataattcgcagacgatccaggcatgaggccattaccttcttgggtcggcccatttcaattgtagtctttgcccagcccacgatgagatgaccttgcggggcggctggtttgtggccccacgcaagggttttctccttctagtggacccgggggatgtctgtccaccacagttgcttgttggcatcctacattttcgttgtggtgagtccaaattaggtgattcacatgctaattg

SEQ ID NO: 85166 - DNA, 297 bp, Zea Mays
cttcgagggagtaactcttcttcaccgggctcacctaccctagcacctggtttgtccaccaacaccgtcagccacgcctcattgtcctgcaccgacgcccacaccttcggggtcgacgtcaacaactttggtccgcgatgaacatcacacgttgtttgccactccactatccaatgatgagggttgcatcgacgcctaccacgacgatgagcctctgcactaccgcactatggacaacatctcagtgagtagtatacccctagagtggtgcactacaacttagaggcggagctacac

SEQ ID NO: 85167 - DNA, 272 bp, Zea Mays
gtgatggtggtctggtccgactgaaatataccttcagatttagggagaagtttgatgagccaaacgacgattggctgaagtgtattgaagctaccagcgatgagttgcttggagcttactccaaggccgaagataatgctttgtccatagccttcggaggtcagaggaagaaaagactgaacagagtttttgatgcgatcggcttcatataccccgattaccgctacccactgcgaggacaggagaaaaagaggaagattgctgcttcggtc

SEQ ID NO: 85168 - DNA, 400 bp, Zea Mays
attctaggatatatggagaataacatgacgaagtgtgaaaaacttgctttgtctgattttgatgtgcctcagcttcagcaattttcttttgcttttgaattgtcacttgacacgttcttgttgtgtgtactttatcttccccacagaaaagacaaaatagccttcatggctgagaattaaaccttccaccaaagcttctccctcctctgccacctcttggggctggtggtctaaagatgttttgtgatggttgttgttgagtactagagacttgtgattgactctgttgaccttgagcttgattgtccttatcttctgcctaaggttggttgtgtacacttctaatatgccttgggtgaaaacacccttcgaagcccctagtcatctctgcatctttgtg

SEQ ID NO: 85169 - DNA, 296 bp, Zea Mays
cggttatgcctaaggaaattccttctgtaggaaccaaaggggcaaagattgaggatgctttcgatttgatagctcaaaatgttgttcccttgaggccgcttttagaaagtgaggaggatgaggaaaagcggatagctccagtaatgagctctttctttgatattgacgacatggagtttgagtaaaagatattgctggtacaatccttgcagcaaaggatgttacactactcgttatggctgtgaccataccaagaggtctggatgttgatccagcggctacagtcgtgacacctt

SEQ ID NO: 85170 - DNA, 401 bp, Zea Mays
aagtttctgtaattatttttatactaaaaaccattttctatattactttacctaatttattaaatccctggattgcacgcataaattctggaaagtctagggttgaattcataaaatccaggacatagttgcaattactttctaattgttgtggatggcgggttgattcatacaaattcggacgactcttttgcaaaagatcatggcgaaggggtatcgttaagtcccggccgctcgatcaagcacgagcggcgcggattagttccaaacttcattgaactggtacacgatcgtgatcgtaggatcaaagatcgatagtcatgatttgagatacccaagacctaatcctacgcgttctctgcaagatatacgagataaatttctccaccgtaacgctatcc

SEQ ID NO: 85171 - DNA, 560 bp, Zea Mays
gcaaacaacaacagccattaggaattatatgtggaatgagcccactgataataccttcatctttggctctgtgaaccatacaagcaagaccatcagcagcaatattaaatagcaaaggggagaaggggtcaccctgtctaacccctttatgggtggtaaaatagggacccactctgtcattagtcttgatggccactttaccacccctaacagttctcataacccaatcacaccatttgtcaccaaagccttttttcatcatcatatgatgaagaaagttccaatttaccttgtcatatgctttctcaaaatcaaccttaaagattatcccactctgcttctttttttcacctcatgaataatctcatgaagagaaaccactccatccatgatatatttacccttgataaaaccatactgaaaatcactgatcactttattgatacagctggccaatctgttggtcaaaactttagtaataatcttgtaacacacattaagtaaacaaataggtctgaaagctttaatgtcaatagcattaggaactttgggaataagag

SEQ ID NO: 85172 - DNA, 522 bp, Zea Mays
acctagatttgcgccaacagttacaatagtcgtcgcaacatgaagaaaaataggggtcattcatgttctacctaacctccatacctattacatctaaatcaactatgatctctcactctgcttgtacagggatgaaaaatgatgttatggacgggctaaggggcatggtgaaccgacagatatgggggtacgaactaacacatcggtacactgaccatctcggggctgaaaatcacagctacaggcagcactaaactaccaactctgacataggccttccgatgggcccagtgatgaatgttggtacggatcactgcatccgcatgaaccacacgcaaccccttcgatcaagagaagtcagcgaggtcatggctaaggggaacggacgacgagggctaaggacataagtagagtgtagcacgaccatccttcccgtagacatcatctacccttcttcttcaacgattgtaatcgacccctcccttggaatataaaagggagggggctcgggctctgattccc

SEQ ID NO: 85173 - DNA, 495 bp, Zea Mays
accaggggtcgttcgatctgtttttaacgcccgagattagatccacaaagttgtgaaccggaatccaatgtcagcggtaagatcttgatcaaacgctcgagattaaaggatcccgcgatatgatctcggccaatagatccgagatcaacggctatgcttttcgatcacgatggggtatttgagattcaatcgtgaacgctcatcaccggatcgatggctagggccagttctcccccgcacgatccagttcacgccggaatggggctgcgacatcctgccctgcaccggcgagcggtggctgctgcgaggctatggatgagatgagtttttgattgatggcttgagatgttatgatgatatgtatttatataggctagaaggtgggcggttacatgatagatctaatctagtacttatctattacacccatatcctatatattaggaactctaacaaactcgaacccaaatctgttacatgatagatgtaatctag

SEQ ID NO: 85174 - DNA, 527 bp, Zea Mays
ggagtcttcagatgaggacttggattattttgcggcgttggatgtggctgcagcggtgccttcgccgcgcgcggagggttccaaggaactcccgggcgcgagtactgggtataggcggcggagggcgatggcgaagcggagagtgagtgaattgtcgcgaagtggtaggcgttattgtagcgagttggagagaggtcgtcttcgcgtggatgggactgggaagcgagaaatgttgtcctcgccgattggggtgagtgtaggtgagggggagctgcgaaatctgttcgagggtgaggaactgaggataatgttgttcaactacaggagatgggtatcatcccgaaggttgagccaatgtaatatgtgatgccctcgctgtgtgtatgtaaccataattttgtgtgatgaagctgcgcgctttcgttgatcaggtcgctcctgtaggtgacttctgtacagagtcttttggaaaagacttcgattttgcgtacctattattccggctgcacccgtaggcgacttttgcg

SEQ ID NO: 85175 - DNA, 1080 bp, Zea Mays
cttttacagaatccaatgtcttttccatcaacacaggagagctgcactcatttcattaaaaacaaatagtaacaactaacaaaatgtacaaaaacagtaacacgcacatgctacacacttgaaaccagtctaccatctagagcattggatatttggatacaaagataaaggagacaaccataaggcatgtacacaccccagagaaggccccagaggccatgagccccagctgtgtatcatagggctccatcctttctactctctgctgtcaattggaatgaagaaaatccaaggcatactgtgccttcttttctatactgtgctttaagttcaatgcattgtggttccagatgacaaggaaacaaaattattcaaaacttacacttagcattctagaattcagttcatgcatatatcagtgaaagactgaaatacagttttcggccatgctcctgctccttcttgaatcatgcaggagagctgtgtcattgtattaaggtagagaaaaaagagcaaaacaggccaagaacagaggctggatccaagtataaaaacccactcgctgcctcaaaactccaaccagatagccttcacccttctgctagttaagtttcagatgttagcgatattagtactatcgtgaattgtaagcaattagttgtagctgtcatccgaatgctcttgcagctccaagtttatggcttcattatgtcattttctactggagtttcatgagtttaattttcctttgtagaaaatggaccaggaaattggcccacttttagaccaaagttgcttgtatgacagaacctatttctgtagaaacagtcagacaaaagttttgtgctgcggcaagtgctgccagctgttgacctgactgaagagcccccctcttttatttgtatggcgaagtttgattaaggccgtttccagcacctttcctatctatcccctatcccacctcttatttcaaactttattctataaacagtgttgtctacagtataaaatattattttgcacggccatatacacgatttaatgaagacaacctaataaagttattcaagtgggctttga

SEQ ID NO: 85176 - DNA, 947 bp, Zea Mays
ggactctgaatcgacatactattcctaccatataaacttctgcgctattttggatgttattatgggcactgcccatggctctgtccatttgatgaagtattctaccacgacgaaggcatactttagattgccctaggccatggggatggggcgacaatgtctagcccccatcattgaaggggccatgaatgggcaattaacttaatcgtttgacatgcctcacaggatcgcgcgacgtggagggcgattgtcatgatgtcgggctagtagaatccttggcacatgacctttgctgcaagggccctggggcctgtatgacaaccacataaccctttgtgtactttaagtaggggttgtgtgccttcattttcagtaatgcacttgagtaggggctagctgatgccttttatgtatagctgatcgttgattattgtgaagcctctactccgatatttgagtctgtttgcctcagatttgtctgtcgagtgtagtggcactgtatgtagagcattatcggtgatctccattctccggtcatgatgaagtttactactttggggttgaggtctaggtgtctaatggctggcttgtccattatctggtagaaaacgtcggagggtaattgttctcccctggcttccgccttcactagtgctttggcctcatcatttttgtttctattgatgtgctgaagggtgaaatctcaaaactatttttcaagactttgcacagctgagaggtatagcaagaggatgggctattttgcgatgcaatcattttctatcttgtcagctactatcttggaatccatcttaacaatgcatgtcttgactccttgggccctgaacttgaggaggcctaggatcatagcatcgtactctgctatgttgtttgtgcatcaatcggtgtcaagggaaaagctgaggcgagctgcatatctatatttg

SEQ ID NO: 85177 - DNA, 365 bp, Zea Mays
ggcgacaattcactcatcggtctagggaccccccgggtttcgaaacaccgacagtaagtgaccggctgtgttaactatacctgactccaaggcatagtagaggcaccggtcctcctcccacacatgaactacgagccccttgggctgcagcgcaccatgacctacgaacccctcggactgcggcttatttatggccaacgtgtcccccctcctgcagtgcactcatgtcctatcagggtttggcctgagtgcattggccacctgtagccacaacgagacaagccgcaccgagacctaggctacgaatgccaggagtcggtgtagctcgaataatggcacgtgggcccatgttgcctttatcatcc

SEQ ID NO: 85178 - DNA, 1165 bp, Zea Mays
attttctaagacacagaccgccctacgcagtggactgcgggttgattgggtaaatacgcgagggttcttttgcaaagtggcgcgaccgaggggattcatttgatccaaaccgtccgatccgaaatcaagtacccagattagatctagctggccacgaaccagtacgcgatgcaagtcctcggatcggagatctgtggccatgatttaaagtactattcacggctacgatgcgcctacacgggatccgacggcacggatccattttggcgaaagggtatgcgatcgaataaatctaaccgtgtgatgcacatccaacagccacgaacagttgccccgatcccccctatcggacgttggcacagtcacactgccacggcggtgccatcgccggcgaccggccaatcgacaagctagtggccccacacaccggtacgagtgatgcagaatgaagctagggacctaaggaagctagtagggtcatcataccgaagtattgtgcgatgcagagagtcaatccacgacgcacagtggctctgcggcggatggagaagtacggtgagcaattactcgcgtcacggtggtgtccaacttgaattagaggcgcagacagctttcccaggcaaagacgatcctctcgacctaacaccgagggtagacgacacgatgtgatgagattcacctgcggcggctcgcgcccttctcttctcacagtggtggcgagtacggcggtgtctactgctgtgcacaaggcgaacagagaggagaagaccgcaactggggcctccgtatatctaccggggaaaaagatagggtctaagctaatcgcgaggatcacagtggcagttgcgtcaaccatgcgcgagtggaggtcgaggaagtagccgacagcaaggccccacccatcagtgagaatgagaggtaggtgtggtaccggctgacaggtcggttcccgcgtgacagtgaccatatgtgcgcagaacggtggagtccaccagtcagtgaaaagcaaggtgcgcgacgcggtggtgtgactgaccagtgggtccccactagcagcgccacaccataggttgggctacacgggcgcgaaccctaatgggccaaattgggcagaggcggcccggttaccgtttttccctttttcttttgtattttctttcccttt

SEQ ID NO: 85179 - DNA, 342 bp, Zea Mays
taatctcagtcgttgcgcaagagatcaacgatccgatttactcagcactgcccatctaatccagaccgcccaagcaaaatcggacggaggaacacacacccaccctaccccgactaacacaccggcggtgcgaaacctagcgcggcggcgccatggccgagattctccctctaacctacggtgcacgatttaggtattacaaatcctaccccccttaaaaaataatctcgtcctcgagatttaggacgatctagggaaaaggtggggaaaatctatgcgaagctcttcttctctttcccatgttgcttcatcttcgccatggtgactccattgcactttgca

SEQ ID NO: 85180 - DNA, 1008 bp, Zea Mays
gaagggggaacaaagcgagctcgcatctcctcttttaacgcattccatgtttgtggtgcaacacgtgtgttaacaagttcattccaccaaatgatagcaaaatctctaaattcactagtggcttgtctaaccctatgctgctcaggaacaagatgagaattaaatttttgttctaccgtcatctcccagtctaagtaagcttcaacatcataagaacccatgaacggtggaatagagaacttaatcttagcaaatggatcatagtctagttgaggattatgatgacgacgtctaccattaccttccataccttgtcgattacgtgtgaggcgttgtggcagcggtgcataaacatcgtcgtcatcgtcgtcgtcgtccacaggagagtgagatggggctagagttgatagtgggggacgagcctccagtacgtccatacgtgtagcaagttcatcaactcgtcgatcaagctgctcataggatgtcgccgcagagtcctggtactttttaaaagcttcagtcatcgcgcgcatcatctccttcaattccagctgagagacacactcatcgtcgttaagcttaggccccttgtccttgtccatttgattctttggtcctgtcattgttagcagaaaacagagacaaaaggcaacaaacaatatgaaccctacaactatctcccagggtgggtgtggaggtggaatacaaattatggagcgtcttaccccgctcttacaacgttcttaccagcactgcaggtggcaaacggtgaccggtgtgaccatccaacgagcgtgggtgtgattgcaaaggagtacctgttctgctcgagagaaagctggagttttgggaaggctgactaaatatatatatgtggcacacaagtcagtaacagatagcaatgctgaataagtgttccaagtactcgtcctagttgctggcctagaaaatgtaatagaacagttggaccaaggcacaagaaaggaggtacaagtatctagtagaaat

SEQ ID NO: 85181 - DNA, 429 bp, Zea Mays
acagatttaaaacacgaaagatatgaatatctagcgaactagataacttgacgctattttattggctggattccgaccacacatagggccatacgttggtggccacagaaaatcctgggaactgttgtgtggccactttccacattatggttgcatgctacaggagacatcgcatgccaaaaaaatgccacgcatgcggggtagccagtttcctatttcttcccacgcccatcacgcaagatgaggacatcagcaacatgcaggtggacccctacgacagttctacattttggctgaatatcgcatgcagatccttctctctaatgcacttgcgcacgaccgttttcttctcatctccttcttcccaattgcacagcagggcttcttcttcttcgatctatagcaagtgggggttgatgggcgccaggc

SEQ ID NO: 85182 - DNA, 787 bp, Zea Mays
cagattttggacagttcgaaaggcagagcagactttctgcgctttctagggcgcggatcgtccagcacccccatgcggaccgtccatgagtggactttttatcaaccaaaggtaggtcatagccgtcacaattgttttattcccatgatgtctctgtcagtttgtcgtttgtgtgtttgtagattcggattcaagcacgtagtgtccgggacaattcttgaagctcatcaccactgtcttcctctcggtattcaattttttccatgcaatttgttcaaatattgtggattttagggtttctacaaattggtctctgatctgtttgtggacaggtttttcacaaaattgattggtggaattggttatggtcatccacatgaactcagtgcaaaaatttggtttcatttcaatggatattctatcgcaatcttgtgtttgaatatttggggcaaattggggtttgaaatttgtccctggacagtcatggaccgtatgccagggtggcgcggaccgtccggctgtggtgcccggactgtccggccccctagcgcggaccgtccgcactctggcagatcaacctatgcatcttgcacatgattttcaagttattatcttatgattattgggattcattatattctatttcagcagttttggtggtctgaagaagctagcatgccgttttttgtctaagcatcgtcgtgcggatgaaacagattataaccctgccaccgattcagaggcccaatcattagctgggggcagtgtctctttggatactaaagat

SEQ ID NO: 85183 - DNA, 634 bp, Zea Mays
aaatcctagacactagatatttgcatttaatttttttaatgggaaaatatcttccctcccatcgctcgacatatctctttctctcttatcctcgccagccgtcatcctcatccgtctctaggattttttccactgccgcgccgtaggctggcttcttccccagccgctcactctccctccgattttttccgccgccgtactcctaattcgagctcagccttattccagaccaccgctccttcttccttatcctctccacacctccctcaggttttttatccgtggaccacagctgctctctctggagattttctagtcgcccaggccatcgatcttatatccccactgccctgctctcttctagttacttcacgtacatatctccatcgatgctccctctcgcctcactcagtgccgctagccgccctggatacccatcgtgcatcgtgctcggcctcccctgcgacgtgctcacgttctaggttgtcttctacctcgcctctgttggtctgctcgccattaaccccgccctctgccgcatgctcctccccggcttctcctgcgtcgcgccctggagttctccatcgtgtcgcttctccagctcggttccatggttgctgtgcgcggacccttc

SEQ ID NO: 85184 - DNA, 689 bp, Zea Mays
aataggagttggcacctttgaagatttcagaacagcatccaaaacactgaccattctcttccctttcctaggagttattgctcagtagttgttaacttcagcaaccccgtcgtggttgggggactctacagtttcagatgctatgtttcttttaccggagcgacaatggccatgacagtcacaacaggtattatctcggaaaccaagagggtagctttggcacattcaacaacctccatcttctctatagttggcactgtagcagtcttctctaaagagtgtagcttcggcctacgagtcaaaaccttagctctttttggcttcgacgtggtggaagaagtcgtagttgcgatcttcctctttgctccttgtttctgagcgggaaagctgtaatcaggataaataaatccaatcacatcaaaaaccctatttagtctccttttgcctcgggcatcgagggcagtgttcatggctttgtcctctgcctttgtataagcccccagcagttcatcactggtcgcctcaacggcttcaagccagtcatcattcggctcgtcaaactgacttctgtaacgataggtgtatctcagttaaaccaggacaccttcactggagccagcagcagtctccttcgacatctcccagtcattaacaagcggccataccttataagcaatgtgctcctgaac

SEQ ID NO: 85185 - DNA, 451 bp, Zea Mays
gatttttatggggtacaacggaagtatagtattgtcactcgagttgaagttaaattcccgattgaaccacgttatcgtgacaggcaacattacattttgtctgacatcaatgtaagacaacccctctctaggtatcatttacataactatatataatgttcgtaccacaatctattttgtgctgaaatcaaattagggagccaagatcgaggccattgcaaatcggtatgagatagtcaaatacttcaacagtttgctccatgaaaagcatgtctacaagatgcacaatgtatggtttggtcttaatccgggtgcatttaattttcgacacctaaatggtaccatggagttgtatttcacccaccaaactgtcgtagagccatacgctgtcccagttcaaatgccgccatttccaaaacatatattattgaaccttgatgatattgccgag

SEQ ID NO: 85186 - DNA, 1082 bp, Zea Mays
ggtatagtagtcaccctgagttacgcaagagcatgtcataccgtcttaagtcgttgtcgacttaagtaaattgctccgttagtagggtatagtggtcaccttgagttaagtaagcgtgagcatatcacaccgccttaagtcgtcgccgacttaagtcgattgctctgttagtagggtatagtggtcaccctgagttatgcgtgagcatgttacaccgccttaagtcatcgccgacttaagtcgattgctccgttagtagggtatagtggtcagcctgagtcaagtgagcgtgagcatgtcacaccgtcttaagtcgtcgccgacttaagtcgattgctccgttagtagggtatagtgatcaccctgagttatgcgtgagcatgttacaccgtcttaagtcgtcgccgacttaagtcgattgctccgttagtagggtatagtggtcaccctgagttaagtaagcatgcaggttgacagtaaacaatttgagcgcctttgagaacgaagtctttttattgatgatatattttccagtttacagaatacaaggccgtcccaatagcttttgaaatatagctaggggtaaaacttcctaagatattctatattccatgagttcccaatttccgtgctgtccatttgagtaagacgatatgatccaggccgagtgacttctgctactatgaatggcccttcccatagtggcaacaatcagtgacgtccctccctcgttagaattcggcggaggacgaggtctcccactgcgaaggatcgatgccatatggccttgtcatgatagcgcctcagagtttgctgataccgggctgactgaatcaccgtatttaatcgttcttcttctagtatatcaacatcctccagtctagtagcctcagcctctgctatgttttcaaagattaacctcggtgccccaaacttgagatcagcgagcagcactacctccgaaccatagtccatgaagaaaggagtgtttccatgcagagctcggctaggttgagttctcaggctccaaacaacatacgacagctctctgatccactttcctgtgaacttttcattcttgt

SEQ ID NO: 85187 - DNA, 2080 bp, Zea Mays
gtgaaacaagcacaatagcaattccttgtccttcattgcaaaccgatccatcaaaatataaagtccagggagtaacagtgaggtatgatatgtctagtttatgagtatcatcaatccgattttatataataaaatctgctacgacctagcattttcatagatttcaatggttcataggccaagtcatattctatgagtgcataaacccatttaccaattctatcactcataatcgggttttgcaacatgtatttgatcacatcggtttgaccggcaacggtgcaatgactagacagtaaataacatctacacttggtgcatgcataaaacagacataagcataacttctcaataaaagtgtacctcgtttcagcatcaaccagcctccgacttaagtaggttaccacatgctcctttccttcggtctcttgcatcagaacaactccaataaccttatcttcagctgcaatgtataatctgaacggtactcctacctgcgacacttttaacacgagagccgaagacaaatactttctgatgagatcaaacacttcctgctgttctgcccacaggtgaattcggcatcatttttaagtcgaaggttaggagtgaaggcatcaatcttcccggctagattagaaataaacctccgtaaataatttatcttgccaagtaacttctgcacttcaagcttacaggtcagagatcccacattccgaatggatttaattcggtcagggtctatctctataccatgttcatgaatgatgaatcctaagaacttaccagccgacactccaaaagcacatttatgtgggttcatttttagaccataccgacgcattttattaaaggctttgcgtaaatcagctatatgagaactatactcagccgatttgactacaatatcatcaatgtagacttccacagtgttattcaacagctcgtaaaagatcaaattcatagacctctgataagtagcaccagcatttttcagactaaatgtaatgacaacccactcaaataaaccaatgaagcttggacatataaaggccgttttagacgcatcttcttcggccatgaaaatctgattatatccggcattactgtcaagaaaactaataattctatttcctggcgcattattgatcaacgtgtcggctatgggcatgggatattcatctttagaagttgctttattcaaattacgaaatcaatgcatactctgagcctacttgattctttcttctccaccagcacaatattggagacccactctgtgtatctgtaaggtctaataaattagcttctagcagccgatgaatttcgtcctttattcgtggtagtaggtctggacgaaatgttctagctttctgcttaaaaggtctgaaaccggacttaataggcagccgatgctctactatctctcggcttaatcctgacatctcagtgtaattccatgtaaagcaatcagaatattcttttcaatagaccgatcatttcatctttaggatcggtctttagggttttgtttacaaatgtcggcctttaagttttaccatctcctatatcgatctcctctaaaggatcgaccgatgtaaacccctgtcctaatttgtcgagatctctgaattcctctattatgtctcctacagaggaattagatgatctctgtgtgacggcagattgtccggtctcgagggccggaccgttcgtgacactggttttatgctgcggtggctgttcggccttaaaagctgaactattctgtgaaagaccggaccgtccggccttagaggtcggaccatccgtgaccagggacatgttcattatgtgtgtactcatcatttaaactttatttaggatttagccgattctctatcggctctagcattataggaatgaaaccttttttatctatacttataaactgataattagaaaagtctactcctgtgagacacatagcagtctcataggtccaaagtacaggggcatcggccatggcaatacaggccgatgcatcagcatgtatttgttctacatcatcgcctacccattgtaataacatctgatataa

SEQ ID NO: 85188 - DNA, 606 bp, Zea Mays
ccagggtgctacttgtggacaagcactcatcatcaacctgaaccacaagtaacaagtcaaccttgtgttcgcaatccccgccttgatgagtgcattgtcgacaccaccacatgaacatatataagcataaaaaggaagaacaagataaacttactcgaacaaccaaaaaccagaaaagggcaaacaagtcatccaaggcaatcaaaaacttggtccgcaaagaaatgggcaatggttcaacacgaccaagcaaaaaatagctagtcctcaagaacaggcaaaagtagggctccacaccactagccaacagacaaagccagatccgagcaccaaataagcacaaaagctgaaatcaaagctagttcctctagaaagatgcaaatggctcaacaactagcaaaagctccaaaatctagagtctctcaccctgagaatctctcccctcgtgaaagcactctcccaaagcaaaaaatctccccccttgttaggaggtcgaaaatgtcaaaacctctcccccttgctgacaaatggactcatcatgcacaaacaagggtagaaacaaaaactcccccttgacaagagaactctccctgagaaaatatagaa

SEQ ID NO: 85189 - DNA, 395 bp, Zea Mays
caaagatttaataatttacgtatcttccctcttgcgtatttgctacaaaaccatcaggattatctatatagatttctttctcaaagcctccatttagaaaagtattattaacatccatttgattaatgagaagaccatgggaggcagccatgggaagtttcacatgtgtgatcgtcaagtgggcaacttatgagtaagtatcaaaataatcttcactttctttgtagatatgacacttgaccacaagcctcgccttgtacttgtcaatagtatcatcacgactagtctttttcttaaacacccattttacattccacaggttttcacccataacgacgatcaactaccttccaagttctattagacataattgaatccatctaactctagacatc

SEQ ID NO: 85190 - DNA, 834 bp, Zea Mays
agagttatccacggcggtgaagatcttttaccccgcgacgctatccatccaccctgggcacgaatcacgacgtcggcagcatgaatcacggcggagggagtcgtcggcggtgaggacaatcgtgctggcgatctcatctgtttcagttactgtaccatcgagaactgattcagagcgcctgatagagcactttggagctccattttctcccagattcatatggcaacatgatcaacactctgcagcaaaattgtagagcaatataccatctacagcattgctatattgtgctgccacaaaaagccaatggatcttgcttgaaattaaacttgaagttcatgtcattccactgtcagtctgatttcagactttaagtagtctgacaacctgactttgggcttaattatctctaaattattcttaacaactgaggtcacacccttgagcaaaattgttctcctttgtttgctctacaactttgatgttgtgccctagggcaaaaaccctataatttgaaagttacaaggctccaaagttgagcccaaaactctgaaattcagacttaggctatatagtgcttaagaggtgatttttgcaaatagacccaaaacttagggtttaacttgaaaattcacatatttgtgaaccaaaggacttaatatgctttaacattgtagtttttacactttagtccaaatgtgcacagtttttgcacataggcccctagggtttggattttggattttcccatggttccaatgggggtttttggtatctcaggattataaatatgattcaagttcattcttgggaacattttatgactattcccct

SEQ ID NO: 85191 - DNA, 923 bp, Zea Mays
gaactgcccgggagcctcagcttcatggataaagccaacgcgtcgttctttccttttccccgcttccccaatacgtacggtagacactagtacccgagagagagcgagggccaagtgctgggtggggtgctggtgttgacctcgcccacggctggcgttcgggagtctgtggtgtgccgcggtgcttcgggtgcttgccggtggatcacccgttgacggattgggggcaaatcaatccagtggaggccggaattcgtcatcgcgattcgcgcccattgatccgtcgtgggaagtctagcgccaattcgacctccgcgttcggtgagctctcgattctttaccctcgccgtattcccttacctagctaatgtcgcgccatagttaattgtgggcgaattgggcacgaatttggcctttgtgcggggaatgtcgttcgggcgccgcccatatcgtggtcgggggtgttcggctgcgtggcggtcggcgaaatcattcccctgtgttctccttgagttccgtttatggcaagactagtttgatttgggtttggggccgcgaacctcgtcggccatatggcgcggccgtgggcattccctgccagagggtgctcggctcaccgggagagcgaaagaaaggagaaagcaccagagccgttgatctcaggatgaacggcccagggtcagataggatttggaccgtgggatggttgttgtgcggcttagatcaaacggtagtatacctccttcgtgcattagatcgtgaccatcgatttcgtgatcaacgatcctcggcgcgtaccggttcattaaagactagattcaatccaggccagtgaatcctgatcgtgcggcccacagtgcacgataccccttcggtcgtccaaatttacaaaataaaccccgggcttgttataaattaacccg

SEQ ID NO: 85192 - DNA, 459 bp, Zea Mays
ctgatgcacttgcgcctctgcctcaagcgctctgctttgcttccttccgggagaatatgcgctagaggcagcactagtagggcaggccacggctaccagcctaccactaccactacctgtgctacacgtctgggctggtgctggaccggactgtcagctgccgcccgtcgtctcgtgatctcgtcgtcttcgtctattccttctcctagctacagtcctgcggcctctgcttcctgactacgaaatacgatgcgctgccgaagtactctgtccgagtttcactctagttttcgcgaccactctggccgaatcttccatcagagcgtgatggaccgctcctcactaatacacgcgattgtagtgctaatcattgaacttgaagcggccattcctgcctatgattaggtcatcaacactccatcatcactctagttttcccaacctctcgtttctcccgcc

SEQ ID NO: 85193 - DNA, 1007 bp, Zea Mays
gttggatctttcagcaagggtgcagattaaattctctccttaagtgaaacgatgcacactcccgagtgtcgatcttgaaatctactgttcagattttgaagactcgcaatccaaccgaatccacatgatctacacctgacggtccccattcactcaagctaaccggtatcggcttttaatcgtggccgtaggctggaaaatccatggttggccccaattccgcacatgtggtgaccgagcgcggcagagcagaaatcccgcgacggcgccacccatggcacatcgccggagtggcccacccaagctaccctgatgccccaaatctaaaacgaataggctgtaaatacttcggggaagacggcgaacccatgtgcgtacctcactcccaccacagcgatgcagaaccatcaggccatagtggagggcggtcggtggcaagttttgaacgccgatgagcaattaccccccatctgagcacgaatccaccccaagcaaagcctcgaatgtgttgcgcatggcatggcgaggcatataggcccgattccgatgactcgtcgtcgccatgtgcttgaatcaaccgcggcggcacccttctttggttcttggttcctctctcttttcccgggtgaacgacgacattggctggcttatattgcccagtggcggagaccggatgccgggtgattgggagggttgttacgggtctgatcgagattcctggaatcccagttggcatgccggtggaggtgctttgttacgatccgcccgtgatttgtagaaagtgccactcattgactcacccaggctattttcaacagcccgaatcaaagttcaaaaaatggaaagtgatctaaatgaatttttgtttagctgaaattttgcacacaccatcacaagagagtttcaatggcacccacaaaattttagctaaaaaagatttaaacttcaaagtgagatgaaaaatacaaaattgaattgaggtttttctcaaaatggctcaagggatt

SEQ ID NO: 85194 - DNA, 461 bp, Zea Mays
cgttctgatgtaagctacccagttccaatattttggaaaaggtggcccggggcctggatggaggaatggttttatgttaagaacaatctgattgaaagggaggacataaaagggattatccaacgtcctatatggtctcgcttcggcctccgaaggcctgctactgcacttaggaatgataccaaagcatgccagaaggccttcaataatatttgtgccttcattggtacaagagacctggttcaagagcacatagcctacagggtaggaccacttgaagataactgggagatgcaaaggagactgctgccgggtccagtcaaggtggtttgatttacttgaaatacacctttagatacagagaccagtttgacgaaccaaatgacgactggctgaaatgtgttgaggcgactagtgatgagttacttggagcgtacacaagagccgaagatgatgccttg

SEQ ID NO: 85195 - DNA, 507 bp, Zea Mays
ctcgttcctagcccagcaagccaaaccacgttctctctcattctatattaccttatgacatatgggcccacgttgtcaggagctttcttcaccaaatcgtttcgtttgcagccaacgcactgctcgcttgtcctccacgccgctgggcaacataaccctcagatcgcctcctcgcatcccctaccctcacccgttcaattgcttcaagcactactgtgatgccgccccacgtctgttcttctcctctcgtcccactaaataggacgtttcttctcccctcattatctccattaacaagcagttttctccattaatgacgtttgaagtcttccttttctcaatccacatcaattcggcagcgattccctccatcctcgcctataaatcacgtccgccgagcccctttcactcggccctcatctgtgctctctctctcgcgcttgttgcttgctgcagcgtcgtgtcctactgtgccacttgccgttgccgagccacgccgtgccttgc

SEQ ID NO: 85196 - DNA, 1374 bp, Zea Mays
ttaattatccattttcattgttctctggaccgagcactaattacagagaaccctgagggcaaatccagaagttctccccagacatagagatcaccgcgcaggatggcgagttgattctttaaaactatacggtttctttaggaaataagccacgcgaaggggtatcctcggatctcatccatcggatcacagttgaacggcccagatcaccccagccattaagtgaaccggtatgcgatgaggtccataggatccacgttgaacgtacaagattttaacaaagccgattgactctcacacgttaaatttaaatcgagcggctcacaacgtttcatcgaaacggtacgttaaattggattccagtcgtaagatcaccgatccatggtcgaaagccccttacccttccttctaatcttacccgtacacggcctgatcaatggcccaacgcactcgagatccgtttcgtccaccgaccgcccaattatgatcctgcgtcttggaagtcgtcttctatccccagctacaggggcacagtggcattccccactacggcggcataatcgtcggtgaacctaaatctcgcccctggcgatctatcaaggtattgaacgagcaagaggaggtgacggcaaacgccagaaggtgtcttaccgaaagtttgaagcggcgatgagagctgaccacgacgcatggtgatcccgctgccgaggacgaacaacgacgagattctagcggcacaacacgaaatccacccaggcaaggctacgaccatatcccgagcgacatgatgaggcccatgggtccaatttcgaagacccgactttgccataggtccgaatcgaccgtggccgcaagctcctctccggcgaggaattcccgacgccccggtcgcaagcccagcccgcagaagccccaaacccaattggcttgtccaagcgaagcaccgcagggaccggtgaggacgaatccgaggctctaggtgcggcgcgacgacagctcctccaagcggcgttccaaagctccctttctctccctctggtacccacagggctccacgaaccggaaccgatatggccacggtagatggagaatgcggaggcgaccccgggcgacatttatagggtcagggaagtccaatatacccgaccggagcgagatacagggaggggaatccgcgcgacaaactcagcggtgggaggttgaaggaggtctgacaatgcgaccccacatggcagagaaatgagaggaggcgcgggagaatgacgaggtgggccccctcctgttgctgacgcggggttggcaaacaggctggcgtttgtctgttcgtccgggcccatgcagtagtggcgcgcgcagtgggtggatgacttgatg

SEQ ID NO: 85197 - DNA, 773 bp, Zea Mays
agcgagcgtatatatggggagatttctttctccttcgtacaaggagcgctagcactagtagaaaaaagatctatgcatacggtaagaggcggtaggaggttttggttatcgaacgtcagggaaacacggtaagctctatgccgcgacttgcgacatagatgggcaggcaaggcctcttgtactaacagttttattatatcgactgactgtggaaatcgatttctactggcggttctcaactaaccgtctatgcactggcattatttctacacgccttcagcaaaggcggttctgaaaaatggttgtaagaaggggttctggggagtcgttggaaacgtcctaatgagctatcgggatagacatagggcatgtttggttcagctttttctgaggagcttttttgagaattttgccgtaggaagaatctggctctggcgtgcagtaaggtgtagaaaataacggtgtcctactatcacaatgactcagtagattcggtgttcacgttaattttagacggttttgactaaagtgatttccatagaaataggctaaaaagataagtgtttaacagcctaaagcggttttttatctcggaaagctaaaaaaggctaaaacaaacagggccataggcttgcacctcacctagactcgcggagcaccatagcatgctcgaagagtttttattccatttcctctacagagcctgatttggcatggcagtagcggaactaggttttttatacagggtgtgccataataaatttttcatatac

SEQ ID NO: 85198 - DNA, 347 bp, Zea Mays
ggactagtggagagtgccgactcttcgatacctcgggaaaaattggaggagtcttctaaaccttgctttactttccgcacttaattcaagcactttacattgtgtatttgtttagcaagtatttgaagtattgttctagcattgttgtatttctagtattattatcttagtgctagttgttggggtgaagttgggctctttcttaggttttaattagtgttgatttttagaaaagcccaattcacccccccttgggcatcgtgatcctttcagctctctaagtaccatgtccagtgccatataaagtccaacaccagacatattggcgagtacaaagtgtatcggag

SEQ ID NO: 85199 - DNA, 292 bp, Zea Mays
atggtatgcacgttcagaagaacgtgtttgaaagcataattggcacattgctagacataaagggcaaaacaaaagaagggctcaattcacacatggacttggtaaatttaggcataaaaaagaactacatcctattcttcaagaaaatgggaagtaccatctcccagcagcaagctacagtcttaatgtagatgagaaacatgcgatgtgtgtttggctcaagaatttgaaagtcccatccgaattctgctctaccatacagagtatttgtcaatgaaagatctgacagtca

SEQ ID NO: 85200 - DNA, 296 bp, Zea Mays
atcttcttcagcacctgaatcttgcccacggaagggaccccatcaggaagaaaagatcctagggttgtcttgggtcagcaagtcatccaagaggcctcttaacaacgtggagatggtaagagatgaagatgggggatgagaaagactaatctagacaaaattattgctactcctagggcaagaaatttaaatgtaatgataatagattgatttagatcgattgtgttgttctgaaccggccagaccttttatatttataggggaggtttagactcgtttctagacactttccaata

SEQ ID NO: 85201 - DNA, 822 bp, Zea Mays
cgctatcagtcattcctgttctccttcctccgctcgctcgcaccagcgccggacctcgccgtgttgtgcttcccgcgccaagccactgtcggtcgattccttgcccgaagtggagcatgccaagacccccttccttttctctgcaattgccctcgatcctttcctccacccgatgcgaatttctttccccattcacgagcgctgtctatggtaggtggctggatcttcaatcatcggagatatccgttgttctagagtcgattcgccccagctttgtccctataagaaccacccaatcccccatcgtcgatcacacgcattgacaccctctcccgtgctctcctgccctctgctcatgctcaccatcgccgccgcaccgccattgctcgtggccaagtgcctttgaagcttctctacccacgctaaggctactgtggtggagcccaaagattgttgctgcttctccgcatcttccccgactcggtccagccctacagcatcgcttcgacctcactggagccccaccggccgtcgttcctcattgtcagccgtccccaccgcctcagccccccttggtaaggcctcagtcgcatttgcctttaccccttgctgctacctaagccatccccagtcaatctagcctcccggagctccgtatcgaccaactctagcgagtcgttggccgtgtgccaccgtgcgccatgcctcctctccctcccccgctcgttggcttgtggatctgttcgcgcgagctgagtcatgcattctggcctgtcggatctggattgtgcgcttagggtttaatgtagtttagttagccgg

SEQ ID NO: 85202 - DNA, 525 bp, Zea Mays
cgcctgggtccctaaaacacgggtgtgatagccgtcgatcttcctgggtgtggggcgattcttgctcaggctggtggactagaagcatcgtagggccgggcggaacttgtgcgtgtgtggggctaggtgcattgcccatttggagctcgtgaatcgctcaccggagttgtgacctcgccgcagatccgccttctcctagggctggtgttcctcgcaacctaatcctccggtatggcgccaccactagcttcaccattctagggccgttacatagcactgaattccgtaggcgatgctccgtcattgggcgcttgtgccgtcgtgctctagaggtgtttggtaggagacgagcttgagacagtaagatacgtgatggacgattgtgatatgatgcttagataacccttcgccgcacttgatccgggccgccgagatgggatcggacgtgatcaggacaagggtgatatctagccttggatctcagatccaacggtcaagatcccaccctggttcataatgtgtgcg

SEQ ID NO: 85203 - DNA, 330 bp, Zea Mays
aattaaaggacaaaagtttagaagagctcctttagtcatcatatttgacagttttaattaaaagggactaaattttattcactaaactttaggagatatgaccaaaacaggcttaataaggccacgataaccgtgggcctgcttttgctatagctgaggacattaacatacacttgttctatggtttcatacatgggcaaagcccaatactgtcaaaggtacgcaggcccaaaccacaacccactccctaacgctgttaagggcctaggcccatgtgaccatgtcataacgctcaacctcagcctgggagcccgatccagtccaacctca

SEQ ID NO: 85204 - DNA, 359 bp, Zea Mays
gtgggattatgcactcatagaatatgacttggcctatgaaccattgaaatctatgagaggccaggttgtagcagattttattatagaacatcggattaatgacactcataaactagacatgtcatacctcgctattactccatggactttatattttgatggatcggtttgcaatgaagggcaaggaattggcatcgtacttgtttcaccaagtgatgtctccttcgacttctctagccgattgaaaacttattgcactaacaatcaagccgaatatgaggcccttttgttcggcttggaacttttaaattgtatgggagtaaaacatgtgaaggcatttggtgattctcagctggtcg

SEQ ID NO: 85205 - DNA, 371 bp, Zea Mays
atttatttcattttggtctgttttgtatactgacatgtcaacgaacccgacgaaacaaaggcaagcacacgataatggactccgcacatgacattgatctgcagcgccagttgggaagaaaccgatccaccaaactctcatccgatgtgtgggggagtcaccgagtcagaatgaatagctcccaccattttggctcgcttgaaacaaggatttgtggatcgagagacggaacaatgttcgagtgatgattactaaatgtatgtacatgagacggtgatcaacacgggtaatttgatgatcgaaaacgcacattgcgacgagaagtggaggttacctggatcctgcccttgtgcgcgaagcgggacacggcg

SEQ ID NO: 85206 - DNA, 694 bp, Zea Mays
gcaaatgcatcccaagatttcttcattgatcccaccgaagagtatggatcccggttggtaaccacaagacatagcgaattcttttaactctgactcatcttcttcagaaagttcctagccacccagctgccgaaggtcaaaatctttctcttctgaaggggcacaattttctttccttgatcaggcactacgaccatgcttttctgcgcaaccacatctatcttctctgcaaccacatctgatataagtttgtcaatttctgacattgtggttgcgaattcttcagctttggctccaccagcatcttcagtgtcggcaggaatcgctgctctcaccatcgaagcttgaggcggcgtttgctcaatcacctgcgttaaattcacaatccgccgcttcatctgccctccaaccttctcctccgtggtcgaaggaatttccttcttctgtaaaaggttggtcagttccgatctcagaggacttatcaacttgaatggtggggattcagtcattaccttcaaaatttatgacacctcggcagtagaaggcaacaaagggctcaaggttttctccgacgcttcatctaccttcgattcggcagaagatatctcatcaagtttccttttcttaggggctcgtgccttcggctctggcgctgctttcactttctttagagccttttcgtctgccttcatgg

SEQ ID NO: 85207 - DNA, 715 bp, Zea Mays
ccgggattaatatcatatccacatttgacttattggtatttgatctattctcggggacgcctgcgaatatgatccatcagccttagtcaaagcatatgttcttattgcagattcacgtggtctgtaaataactctcctccgatgaactcgccctgctggtgatttgcctcacgaagaggttcatcttgacgatgaaattcctagcaatgcgcgctatatcattgtgctgggaatacggaacaatgaatctttcgttttgggaaatgacggagatcattattaaatgtgggagacaaatgtgtcgacacctatcttgcctctctagattgcaaagggatccaaaacaaagtcctaggcatgagtgctttaagctctcttatcgggtcattgataaatgcaatcgaggctgaaccaataaatcgcaaaatgaaagtcacgagcttgaagttcggacatttatgagcactattgaaatattgtgtggtgaatgcgatggttcaagtggtcttgtgagagacccatcccacatatgtgttgagtaaacacaattctgctatgtaatatatatggcaaatggcatgaattaaaatatgcagttaataggattctgaagatccgtcatgagatcctaggaggactcatatctttgaattataaatatgcaacatataaatctcgtaccgaataatacattcctggcgaatgaacactctcc

SEQ ID NO: 85208 - DNA, 709 bp, Zea Mays
ctatttttatctgatagttcataattcccagagtctagcaaaattggttttgacaatttttggatgattattcttcaagttatgcatttattaagttatctgccatattaaaagaaaaataattcgaaaatggaaaagaaaaacaggtttgcgctgaggcccctgggttttatctccctcttctctcacaaaacagtcctcggtctactattggcatgggtcactgacattgcacaaaaccccctggacctaaccgaaatctaacccgcgctccctggctgacgtaaacagtacccgcgacatagattacggcggcgaggcttaccggcggcagtagagctccggcggggtggtcagtgatgtccgggaggtcacgacggtcacgtcggtgtgcgggtcggcgtcggaggtggtcggagctaccctggccacgaacacaggcggaggggatcgtcggcggctcctgttccagccaacccacgacggtatagctcgattaaggtgcacgaggagctccacggggtgatgtagaggccatgcgcgcaacgaattggaaaatggtgccgaggcttacccggtccacgtgcgccagcgggtttttgaactccggcgagcacgattgcgctactccggtgacgcgggttctcggttcaagcttgggtaagcttcacggcctcaccaggaagcgatctgagagcttggattgaac

SEQ ID NO: 85209 - DNA, 474 bp, Zea Mays
ctttagtgttgatgtcgtccaactttgctccccttcttgaaattgaccctgtttttgtaaaacatacaaagaaggacaagtggaactggacgtgatatggttagctttaacatagccctctaattgatcatattgttttatgaaaaaaggagattccatatttgaacaaatatatactcgatgtaccatatattctcctttccaattatatcttccaataacatgatatgtatgtttagataaccatggcaaatcaacagtaaaagaaagtttctcctctaaattatttaatttacatagaacttcaaattcaatatagcccaaagtatctaaacaaggtaacaattttagctcatcatgcaaactagttacaggattgaatgttctaattttggcacaattaataggatcataagcaacaacatcaagtttgttctcaagttgtggcatataagtaatagaagaatcatcaca

SEQ ID NO: 85210 - DNA, 282 bp, Zea Mays
cggaagcatcacaataaacctcaaagggtttggtgttgtcaggttaagctaacacgggtgctgttgtcagatggtgtcttaatgcatgaaaggcctcttcacatttatgactccactcatacctcaatcctttcttcagcaactccatcattggcttggcaatcctagagaaatctggaataaatcgtcgataataccctgccaatcccagaaaactacggatctgctgtactgtggtaggaggcttccagttcatcacttcttgtactttctcagggtcaa

SEQ ID NO: 85211 - DNA, 821 bp, Zea Mays
agggtatagtggtcacctcgagttaagtaagcgtgagcatgtcgcactgtcttaagtcatcgccgacttaagccgattgctccattagtagggtatagtggtcaccccaagttgagcaagaatgcagattgaaaatgaacaattcttgaagtctttttattgatgacgtatctccgggtttacagaatacattgtcgccccaatagcttttgaaatatagctaaggataaaacttcctgagatgttctatgttccctgagttcccaacttctgtgccatccatctgtgtgagacgatatgatccaggccgagtgacttcagctactatgaatggtccttcccatagaggtgacaatttgtgtcgtccctcccccgttagaattcggcggaggacgagatctcccactgcgaaggatcgaggtcatatggccttatcgtgatagcgcctcagagtttgctgataccgtgctgattgaattaccgcgttcagtcgttcttcttcgagcacatcaacatccttcagcctagtagcctcagcttctgctatgttttcaaagatcaaccttggtgccccaaacttgagatcagtaggtagcactgcctccgaaccatagaccataaagaaaggagtgtttctatgcagggctcgactaggttgagttctcaggctccaaacaacgtacgacaattctctgatccactttcctgcgaacttttcatttttgtcgaaaactttctttctcagcgcctccaatatcatcctgttggctctttctacctgcccgttggctcttgggtgtgccaccaaggcatatttgatc

SEQ ID NO: 85212 - DNA, 1026 bp, Zea Mays
catcgtgccttcataccgcagtaaggggtacccctaatccagggtaccgacaaatacttttcatccgcgaccataaccatatgcatttagactacaacaagcaaatcatcgtgactacgagcttaaccaaaccatctaacaatttggctaactagcgcaacagcataggctgctatacatcctacacgtcggcttgcctattattatcgcaatctaagactacatatatctaacaatcacttaacgcaactaactcttacttaacaagagttggccaacacagtataaaacttagcaaactatttttgacatcgcaactcaaaaacataggttggaacatattaatcagtgtttcttaaccattgctcaacttgaattagttaacacacaagtcacctaaaataacacattttagggggtctaacatagaggtattaacacatggcataaaactccataagactacatttgctactgaaggacctaaagctctcgtgtgcatatcttgtcggtttgttcctcaattttaacaaggaccgacttatgaacgctactcacctctaataattattgggctgcgatcactctcatataagacctctaatcaatcaacaagatatttatttatccaatggaaatggaattgaatacttgaccaagcaaggcatcgatccgccatacaacagaaagcatgacgacaccgatagatgctatcaactaatcatttaaaaaaatactaaacttacttctctctttgccactacaccaccctttagtcacatgaccatcatgcacatccttcacacgattatataatagcaacctaaacgtcgtgttacacaatacatacatctttcctcgtcgcgagtataaccatattacgacatatacccgcacacctcaatcaaatatcttacgccaccaccactataatacaccatggcacacacgcacatacgtgtccccatattacgcacaagacatcaaccgcacaagtgactccaacaggattaatcatactcctca

SEQ ID NO: 85213 - DNA, 473 bp, Zea Mays
attgtttcagcgccatatgcagaaccgttgatgcatccaagtctaccgatccgaataaacaaaccggtcgcaaaacgaactggctcaactaacccgcacaaaggcagcacgtcgtggtgccgccctgcgccaagacaggggcgcgcgacatgtttaaggcaagttggcgcagtcccacgagaaatgatcagatgaattttactaatgtgccaaactagcgagagggggaaatctcgcgtctcggatcgccgtgcctccctcatgcctgcgcagctcgatggcagattggcagtggccctagctgcgctctccgcttgcaggtagcagctagcgcatcccagccagagagagagagagagtactagatagaatatagaatggatgcattagtcgtcgtcgtcgatcggcttatcataattgcgcgctgaattattggtagatcgtggcgctgctgcatgcctcgtgcttaacgg

SEQ ID NO: 85214 - DNA, 702 bp, Zea Mays
tgttaatatacgcccgtgaaggggtaatatcgcatctgagtcgcacgatctaaattctatggcctagattagatcgcctaataccgaaccggtaagcagccgtagccctcggatctgaatccgacggcgcccgattcatcccggttggattcgatcccacccgatccaacggtccagatgatgaatacccatagtccactctcatatgttcctctactgatctacggttgtgatgcatcctgacgcatcgcccccgatgacctaatcccgaccgctccctgcaatatcaacggcccacgcccgctcttcttcctccaccagacatgagggacacagcggcccgccccatgacggagatccccaccggtgcgcccccaaatccgcctgctccggcgacaacattcccacggtggcgcgcgaaattgaaattgaagtaagggcggttacaaggagggtgtctcaccaatggttggagcagcgaagtggcctgaccacggcgtgaagcggctccgcggcggtgagaggctcatgacgagaaattacagcaccgactgtccccaatcaagcctggaaagaccatacacacgaccagtgcgtctccccgaagcgcccaggccccgatccgaggcccgaacagcaacaccagcaaggtcccacggcggcgacagcttcttccttctctctagccctttctctctacgt

SEQ ID NO: 85215 - DNA, 460 bp, Zea Mays
tacgactttgactaccttctgtattcttcttggttgctatcgatattgttattcttcacttgtcagtcatcttgttggtggtggaccgaaatatacgtccaataatttggttaaattgacgacgatcagtattttgtctagccttggcggcccgggcccggccaggcagcgcggaggtgagagagagaggggaaaggaaaggagaaaagcgcacgcgcagccgcgagcgacatgacccttcccctccatctgctttcctcgagttccgtgcctagtcattgcctcacccctctcgtcctcggtcatggtgcgatcatgtcaccttgcttgccatcatcatgcatgctacacacagtagccccccacagccaaaaaaaaggcggtgcgtaccatccatccgtcatgtatacagctcggctcggaaaaatggatacagttatagtttgagccgagagttctg

SEQ ID NO: 85216 - DNA, 562 bp, Zea Mays
gtcgatgggctcttattttcgcatgatgcctggcgttgtggccctactagcgaatttccctggcgtggcaccctgcctgctggtgcgctgccgatgctttgtgtgccggggtttgggcagcaggcgggaggttgacgatggcacgtccgccgtcggatctggaaggagtgtgcgagattcatccaagtggggcgatgatcgttggccgttagatgacaatcgtagagccacaatcacgcaacaggtgtaccggttcgaggttgtgttctccccgtagatctgggatccttcgatacagattaggattggcggcattaaattgcgatctttggtttctgatctggcgggcaacatcgcccactgattcgattggggaaaaatctaatcttggcggccgatagctgatcgaacggctaggatggctgcataccccttcaccccagcgttttacataagaaaccctctggagttagataatgaacctgtcgtcgtgctcagtgtggctcagtgtcttgggaagaattaccccgaggcccctgcctttctctgttttagttcgcgc

SEQ ID NO: 85217 - DNA, 497 bp, Zea Mays
cagaagtctaggaaatccctctaagattacatctggtgtttctcctgacagtgcaacaagctatccagtcttactgatgccaacatcattaatgccttcatctctaggaccaccaatgagggcttggtcaacaatctaggacacaaaggcctccaaaccaccaaggaactcctcgatatcgccaccaaccatgcatctggagaagatgtcgtgggggtgatcttcgaccactccaagggcaaggccaagcgggatgatgacaccgacaaaggtgcctcaaaccagcgcgctggtcgctgccaccgatcccgaggagaagaaggtccctaggtagaaggggacgaccacttcgaggaaatgctcgaagcaccctgcccaaatcgttggtatgctatcaagtatgcatacaaagaggttcctaggcaaaaagagggtgcccaaataaggactccagggccaccagtggacggcgccgctgacaaggaggaccctccttc

SEQ ID NO: 85218 - DNA, 891 bp, Zea Mays
cgtaagaaataccagcgacccccgcgctatcgtaactactcctcgcgccgccgctgtccagcgtgggtcgagaaagggtcaagtacccccatcttgctacactgatcatatccgtagaagccgagtggtgaattggggcgggcctagccggaatcgccatcggagtcaagcgccgccgggagtccttcgtagtcggtgacctccaccacttgagaaccggtatgtgataaccctatttggtccatcgcacaatcaggacggtagatcatcttgaagttgtagtcgggccgctgtagtcgagacggaatgcctcgctggacttcgcagtaccgtcgtgggccactgggcaccgagggcagagttctctccgcgacaatttagcattgggatgatctaattccagtcgctacctcccctagtgtgcgtaggggtagttgaattcagtgtccgagcgctgtggcggggcgtggccgccactctggcgagcctccgtcgtggggggcttggtgctgctgctgtgcagggcgcaagggaagatgcgtcctgggccgttgatcccttttgggacggctcagattaaaaggataggcgtccctcgtcactttcgatcggtaccgttgatctcaatcgaacggtccacacccgatctagggcagatgaactggtagctgttagatctgaatcctagggtttatatcacgtgccagtttagcccaggaccagtctaatccacgccgtaggtggatgatcggatggccagagttcatcggtaccccttcggtcgcacgaccttgcaaaagagccccctggaaattataaaattaaacccgcagtccagggcaatgttagagtcattacataatggccctaaaatttataatttgaaccccg

SEQ ID NO: 85219 - DNA, 385 bp, Zea Mays
aaagaattaacttatctgtgtttcatcatatttcaatttaatttcctagatttccaagcactatagagcttgatatagtcattatggccacttggcaatataaataaatacataatgccacacaacacaatcaaataaaatatagagccaaacgaaattgtttatgaaggttgcgcataatgtgacttcagggtttgaacaacccaccataatccacgcgagtacaagctctagtgtatctggcgttaatgcgtgtgcggccatcagggccacgacaacacaacaagcctccataataagcgcgagatacgcaattatgtctcggtagtcggtgtacacaataagtccacacaacgtgcacaacaggcgcaattgtggctcaatg

SEQ ID NO: 85220 - DNA, 508 bp, Zea Mays
ccatgtcgcagtacatcgccttagtatatccactcatcgccggtaatcttgccacgatagcatccacggtttacttgcgccagtgacctctttcctctccggccgccaccgcgccatctccaattcacgcgccaccgcccccggagcctataaattgagtgtgtcgtcggctccgcaaggtagtcaagcaaccaatacactaactcgtacctcgaatcgtccaccagagctcgccaattcgagactttccccaaatcgggtttccaccaccgtgaaagagacctcgacgtggccagccattcccaggtctgctcccgctctctttgatcatgttttagcatgcgtacgttctcaagatactcgtcagctcgaccctttatgcttaaccacactcaatcaaccggaacgcttggaattgtgttcggtgttcgccgtcgtcgtggtcgggtgtagtggataaacccaatttaagcccgttctaggttcacctcgggtcagtaatacttgc

SEQ ID NO: 85221 - DNA, 364 bp, Zea Mays
ggcctgtagattgggcagctccatgcgactgcgccgtgatgtcctcgacgcttattactcccctaccccgtacgccatgcgaaatccggccttcccgcgcgctaggctttttttcctgtcacttataagatttggggcctaggtgtacccgtggattcatctctacgccacccacacgccacccacacacgctccgcttcgcatctacaccatccagtggcctatacccgcggattcatctggttcgtcgtgcacgcagacatattcatttggtttgtactctggctcttgctgtcggcgagaaaccgaaatcgttttcatccctaatggtacccacaacatatccagtgttgatcaatatatt

SEQ ID NO: 85222 - DNA, 528 bp, Zea Mays
agcaaatgccctgttcggcagcaacagacatgggattatattagcttatgatactagctagcaaccagttcaaaaacattcgccgcgacttgatatatacaagcagagaagtgcaggtttctgaacaagaacttgagaggctgagcaatgatactagctagcagtaagcaatagcgtggaactcaaggtgacatgcattttcggaataaacaatgatctcgccatcagtccgcactccacggtccaatgccgtcggtgaaaaacgagccaaaggaaaatattacttgacccgtagtccatagaacagaaataaatctatctgcatttttgaagcggacaagctagaaaacagcaaatttacacagagcgaaaattgttcgtctggtcgcctaattcaacagcatgtcaaattgcagcaaataatgtaatatgccagagcgctcgatgactctagaaactgcttgctactctctcgttccgcaggggaaaaagagagaggaccaaatcaaagtatacacacgagcaaac

SEQ ID NO: 85223 - DNA, 836 bp, Zea Mays
gtcaatccaggatgtgactccatgtacagggggttcagggcatgccatctggcttgacctgcagccaggaaggtggatgttggtgttggtgtatcgctcagcagatacacaacaagagtaatcattaaatttgggctagatcgtgtggatcagcctgtgttggttgaaccgatcggctccttgagccgacgatcatttctgtaatgtgtcgtctactatcataacaatcaatgtaatcatatattgaaagtgattgataaggaaagtaagtctacctaaagcatgcttaagttcattgttatctctagagcgatctagactacgtgcataactcagaagggagtcgtgggtcagaggaccatcgttattacccagaacattaatcagatcttgggccagataaacaataaaccatatataagaacatcccagatacaatctactacatgtaccatactgataaacctagaaacatctgccactaaaaactactaaccgcacgtgtgaacatggatcatgatctccaaagaagtccaactaaagtaaacaatgagcctaagcatataagacaggatgccagatgcatatcggacatccgagttaccgtgtgcaaatgtgcagctagcatgttgtggaatatggcaacctattaaggaatatgcaagtgtaggtgaaatatcaatctaataacatgacacataaagtcaaaattaggttgaaactacacatgatagctagcaaatattgccaacaacaacacttgatacaagatctattggggtaagttggtgacaccatgtcgccctgacatggtcagataactgagagcacctaga

SEQ ID NO: 85224 - DNA, 632 bp, Zea Mays
gtccacctctagcatgtgtatggagtcctcggtggatgtagagttaccccactcgaaattcgccatttgaagaatggattttgaggagggagtaacacgatagatgatcacataaaatagataaaacatgggaacaaatcgagatgatactacttccttatggactatatgtccctatatctaacttccttttcttttatgtctgtccaatctcttaatagtagacattcgtatgcgatctaatactactgaggaagagaaaaggagaggagtagctcttcatacctttagggtcaaggtgaatagcaacgctgtgaattgtggtggtgtcgagtgttggtgcgccagagtccggaatcccttctaatccttctcattggcttagcgcctgtggtggtgcgtcagtggccaacaaggaggaacaaatagggttcatcgctgctatcatttgagcatttttagtcactctagcacttaggagattgggtcttctaggaatggggggctagggtttcaggagcaggaagtgttaactttcgtgcgggttctagccatagctaatatagcgcctatgaggctacgaccgattgcctcaaccaagaaaggtaggccccgattagagagaagttcac

SEQ ID NO: 85225 - DNA, 316 bp, Zea Mays
ggcatagcatgttttgctcaagtgattaataactatcacactggccactggtttcgtgaatatgcttgtaataactatcccactttttgatactgtcttgcccaatttatcagcatgatttatcatgtagcatgttatagtaaagaaatatagcatgcctcttgtggtttcacttggaacttggaagtggataaacattgtaattgttctccatccatacaatccaatgtaaaatgtgtgaaaagtaagacagtttgttgtagcagctatctgaaaggcgtgtcgattcagttgtgccggtgaagcttgctccatg

SEQ ID NO: 85226 - DNA, 457 bp, Zea Mays
gcagtgcagtggggacgagagtaagactgtgcactggaccagccttagccaaacctggcattttgttttcatatgggcatgggcatgtgaatatgtgatattttaatggtcgatttacgttcgtctaagtttcatggtggccaggcactctggcggtctggccagcgagactgtgacgccaagtgcggcaccatagaagagagtgagatatgtcgctctggtacgatcatgtgcattgtccgaggatccttggccatctcatgcaattacgatcaactgtgtactcccctcctcgtaaaatgcaagatatccacaggtactcccctcattgattagttagttttgttagtaacttatgtaattttatattttaatgaaaaggtacatagacatgtcattgatttcggttactaattacattaattagtttaaacaagataacctgtaggtttctcaa

SEQ ID NO: 85227 - DNA, 1328 bp, Zea Mays
cttggccatggcgcgctcaccgccgaccaccctgttgctcggactggccaagaacaatgatggctgcccaaattagctactaggcaagcatcactggcctgaaataagtatagaacaagctttaaatggatggttatggccctggcttagcctgaccatggtggcggtgaacaccaaacacaatttcatgtgttccgggtaattgagtgtggtcaagcatagagggttgagctgacgagtatcacgagcatgtatgggcgctaaaacacgattaagaagagcaggagcggacctgggatcggctggccacagagtgtggaggattttcgcttgccggagactgagaagggggaaaatggtgtcgcgacgggctctggtgagattaggaggtgaggttggggctacacggtcgcaaagtgctactaattcaccgtgcactgctaatttcggaagaggtggaaaggatttcacgaatttgggcttcaaccgagttcactggtgaggtggtgagtacctcgccgtgggcggcggagctatttaaaggcgtggtggtccggctaacgatccacgaccgcggattacatcgttcgtgcatggttaccacataaagaagaggcacagtgagggaggagcgaggcatgagtgacaccacggcggaaatgaccgagccacggcgatcgccggtggaatatctccggccacgctcggctaggttcgtgggatggtggcacgtctgaagttatctccccgcgatcgatcccttcaccaattcatccgaacacatctgattctatagtgccccagatctttatcttcgtttcagatattttcagtgctctggatcttcaatgttcttctgaaccgacccacttcaaccctctctttcttttgattcttgttaagaacagggtaagctccattaataaaggttattcactaaacaatagtcttcaaacttactataggatccctggtccaacactgaatggaatcaaagatatggtgccttcaatttggtcccattccactgtgaccattcctgttcttaattcagtttttagtgacacttcatggctctgacagagcaacttcgggctgttgtttcattaatttttgtacaaaaacaagagaagatgactgcaccaaagttactcccctataaaccaattttaatgttgttacaagggtcttagtcagttacccattaaattgagctccatctgttcctgaagttggtcctttacaactggtttctctgaatatcacagattttcagcctggcagccaggcttcaaactcactcaactcctaatcttgtacaataccag

SEQ ID NO: 85228 - DNA, 653 bp, Zea Mays
gtaaaccataaacaatggtgtagccagcgtgtgaccatgcaggatatgcccgggatatagcggcagtccttagtcctcagtcctcatggatcagtggcatgcagttgagcaccgaataggttgttggacttgggtctctaggtcatggaatatggtgcagcacatatgcaaaagcagaataaaaatacgggttcagagatacatggagatgaaacgtaagtcggaatctaaggatcccgcaagtcgtaagcattgattccgcgagtaccacgatttgaaagctcgtgtggtcgtgcataacctactagcgggctggctttttagcctttcatgttctttgtgctaggtatagttgtgctcttccaggactttcatagtggtcaccttccagtatatagtctaaaaattggcacaatcatccttttaccaaaatgtaaggacgctgaaacaattcaacaatatagacatatttgtttactcaacataagtttcaaaatctttacaaaggtaattacaaatagtataccttcttttgcttcgaaattaattagtccaacccaaaccgcttcatcccagggcgaaatatcatggagggggtggtagtgttacatgagacgatatatgaacttcataaaaggaagaagagtggggta

SEQ ID NO: 85229 - DNA, 1007 bp, Zea Mays
aatttgcttgcatgggtcgatgcgacggaacctgtgcagtagccgattttaagtattatacaaaatagaacatcattgaaccactcctactatagtctttacacctgcgcagaagtcctcgccgccacaggatcctcaacgccaccttccttgagcgaggactactcttcaactcccgcctccacctcggcgtccttttggatcgtcgagctctccgggtcggcgaggtcctctacttcttcatccctcatagcttgcgaagacaacacatcaacgcgtcagacagtgaacatatacatcaccctctctaagggcacaaacatacctgtgcaagtgctcggtcggccctctcctggacgacgccgcggccgtgaggaccccgcatcctatcgtaaagcgccccaaccgagcacttcagcacgtcgtcctcgactaggaatacaccagcagcgaagtcctcgttgctctgatcgaaggcctcgaagtgcctatagccctcgggggccaaggcattcgtagccccctcgcaggacacgagcgacgcataggacataaggcctgtcacgatggacgagagtgactctagctcctcctgtaaccacccaaggaagcgggtccccacctcccccctcacttgtcgaagggagcagtttgcacaccgaggtcacggtacgcatccacaaaaagtgtgtgcgcccgatccacctcggcacgggtggctgactccattttctcacggtaggcacacatgctctttaccttgagctccatctcggcggcacgcttgcagggcaacttgggcttccgcgcaggcgttctctacatctgtcttcgcctcaacggtggcttctttcttgtcattgagccagcgaccgagatcttctctctccttctcaagcactgtcaccttatggagaaggtttcaggtcttgttctcggccgccgacttatccctgatcgctttggtatgttgcatccgaaggcgttcaattttgccctcgagtcgc

SEQ ID NO: 85230 - DNA, 398 bp, Zea Mays
gtgataggcaatcacaataggtcttttcatgatgaatggtacgtaaataatccatggttggaatatagctttgctaagggtgtggccttttgtttttgttgctatctttttaaacaaccaagagctgaaatttatggtgttgatgccttcacggttgttgggtttcgtcgatggaaagatagatggaaagatagacgtgaaattattggagctcatggtaatggcatagatcacaataagtctagaaggtcctatgaggactacaaaaaatcagaggcaaaattgtgtctcatgtgatgaatcgagggggtaaaaagatggaagaggaatataaaggttgtttgcttgttatattgggagttgtaagattccttttattgcaagcacttgcttttcgt

SEQ ID NO: 85231 - DNA, 418 bp, Zea Mays
ggagggcggtctagctcacaaggacacactggttcttaacgttgcaggctagggttacctggctcctgtgggtacgaccgagggtgcttcagcttccgatggtgccgttgaggataacccaaccctcagggtggtgctgaggatgacctagccaccaaggctgctgagcttggttcctcttcggctgcctccatggatgttcatgttggatcactaccggttcaatctgaagaacatgtggtgatgagttcgcctactactcttgtcggtccggtcaccttagaggccagtgactcggatgctaggaatccactgcctgctgtcggtgctgaggtctccctgcgtgacgctctcaacattgtccctgtcaacactccatcattagacagtgcaccgatgcctccggctctgggactcc

SEQ ID NO: 85232 - DNA, 443 bp, Zea Mays
aattaataaagaacgtaccaatgacaatgtcagaaccatcagcagtagcttcaacattgatctagttaacccggccaagagtgaagttctgctagccatggtttctagatggagtctgaccactaacagattgacctgatctattagggttactgcctcgagatggaatggtgttttaattcctcttagggcaagagttggcatagtgtcctacctcaccacacttgaaacatgcattgcttgtagtggtgttctggccaaaaggtcttgccggggtgctagctggggcagcctgacgagggcatgatgtctgaggtgtggcctatggtgtctgatgaacaggacgttggtacgactgctgtcctcctcctgaacgagctagggtaccctgaggctgagtgtaactagggcgactgttacttcctccctgtccctgggtgata

SEQ ID NO: 85233 - DNA, 435 bp, Zea Mays
ttgatgtaatgacatttgttgggtatcgtaattagaggtaccaaggttacgtctccaaatacacgcttaaccccaagaccaccatcaggcctatttctcgaggtcaaaggatcattaaccgcgcttcgcccgaggcctatctcggcggtcaacataaacttcgcttcgcccgagccttccctcggacaacgtacattctcgagagaatcctcgtctcggccgatcccctctccctagagttgttgtctccgtctcgctcgagcccgtctcgggtaaggaagacaactcctaggcaagactcagccgaagacgcaggagacaagagcattcattgtgcacacctaccccacgcagtgttgcaggtgaacatgagggacaagatcgtggtcccgtcatacttcaccaactatgatgatgcatgcgactactgttccc

SEQ ID NO: 85234 - DNA, 318 bp, Zea Mays
caattctgagcagagattttcatccactgcatttgaggactcaagtcccttcagcaagactaagatcttagtgatcaactgctaacaacattaattgtttctcgtctaagtaaccttaatgaaacaaccattggaatttatctctaatcggtaatgaactcaccaaactgatcatatactgtgattcaagcctaaaagatgaaacatatgttcaaatgcttatgccagtgacatcagtgtaagtaaatggaagcaaagttacaagaactatcaattctacactacaaattcatctagagatacgctagttaatacttc

SEQ ID NO: 85235 - DNA, 345 bp, Zea Mays
atcagctttgtatactgcgaggggctgcccgaccgaggagaaaacttctggcaggcttcgcaggaccgggtgacccgatttgcggcgcagatcattgcgggccagtaaaaaccttggcggatcaccttagcagctagggcccttggccctgcgtgagagccgcacgtgccactgtggacttcacgtaggatctgcatgccttcggcttcggtgacgcacttaagcattggctgactgaccccttttttgtagagttggccttcaatcagtgtgaagtctcggcttcgatgtttgaggcgcttggcctcactaatgtcggctggatgataatacccctgtaggaac

SEQ ID NO: 85236 - DNA, 609 bp, Zea Mays
actaattttggataaatatcttgtgagttatgactgaaacaactattgtgctattgtcctaaatatgttaattgtgattgattgttccactccagtgtgcttgtcttgagtcgacttcttattgttttggattttgattgagcgtgagtaataatgatagtgcactaaattggttaaagcctaaggagtaacttagcttaaaaacatttaactagtgtcgttatatggacgagaaacacaattaatgataccttaccatttctaataattgcgctgctaatccgaatgttgctaaataaccaaccccattagaagaagtgtgattaggctatcgctttctgtgtgtgctcttgggtgtgtgctcgcattaggatattgtgaataatggtagaaccagattaagtgattattcccttttaactaagtttatctatatagaagccttgggcaaattgatgtgtacttaactagtataataataaaggaactaatgaaaaaatagagcgaatgtgataaatgcttgcacgtgtgatgccgtgttgcgctagttaattctagaaagtaattgtcgtctttctaatggtattgattacgtatgcccgatgacgt

SEQ ID NO: 85237 - DNA, 536 bp, Zea Mays
gaagatattgaggctctagttgcttctctttgtgatcttcccaatgatgagaggcaagtttattttgagatgccagcgagtctagatgatgcagaaatagatgttgtactcaatatgttggctgaagaatcttctgactcggcccctactgaaacaatggttgttgcggttataccagagcttgacaaaacagtggatacccaaaagcctgagggtattcacccaaagcgtcctcgccaagtcaaccgcccaactgtgcatgttgaggaggagaagaagaaaaagagacggcttcggcgactgtcatgcttggaccaggatgttggcccttctgctgctgtttgtgaagaaataccagcagaggtttttactgaggttgatcctaatggtgatgtatctgttgaagctgaccccaatgggtgtgaccgcgcaccagctgaccccaatgagtgtaaccttgttgaagctgattccaatgggtgtaaccgtgcaccagctgaccccaatgggtgtgaccttgttgaagctgatcccac

SEQ ID NO: 85238 - DNA, 510 bp, Zea Mays
tcggacgacgaacgatcaaaacactgatgaatccgccgtccatgcatgggcgtgtcagttggtacgacgagcgagctagcgacgcgaaacggatcggaggacgggtttttcgcagagacgctgtagttgtagacgatctagctagcggccgggctcctgctctctctctggcgaactcctgttgccattgccactcctcgttccccaaaccaagtaaattctcggcgccttttgagcatccggataagttccggtgatatcacgtagtattaggtaccgaacgcaacaaagctcacaccattccttttagcgaaaaaaaaatgcacaccatatatgcggggcggggcactttagttttggcctctccctggctcctctttggaacagctgaaagcaaaaaccgattattgcattgcatacgtatatatatccactgagtccagcttttccctctcaggcattttacaactggctgtgtaccagtgtatgcatacacaagcagcgtccacg

SEQ ID NO: 85239 - DNA, 595 bp, Zea Mays
gctgccagtggggctagctgtaaatgatgtggaccgctgctgtcagttaacgcaacggtgacggaaatggcgtgtgggcgttattccgagtgaaggcaatagagggtgtgtaaaactaaggaagaagtaaaactaggtgtagacttgagtagatgggcaaaactaaggccacggctgtaaaaaaccctaaatacaagtgatcacacatccctatcactttcacctagtatgatctttggctacaagattacccacattacaatgctatggtaatcatgtgtaggataaagggcttagtagtacacaatatgctagtggataatggaagtccaatagagatcattttttctagaacatttaggcaaatgcaagaagtcaaagacatacttcaagaagctacgaaccaactattgattttggcgaagacagaccatcccttagcaagattcaaatgctagtgtcctttggatatgtcaacatcacaataccagaaaatatcatatttgacattgttgaaatggattacccacataatgtcatattcgaaaggggtacattggactccttcgaagtcataatgcatccaggttatttt

SEQ ID NO: 85240 - DNA, 1084 bp, Zea Mays
tggatacttcgttgttcttagaaatcgaagaattcagagctggtgaagtggaccccaggtcaattatgatgctatttggtatcccaaacctgaatatgatgtcttgtatgaactccactgccttggctaaggttaaagatgcaatgggcttgtactctatccatttggtgaactttcaatggcaaccaacacttgagtatagcctccttgagctttcttgaaaggtctgaccatgtccagcccccagcatgcgaattgccatgttatagggatggtctgcatctgttgtgctggtaaatgctgttgttttgataagaattggcaagattcacacctctggactaactcggcagcatcactcttcgctgttgaccaatagaaaccagatctgaaatccttcccgaccagagttctggatgctgcgtgtactccgcactgtccggcgtggatttcatccaatagctgcttcccagtagttgaggaaatgcacttcatgaggactccagtcgcaacccttctgtacagtgcgccccttatgagggtgtagtgggccgactgtcttgcgatgcgctctaccgcagccttatcatccggctcttcttcattctttatgtacctgacgataggctccctctagtcattggggtccgattctggttggttcaaggtgttgcattcttctgtctgatctgagagaatactcgggtgtgatacttcttggacgaagatcccggatgggacctgggcccgactggatcccagctttgacaacgcgtctgctgctgcgttgcggtctctttccacgtggtggaattccaacccttcaaatttgtcttctaattttcgaacggttgcacagtacttgcccatagaatcaaccgagcaatcctagtctttatttatctggcttataaccactagtgaatctccgtataccatcaacttcttaatgctcagtgacacgacgatattcaacccgtggatcagtgcttcatattctgctgcattatttgatgctggaaataataactggagtgcatacttgagttgttcacctccaggagcaatgaagaggatccctgca

SEQ ID NO: 85241 - DNA, 771 bp, Zea Mays
ggaggtgtcagccacggtcgaacacgtgttctcgttgcctctgcccctgttcaagcgctggttgggtgcaaatcttcgcgaatttgggcaagatcgctgtgaaggatttgttcacctgaccatgctttgtcttttgtgtatggacgtcgcgcggtttcaggctagggacatggagttgtagcgtcaccaaggtgccagtgtcagaatgcctggtcccgaggtcaaactgcaccaaaaccgtgtcaaatgaatttggtttgagttcaaacttttccaggacgtgttcaagggaatttggcacaactttgatatttggatctcctggttttgagtttcgaaaaacagagaacacagttgatctttggatagaggtctgaatttaagaaattcagaaatctgaatttctccaagggttcatggttcaagggctgatttgggaatttgcttgagttattttggctaagctttctgaacctttcttgttgcttattaaatatactttaatttttacaattggctcaagtcataaatttaaatttttcatacccttttccttatttccttgaattttgctcatggggcttacttatggtttttattagggttacaacattattaccttttgaaagactcaattgttttgatcatgatacttttaagtatatgcttggtgaattccttcttacttaagttaatttgatgctcatgcttacttgggttcacataaaatgatggttcttggttggcattttgagagaaaccctaggtgac

SEQ ID NO: 85242 - DNA, 639 bp, Zea Mays
atcagccattctccttccttttttaggagttcctgctggagcggttgtaatatgtggttgcgctagcgccttcgactattctggcccatagctcttttctgtagtcaatcccaaatgaatgggatccgagacattcactacagttgtcgggagggccccttcggtctttttggcagtctctgtttctgaagtccctatgtcgggcagttgtgcagccctttctaagaagtactttttggctggtgggttagaatctttgctttctttggcttcaacacagcggcagaaacccttggcacacttttcgtttttagccccctcttttgagcagggaagcagtaatcaggataaataaatccaatagcatcaaagaccttgttcaatcttcgtttcccttgagcaccaaaggcaacatacatagcttcgtccttagccttcgtatagctccctagcaattcatcacttgttgcttcaatggcatcaagccaatcatcgtctgactcaccaaattgatttctgaatcgaaaagtatacttcaggtgcaccaaactgctttttcccgcattagtttcagcttcaccatccttcgacatttcccattcaacagccaagggccacaccttgaaagctatgtgctcc

SEQ ID NO: 85243 - DNA, 726 bp, Zea Mays
aactgcgagcgggtaaagatcttggcgcctggatcagcttgagtccgaccgcggctaagctcgtcgtacccccttgctcatcgaatgatcgggataagagctcgccgccgttggtcgatcactgtcgtgcgccgcgtgtccgggcactttaccacgtcgcggctaaacgcgctatgcatatacggtgatcgccggaggcgccgccacggtaaaggccacgttgagcggccaccagtgactcaccttgttcttaccgatcacgatccgccgctcaaattcgttgtgctcacggtcgatccctataaattgaagccaccgtgagctccgtaggttgatcactcaccacaccacccagtattgcctccaatcttacaaccaagagcttgaattttgaacttcccccaaatctactcagaaacaccgcaagaacaccctcaccgcggctagctcgattcaggtcagctcatacgctctgctccctcgtttgagtgttctcatgtacccgtgatgctcatcgacccgcccaattgaacgagaaacccactgatcgtcaggaacgcgttcatctgtccgcaatgtccacggtcactgcggctagagcaaaccaaatagccattgatgaaattaagttggggaaaatgcgcaggtggggttcaatttggtgtttgctgctcgggagcaccagttcttacgtgatccgtccggtctaagctcaccggtgctcgg

SEQ ID NO: 85244 - DNA, 570 bp, Zea Mays
ttccatttgtcactggagcgacgcggtgagccctgacctttcttgtccttgcccatggctagatggaagagaagagggggttgagaaaaaagcaacagatgatcagaggatgtgtgaaaacaacaacggggcaagcaggctaattatagaggccggaggcaactgttcatcacctaccacgctcaccgaacaatcgaaagtattcaataagccattcaaatcgcctgaaggcaagtcaggcagcagacgccgctttgcgtaacacgacactatttggactaaggtcaactgcttgggcaatatgattacgccccgtggtcacgtcaagttactactccaggacaatgtgctaaacgctctgcgtaccaagacgtcccttggtcacacccattgggggggacggctaggaattttcaatagattttctgaagcagtcacatccatacaatatatgcaatgaatgtattaagacagaaggaagatattgatagagatcaaaggaaagccaaatatagctactgaactgcaagtctagtcagcagaagcattgaagcacaaagcgaaatgaag

SEQ ID NO: 85245 - DNA, 432 bp, Zea Mays
gtcatatttatacagaccataaaagcttgaaatacatcttcacctagtcagaattgaatatgagacagaggcgatggctcgagctaatcaaggattatgaattagaaatccattatcacccaggaaaagcaaatgtagtggcagatgcgctcagtcgcaaggtttcctgccattgtctaacaatgaagacttctgacattacattatgccaggagatggagaaattgaacctgggaatgattcaacatgggacttcaaatcatttgaagctagagtcaatcatcttacaaagaataatcgacgcacaaaaagatgatgagggtatgaagcacatacgtgagaaaataagggctggaacagccaaatgtttcaaggaagaagatcaaggtgtggtatggttcaataaccgcatagtggtgccgaagaatgaag

SEQ ID NO: 85246 - DNA, 825 bp, Zea Mays
gcggaagtcttcccgatgcgttagtggagccgtcccttgacgtgcgccacagtcgggcggagtggcagtctgcaggattcgcggcgtagtaagtggccgaggccgagctcgagtgaggtgaagaattcgcccaagggccgaacttgacatcaggcgaggtggagaaatcacccgaggctagaaccggggtcagacgaggcggagaggttgtgcccgcgagctgaatcctacttcgggcgacacagagagattgcacccaaaggccagtctgcttggcttttcgtattaggcgtcccatccgagggtggcaggcggcgtgcgcacactgtagtgtagacataatcatgctattgcgccagacgtgatcaccttcttgtcactcactgtgctctgctgccgcagcatgggttggcatacacacattaaatgtgtgtgctcccttcctgtttttgggtgcccttgtcctatctgcctgaggctagcttgggcgagacggacggtgcgacggcgacctcgggtgaggtggagttctgcccgaggtgggagaatctcggagagatgtctcggtttttgtgggtagctcggctgtcacacctagggggtttttgtccttgtttcggtgagtgcgcttgttagggggataattcgggtgtccctaattattaccctggacaaccatcgtcacacatgcgtgtagtcatagcctctctataggctgcttctgccgaaggctatcttcgtctgcccttcattatttgcctaaaatgcatctacttgtgttgaaggttagctgttttgaggatcttcgaccaactagcccccaac

SEQ ID NO: 85247 - DNA, 841 bp, Zea Mays
cgagggtgttggtggtagtgatccagctctggtgggtagtgcaagctacgacccagcccccgagggtgtttctagtagtgatccagctctggtgggtagtgcaagctacaacccagcccccgagggtgtttaggtgggctctctttcccatgcctccatggatgtccacgttgggtcgtcccctcctcggtccgatggggcgatgactgtatatgcttctacaattttaaatggacaagtcaccttagaggtcggcgagcttgatgcgaggagcctgctacctactggaggggctaagatcacccctgataatgcccttcagattgttcctgctgatcttctctcgtcgagccatgacatggctcctcctgccttgggtctgccactgttcctctccaatcttcaggtgagtcgacctctggctctatgttgttcatattagcaaattatctttcttctgctcatctgtctttgatcacaggcttttgtcgatggaatgtctgctcagctgagatcctgtggtgccactgttctagagtaagctctatctctgatgcagtggaacccattattgttccagaaatagatcgatgacttgaaggcatcgaacgctggttagtgaccttacaacttcattagttgtttttattgatcaacttattcttagtcatgcatcccttttcagctgcgttgtcgaatatggcccagcggtgcttgaccttgaggagaagtattctcgaagtcaagccgacttgacccaacggtgctctggccttgaggggaagtattctcaaagtcaagctgacttggcccaaacctctgtttctttggatggcgcgcg

SEQ ID NO: 85248 - DNA, 909 bp, Zea Mays
ggagaccatgctatgtacagttcatggcgattccaagctacacctacctcaggttgaagatacctggaccccgcgaggtcattatagtggccacctcattcgaagaagcctacgtgtgggagcaagccaactgcaaactcgtgtcggtgctcgctgcctcaagggaactagccgagctacgaaatgatgccacgtagcaaggcgcctccgatgccccaaaggccaacaatggcttccttattaggaaggaaccgtaaggaaagggtaaaactaagcattcttacttggggtaaagccacgcgtacttgtgggccccagggttgcttggctgtctcgtatttactgtggcggacaatacagggatacatgagtcctaggcgccatcatttaggctatgctgacccctggccttcttagcctagggttgggcgtggctcgtcgccttgcgccctgccagcggtttgtgcactcaggccaagtccaatgggtcatgagtgcatcgtaggctgaggggcacgaggaccataaatgcgtcgcagtccagggggtttgtaggtcatgagtgctatgtggcctgaggggtttgtaggttacaagtgggaagcggacaagcgcctgcgctgtggctcggttccaggcgtcgcgggatccactcgagtggtttccctccgacacgccacccatttcaggttctgccatgcacgaccctgggctcggtgccatggggtccgatcgagggcaggttcttttagggtatatgttatccacctcttctagctgaccaacaagccccagcgaccaggggttttcccttagcccgcactctgaccgatgggccctagagaccgtggatcgtatccccaacaaaggagttaaccacaaaagatcccacctctccattttctgtgg

SEQ ID NO: 85249 - DNA, 710 bp, Zea Mays
catatattggtcactcactaccattttttaagctaaccatttgtgtacaacatgaactttgtcagactatgtattaggcagtttttccaatctacttcatgttggacattctattttagtgccttatgcttgtgtcatttcatttatggaggactcaaggaaatcttttctgcttcagaatatatattcttctgttacttcttttatttactgacatcagcatgaatctgaaagacagaaacgaatcagttagccttatagaaatgcatttcatctgggtagtaactgtagcgacctcaatcttatgattttctgatgttgtatcctgtttgcatttgggagttgttctgcttcttcttgagcctttttttttttgctcgctcatgttgattcaccagccttccagatgaggctcctttctgaatacttctcattttgtgtcccggttctcctacagtgccattatttttttctgacattattttcatctcatcctgttcacaagggaacgaacttccaagggtgcttcttgagacaatcttgagaatgaaaccaactgacgaggaggaacagaatctcaggctttataacggggatttctcgcagctaggccttgcagaacaagtgatgaaggcattaattgacacgccttttgctttcaagagggttgacatgttgcttttcatgtcctccttgcaagaagatgcttc

SEQ ID NO: 85250 - DNA, 706 bp, Zea Mays
cccttccagtgtatgccgaactgctatgctaggatcatgaccgtcagcgatgacaggagcgagatcattctgattgccaagagagacgtctctgccggagaagagctgacgtaaaatccccagccctgccattttcttccgatatacagacacagcttctgcgtcttcatttacacgagtccctgaacgacaccgtctcatctcacctaatgcccgcttccgaatgtgtaggtacgactacttgtttgaccctgatgagtccgaagactgcagggttccatgcctgtgcaaggctcctaactgccgtgggtacatgaactagaagactaaccaacctcagaaacagggactaaagactaacgtgaccccccttacagttacagaggccaaaggctggccatttttcccggaattcttccgttggcttctcggtttatatttactggaaagtttattagttctcgtggctgcccaagttttgaaccattttgtttagatattgcgattgagggcagccaccccattgtatattctttcattgttgtaataagataccagtataatcaagaatgctgactttgaaatggaaagaagaaaaaactcaacttgatgccgtcgtctgcctgtgacatcaatgtattaaccactcgctttggcctgtccatgtctggacttcgaaccagatgacctgatcaaaccgtggaac

SEQ ID NO: 85251 - DNA, 285 bp, Zea Mays
gggaagtgtctcgacaatgtgttcatgcagtgcttcatccaatgtgttgatgatgatgccaaaaatcagcaaccttccatgagttcgaacagattaattcttgatgttaatgttggggtaaattatcgtaacatacctacaccatattcatatacacaatggtatcccaagtatactgactccattcatattgtttgttgcagtcactactcaactttgaggaacaggaacgacacagccgaaacccacaaccttttgatgaatctgtactgcacacacttctag

SEQ ID NO: 85252 - DNA, 397 bp, Zea Mays
ctcccaacaggctgctcgtcaatctggctaaggaagctaccatattgtgacatcacctggttccaatcagttcccattctttataacagaagcacaacaaacttgtcatcaatgtactactatgtaacaataattgcaatcgtttgaaaatgaaacacagtgttctattagttaccacggcctagtaattaatgttaaactatctaaaacaaacttttgcatattaaaggcaaggtgaatacgcaagttagtttgggctaaatgtaaccaagtcaagaacactaaaagcatgaaactacatacctcattgcagtacaatcgcattgcattgaagtgaaaacatgtatttagataaggcaacaatattatacaccgaagataagtactggacacatcg

SEQ ID NO: 85253 - DNA, 430 bp, Zea Mays
agaaacttggcagctaactgaaatcagtagcattttcaaaaacttgctacttcagaaaacaagctacttcagaaattcagtagcattttcagagttcagttctgtctgcttggttttctgtcactttgccttgtcggccttctcttcgtgccttactgaccagggacgtgctgacagagttctacagggacgtgctcccagggaactgcatcgttcacgacatattggactgaagctaggactaattgaagctaactgaactcggactaggactaactgaagctaactgaactgaagctaacacgattagactaggactaactgaagctaactaaaaataactgaagctaactgaactgaattgaagctaactgaactgaagctaacacgatcagactaagactaactgaagctaactgaactgaagcta

SEQ ID NO: 85254 - DNA, 1085 bp, Zea Mays
tttcgttgcacatagtctcaatcatgtctagccattctttgcaaggcttcttgaattgtttttcaaatttgaaacggtaagcaagatgaacaagttcatgcttcttccccgcttatttcctcttcggcattccccagccacttgacgtcggatatgttctattcgccaagtattcttgcaccaagtccctggtactgatctgctcagctaccactctaaattctacttcggccagctgacagggtgaccccagttgcatattgcataagggcctagtcattctgaagctcaaactcagtggactcatgaccatggtcatcagcttctccctctttttctcgtcagccttcatatagaaccattcattttccaaccagttggccactttgtgcggtagctaagggctggtgcttttgtatccttttgatacacaaaattgtaacaaccaaaattttcatgaaggccatctgccctagccttcgtctaatagtgcagctcgtgcactcgacagaaagcttcggcatctagactcatcccttggcttcggagggcccagatatagatgctgagtctaacaatggcgttgggagtcagctgatgaagatatatttcaatgttctttaaaactacccctatcatttcattcaggggggatcgcagccctgctctgaagaagctcttgaaaacgacaacctcatccttcttcggctctaggatagtctcttctccagcaaatcgaataagtttgctttcagcctctccaaaataacccaatttcatcatcataggcatgtcatctttcgtcaaagtagatttctcaaaatccagatgactaggcttcgttgggatcagaatgttgtagtcttcttcactctcatcaacattttcaccttcaaccacagtttgttctacttcggcattagaagcaccttcgtcagccactaccaaacctgatcgcttcattacttttgaaattggtgttgtttcagcggcctcggtttcgtccccctcacgagacaatctagcagttgatcgtactctagccatttcgatggtttttactgtttgatgaagctaaccttaag

SEQ ID NO: 85255 - DNA, 688 bp, Zea Mays
gaaaaagaaagaattaagcatgacaatgaaatacttcgtttcaaactttaaagttaacaacttctgtacctttatattgttgtatgcaaggctatcagcaagatcatccttcgacatggctgaaaggccttcctcaagattcgaaaatcccatacttttggctatctccgggcaaacagatatttctttgttgtccgggagacagtataggaagtcatcttcgtcagtgccattgaacactaaggctcccttcggatattttagtttctgggtgtagtgtctggcttctaagatttcttctttggataatttttccccaaagcatgtcgaataatgcaatcaacatcttcggccggagcttcgggggcaggagattttgctttttctatcataccttgccccgccgccatgccggtatctgaagtttgttgcccagctttatcctcaagcgcggcagccttcgtctcaatgggcactgaaggaccagcttcggctccggcctggactttaacagcttcggcaactttcttagtaggagcagggctaaaggcctttgtggtctccatgacagcgtctagcatgctggccatcctccttctcttgggagttgaggcaggagccttttgcactttcggcaattctgcctttgctggtgggctcagaatttctggcattatcactatttttc

SEQ ID NO: 85256 - DNA, 1136 bp, Zea Mays
cagttttcataattagatttatatttagatttatattttttagattgattatttaaagacatgatgttgatagttggatcttgaaacaccagatgtctagtaagcttagaccaactccaccagaggtcgtatatgggcgtgcatctgtaaaattttgcacgtcttcgcactgttgagttccccagcatgcgctgtatccggcgacggaaaaaacgggccaggggtgggcgctcctttttatcgcgtattctctctcatccacacaacccaaccatcattccgaacttcctccttccttcgttggtacggcgacacaagatctattttcttcctccgagctatcggggtcacgctcaagttctcgagttttgtctcctaggtcgaaggacgtcgcccccatccgcggcgctgaagcacagtcgactatgaacttcaaatctaccggatcccataatcgtgcaggacctttaattattgcgtactgaccttgaagaaccctgaagcaacgttcgacgtcttttcgatactctgctttcatctggccctccgtaggctagcttacgaattgcagcatgaaccctccagtgtagtggcctccatcagaactgagacgacgctggtcgtccttcgttgctacatctgaaaggctgcgccaagtggcacaaatccaaacgatgaactcgcatctgcagaggaaatcaaaacgatgaactcgcatccgacgggggaataaatgaaaacgatgaacgcgctggcaacctaccaccggggactgcggatggctgcaacagagcagaaatgggatactagccgtggccgagccagagacgaggcagagctgcaatccggcgacaagagcttcgatgaaatgctacggtggaggttgtacccgaggccggtcgatgcagcactgtgactttgggcagccggtgtcttcagacaggggccaacggctctcgtttcagggcgttggcgggaacagaaacgatgccttgtttacaccgctttacggagccatttatggagcttcctggaaatcgggctactgagcaactccgtatcgtcgcctgccactccgtaggatacagatccgcagccagccattgctggggttggtcttataaacatgcacaaac

SEQ ID NO: 85257 - DNA, 852 bp, Zea Mays
ggtcgctccaccctccgcctttccttgccaaccgttgtccagccagccttcaccagaatttgaccgaggacacgatcatcgtcgcccaccattgttgcccaaggcacgccatggtgaaccaccacctctggtcacgtgccaactcaactagagccaccactaagatcccttgagttccctagggctctccaaggcctcagccagagctctacctcaccagaaccgcgcaaccatcttcgccagagcacggtttccgccggtgaacgtggactcgcgtccacagccaaccatagtccaattccttcaagcaatcatctcctcgacaccccgtgaagtttccccactggtggaattgaaccgtaccatcaccgactagctagaacaccgccaccgacgaactccgaccgttaggagacgtaggtcggacacctccgaccaccaccagccgccatctgaccaccgacgtgttcaccgaagcctccccgacctcaccgaccaccacgccagagttcaaccaccgccggtaagccccaccgctccattacttgccgccagtactgttccgattgagaatgggcctcggatttagattctagaaaaccagggggttttctgttaagcccgtgactcaagggaatagtgtcccgaggaccctcttgtaaataaggaaaggaagaaaacccagggaccccagcgctaaatggagatttttcccaactcatttaaaaaattgatttaaattctacagagaacttgtaaaatgcataacttgaggaatattggcgcaaattcgaccaaacaaattttgttaggtctgtatgagttaagctttagagtaaaaatataaaaacc

SEQ ID NO: 85258 - DNA, 608 bp, Zea Mays
attctcaaacaactactacaaggagcttctgaacttgatcagtgatgtacttccggataatcacaagatgtcaaaggacatatatcagtccaagaagttgctctctggcctcggtatggactacgaaaaaatcgatgtctgtgacaataattgtatgcttttctagaagaagaccgcgagtgagaaaaagtgtacagtatgtggtgagcgtagattcgtagaggttgaaaatgacaatggtttgactatgacgaccgagatagcacgtaagcagcttcgttacatgcctcttatacctcggttgaaacgttcgttcgtatagccagacacatgaggtggcacaaagaaggggtacatgagaatccagatgtcatggtgcacctagctgatacagatacatggaaggcactagatgcctttgattctagctttgctgatgaagtgtggaatgtccgcttcagtttggcaatagatggtttctcgcctttcaatctaactgcaccatcctactcatgctggcctgtatttgctgttccatacaaccttccgccaaatctttgcatgaaatatgaatttatattcttgtgtcttgtaatacctggtccgga

SEQ ID NO: 85259 - DNA, 373 bp, Zea Mays
catggatttcttaaacgggttattgctttctgacttaataatgataacttctcaggcttgtaactactttgttcatttcattggcatgcatgtaatacatgaatcctagcacagtttagtaacttcctctttcaggtgtggctcaatattatccaacatttacgtgttcacaagttaggcggtcttttctgttactaggtcagacaagtgcttaatatcctatcatataccaaaacagaaagtcgtcattggccaacaacattcgaactgactgttgtgcctcgagctctgattaacccttgaattttactaaccagttgcaaccattgcaatgattttgaagccagctttctaactagatgtcaatgtatac

SEQ ID NO: 85260 - DNA, 365 bp, Zea Mays
ctcatcgatgactggtattttttacgaaggtatcgagaagctcatgcttccccctagtcctcgtcgtagcccctcacaaggatgcattacaaacaccaagctctcagctggctaaatccatgcataaaccttaggccttcccccacacaagtgggtctccaagatggcctctcctcgactgctcctcgtcgtattcctatcaaacttccaaccaaatcaccacgagccttgttccatctagtatatggtggtagccacaccataaacatggtcggtgtggtctcacaacactacaagtccttcctaatataataatggtgcattcaagcaatgagtgatatgatgtatgcagacctcactaaatg

SEQ ID NO: 85261 - DNA, 338 bp, Zea Mays
atcttcgttcacatattcacactattgtgcatgatcctattatgaacagaatgaacaatatgcaacaaagctttcaggacaatatgggtgccttgtcttgtcagtttgaaaatctctctacgagtgacagtgtccatgctctgggtgacagacaacagcaacttcaaaatgattttagtcagttcacttccatatttgacagctttagctctcatttttactccatgtatcctcgtcctccaccgggtgcacagtgatgttccctttgtggaaattgatgccaaagggggagagagaagtgatgactcaaggaagagcctgctgatcctgccgcatat

SEQ ID NO: 85262 - DNA, 365 bp, Zea Mays
ctgcagatgggcatgcatctgtggtctgtgtacagtggtcaaagccagatgatgcggcaggcccttgtgtgctgcacataaacgcccggtgtttgctgttgtgacggtgcttatcaaattcacagagatggtaggatccagtatagacgcttatactgtttttttacgcaagggcgtgcagaggtgagaattgcctgcgttataccatgtctcaggtttttcgcattggtcccacatgaggatccagtataaacagctcaaaccaatagaggttgtgtgtgtgcgtgtagcagaatccttttcagggcatagtaattatgatctcaaaccagcagaggttgtattttgcgagctttggccaaatc

SEQ ID NO: 85263 - DNA, 366 bp, Zea Mays
atttattctatcttcgtccgcgacccaagcattggtcctgtgttgcagctccgcttgaagtcggcttactcgggcttcaagatctcctattgggtcattactcccgctgctactgttttcatgtcgaggggctagttaatgccgaggcaccccgattggtccagttgacttgcgtgccgttagccttgtgcgtggcggcatctttctaagggggaaaactttattagtataattcttagcatgatgcatgtgtaagtacagaatcaaccttagtcgattcaaccttctatacattgcactcttcctatctggtctttaagataaactcttcagaatacttaggtaagaagagaaaagagtttttag

SEQ ID NO: 85264 - DNA, 438 bp, Zea Mays
ggggactgctggcgcagagagcagggggcatccatggagctgcttgggagatggcgtggaggtggaagatgtagtggagaacgggggtctgcatttccatcggaggatgatgagaggcgccatgcaccaagcagagggggctactaccgagcaccatggggagagagatcctgctcctgtacttcaaacaaagaggttccgtgtggagagaagagagagggataggctgccatttatagagtagaagcttggcatgccagccagcgtccaacaggtggtgggcgctacagtgccgaccttggacggcgatttttggccttttatgcttggattcagatcttggccactattggagatattttccttgatctacactctacaaatcttatatagatatagagatggttcgagcactgattagagagttaatgacacccg

SEQ ID NO: 85265 - DNA, 353 bp, Zea Mays
acgacatcgagcatgaggcagcggtgagagtggtcactttcaggcgcccattggctccaaatctttgcgattatggtcatgatccctttgtaagatctcttcaccagacctccctttgtcatttgtgtgtggtgacctatggattttgttgactggaatcgaagatatggggtgctctagtagggtttgtctcactgcgtgaatccgaggtaaaatccttgacttgacgtgtctagggcacgaatcccgatgccatcttcacacatgttgcagagggcttaatttaacacaactttgtcaatgggagcttagggttttgatttagggatcaaggtgaacgtgctcgatttcta

SEQ ID NO: 85266 - DNA, 1238 bp, Zea Mays
cttaatctataaaagggaaagcacatgggtagcaagggggagaagacaaaaccagactagcccatctagggactcggggacgaacattcacagttgaatcctcaaagaggcatctccaacctgtcctaggctttctcaagctttcaataatacaacgcacaagtggagcagggtattacgccacgacggctcgaaccactctaaaccatcgtgtgttcatccaccaaatcaggcaaaccccaggctgcccctgttcttaggattaggcaggtgcattcgccacccaactgtagttttctcttcgagatttagcgtaccaagtaggggaattttctatatgattctcttagcctatcgatgaagttcctccttcgacaatcggtgggcatggggttggcgcatcctgcctcctggtcggagttggctctccctgttctctaacaacttatggtaggggaaagttgcagtatgacttcctctacttgttaatggatttcaagagggaggacaacaagggctacgcctttgacaaccccatcgcctcgaaggcatgtcgactcagcgaggcgttgggacatgcggtggcactcagtggatacgatggtggtgcttgattgcgcttaaatggtcagagaagggttgacgacggggaccgacgggtggagctcgctggcgactgatgtctcgtgctcttggcacggtagggcttcgaggagatggtggactagttttagcggagctccaggaagtcgatggcacactcggtttggatggagaatggtcggggatgcttggccactgaagccgagctccgacgaagatggcggctcgtggcgagctcactagagtgtaatagaactctagggaatgggtgcacaagcctaaaggtgttggtgcggtcagagggaataaaaggtggtcggaggtgagtgctcatgcgagcaggatctcagcggtggcggcgttggtttaggcaagcgcagattacggtgggagagagcggaagaggtggcgaagcgctcggggcgagctcaggtggacgcaagcggacttataaaggcatgaagtgcagtgctaagaatgacaatgttgtagcgacactatggttgtggtcagtgagcgtgcgcagttgagacaaggcatcaaacatgtggcgaggtttgtgtgtgtaggttttcaaatgctccataggccgtctatccctccatatctgcctgggatcccattattagatatgt

SEQ ID NO: 85267 - DNA, 1006 bp, Zea Mays
ggaatatgcctccgaatgctagtaaaacgtccttcaaaactccatcaacataagatggacttatagagggaaggcatcgatgaaagcatagcattcctaggcctggcatccgagggccatgccttgtggtggttaggccttggggtcctatgagccaatgctttacataggagccctgacactctcgagacgcacctaaggtaggacagcttcgcgccatatggctacgacaccacaaggtcacccacacgtgccatggagcaattgagataaagatatcgtccatcacatttattgtaggaagcaatattagagtaaaaatatcactttagtctcgcatcatgttgcaggtgtatccatgagcactatacagtgcatgcgctttcgacagctaccaactacatcatacttgaagttgtgggcacatatactcaccatcgtgcttcatatacgatataatgagtatgatagaagtagttggacttctattgggcagagcatgttctccatcccaaggatataaatcacatataccgtcagatgccctcttttactattgactttccaatgtctaaataacttggtttctgatgtcacagtgcgctgtcatcattcttggcatcctcttcagtgatggactttgtccttagactggttccccctaatatgttttctttctctatagcccgagttagtctgccaatagtttcttctacatggtcctcctcagcggtgatggtaacattgtttcattgaagggcttcggaggaggtgggagtagaaactgaagcggtcatctggacgcgagccatctcaaaaaaggatgaagtgaagctaaacaacaaagagagttttggaggtggagctcagggcaatagtttgtaggcataggtgaggaatacagtgtggagagcattgttccccatatctttatgtagccgaaacaactcacaaattgtgagtcacgtacgaaaagcactcgctaccactctagacgaaacaaaac

SEQ ID NO: 85268 - DNA, 983 bp, Zea Mays
atcgtatcatggaacaccattattgcaggatatgtgatgaacgggtatcaccatagagcattgggcctgtttcaggggcttctgtctacaggaattgctcctgattctgtttcttttatcagtctgctcactgcctgtgctcaagtaggtgatgtcaagacagggatggaggttcatggttatatttttcaaaggccagtacttcaagaaacatccttaatgaatgctcttgtcactttttatagccactgtgataggtttgatgatgcttttcgtgctttcaccgatattctgaacaaagactcaatttcatggaatgcaattctctctgcttgtgccaccagtgaacaacatatcgagaagttttttgtactgatgagtgaaatgtgccgtggggtaaatcagtgccagtgggattcagtcacagtcttgaatgttatacacatgagtaccttctgtggtattaagatggtccgcgaagctcatgggtggtctctaagagttggttatacaggtgaaacttcagtagcaaatgctattctggatgcttatgtgaagtgtggctactcacacgatgcaagcatacttttcagaaaccacgctgggcggaacattgttactgacaatataatgatttcttgctacttgaaaagtaactgtatagaggatgctgaagtgatcttcaaccatatggctgagaaagacctgacttcatggaatttgatgatccagttgtatgcacagaatgacatggatggtcaagctttcagtctgtttaatcacttgcaatctgaaggcttgaagcctgatattgttagcattgcaaacattcttgaggcttgcattcatttgtgttctgtacagcttgtgagacaatgtcatgcctacatgctcagagcatccctagaagacatccatcttgaaggagctcttgttgatgcgtactcaaaatgcggcaacataaccaatgcatataacatctt

SEQ ID NO: 85269 - DNA, 497 bp, Zea Mays
gcttgggtagctcagaaggttttgcctttactaagaaatgagccttcacttggcgctaaggctttgcaaaagaggttacaagacacttacaactgtagggtcagttatgatgtgacttggaaaggaatgcaggaagctttaaaagagatgtatggcaattgggatgaaagttttagtatgttgtataggtggaaggaagaaattttgataaaagcacctaatagtgtggtggagatagacacccaagttgtagataaaaaggtgcacttccatagatttttctgtgcacttgagccttgtatacaagggttttttgctgcgtgtaggccttacctaagtgtggattcaactgcactcaatggtagatggaatggtcacctagcaactgcaacagcgttagatggacacaattggatgtacccggttgcgtttgggttcatggattctgagagcaaggataattggctttggtttatgacacagcttcgaagggccat

SEQ ID NO: 85270 - DNA, 351 bp, Zea Mays
acatgccctaaactagtacagtactagtagactagactgggccaagcgaaggcaaggagttcatgctcgaggttcataatagaatttgtggatgtcacatagaccctaggtccctcgcttcgaaggccatgcgcaagagtttcttcgggctaggaattgttagggatgtactccatatagctcaatcctcataaattatcaaccaaaaggggccctcgcaaccaacaagcttaatagcccccacatggcctctacaacattggggcattggcatcgtcggtttactgccaacaacacaaggcaacatcgagtatgccttagtagctgtagaatacttcacaaaggatggaa

SEQ ID NO: 85271 - DNA, 1204 bp, Zea Mays
gaacttgccttaacgttgatgaaagcctcacattgcaatctcaacatcggttgtactataacctatcaagcaaaacccacaataaaaaatcatcacatatcatatttgtacttgaaaaaagaacaaaactcacacaaacaaattctagagaaacacattattctgaattttccaatatttgaacatgcactgcttcatccttaacttttactactcttaaaaaatgaggcaaataggtacattctagaaactaaacaaattttatataacttttgtgttgatcaccaagataaattttatatgaatattctctagaaattaggataaactttctacctaaatatattttcacttttaggacaacagtaccatttctacaattactgctaaaccaaaatagaacttgattgaaactagtggcattggaaagctaacaacaaaaacacaatttttgtatttacataatcatcaaataagaataaatattgttctagagatatcaaaccctatgtttcaatcagtttactcaaccaacaatcttaatgccagcaggaacaagttctataggtcaccctttcttattctgccagttttttgattgaatacatgtccccaagtcgatataacccttcgcgacgaccatagcaaagatagttgccataaaaatcgatcaatggaatcactcacttcaaatcaagcagacacaaagctggctttctaatccttggtcagcatcaccacatctactcgtccatttgaagggggatccacctgtcaacctgaaccccattgggttcctaacttgggggtgcactcgcttgctgcccctgcggcacatatgaggcttcggcggcgccgcggtaggcacaatcatgagtaccctggcggccgctcggaactcctccacgaacgcctccgcaggcaaaaattcctaaacttgtggaacataacatagagccacttgtcgttggtgaggaggatgtgaccattctagttctttgactacgccctcgcgtgcttcttgaactgcaacgacgacaacacctgtgtggtgtcgcacgaagaagaaaaccatgcgaagttttgagcaaaaccacataactgacgaagtagctgacagaccttgtcacggtagccatcgtgtattgtgcgtcatgtcacgaatcttggccacgaacttgccccaggccacttcctcacccag

SEQ ID NO: 85272 - DNA, 694 bp, Zea Mays
gttccttgtgggtatgggatggcatcaaaatagtgatcatatggcttccgataagacgaccttgagtccgtcatactaatacctagtctgtccgaaataattcggctatttcttcctaaattttattcatggtggactgtggtataggatcgaatcccgaaacgtgaagcttagataactgggtattatcatgttggctgtctgtatgaggataagctattttatgtggtggtgggaatccctataattccctatgtgttgggcggtaatcacctctgtaggtgggaacacttcagctttgatacgacgaaggtggaggagggaggtcctgctgtggtgcagagagttgttgcgtgttgtgcacattattccaatctaaatatggtatgtcggattatccgcggtaggtcattggatggtccaacggaacgtcgaacggttcgttgtgggttactagatggtctggtatgggtttggatagtccaagattatacttagatagtccggccacaggtagaggcgttgttgtgtcaattagtagatgatgtggaggcaacgactgtcctgggtatgagttcatcagcataccatataatggttgggagtgcataggcccatttgttactgatgcatctagtgaggttgccactattgcaacatcatgggatgaaaaacagggaatagtagaattttc

SEQ ID NO: 85273 - DNA, 322 bp, Zea Mays
cactcctgaaggccctccttgaggctataaatagggacgtccagggcttcaggcagggggtgaacacttcacagttttctcctccacgcgatattggcacttgcctcaatcaaccgcagggacttgggctcctttccctctctcgaccagcttgtactccctactacaagcacttaggtgcaagtaatataagtctcatccccctctgctagaagtagggctctcactagctcgaaccagaataaaagacttgtgtcaccttgcattacccttctgggccagggcacacaacttcatttcagtagtcgataggatcctcggg

SEQ ID NO: 85274 - DNA, 274 bp, Zea Mays
gcaatttcgatcttcatttttgtccaccaataatgttgctttaaatcatgatacatcttagtacttctgggatgaatggaatatcgactaagatgtgcttcatccagaatttgctggcagacatcatcattcttgggcacaactaggcggttattaaaccatactataccttgatcatcctttctgaaacagtttgctttaccggcctttattttctcatgaatgtgtttcataccctcatcacttctttgtgcatcaataatcttttgcagaa

SEQ ID NO: 85275 - DNA, 520 bp, Zea Mays
gcccagcgatgccaatcgtttgtcgacacttgctcccgatcgtgttcttgacatagaaccactcaccctcttgtacaccccccccccccccccccgcgcttccagccagagcaatgttggaagttggccaaaccgacatatagttagtctcgatggcccggagttacccaaccactaaagaagtattgccacaacttctagtgggggtcaatccccaggaacacctcgcacagtgtgatgaagcatgccatgtgtaggacagagttgggatgaagagcagcttgtagaagaagagcagcccccgcatgaaggggtgtagggggagcccaaacctgcgctcgtagaagggcacgagcacgacaacctcctcatcctgggggcacggcacaccaccctcctccaatctccaccgcgagattcccttggggggagaaacaatttcttctccaggccgaggaagcgactatcctggatcgagcagactgggaacaacaccattcacacgaaactagtaaggcgg

SEQ ID NO: 85276 - DNA, 331 bp, Zea Mays
cagattttcaggaaactatgactaatccaaagagatctaaaagattccccaaacaataatgaaacgggggttcggttcccaaatcccgctatgaagtatccatggcgtggtagccatggatcagctatgcaacgcaggagatagggtgttggatgaatcgcaagtgacggcagcgtaacaccgtcctgctacggattggtgacagtagggataagaataggataacagcgagcgcaacaaactctctagtactgtctccatgttgtgaacttgtgatcaaatcgaagcctagggcaagaagcgaagaaggtccgcctacctccgccgcgag

SEQ ID NO: 85277 - DNA, 328 bp, Zea Mays
ctaacatacaagagcaatcatcagagcaatcatcatcattgcaaaaaagaacgacggtggtggtgactaggcacaccaagaaggatgaccaccctccttcaatccttagatgggtactatataagtttgtcttatccatgcaccatgtctagtccatcgcagttcagtgccatgaccatcgttctggaagggctaaacggcacccaagcattcaccgccttccccattagttgtggcgcatcccctagcagtgtcaggccctatatggtgacccatatcctgctaccatgtaggggtattccatgggggatcctagtctatattagca

SEQ ID NO: 85278 - DNA, 1179 bp, Zea Mays
caattttacaagtgaagctcaaaatgacgtgatatgaagatataatacaaaaaaatgaaggactaaaatctacatgaaaaggcagaagataagatgaaaagaccaaagggagccctcaaatcaaaaagggaagcaaacacccaatttccctcgcaaatgagcaaatgtggactgatgaaggggtttggtcaaaatgtcagcaagttgtcgataggtatcaacatggcgcaaatcgatatctcctttctcataacgatcacgagaaagtgaaagcgaacagtaatgtgcttggtcttcgaatgcggcacaagattcttggcaacacttacgacactcgtgttatcgcaaagcagaggcacatgattaaaatccaagccaaaatcctacaaggtagccatcatccaaagcaactgtgagcaacagctagcggtagcaacatactcagcctctgtggtagactaggcaacgatggattgtttgcgagaagacgaggaaaccaacaaagtccccaaaaactaataagtcctataagtagacttatgctccaaccggcaacctgcaaagtcagcatcaaagtaactgcacaaagatagaacggacgaagaggagtaccataaaccagactcaagagtgaaacacaggtacctcataatccgctttagaacatatctatgagaagtgcgtggggaagcctggaaacgagattacagacacactacgaagtctatgtctggcctcgtcgcagtcaagtacaagagagagctaatcatgctcatgtactccttctggtccaatggctcgctgtcctcatcggcatcaagcgccatcatggtgtacatgggcatcgaaaaagccttggcctcacccatgtcgaacttcttctagacatccttcctgtactttccttgatgcacataagtcccgtcttgggtctacttgatttgtatcccaagaaagaagtttaactcacccatcttgctcatttcaaactccctgctcataagatctaaaaaatcatgacacaatagcatgagaataaccaccaaagatgatatcatccatgtaaatctagactaaaagggtgtcactgtcatgcttgaggagaagagcccattttaaaaccctttgcaagcagaaaagaattcaaatgctcataccaggctctaggggcttttttaa

SEQ ID NO: 85279 - DNA, 350 bp, Zea Mays
gcatgtgcgcatttgattgtttagttcagcctttttgctaaaaatgcttggttagctcttaattaatgtagacttgtcataactaagcttagtaatgcacgtgtgtcatgttttagatgtgtccttctctatttgattgtgatatatgaattccatagaaattggtgcataggtcctccgttaaacgtgtgtttggaatgcttttgtatgatcgctagaagaactaatgaaatgccgtattaaattaaataaatgcttatgcccgtgatgttgtgttgtggtggctatgtatatgatagtgtttgtcggttcttagtagtgttaaattcgtaggtcaataacgtatggct

SEQ ID NO: 85280 - DNA, 460 bp, Zea Mays
gctgcttgcaacagactggaaggaactttgaccaggctgactgaaacgtgacggagcggatcctgttggcttgttgaggtttgtccccttggaagggaacccaaaagatcaaaccctctggtgcctgtcctgctgctgagctcgaagacttgacctttttcctcttctcgttctctttccacctggatgcccttgttcgagaggtgcgagaaactgaagaagtcttggctgacaaggatggtcttgagttttggtcttaaccctttcaagaaacgggccatcttcttggcttccgtgctaacgtcatctggtgcataacgagcaagttatgtgactttatggatgtattcactgatggatcgccctccatgagttaactcccaaaattcctcctccttgagctggacgattcccaagggcacatgatgctctcggaaagcagcctcaaattctacccagg

SEQ ID NO: 85281 - DNA, 387 bp, Zea Mays
ggtacagtgacattggtgggactaactccatcaacgtaatcaagcttcctgaagcacaagaagaaaaggaaaattaagtcaatgtagttttattttccaatttgtacaacaacaaccatcttaaaaagcctttctcaataaaactgtgggtggtaccgtcttaccaacaatggtgccaaatgtaaccaacaagaactgtttcaggcctagatttagtgcatccgactctttcgctctttctagtccagaattaatccaattggaacacttttgcctagaacgcttcttctccttgctcggcagcctaggattggaaaaggttgtttgagaaaaatatgagttacaggcttacaacttcagacatgtgatagccaaacctgaatcaac

SEQ ID NO: 85282 - DNA, 494 bp, Zea Mays
gtagcaaaagccggtaaaacccttggatcctggcttcttcacccgtgtcgatctcaagcggccgacttcattgtgcatttctgcccacgtgcgacgtagagctgagaacgggccgggtaccagtaccagcagcggcgaagcacggagagcaatgccaataactgagtgatggtggtgctgttaatttggcacatttcggtgcatgcatacacatgcgccttatctgtttttgtagcattgttcaccaaactagtaagtatactactactagtctctagctgctgctgcgtgattgtgattttggaaacatatatatggacgtccgtccttgcttgtttggccgcaggaaattcgtataattaattaacttttagcggttaaaatcaacaataacatctagtatatcatctatttccaacttcactctacaaacattgtcgtttatagttctgcgtcttcctatttcacactatgtatccactcatattatccag

SEQ ID NO: 85283 - DNA, 341 bp, Zea Mays
taataaagcccaagcatgagaaaacttcaaaactcatgataaatactcataagatatcaccattaatggacttaagtgacacccaaaccctagaagtgccagaaccctagaaaggaccactgaaaaccctaagttgaaaccctagggggttatatgtaaattttgcacacttttggacctaagtgcaaaaaccaaggaattagggtacctcaagtcatatggttcacatatttgaagatttgcatgtcaaaatatgtgaattgggctcatttgtaaaaagacactcaattcctctcacatgactaagtctaaaaactgatgagcgaggctgactttggagc

SEQ ID NO: 85284 - DNA, 598 bp, Zea Mays
ccacctcaacgaaccgttatagccccccgcaaaaaaatagggattcatgtggatttatgtgggttatcaatctccataaatttttaagtacttagaaactcaacatcaattattaagtacttagaaactcaaatagagatctttttacaacccgatttgttgattcaatctttaacgaggaacatttctcaatattagggggagacttagagtaccaaaaaggacccaacttttgattggatatatagatgctagctatcttttatatccccataatgatataacctcacaacaggctttgtctatttacaatgtggaacaactatttcttggaaatcaattaaacaaactttagtggctacactcccaaatcattctgaaataattactttatatgaagcttctaaagaatgtgtatggattcacaaatgattaatcatatactacaatcttatggtataggttctctagaattaccagctcgtgttgtccagatgaaagttggttatattaagagcaataccattgaacatatagctccaaaattgtccacatgaatataaatacattgcaaactaaatcatgtgataacctcgtt

SEQ ID NO: 85285 - DNA, 784 bp, Zea Mays
aaaaatgattgctacttggtttgaattgcaaaataaaaagtaaatagcagttgcaacttgggaaaacaaaaaaaccttttcagctcaggatcagaggcgatcttctgcctaagtgcaacagccttggccaggggtatctcaggtcgattacgagggatcttgaacggggatatgtactccctaagcttcttcagcactctatcacctaggcgcttgaatatcatcctttgaaactcactgaaatcagcctggcctactgagacttcgtcttgagaaagtcagattggttgggtcaaattgttgatatcatcatcagactccgcagggaactggatatcatcaaatgatgagctgggttctgcctggccatcaatgctcttctccaaactaacaatctcagctttggcctcctgacgaagcatgttcaacctatcctcgtactgttggcgctgctgagcatattcttttgacatttgtaactggaacatcttctttcacttggcagcgggcaccggctttttcaaagctttgatgttgtccttcagctgtttctggattgcagcctgtatccttttctcctccgcttcaaccttcttctcggcatcagccttcttcttcacagcttcttcagctgcagcctttctcttaatctcagcttcttcggcctcagcctttctcttattctcagcttcttctgccttcttcttctcggcatcagccttattcttctcagcttcttcagctgcagcctttctcttaatctcagctttttcggcctcagcct

SEQ ID NO: 85286 - DNA, 493 bp, Zea Mays
tgccattcaacactcgacagaatgaacaacccaggttcacagtacttcactaccaagttcagttaccttacacaagctaactattacacagataccttacacaagctaactcttacacaaataacacatccagtgccattcaacaccacccatattactctacttcatctgacgatccgaaagctcttcagaactaacatcatccagtgcccattccccaccacccatatcttcatcttcagcaaattggttgttgaaccactcatataatggtggcgatggaccagcttcgagatcttctaaacgatgtgcttcgtcctcaagtgactgagcaagctcatacacgcgccacattgcaaagttcactgacacctctttggtcgtatctggcgaatccataatcttgtctgtgaccaaatctttcaactccttcccaactaaatgcatctttgcaatggcttgggcgaggtcactacgaactgtttcaaatcgg

SEQ ID NO: 85287 - DNA, 601 bp, Zea Mays
gccgacttaagtcgattgctccgtttgtagggcatagtggtcaccccgagttaagtaagaatgcaagtcgatcataaacgaatcgagtatctttgaaatctatctttattgatgacatatttccactttacagagtacatggtcgccccggctgtttgaaatatagctaggggtaaaactttctgaggtgctctatgttccaagagttcccaacttctgtaccatccgtctgggtgaggcgatacgatccgggccgagtgacctctgttactatgaagggtccttcccataagggtgatagcttgtgccgtccctcccccgttagaattcggcggaggacgaggtctcctactgaaaagaaccgttgccgcacagccttatcgtgatagcgccttagagtctgctggtaccgtgctgattggattactgcattcagtcgctcttcctcaagtacatcaacatcctccagccgggtggcctcagcttccgctatgctttcgaagatcaatcttggcgccccaaacttgaggtcagcaggtagcactgcctccgacccatagaccatgaagaaaggggtgtttccatgcagggctcggctagg

SEQ ID NO: 85288 - DNA, 657 bp, Zea Mays
cgtcgggtagggaggtggtattcttgggatgttctccaaagttcacgttatccttgttgtcgcaattgcttccggatcgtcggtcaaggaagtcgggaattcttttctccatggtggtggagagtgaggctgctttgcgggtgcaagacatccgtgtggtgtgtgactttgccgacgtgtttccagcagagcttccaggcattccaccggagcgtgatgcagcttttgaaattaaactgattctgggtacgcagcctattcataaggccccgtatcggatggctccaaagaagcaggttgaattgaagcggcaactggatgatctgctggctaagggtttcattaggcctagcaggtcgccatgggcttccccagttttgtttgttgagaagaaggacaaaagtaagaggctatgtgtggattatcgtgctttgaatcaagtgacaatcaagaataaatatccgctaccccgtattgaggttctctttgagcagttgaggggtgcccaggtgttctccaaaattgatttgaactctagttatcatcaattgaggattcgtgaggaggatattgagaagacagccttttgcaccaggtatgggcattacgagttcatagtcatgtcttttggcttaactaatgcccctgctgctttta

SEQ ID NO: 85289 - DNA, 1159 bp, Zea Mays
gatctttgttgctttgtccctgttgaagtacatggtctcccacctccagagttcttcctcgtaagcggcggtcgtgataccttcgtagtgccttttggtacctcgccgaccataggagcgctatgtcgcgggcttcatccaactgatccagcgcgtcttggaggctcggcttgttgccttcatccgcgtatgccttcatctttaggccgccatactcgagatcagtggggagccccacatgttcttgaccatgatgtcgtcgatgtatgcttccatgaccctcacgatgaggtcgccaaagcatttaatcatgcactgctagtatgttgctcccgagttcttcagactgaacaacattgtcacataacagtacgaaccaaaagggtgatgaaagaagtggatggttgatcagattccttcatcgtggtctagtgataacatgagtaggcgtcgaggaagctcagtacctcgcacctcgaggtggaatcgaccaccaagtcgatacgggggaggggaaacagatcttttgggtatgccttgtctaggctggtgtaatcaacgcacaccatccattttcctctcttcttcctaaccagtaccgggttggctaaccactcgaggtggtgtatctctatgatgggccgagccacaagtagttgctgacctcttccctgacggccatgtttttttcttcatcgaaacggtttagccactgctttactggtttagacccaggcttgacccatagagagtgattggtgacttcccttggtatgcccctcatgtcgaagggttctcacgcgaagatgtccttctcttattggaggaagtcaatgagcacactttcctatttgggagagagcttggcctcgatgcgtatcattctcctgtcggcatgctcaggatccaagggtacttccttcatgtcgtccactggtttgaaggtcgtgcccgccctcttcgcattaggtgcttcctcgtcgatggcctgaagcatcttcggaagctcctagctagtggtggctcctttggctaagtcacaacattcaactttgcattcgtatggatgatgcgctatggtgcccacggtatgggacctgttattttgagctttaggtacgtgtagttggggatggctatgaacataacgtagcatggc

SEQ ID NO: 85290 - DNA, 319 bp, Zea Mays
tggcacttactcgattttgacatttagttatcagctttatcggattatatggtctttgctggaaagataatttccactacctacaacaaaacatgtcatttttatataggaattcttttcatttatgtggaatgacatgcatgatctcttcacctttacacatgtgacaaccttaacatgatatgaatatgtaaagtttgctattaaagcctttataaatggatattgttgtagtattgttctgctggttaaacaagcatagtagttagatgagaagtgatttgacaatgaaggaacaaatactaaaagattgagagta

SEQ ID NO: 85291 - DNA, 399 bp, Zea Mays
acctggtgaaaggtgcttctttaggcctgatatggtgaaggaggccgaggataaggtgcagaaaattattcaaaatatgaagaaagcacaagctcgtcagaagagttatgcagacaaacggcgaatgcccttatatttcctggaaggagactatgtctacctgaaggtctcaccaatgaagggagtatcgcattttggggttaaaggaaagcttgcaccacgatacattggtccttttcttattctggaaagatatgggccaatggcataccgattccaactacccgaaacattgtctgctgtgcataaggtgttccacgtgtcacaattgaagaagtgtcctcgggttcctgatcgaaccatagaggtaacagatgttgtccttgagccggacttgac

SEQ ID NO: 85292 - DNA, 653 bp, Zea Mays
gccatagaaaaatgtagtgcggtgtcacaataaagaagcgctaaaaatattacaaacctaaaaagtgttagcatggcgaaaaaatgttgatataagcaaagaaattaggagacaattttctggtgcctacagatgcttttctagaagagtgctagcatggcacaggttcctagagttgcttttgtagttctagcctggttggatgcgccgggatgtgtggagcattgcgagtggtggcgattggcaattgaagacgcatcgctgctgggatttgtttctttcggcattatactaaggttcaagcttagtaagaacttacccgtgtgatgccgtcggaatctcgaccccttcttcctcggaggcatcttgatgtggtgacaaacaagctcaggtgatatcttgccacgccaccggtcggaggaggttgcgtggaagttgaggatgtggcgtagtttccgtgggaggaagactagagaggaaaggaaggtgggcgttgattgcggggaagctgggccactacttttttatttcggcgtggagatgtggagtaattttattttcaatgaatatggtgccggccgaatgccccaaccattctaatatattctcgtttcctcttttcaatgaatatggcaacgaatgccccaaccatt

SEQ ID NO: 85293 - DNA, 679 bp, Zea Mays
gcgcggacgacgggagggaggcccacgggacacgacacgttgcgtgcgcatgagtcgcaacgtgcaggcccgcgtggccccaccggctgggcgggcagcatgtgggtgctgtcgggtgtcgccgaggcggatacggtcgaatctgtctgtgtgcagggcagggcgtggatgcgcgccggacgaggtacctgtacggtgcagtgctgtgcggtgcgcgtggcggtcgctctcagttcggccattttctggtaggttgtcgagtgtcttccttccatgcctttcgtttcggcggctccgtgtcagcttatccatccggctaatccccaacacgagttgaggttgagttatggtgtgctctcttttttttatgtacgtagaacgagagtgggttggggtggtgtcctgaacaaccctgtctctatctgcccgtgcgcccacccataccagcacgcgtgtggcgcggattcgggatgcaaccaataatatacggcccgtctgattcgattcgccgttctgccgcggtgcacataatgcaagctacctagtaggtcacgcatggacagaaagcagcaagcttggtgcatgcgcctcaggtagcgaccgctcgctctttacacgaccggacacgtccgttgcaagtccggcgctctgatcacttctgattcacacattccctgtc

SEQ ID NO: 85294 - DNA, 549 bp, Zea Mays
atccttcaaatccagctagcaggactaagagggctccagctggttctgtgggacctacctctttttctaatgtgtcggctcctcagttgcctcttcatggctcttcctcccatgctgctgctgcttctcgtcctatggactgcggcgggtaaggatgaggtcgtggaagaaggcctagtctgtggtttcacctagcgagaggtattgctagtgtgttcgctatctgtcgcagccatgcagcagacatagttgagatgtgttgcgaggctcagcggatggacgacaacctacgccaatttgccgcttccatgggctatcggatgcctgatcggcagcccgcaactcccctgcatcaatatctagaagatctcaaccagtggcaccaacaacaatatggtgtcctcttcataactctagaggaagaagaagaatatgttgatgatgatacctttggtcagtctatcaccgctgctcctgcttctgccctagctcctagtggccctcgcctgtcctcctccgctcctcctcctccattctaggaaccttctt

SEQ ID NO: 85295 - DNA, 640 bp, Zea Mays
tctgtggtgtggtgcttgctcggatagggtgtcttcagaacaaggagcaggactcgctaagacgggcggatgagggaaggcacaggggctcgtatatatgctcaacgccgagagccataggattcggcccgagggagccagcattgcggagtttgtttcaaatggcatgagccgaacatggaggggatggggatgactctggacaaccgggctcacatggcagcaggtgtttcggttgggggattctcggcagatttggcgcgatcttcaccaacaaattctgttgaggcatgcggcttcatggaaggaagatgactggcgatatggtcccacatgtcagcaacgtgaagtgagcagcacacgggtccgcacattagcaacaccagcggtgcatgctgttgggctggcagggacggctgagatgggccaaaatgtggccgcgacagcccatccggcttcccactcctcttttattttatttcctattttctatttcctatctcaatcccgaaattcaaatgggattttggttttaaatttcaactttaagtaaaatgcacattccaaaaaccagaatgatgcaatatatatttatagtaaattctttactcattctcctacacaaatgttgcaattacgc

SEQ ID NO: 85296 - DNA, 392 bp, Zea Mays
aagattagggcaagtgacattccaaagccgatttttcaaccagatatgggccaatgccccaacatatttcatgtacctgatgaactcagtatttatgccagatctagataaattcgtagtggtcttcattgacgacatcttggtatattcgaagaatgaaaacgaacatacaaggcacctgcatatagtgtaacaccccaggtgtttatgaccagtttaacagtgagtaaggacttaagcatagaatatgggtgagaataatggtctctatgtcataaacatctttgcccatcccgattttcgatatcgcatctatctctgtttacctgaactgcccaagatgtttttgtgcagctcggtgttaaactactatctgcgatgtcgagccttgt

SEQ ID NO: 85297 - DNA, 562 bp, Zea Mays
caccagctagggtgttgaggcgatcctcaccatcttcacctggaacgatgctggtctggcttcctccactcagacgcagatggagatgcctgaacctcgtgtcatgcagctaatgccggtaggtgtggctgagagacaaagtcctaaaccctatatcccgtgcatctatcaccctgacgtgaatgcgagtgatgtagtagcaagcccggggaggctcgctcactcgccttgtctcgtacaagggttggacgtaggttcccaaagcgtgcatcacgtcttgcagcaggttgtggaagtgccccgtctcgaacattgatgtgtaatgttcggtgataggcccaaaccccatgaagtagtcctgctgggcatagttggcttcctcattgatgtgttcctcgtcatcctcgtcatcgtcttcatcctcatcatcgtcgtcccaagagtcgtctgggtcgtcacctccaggtgcaggagcttgaacggctggtgcaggcggtgccgaggttgatgacctagctacgaaggccagtgactctgctagcggggtgggcgtcggcagaag

SEQ ID NO: 85298 - DNA, 740 bp, Zea Mays
gtgagttacaactttcattatctttggtttcggtgcagtagaaggtgtcattgatgcaattctcttttttgtcccttgctttcgagctggaaagcagtaatcaggatagacaaaaccaatgacatcaaaaactctgttcagccatttctttccacgggcgccgaaggcaatattcatggctttgtcttcggcttttgtataagcccccaacaaatcatcaatggtcgcctcaatgtcctcgagccattcgtcatctggctccccgaactgatttctgtagcggcatgtatatttcaaataaattagaccaccttcgcttgaactatcagtggtctccttcggcatctcccatccactaacaaggggccataccctgaaagatatgtgctcttggaccaagtctctagtgctaatgtagatgcacacattgttgaaggctaccaggaaggcttgagccttatcactattcacaatcgagggacttcggatgctgaaaagtgattgtattggacgctgaattatatcttttacatcctccctctcaaccaaatcattcttaacataaaaacattgtctcatccaagatcatggccatttcttctgaaacgtggggacatggcgtctcgcatcagagcgatatacgaaggaatagcaaccaaaattgttatgatattgctccttccccatcgccttcgtttggtaagataattcatgtatattgcagaagcagtcgacgtccg

SEQ ID NO: 85299 - DNA, 285 bp, Zea Mays
tatcttcccggcttagacctaatgtgcctcaataagcaactgcataaaagtgggctaggtatgtagtgctgtgcggatcattcgttggtggttttgaatctttgattgaaccaacaaaattgaggggaaaaaagaaagcaatggccgaaaggcagggggaaaagggaaacaagtgctgccgcagctaatggctgttgttaagctgttatctcggcgcaagttgttccctttcttctgggtttggtcttgatctttctctaggactggactgatgaataatgtttc

SEQ ID NO: 85300 - DNA, 504 bp, Zea Mays
cacaaatgtcagctgcttattctctagtctgcaacaaactcctaacgaaaccatcgtattcctcgcgcgcatctaaacctgagctggggttgttaagatccatgcgtggctgttgagatccggcgatctggctgttgccctgttgcaaaccgatgctttgcatcatgcctataaaagtgtcgtcgcctcgaccaagtttttcctggttcaggtgctcgacatactatcgtcaaaaccgagtgggtgagcaaccggggtgctcacggactggagaggaacagagtgttgccgtcgtggtcgaaatttattggaagtgcgtattagggcttgctgtgtgtctgggaggcctcgttgccgcgcttcaggcggccagaatccttcgccgatgcttcactactactcaccaccgtggctggagatttacctgcgatgatctctggtaaggacgttccccattgcttcgccatgttcctgactccgagtagtgacattggaatcaacgat

SEQ ID NO: 85301 - DNA, 881 bp, Zea Mays
taaaagcaatgtgctcctgaaccaaatctctagtgccaatgtaggtgcatactgtgttgaaagccatcaaactttcttgtgtttcatttccacccgcgatcgaaggcctcctgataccgaagcgtgatcgtatggggcgttggattatgcccttcacatgctctctcccactcagatcatttttgacataaaaccaatgcttcatccatgagcccgaccattttttcaaaatgttggcacatgacacttcacatcagatcgatacacgaagctataacattcaaagttgttatgatattgctctttcccaaccgccttcgtctagtaggacaattcgtgaatattgcagaagcagttggcgtctggctctagcccttagctcctcatagcccaaatgaaaactccaactttaatcaaagcctcgggagtaagctaattaagttatatttcaaatgtcttcagtacttcgaccaacatcttatgcaagggaaagcgaagcccagccttcataaaacttttaaataccaccacttcgtctgcttcaggaagaggaacattactctcttttctggccctcactatagatatatcatggaaatatttgcccttcattgcttcaatttgctcttgcttaacagtggatttcccaaaaacaacatgacttggcctccatggccgatcttcggcatcttcgttctcactctcaacatcaaaactctcgctgtcgcttgagtccccagacaacccaactaacattttatcaatgattttctcaacgctggtcctctccatggctccataaaaaccagcaagcgcggggtccacgctcttattctcttcgggcatttcagcgatgattacaacaaaaagccgaagctcaa

SEQ ID NO: 85302 - DNA, 555 bp, Zea Mays
ctggattgctcgcatgattatataaaagtaaaggggctaaagcgcaaaagcgtcctagacacagcgattcaccagagtggacggcgggttctatattctaataacataaggactcttttgaataaatgccgaggcgaaggggtacgggaggacatcagccgcacgatccagaatcgagggctaagattagatttctttctaaacaaaacggtacgcaatatcagccacacgatcatggatccgcggtccaggttagatcgcacaaagggataagtcatggctaaatttcggccacccgtgcacagatctacggtcacccagtgacatccccccaaatctaatcggggacgttgcacaaagatccaacggtcacgattttctctcctacctccgagctccgcacggcggcgacacctagaagcgcggtcaatccccgccggggttccgggttctagcgcaagagttcaccagcgccaaatgtgccagcgacaataggatgcagaggcaacggtgaactcgacacaagggtccttaccagtgatcacgttgtgaagc

SEQ ID NO: 85303 - DNA, 618 bp, Zea Mays
gttaatcactacgatccgcctcccagcttcttgatccttcagcgaaaagcacgtcttttctgctcttgtttcatgtcgcaattatttcttcttcggcgagaagaatctaacgaacaccgctcatggtcacgtcacggagcctacatctcggttgaatctttatttactgttctggcacagattatttcttgtgcttgcgatatgatgatagtacatatggattgcgattcgacctctttcggatatgttggttcggttattatatgcatcaaatcattgtattgcaaacgttgggaggtttccattccctttcattttcccttgcgaaaactaggcaacttgctgtgaagttcttgctgaacagaattgcccagcagatcaaagcatgaaattgggacatcgaaatatatcagggttctctagttttgtcccgaagatttttcttcttcaaaattgctacccgataagattcctggagtttttgtcttctttcgaaaggatgccatatgcatccgcgtaacctgcagcagaaagattctgtttatctactcactatcttttgctaaaataatttctgttgttcacggttgtaatttctccatgcgaagtacaatattg

SEQ ID NO: 85304 - DNA, 379 bp, Zea Mays
cggagctagagaggagtgcactcgaggggagactgacccaccataaatggctgaccgtattaactacgtctggcatcgagccatagtagagaaacggtccgcctcccactgatgacctgtgagcccctcggtctacgacgcactcatgacatacaagcccatcggaccgcagtgcactcatgacctattgagactaggcctgagtccgcaggccatctacagggcccacaatacgacaagcaacgccaagatctaggctacggaggccaggggtcgacgtggtgtagaggcagtaatgatggcgccaaggctccacaccgccacaccgttcgtcataatttagcacgagcagagacgaacgggtggccaagatgcctac

SEQ ID NO: 85305 - DNA, 398 bp, Zea Mays
tcaactctagcctaacatgtttaacctaatctgacttgactaggacttgtgttgggtttcaagtctagcttggctttgttgggttttaactctagtctatctcagtttttttttgttggatttcaactttagcctatcttgattttttgttgggtttcaagtcttgcctatctcgacttacttgaattagaggccgttatcttgacttatattgggttttaacttggaattagagaccgttatctcgacttatattgtgttctaactgtagactatctggacctgggattgaagaccgctatctcaacttatattggggtttttgaactctaggctatcttgacttacttgggtttgtagaccgctatcttgacttatattgagttttaacttaggcc

SEQ ID NO: 85306 - DNA, 694 bp, Zea Mays
atccaaatgtgttggacagcagaggcttctactgtgtacctcgaggcaatgtcatccacactcatcagaccatggtggtcagtcgacatcccttggtacagttgtattatctagcttttgaatgtgctggacgttcagaacttgatggtagcaaaaacaagaatagtcagaaaaaaatccccatagtagggcacgtgactgtaatcaagtcagttacagggagaaacaaacaaggatgggacatgagtgggtttctattctaggtatcacatagctaacagaaccatgaacatcgaaatggtgaaatcatactaaaccatactaaacgataagcaaggtaaactgaaccatgaaaacattagttttaatttccattaatctattaccacagtccagcctcacagacggacattaactttgtcattgtattgtaatatgtaaatcataaaaagaagcaaaaaaacaaataaattacctttatcaaactttttgctatcaaggtgtagcctggtaacgatggaggcttcctcgaagagatgctcagatatatttcgtgtaaaaaagatgagcgcattgcatacatgaaccaaaatcatgcaagtaaataagtaataaggcggaaaagcaaactctgagctaataatgacggcaccatggtaagttgaatcgaaaccaatagaagcaaacgaccttg

SEQ ID NO: 85307 - DNA, 306 bp, Zea Mays
ctagttcatacctgtagagtagagatggagctagggctccgcttgagagcagatgtaatacttttgctttttgtaaggtacttttgagtactatttatcaagcagtattagcacttatctgtgtaccacttgtccctgttgcgtgtggtgtaactgattcttccttggcacctggtccctctgggatgtaggctcgatttgtcgaggctgtagaccagtgtacctaagaaagagtcggtgatggccctcaggaggtaacctcgactgggacctgggcctgcacacagcttcggctagggagcatca

SEQ ID NO: 85308 - DNA, 585 bp, Zea Mays
tcagcaactcgtcgatcaagctgctcataggatgtcgccgcagagtcctggtattttttaaaagcttcagtcatcgcacgcaacatctccttcaattccagttgagagacacactcatcgtcgttaagcttaggccccttctccttgtccatttggttctttggtcttgtcattgttagaaaaaacagagacaaaaaggcaacaaacaatgtgaaccctacaactatctctcagggtggtggtggtggtggaacataagttatgaagcgtcttaccccgctcttacaaggttcttaccagcactgcaggtggcaaacggtgaccggtgcgactgtccaacgagcgtgggtgtgattgcaaaggagtacctgctctgctcgagagaaagctggagctatgggagggctgactaaatatatatatgtggcacacaagtcaataatagatagcaatgctcaataagtgttccaagtactcatcctagttgctggcctataaaatgtaatagaacagttggaccaagacacaagaaaggaggtacaagtatctaggtgcagcaaggaaacaggcttggggcaaaataat

SEQ ID NO: 85309 - DNA, 271 bp, Zea Mays
gaagcagccgaagagatgtgtcacatcacacaagacaacgagcaagggcataggccacaacagagagagcttcgttaggaaagcccaagctatgatgatgtatgatataacgattttcatcatgataacattgcttttgatgatgcttccccctagctatagaattgcatgctaccccatggccaccttcatacaaaccaccacagcttcccatgtatgatgggcatttggacccgaaacagttcctcatgagttacgaaacaaccatatc

SEQ ID NO: 85310 - DNA, 793 bp, Zea Mays
ctgacactttgcgccgaggcccctcactttctattccttcgcgaattgaagtcctcgaccgtggacggcggagcagtggctccggtgagcctaccctggccgaaaaacgcaatggctatgcttcttctttgcttgacccctaattctaaccctggcgacaagaatccctcaactaattgcacagttctaggtcgagaactctctgtccacggggatggcgcacaccgaggacaatccgcggtgttcctagtgatctatcgtaatctaattcaattggccgggccgctaagcatctatagcacacagggatgttgaaacgagagcaaggaagacatgaacggacctgtagcgagctatccatggtgagcactcacacgtcggtgttcttgactaatttgggggaaatcccaaattagagctctctggtggacaatccgagacacgagtgggtgcgctggatgcgtgactacctagcggagccgatgacatgctcaatttatagggcccgagggcggtggctcgtgaatttggaatggcgcgctggcggccggagagaggggagaacactggcgcaagagatgcgtggctttcatcgtggcaaggtcaccggcgatgaacggacatgccaaggcgagttactgcgacgtggtagagcacctaggcacgaggcaaccgatcgacaggcggccacctccggtgagcttatctgaatcggcctgagtcaagcggacacggcggccggggcgaaatagtgtctcaagctcatccgcggtgaagatcttttcaccccgag

SEQ ID NO: 85311 - DNA, 609 bp, Zea Mays
ggagaagcctacgacaatgcgtggaatatagaatagttacgtcgcttttatccctaggaatacatgcctatttgtactacgttctctatgattaataaagaatagctctcaagagaggctcggccttgctttcaaaaccgagcctccctcgggggctagcaggggaaacccctcctctgtgttgtttttccttgcagttttgaaaaacgaacacgtttcgtagcctcaccctagtcatagtgtgaaaacccttaggaacagaggacgtcccgactaaggaaaaatagccgagccgcaggaacacctacgcatcagggatacggtttcctcactcactattccctcccaaaagggtaactcacgttctgacgggaacactgcagtaggactaaagcaacaggcacaaaacaacagaaaaaatcacacagcaaacaacaaaagcttgatatccagagtcaactgagttcttatcatatattaaaaaaatcccaaaaatctccgaagggtgatgacacggttcatgcggtcggaggaggtacgacagcgggtacggcagcagttgccaacaagggaagaggaaccgcctcgacctcgaagtggcaggccagc

SEQ ID NO: 85312 - DNA, 465 bp, Zea Mays
gacaattgctcgtcggagctggggctccgccgcggtgtggtattccgtgtgggcgcgtctgtataccttcacctcgggcgggcgctctataggtcaactcgcggtgttttcaaacggggggtagggttctcgtggatggttgccgaacactcagacatcgggcggtgtttcgacggtgaggcatccgccgtcgtgggtgctcgcaccgccgtcgcagcggagggttgggagagaaagtatcatggtcgttcgtccagaagcgggtggcggtgattgagtatggctgagcgcatggtcggattgaatcccagccgctagatcaagatccaacgactgccgtggcataccggttcgctagcaccacgatttaatccaggtcgcctaacgtagatccaatggtcagattaggccagtaccccttcggctctggatttttgctaaagagaccctgaggttaaaagaaat

SEQ ID NO: 85313 - DNA, 408 bp, Zea Mays
gatagaccaaaccaagagatgaagccgcctagtggtggaaagacatggagaaggcctaaggccgatttcgtcctaagcagggcccagaggaaggaagtactacagtggatcaagatgttaatgttccctgatgggtatgcagctaacctgagtagggggtgaacttatctactctgcgagtcttagggatgaagagtcatgacttccacatatggattgaacgaattcttccggcgatggttcgaggctatgtccctgagcatgtctggccagcgcttgcagagttgagctatttcttccgccagctttatgcaaaagagttatctcggaccgtgattgcagacttggaaagaatggcacctgtgttactgtgtaagctggagaagatctttccacccggcttcttca

SEQ ID NO: 85314 - DNA, 441 bp, Zea Mays
taaggaaaaaaaatagagtgtacaaggttgagagcctagccaagctctcaagtcacccttacagacaaggaggaagccccctagggagatccctaactcattcttacagaagcggtttcacccctatagagagagaagatccttattaacactccccacattaattgttcatatgacgttgaatcgtcgatattctatgtatagactgaaggattagcatgatgttttcatgcattggctatattattgaaggttggagtatctagtgtatgctaacaatctccagttcagtatgtgtctgaaagccatgtccatatgttcactatctggattattagtttatggactcaagaagtaaaaggttgccccccctatattttcattgttgttttccagtacctgtagctgactacagtatgctctgctgatgttgtgttccct

SEQ ID NO: 85315 - DNA, 1688 bp, Zea Mays
cttttcattaacccccatatcaaacaaacgtataataatgtcaaataagatagcaaatatgagattttatacaaacacaagtaatagtacaataatacataaccatcatcaaatgagatagcagatacaatgatccattgagtctcacataaagaaatgaaaggaacaagaaacaaataagtctcacacaacgagataaataaaacatgtacaactcatatcacacccatggccctctataattgccatacttggttatgtatttccctgaaagccagttgaatctatgttcggtaaaaaaggtcatgaacatctctttttgggtcagtttgacaaatagttcagttgtaatgaagtgctcgttactaccataggtggcaccacaagcaagcacatgtttcatcacttcatcaatggaaatttttccttttttgcagcataagaattagttgaaacagacatagatgtaactgcttattgaacgatgattagtgttgtccctgttttctgttttctgcttcttgcctttattttgattgaaccttggcggtctcttgtcatttggactgaccggtgaaacttcacattcattggtgtcaccatcttattgtgtgtcacaattgattgcctcgtgtggtgtacctccttgttcagcaatggtggaagcagtggccatatgaggagaccaatgatcaacaccaatacttgtgatgctgccaaaacatatttctagttcctccatattttgaagttcccacaacttggaatgtcctgtaaaagagcaacatgtggtgcacgaatgaatacaagaaatcagaaatatacatgacataaatacaaaagaaagcaataactcaacacttataactttagctttttccaccacctgccagccatatcgatggttccttttctagagcaccaaccagtacatgtctgcctcatcaacttcttccatgccttgaattctttcaacatgtcccatttgttgtcccatttgttctttatttgtgtcttggttgccacaatatggaccatgtctttcaatcctttttcaacctcggcacaaccacccaagtcaaacaagtgtttggatgattccctacttgtttggcaaatagtttacaaatttctcgagcgttctcagcattccaattaatttcagtcatctataacagcttacgagaaagaaaataaagggatcatatatatagaaatttaaagttgcagttaggcacaacacaggttgctgactaaattcaatgcagtgcagtgcttattactatttttgaggtggactgtcacctggaactggacatagaggtaagccgaaatactcgggatactatgcagaccacacctttttgttctataaaaaaaataattcagtttattcctattcctaccaaaaataatccagtttgttctaaatagcagtaagcaggatgtggatgtaccaattaattcttcattaatccaatgcagaccacaacatttttagcactataattaattcaacatcttgcagaacacgacttccagaaacaaatgaagagaacagaacctaatccaatccaaccgcacatccacccataatccaattacacagcaatccaatccaatccattacccaattacacagccacccattacccataatccagtcaaatccgatcgattgatccagc

SEQ ID NO: 85316 - DNA, 707 bp, Zea Mays
tggggtatcttaaaaaaaccactgagtacacaacagagacgttggatggactacttttgacgatgttcgagacccaaatcaagggtttagagaaagtgatggtggaccgccatgatgacaccgtagatcatgtcgtttggacaccaaggccaggcaagcacatctagatgaggtggctgccagtctctgacacctcgtgccgtccatcgtgttgagtgcttgataaatgccaccctgtgagctggtgctcgctatctaaccgaaggacctggcttatttgcatcatgtactgtggatgccatttcaattctaaatgtatgtctattgagaataaaggagcggatggtgcgcttggaatccatagatgcctttttcatttgaaacttcaagattcaaaacaaataactgagttttggtattgaacgtagccttgttctgaaaacaagtgaagaagatcttgaagcacagctcttcttgaggaaaccgaaatgttttatcacacctccatctccatgtcacactggctttatctaactttacatgagatgtagcttatgtatcactgaacctatgctaaataaccatgtttccatcttctgtcattctcggaacctggccacagaaaatatttgcttgttaaatcccaacagatactttccttgtaaatcctcaagaaggtggcacacatagtagaccaagcagcaact

SEQ ID NO: 85317 - DNA, 571 bp, Zea Mays
cggggtacaaagctatagcagccaaaattgttgtggtattgctctttctcgatcgccttcgtctgatatgataactcgtggatattgcagaaacacctggcatctggctccaacccttggcttctcatggcccatataaaaacccctaccttgataatagcttcgggagtaagttgatgaagataaatttcaaaagtttttagaacttcgaccaacattttgtccagggggaaccgaagtccggctttcatgaagcttctgaaaattaccacttcgtcagcttcgggaagaggaacattattctctcctccgaccctcacaattgaaatgtcacgaaagtatctgcctctcattgcttcgatctgcccttgtttaatagtcgactttcctaaaacaacatggctcggtctccatggccgatcttcggcatcttcatttccactttccacgtcgaaactctcactatcgctgtagttttcagatattccaaccaacatctcattggtgattttctccatgttggtttttccatagcttcataaaatagcacaatgcaagcagctaaaatagc

SEQ ID NO: 85318 - DNA, 428 bp, Zea Mays
accagagaatgcctagtgacaaaggaagccaaggatcgcatggctagagcagtcctcgtaaataaccaaagagccatagcccacacctaccatctccatcaataccaccatcattattatgacaacaaacacccgcaccacccccaacatcaacataactacaaccaaatattcccctagcaacaatggctgcagcaccaagatagattatcactaccactccccgccgccaccccaagcaaaaccaacaaccccctctgcccacaaaacaacaagaagagttcgccaacacaccattcagggggccatctacatgatcataggagggtccagttcagacttcgagaacaagcgatagaaagaagatcaataccggagggtcaatcacgtcggtgtcactggctcagtgtccaaacgaagtggtccca

SEQ ID NO: 85319 - DNA, 293 bp, Zea Mays
ttgatatgacattttatgggtaaaacccaagagtaggatacttaaccctaaattgggctcagaagggtaaagcaaagcctaataagagaaaacttcaaaactcattagagatggtcataaaatgtcaccatggatgaacttaagtagcattcaaaccctagaatcaccaaaaaccctaaatagaaccatggaaaaccctagactaaaaccctagggggctaagtgcaaaactagtgcacttttggactaaagtgcaaaaaccaaggcattagggtaccttaagtcatatggtt

SEQ ID NO: 85320 - DNA, 511 bp, Zea Mays
gtgggtgctaaggcttcacgatgacatagcgcagctacccgggggctcaatttatagaaggagcgagcggtggccgggaattttacgaaggacgcgcgacggtcggaggtagaagaaggtactagcgcacgtgaatatgtggcatctaccgtggcagttactccgacgagccacgaagaggcacaagggttcacggcgatgcagtggaggggctgagccacgcggcgcaaggccgggaggcagttgtcgccggcgagcatatccaaaaccgtcgtggtgagtgcagtacggcgcccggaattgtttactgcccggagttatccacgacgacgatatttttgtgaccccgcagcgctatccactccatccgagcaccaatcgtggcgacgacggcacgaatcacggcggcaggtcaccggcggtgatgacagctgcgttggcgatctgatcctcctgatagcactgtaccatggagagttacattcagacagcctgacagtcaagtttggag

SEQ ID NO: 85321 - DNA, 409 bp, Zea Mays
cggttccaggaagaagctctatggcaaactcaactttccgctctggtggcatacctggtaggtcctttggaaacacgtctgggaactcggacacaaccttgataatctcaagtggatctacctcactactatcgacagccatctgataacaacttcctttcttcggctcaggcgggactaactcggtcaccacttcctctcctagtggagacatcaacttgattgtcctcttatcacaactgataactgtctgatacttatctagccagttcatccctaggatgacatcaaaaagccatagtggattttgttctcagctctatgatggtctatcttgttatggcagttgatctccctccatgggtcatcatagaaattggtaagattcgtagaagattcttttgttagg

SEQ ID NO: 85322 - DNA, 487 bp, Zea Mays
tagatgtatagcaccagtttctccaaatcatttcaactttttttggggtgttgatggaggtgtaccatgatgttttgtgccagtgcaatttttagaactagtttaactattaatgtaattatttgttattttactaaagaataagtggtaaaaaccttaggtagctagaaaaatctaaaaacttgcatgtacacttcattttggtgtacaatgttgacaaaaaaatttcaatttattctgacaaagtggtgacatacatcctacaaaaatgcatacatctctcatataaggctaattactaagtgagagatgttcatgcttgtgatggatctatactaccactttctccaaatcattttaaactttaatgggatgtttattgaaccaacctttgatgttgtgtgcagttatgcatttttcagacctagtttaccaattactgtaattatttgatgcatttcgtaaagatatttgttacaataccata

SEQ ID NO: 85323 - DNA, 338 bp, Zea Mays
tgacaatcgcacttaagcccctctcctttctttcctttacaagaccaagtccccgatggtggacgacggtgtgcgctctccggcaaactcgtaccggccgcaatacacaacaatatgtgccctaagtcggtctacgcctaattccacccctggcgagccactggaaatccctaatttaacctgaacacagctctagagctcagtccacgcacaaccgcagagctagcgactttcctgacgtgttcctgacgacatagtgcagtaacatacaaattgtggacacagtaagctttagcaacataccaggactcaagaactgcagttaggaagacgagtgg

SEQ ID NO: 85324 - DNA, 478 bp, Zea Mays
gaacatcccaggtgctacgtagcttgatcacatcttgcgcccttgattcttatctaacggccagcatcaaaaagataggtctggcagctcatggccgttgcgtaggagatcaacggctaccctattgtcttcttcctctttcctaggcgcggtcagagagatggaggcgcgccgggcagcaccgtcataggcatttgcctcgccctggccctagcccactgagatcattgcggcgtcgaagcacccattggcgtgaatccgaccaaccctaaccaactagctcgagcaaggggacgatgccggtccacagaatggttagacacacggtggggaagattgctccagtgagcaattgcaggctccctaagctacaatccgacccttacctcagtgcaccagataaccacgataatgagaatttcggggagaggagtcgtaccggttgaatagccgagaagatgctcggccacgttcgtgc

SEQ ID NO: 85325 - DNA, 315 bp, Zea Mays
gaagaagtgaggggtgggagtgaaaagttgccaagtgagcacccctatttatagaagaagccctagggttaggtttttctcatgggccaattgggccgggctggaatgggcttggcccaaaacacgtactcgggtcgcgctaaattatttttccgaataaaaatgctcccgcggaattcatcactacggagaacagagcggaatagagttcggacgaatggatgattgtgcgattaattcggctgatagtctaatttgatttggctcgaaaataaatacctacgtgtgattcgaaaataaatcatcctgagattt

SEQ ID NO: 85326 - DNA, 858 bp, Zea Mays
ggcacttcatttctttactgcaaccgtatactgctgcaacagtggctcactcgttcatcaacaatgtgtacaaattacacggacttcccgcagtcatcattttagatcgtgacctagtgttcacgagtaagttgtggcagcacctctttaaattgactgacactcagcttcagctcagctcttcttaccacccacaaacagacggacagacggaacgcgtgaaccaatgcttggagaccttccttcgctgtttcgctagcgcctgccctcgcaagtggaaagagtggttgcctgctgctgagttttggtacaatactagtttccattcagctttgggtcggtcaccgtttgaggtgctctacggtcgccagccccgtactctgggtatcacagtggatgacgctactccggctaccttgtcctcttggctacaggagcgttcagcaatgcaggagctcgtccgtcagcatttgttatgtgctcaaacaagaatgaagtgtcaggcagataagtgtcgatccgaacgttgtttcgagatcaatgactgggtttaccttaagctacagccctatgtgcaatctttagtgatgtcccgctcccaccataagcttggattcaaatactttggccccttctaggtgctcggtcgggttggccaagtggcacaccgtcttaatctgcccgctcacagtcacatccacccggtggtgcacgtttcactactcaaattggctaaacgttatcaaggtccagatgttgttccactgcctgttgagatgcctgaatttcgtgtccctcagcgcattcttccagactcgaggtgtgaccaaaggaaccgtctggtgcagcaggttcttg

SEQ ID NO: 85327 - DNA, 488 bp, Zea Mays
gaggttttaaacagagaaaaaatatatcacagcataaggatgcctataacccaagttggtctgtagctagcgactctaaagccttgtcgtattgtagtataatttaatttgtatcagtttagttctagaagataatatattgggtgttcgttttattttagaccattggatgggtcatgccatcgatgggataacaggtgctaagttttttgtttgtcttgttctagaaatgttgactaagttggcaagaagggagaagacaaccaacatcaagccagatcatgatattgatgtctatatgaaggtgaggttgttacagataacaagagcattctgtgcttgaaaaaaatctatctatgcgagtataaaacaggaaggatcgggacttaatgtggacagtcatatatatcacctcctacctttttttgcaacttggtaacaattatttatttaactataaacttatgtaggcctcaactatgggtgag

SEQ ID NO: 85328 - DNA, 868 bp, Zea Mays
ggaagtcgtgccctgctattagagtttggtggtcggcgctctcggatctccccgtcaacacccgtctccaccgcagctccttgttccgtggatctggaccatgcgactcttgattcacaggtatagacctgcaaactgtttctgcatagtctctgcctcgcttagctacattttacggttgggttggtctcttggttgttggggaggggcgtgtgatggcaatggcgccgccgccttgtgcctacgccgagggacccggtaccagggaagaagaaacagtcttgaccgttggatcatgatctggcgcgcagacttagatgatgggcatctggccgttcgttttgcgatgatcggctaggattagaaaatacttaccctttttgcggggattgatccgtggccgtaggattagttgtcagtggccgagatttaatcgcaaccatattaaatctagtgcgttgatcagatcggatggccctggttgcatggcaattcttttaatactggaatctaatctagaccgattaaaccagatcgtgcggctgatgattgcctataccccttcggccatgccactttacacttaagcccctacacttttgttaaaccaacccgccatcctcccaagtcaaaacaaattacaaccgagccctagatctttataagctagcccctgcgctctgtagaatttgtaccagcagtccttagcccttgttttcagcaaatagaattttagaaagtgatttataatataggataatcttagaaatttcgtaactttctcatttaaagtccaaattgacccattccagtttctataattttgtaatataattgtttatcattttgtgtcactgttttgacatga

SEQ ID NO: 85329 - DNA, 304 bp, Zea Mays
cgatgaagggatgagccaccatatagttgacctcttgatgcaaagccctgatgcgctcttccaagggcactgagagatctacctcgtcaagagtgccttcgggcgtgaaccctttccaccaaatgccatggttgcgggtcctctcgaaagagccgatgaggtcgacttcgaaaagagatatgatttgatcatacttcacttagtgttctagaggtagctcttcatacgtgatggccagtcttacaccggtttggacgtgttcgtttgagtgttcgccatctgggcagccaatattgcagatgtt

SEQ ID NO: 85330 - DNA, 528 bp, Zea Mays
ctcatacttccatcctttttggtgacgaacagaactggtgctccccaaggagatgagctgggacaaatataccctttctgttgaagttctgcgatctggagttttagttctgctaattcggtgggggccatgcggtatggtctttttgcgattggcgtggtgccagggattagatcaatgtagaactccacttctctttctagcggcattcctggcaattcttctaggaatacatccataaattcttctactacagatatgctttcttctgctagattaaacaccattgggtcttgggtgggtggctgagcctgacaggaaactgactttccttggtgatctttgagaagaatggtattatctgcgcaacttatgacgccattatgcttggttaaccaatccatccctaagatcacatcaattacgtgggatggcagtacgataagtctaccaagaacactaccccacttaaaagaatcctgacttgggagcatttgaggtggcatagaaggtctgcccctagggttc

SEQ ID NO: 85331 - DNA, 276 bp, Zea Mays
cgaggaggccaattctgcagagaagccttgtctacctccttcagagtccttaggtaactctgtgcctgggactactgttgatgcccctgatcctagagatgctgctgaagtccaacctgatgaggcagccagttttgaagctagaaaaaatgagtttttcaaaggaatcaccaagcattcatctaggatccttcatgttccaagagctggtatgcaagcagatctttcaccttccccacctgctgctctcatgccaagaagtcgtcgtgttacgag

SEQ ID NO: 85332 - DNA, 762 bp, Zea Mays
aactgggaggaattaaatggagcatccggctgatgcagttgagatcaaggtggcatgtggattctgaagaagaatctccctctatgttgttcactcgtgagtagagataaagttaaagtagagatacatagcagaaagtctagagacctcacttgttggtgggaaaatatctagtttggactgttttggggcagtgagcagtggggtgtttaattgttttggttgttgtttgcagttggggacaaaggggatatttgtgtgtagttgagatgagtatggagtgtaggatcgaggtgtcaagacaccaccctctgctggacaaaatatcaggactttgaacctattggaacctatccacaagtgatatttgtgtgctgtaattcggagatgaccacatttagtgtctctgagctgtgctatgaacctgtgtggtagtgagcatgtgagccacgaaatgaagtgcatgtgtggctggcaccctgaggacacaactcgactgcatgctggacatgttcatgggacatctgcccatttcagcaagcttaaaaggcagggtccagtgaggttttcctccctgtctcaagctctattttcagaccacggcaaggagaatagagttcttgtgctcatacctgagataactctctcctcatcttctaaagttgccctaaccctgagacgagcacaactatcccttgggtggtgacctcacctagcgaaacaccccctcaccgtggctaagtcaacgtaggcaggtacatg

SEQ ID NO: 85333 - DNA, 387 bp, Zea Mays
ggtttcctccctagcttctgcggtgcagctcatctcggtatttgatgcaagtaattcaaattaagccgacaagcacgagtcggtgaggcctattaggcttggcatttcttgttcaattaggttattaggcgtatttggacagttaaatcttgaaaattggtagagctcgtgacgagcgagtgtaaacatccatggcaggaaagaactgaatagctagctccaagagagtagtacggtcctggccttgcagaacagttccggttagagtctgagagataaaaagctaacgctttcggtcagagtccaggatagaaatcattacaagtgtcaatcgcagctccggtcgaactgacagaatgagcaaatacagtatctatcacacactcc

SEQ ID NO: 85334 - DNA, 329 bp, Zea Mays
tgttccttaaaaccaaaagctaaattaacaagttcttcatcctttgacttcagctccttcgacagcttccacccaatccgagtcaggtacatattatagtcaagtgtctcttgaatcaaatctcaagacctaattttattggcaactatattaaaggctttgtagcactctgtagcagcctcgcatagttcacacttcggccagttcagactaaatctaatccttaaaggactcatgggtgcatctttgaagtcctctcgctatttagagtcaacatcaatataaatcactattttgtccagtctacatgccacttggtttgatatgcg

SEQ ID NO: 85335 - DNA, 532 bp, Zea Mays
ttctctgccatgtgcagcatgtcgctccaaagcctacgacttgcccttcaatcttgcatttagtctattgttgtcgagccatgtctcttgatcttctccacctagccatatgaaaccatgtcatgtatatttgtagtgaactccttcagtgcactagttggtttcaacaggttcaagccatttccacttccatgactcaagttgctcatactagtgaacctttgaactaatctctgtgtatctcacatcaaacacacatagtcgacctaagtcatcactcaattaccaaacccaaacaaggacctttcacttgccccactcgatggagaaccccaccctttccaccctgtaaggtgaggcccatgatgactggattgacctcgttagtgtcgacaaggtacattcactaggatccaaccccaaacatgtcaccgctcgagggggggcagcaaactagcagtgatcattgcacactaccaacttagggttctagtcagggtgtcgactagacattgcggcgagcgatggaggc

SEQ ID NO: 85336 - DNA, 458 bp, Zea Mays
gcctcggggactcgcccagggtggtgcgtgatgcgcctggtgatgttgggaacaaccttcaagcttttggtgccgcgggtaagtcacaatccctcgtcggtgtaccacaccgccccaaatccgcacttcgccgtggccaaggcgtataactggacaattcgtggtttgtcatccaccctctagtttgcaatgtcgcctgctccctatgacctaatcgatttcgagtttgggatcttgttgctcgggtttgacaccatgggtcatggcgccgccgcaccggcgctgtgcgccgccacggtctgatgctcaggcggccggaggactgggggagtgttctggtcgttagatcggaggggaacggttcagattagataaatcacgtatcgcttcgaggaatgaatctggaccgtgggtttgaatcgggcggtccctggtcaatctcgcccatttaaaagctt

SEQ ID NO: 85337 - DNA, 1261 bp, Zea Mays
cattgggcaaaattttccatggtctttattttattttgagaaaagatgtagcaaattgatgtgtggtgttttacttgagtggacataaacacaatctagttacgccttgaatataagggattataggaaacctggtaacacaaaaagttatttgctagcccaataatgtcttcatcctctagttgtactctaataccctctcgtgcgaatacagtgccctcaatatcataaaaacatcatttgtggtttaaaaggtgatctattgttttgaattcattatattccaactttttagcaaccgtatggtggaaaaatgtgccttacaactttaacctatgtttggatagttctctcactcaatttggctaaattttccatggtctttattttattgagaaacaatgtggcatattaatatgttgtgttttatttgagtagacataaacaccgtctaggtatgccttgaatagaggggattataggaaacctggtatcacaaaaggtcattagctagcccaataacatctttatccactaattgtactctaataccctctcgtgcgaatacaatgcccttgacatctgggaaacatcatttttagtttaaaaggtgatctattgttttgaattctttatattcctgctttttagcaactgtatagtggaaaaaagtgccttacaaccttaacatatgtctggaaagttctcacacacaatggctaaatttcccacggtatttattttattttgagaagcgatgtggcatattgatgtgcggtgttttacttgagtggacacaaataccatctaggtatgcattaaatagaggagattataggaatcccgctatcacaaaaggtcatttgctagcccaataacgtcttcatccactagttgtactctaattccgtctcgtgtgaatacaatgccctcaatattatagaaacgtcatttgatgtttaaaaggtgatctattgttttgaattctttatattccaactttttcgcaactgtatggtggaaaaaaggtcccttacaaccttaacctatgtttgcacagttcactcacgtaatttggctaaattttccatggtcattattttattttgagaaacgatgtggcatattgatgtcttttgtttttttgagtggacataaacacgactaggtatgccttgaatagaggggattataggaaacctggtatcacaaaaggtcattagctagcccaataatgtcttcatccactggttgtacttta

SEQ ID NO: 85338 - DNA, 433 bp, Zea Mays
aatcagaggtgaagacgaatatcttgatagaaactcataaaacgccttacaccgtccaccctggcgaaacaaaaatgtacagggatttgaagcaaaacttctggtggaagagaatgaaggttgacgtttctaagtatgtggcagcctgtgaggtgtgccagcgcgtgaaagccgaacataagaggcctacaggtttattgaagctgttggaaattccatagtggaagtgggagcatatcactatggattttgtggttggcttacctcgttctcctcgaggcagggatgctatatgggttgtagtggatcgcttaactaagtctgcgcactttattcccataaagaccacaaattcagcttcagagttggttcccttgtatatgaaagaagtaatcaggcttcacggggtgcctaagtccattgtttcagatcg

SEQ ID NO: 85339 - DNA, 1340 bp, Zea Mays
ccgacccatttctctccctctgctaaaaagtatgtgagtttctttctttccaggtttccagactatgagtaggagcatggattgtgcccctttttaagtgtcctatgcaggtagcccaatcatgaaccaccagtctctgactgtctaggatgtctgctacatcagttcgagagatagccatactgcaatggcccccacaaatccacctcaataattagcattagacaatgaggtgttgggcggtctctgacatactcctgtatagggcacaacagggattgtgcgcccacccgtgggtttgccgtctactcgatgtccagaactagtttcaaatgattagccaggcaaagagcatgcatttcgaaggtgcccaatgtttctagataagcgccttgaagtgtattccagagtgtcccatgaactgtgctctataggttgatgttgttgagtaggattccgcttaagtgaaggcccatgttatcgcatcttccttgttgtgcataaggtccactgattgtatgattgtccataactcgacgaattaacttaagtggttgactatggagatctcttgcaagtttatacttctcacccacatccatggtaaactagcgcttccttgatcgacagttttagtttgccggatgccgtgaagacgttgggcactatgtctttcgggcgtcgaccgtgggcccatgcgatctaccgtaacgaagtttttgctccatcaccattttttattattttttattctgcaaagagtagtcgatcagtctcggtgcaaggtgtttgtagcccagcccatgaagtgtctggctttgcccattctagccaaaaccaacgtaaccacaatgctctagcaaagcttttagaatcttgcactcctgggacaccaaggttaattggatgtgtcactgttggctagttgactctgcatttccctcccgttaagttttctcgtctgacccaaaggagcattcttcttatcttgtctatgtcctttagcacactgtttggtaagtgtgttagttagctacaaggacaaaaccaccttagttagtataatccttctggcatgagtgatgttgcaccctttccatgttgccatcctgctttgcaccttgtccagtaagtattgaaatccacttttggcaatctagatatgatcaaggggatgccgaggtatttgattgggaagtgcgatctacccgtaggaaagctgcaagagtttcattgaggttttcgtgattgcatctaattactaggaggggcgatttctagatatttattcatacactaaacgcatgttcgaagccccgtagaatgtaggtcagggcatc

SEQ ID NO: 85340 - DNA, 376 bp, Zea Mays
ccctccctgggtataaacctagcgctgccgttccttatcccttcctctccttccttttccccaatccctcgccagccaccattgcgccgcagcgttccgcacggggataactcgccgtcgccgtggttttgcgtctgcgtcgctagtgcggtcgcaatagttggcctgagtgctcctgcacggtctccagagtgcgtgcgtggcctcattttgcgcgattggtgctcggagcaccgataattgctcgtcgattcttcatcaccagcacaggtccgtggtgcgtcgtggactgacggaggatcgactgggaccattgtaagaaccccctatctagatctgccgctttctcaattccgtttagcgtacaacaccccag

SEQ ID NO: 85341 - DNA, 499 bp, Zea Mays
tttaagatcatatgatgcttaccttgaccctatggttccatgacaagagaaaagtttccaaaccctaagtccaaaccactcgggctatgtgaaccaaaacaaaaaacgtgaaaacaaacgatgaatcaaaccttatcatcaattgggctaattacacaagttgtagatcatcaaaatatctatcagagatagtaaggaagtttccccaaaacaggtcttaaacaaccgcaaatcgatcactaactaaaagaaccctagaggggaaaccagattttctctaagtctcgctaacccgaattgaaaaacatgtcgtgttcacctagcttctctactcaaatccaaatggtccaatggacaaagtggcgcctaattacctcaaacacgccctagtcagaccaattgacatgccttggcacaagtttttgtcgtgacctgggtacagtgacagacccgactagacactagcgtagctcctcgccctaagcgtatcacagctcgg

SEQ ID NO: 85342 - DNA, 540 bp, Zea Mays
cccgaggcggtctgggcgctaaacacgactgaatgcagggcgaccgggttcactcctttccgccttctatatggatcagaggccatgaccccataagaaataaagcatgagtccccgcgaacagttccgtcagccgtccccgacgtggacgagcccacttcgaaggatctcatcgatggagactgagtcttcgccttacaggctctaaacaaataccaagcccagacaaaagcatggcgcgaccatgcagtcatcccgagggaattcagcgaaagggacctcgtactcgtccgaacagctcggacagagtccaggggcaagctggagcccaagtgggagggccccttcattgtcaagacgaaagcttcccccagcgcttacaggctcgcaacgccaaacggcaaagacctggagcactcctggaacatcgacaatctccgcaaattttttgtttgactcatcagggccgattcgcccttgtaattcgcaaaaacaattttattctggcccgcactcttttcctcccggggggtgaggttt

SEQ ID NO: 85343 - DNA, 474 bp, Zea Mays
aaatgataggaacgtcatagaaacaaacttttgacgaaacaaattcgacatagattagatttgatatcgtcatcgctaatttgccttgtttggttgacgtaatgatgaaatatattggtcacagatgagttttagaaatcgttgctcagatttatttgggaaaaaaattgctcccgcagagcttcgaacctgcgaccttacattgcacaggtagtagcgttacctctagaccacgcgcttgttgttataaccaatgagagtttttaacctgtaatccatttacactataacctattcccattgttaagcgtttggttggaccaggcctaccgcattaggttgtgaccggacacaaatcgccggacacaaatcgccgccatggtcctcctcctggtgatcccgcgccataccgagcaggaaggtttccctcctcctggtgatctcgtgttgcgcgctgtgtcctcttcaccttcc

SEQ ID NO: 85344 - DNA, 458 bp, Zea Mays
ggagcatgcaggcagcaaattctaagacagaaatagaagataagtgatcagaagatgaattcgcatggccttgaatgctcaccctaacggcgaccaaatggattgtggttggtacctatagtcaatgtctcaatcgtcaggtttcagtaatttgagttgctccgatggctttatgtcgtacgtgggcagtggggtgcaaggtagtagtggtgctccttagttgttttgtctttatttcgttccgcttatattacttcttgaaaaggtctcataatctttctagaagtcaccctctttccacaaaactggtagccgttagaatttggtgtttttttattcacagcttcacagttcactctgcatgtatagctccaattgaacccgaatgcataccaactttcctaaggaaatgtatgtatccagaaacacatatgaatgtgaataagtctgagaggtga

SEQ ID NO: 85345 - DNA, 454 bp, Zea Mays
cgaactacctttcttggtgtcgttcatcactcgggacttttgtttccaagaacagatagatcatttgtgcttgtgcaacgagttctgttgatactgtgcctccgaatcggctgttggtttcatctacgtaggttcaaacgtcgcgtctctgaagggagggcaacagggatctagaaggaaaacaagcacctcactgtcacaggtgcatatttttaggcactgtctttctatgtcattttaccttgtttactacttcaagggaaaattaaagcagcaaacagaacatgacgcatgcctttttcgagaacactacatgttaatctcattttcaagcaagaaagcacggttgaaattaacgtgacactccctatggcctctgaaattgaagaaaccattaatgatattgcgtcatcagcaactgctccccaatgccagtgaagtgaaccggttgttg

SEQ ID NO: 85346 - DNA, 328 bp, Zea Mays
cctgcaatgacattgtcttccaaaaacaggatataactgcgtgatactgagttaaccaatccatacccaagataacatcaaacgaccccaaggaaatcaccacgagattagctgaaaagacctcatcagcaagaatgacggaacaaccctggcagactaaatagctacaaatggatccattagcagaactaaccacgattggatgacccatcctttgcaccgaaagaccagcacgcgacacaaaatcctccaaaacaaacgaatagctagcgccagagtcaaaaagagcatgggcaacaaacgaatcaactgagaccgtacctgtcac

SEQ ID NO: 85347 - DNA, 401 bp, Zea Mays
cattagactcaacatatcaaattcataatattcccgtcccttagatgtatacatccctttttaaagtgtcgaccaacgatccatgaccctgctcctcaatccaatcgatccaggaacattttgactatggcccagtcccattcttatcgacactgcctgatccagtccgcttcgagacatgtcgcgacactcccctgcctcgcttgtcatcctcatgacgctagctagctcggcatgtccgatttcgttcgtcgcgatgatgtgacccgtccttggaggtcaacgagctgtcgaaccaacgtgccctatctttcaactagagacgtcccttgacctacccctttctcagcacacctgcccatcgaagagatcaatattcgataaggtacacccaattttta

SEQ ID NO: 85348 - DNA, 562 bp, Zea Mays
cacgcaatgacctaacccctggcgggttcatgaagccagttcttggagcatcctctctgagttctctcgcacgtctgcgttctcgctgcagccagccactctgttttttcccttgaagatatggaagatcatcagcatgttttcggttcccccctcccccttgaaagagcagcatcagcatgtgtgaaaatccatacgattagtttggaaagtcataataatacatgtactagacacatttcaattggcccctagctacacgatcattcttcattcccaggaaacaaaaaacgcttgtcattgccatttattttactttttggagacacaaaggtgtttgacttcgcttgggcatgaccatgaatccatgatattggccaagcttcttcgttgactagatttctctcgttcctcgtgcgagtttgcaatgttcgaacgaaaaggtcagctgcaaaaaaaaaaaaaaaacttttcccctccttcagaaatgagagtcgcccagagcctcgaatgacgaggtactctgctgacgaggccggcagcaaactggagcgggtcatcg

SEQ ID NO: 85349 - DNA, 775 bp, Zea Mays
ccgacccgcaaggagtcataaagaatggctcacatgtcgaataactcatgcagtgagtctagggccattgtcggcatctagaaaagggtataccctcatatggtgtcgagacatgctaagatatcttgaacaaagagacccacactctttaggacaactaccgacttagtctatgaaactccacatgtgttaactccatgcatcaagtcttgtgacggacaaagcccccacagcccctcgtgccctagggcaccaaatagataaaactctcgagacctcttggtccccgaggcacgtggcagataaagctctataggccctcgcaccttggggcaccaaacagataaagcctctaggcccccttcagccctaaggcatgtggcgccaaaacctcgagacccataatgctcgggtcaccttagggataagtcctccgaacctagcagataagcctctagaacccctcgcacccctagggcacctaacaaatatggcctctaaggccccggggcacctaaagtataaacccttgtaccccttgtgctttggggcatctaatggttaaagcccctaggacccctaatgcactaagacacctaatgaatgagccacatgcccctcgtactccgggagacctaatgaataagaccctctggtcccctcacttctcaaggcacctaacagatagggcactcggtcctcatcgtgtgtcgaggcatctaacaaatgagccccctgaggccactcacgctcctaggcacctaacatgtaaggc

SEQ ID NO: 85350 - DNA, 318 bp, Zea Mays
gtgagttcagatttggtcaagaagcttagcttgcccacacgcccacgtccgcatccataccacattcaatggtttaatgataccggcaaggttaaggtaacacaaatggtacgcgtgcatttttccatttgtatatattctgattatgcggattgcgatgttgtacctatggaaccatgctctcttttgttgggtagaccttgggaatatgataatgatgcacgttaccatggtcggagtaatacatacactttcatgcataagggcaagaaatttactttgcttcctttgactcctgctaagattgtacaagctgac

SEQ ID NO: 85351 - DNA, 722 bp, Zea Mays
gcagctcgcactacccacccgagctggatcattgccggcaacaccctcgggggctgggtaatcgctggcgccatccttgaggaccaggttctctacaacagccacctctaaggctgaaagattctcagttacctccatgggaatggagcaacctagaccagcttcttgactctgaagaccgcactccaaggtcgatgaggctcaagaagctgctcgggataactctaaccccacatccggaatgtcagtgcaaacgtccatcataccaccatctgttggctcggacagcagatcttcaagaaccatatcctcgagatcctgatcaaaatttgctatggacaactcttgcagaccaacgaatgcggacaaggccggagaaggaatatcactactgcccccactgaccaggtagcgccgactgtttttccgaattaaggggatttcctcctcttcttcctcgtcctcgtcaacaatacgaacaacacacccattgggttcagcgtggccggattacacccattgggttcagcgtcatcaaggtcacacctattagggtcagcgtcagcagggtcacacccattgggttcatctccagtaacaagctccactagcacttcctcagtagcaggagcagaagggccggcatcctgattcaaacatgacactcgcataagcctcctctttttcttcttcttcccctcggtaggagcagttgggtgact

SEQ ID NO: 85352 - DNA, 840 bp, Zea Mays
ccagcaaaggagcaactctcagaccaaccagaggtctggtggaaattcacagaaccgtcaaggtggcgctagtaacacgcaggccagaaacaacgcatttgtccaacctaatggatgtttcaagtgcggtgagctaggccactatgccaacaactgcccaaggcgcaaccagcaaacactccaaaggagcaataatcagaggaatgaccagaacaccctcgctcgtggatctgctcagaacaagacacagcagaaccagagcagaggaagggtcaatcacgtcactgcagaatcagtgcctgaggatgccgacatagtgtatggtatgttccttgttaactccatacctgcatcagttttatttgactctggagcatctcattcgtttataactgagtcatttgtggaaaaacacaatatacctaagtatcctcttaagaagatattacacattagttcaccgggaggtgacatgaaggccacacactcatgcccccatgttaatatcaagattcaaggaatagatttttcagtcaacccagtggtcctaggatccaacggtattgatgtgattcttggatgcaactggttgaaaagttgtgatggagtgatacagtgtgccaaaggaacaattatgttgacaagtcctcaaggtgaaagaatccaagttaacatagacaagtcaacagatgaaaaagggaaaacagtgatcaatcacttggaagaaaagcccttggaaaatatcaaggtagtgtgcgaatacccagacgtatttccggaggaattaccaggtatgccacctgaccgtgatatagagttttctattgaattattacccag

SEQ ID NO: 85353 - DNA, 552 bp, Zea Mays
ctgccaagttataaagtttttgccctaggtcaccacatcaattttgtagatctatgaaaggagaataactttactatagagatcatgccttggtaccatgaagaattctgagataaatgtgcccaaagttgggctgtcagtctgtttgaaacctgaattatggtattcaggggcatgggatgaactttaggggccattttgaagatgatcccgtggaagtttgagcatggtgactgcagttggtttatagatggatcattagacaacaactttgatactggccgatcaacaacttgccatgtaaatttaggagaaaatcaatgccaaacttggtctgtcaggttaattgaagaacaatccgatggtacagtaaccggataggatcaggttcaggtctctcaccgctgacaggctgcgcgtggattcgtgctttcaccaccgtgattcgcgctcagatcagttggatagcgccggggtcagtaaatatctcaccgtggaaatgctccggccattattttactctggccaccgtactgagcagaccacggctgg

SEQ ID NO: 85354 - DNA, 1039 bp, Zea Mays
aaagcagcaacatcatctggttggagaggatagaggcccccgttacacgatccctccaaaagtgtagtctttgtttgccgatccttaataaaaaaatgccaaggatgaaactcagaatacatcattatctcgagaaatttatgcactgagattagatgttttttcatatcaagaacatgaagaatgtgacgcaaagcaagtgagcgatcagcagtattgatggaggaatggccaatatgtaaaatttgcaaacatgtagcattgccgacttgaacttgatcaccaccttgatagcgttcacgcatcgttagagggtcgagatcacttgtgatgtgatcggttgccccggtatcactataccagtttggatcaactttgaacgaggcagtggtggccatagccgctgatggatgttcctgattatagctgtcatcattcctgtggcagcagcggacaacagtgtggccctcctcgccacatatctgacagatcaggcgaggtgaggtaccgcggccacgattttacccttgacattgtggagggggtgcacaacgtccatgtcgtcctctgccacgacccccgcgcccagcgtaatttgctaaggatgcataagttggctgctagtcagcctggtgtttgagctgacgtgcttcaaatgccatgagatgggcataaacatcatccaacgtgaggtggtctgaccgggtggtcagcgacatgacaaatggatcataatctgtcggtaaacctgcaagtaaatacgcaatcacctcatcatcatgaaggggggcattagccgcagccatcttagtggctaggcccttgaccttgcgaaaataatctgcagccgtgagactctgcttcttggccgtagcgagttcaactcgaatctgcaagacacgcgcccgagtggatgacacaaactaggtttggagagaatcacaggcttccttggatgttgtggccgaaatcacatcatgtagcatgtcttctggtatggatgagagcaacccagtaaggagttgctgatcttgatcat

SEQ ID NO: 85355 - DNA, 430 bp, Zea Mays
aaagatttcgtggttattattaggagcataactggactcacatatgtggcttgtgggagcttccttacgtgaaatcatgattctgatgcacatcatgcactaagagagtaacattggccaaaccctcataaatatatgcatggattttctagataaaacgaaataaaatcataaggcacacatggacttagctgagatatttgaacgtccaacacaagttcttagagaaaatggaggcaaaccaaaagttgactattgtctgaaacctaagcaatggaaagaagtgatgagttggatgaagcatatgaaattcctccatggttatgatgttgtgttttagaagatctatgaatttaaagacaatcaagatgaaggggtttaagagccatgacttccacataattatggaaagactcattcctataatgtt

SEQ ID NO: 85356 - DNA, 730 bp, Zea Mays
gcagttcaggacccctatcctgatatagggggtcatgcgacctgcaggtccggttctaaagaatgggcactcgtttcctggaggggtccggagctgtgtagccgcttagcctggtcccatacactaagcctacacctccaccactctgcaacaggtgccctagtatttggagctgtgatcttgtaggtccgaacataaggttggcttcctaggctaaatcctgcaggtcctgttgcatgaatcaaatgatggcagataccagacgatgggtcatatgggtgtgctactaacacttcctagccaaagttgtgtacaggtccaggtcccagcccaggctgcatcctgggggccaggtcaccaactaattttcccttaggaatactggtatccagcctcgacaagtcaagactacatcccaggggggccaagtaccagggaggagttagtaacgctacacacagcaaggacaattagcatacagataagtgttgtttgattaatagttctcaagagtattgtacaaaaccaaaagttattacatccaccttcaagcagagccctagcctcatttctgcaggtatgaactactcggcatcggcagggtcgcgctggaagcgtgcgaccaccatctccatggcgtcttggacgctctcctaggcgacatcttctgtggcgtccaccgaaccgtcgagcaccggcaccaaggacatggacgggtcgtggctccgga

SEQ ID NO: 85357 - DNA, 1090 bp, Zea Mays
ccatctcctttttgttctttcccgatacccctacttctactatatttgcttcacatccaacacaatcttgttatgtgccttctttggagtcttctttgctttctgattattccatgaagcctccagtgacataggtttacactcgctgcaccactatcccttctgatgcaccatcttcttctgatgagccatctcctgctgcttcatcttctcttgatgtatcgacatctccttgtgagtcatctgttccttttgacttgtcctctttcactgagccattttccttgctgcttctacaccagagccattccttagacaaccatttcttagacgtagtcgctgtcttcgtctacctactgatcggtaatctctttctgcttttgtgactattgctcttcctgagccagcttcttatcgtgatgtcattcttcaagaatggtagcatgcgatggctgatgagatcgttgctctagatcgcactggcacatgggaactcataccttgtccaccacatgttcgtcctatcacgtgtaactgggtttataaggttaagacccgctcggatggttctcttgagcactaaaggatcgcttggttgttcatggtttccagtaggtacaaggccacgattatgatgagacttttactccaattgttcacatgacgactgttcacactctttgtggcctttgtttgtgggtggtccatctctcagcttgatgtcaagaatgcctttcttaatggtgagctgcgtgaagaggtatacatgcagccactgcctagatattctattcctgaggatatggtttgtcatcttcgatgctctctttatggtctcaatcaagctccacaagcttggtttcagcggtttgcgtctgtggtcactgtagctgggttttctaccagcgctcatgatcctgcgctatttgtacatactttatctcgtggttggattcttctccttctttatgttgatgatatgatcatcactggagatgatcttgagtatattgccttcgtaaaggcacgtcttagtgagcagtttctcatgtctgatcttggtcctcttcgttattttcttgggatagag

SEQ ID NO: 85358 - DNA, 376 bp, Zea Mays
cataagattggtcgtcggaatttcgtctcttgttcctgttgtggtgagccgtgaaaaagtttatgttgcccaaaagatcttagtggaacctttcaagtccaatcttgatgttgtacttgagaatatgatatggtatggcttcctcacaatatagacatagacaagcccttgcggcacgctccatgaattaggtcttgattgctttgctaaatttttttcaacaacagaagcaacacattgcaaaacggtaagaaagatcataaggccggggtcaaaattagcataaccaatcttgcttgtgtgatataataatgattttacttctaaggaaagtcccatagcaacatagtaaatattcttctagttaaaatatgca

SEQ ID NO: 85359 - DNA, 1077 bp, Zea Mays
gacttagtgcaggagcaaatagccttcaaggtatggcccctggctactgactaggaaatgctgaaggaaactgggctcagtgatgagttgttagaggcctacaccaaggatgaggacgaagctatgaatgccgcctttggttccgaggaagaagaagattaaacatagttttttggtgccattgggtttatttaccttgattattgtttccctgcccaaaaaaggggactaaagagaaaaggtgcgctaaaagcttcttctatcgcgtcgaagtagaaaaaagtaaaaattctaactcatcggccaaggtcatattatgcgaaaagagcagcaaagctgcctaccttgccagttattgaaactgataagactgtgagtgtttttctttcaaaggtaatggtttttactttttaaattcagctttgcattgtattgctggcattcttattaaaccttttgaatttttggacaggagcaagaggagatcaagaaatcatctgctaaaacatctaaggctgacatggagctgaagatgccaaaactcccgaaggtgcaaaagcagccaaaggtaacatctgtcccggtaggaactcctaagaagggaaacaggatggccaatgtaatagaagtcgttctgataccttcaaagatgacgtcgtctgcagcgccaaagtttctgtaatttctaaagatgtaatggaggagccaaagatggctactaatgctgaaatcaattctggcttagagagagccgatccctagggatccattttgggaaggcgtgattctgataagctaccagagaagaaaatttgtcggcacctgaagcatcgtcacctgaagatcttgaatatattgttcgtcatgtttcggggaagaagttaagtaaagaacaaattgtcgaggtgcaacactatgctcgagacctaatatatcctcgaggctctctagtttatggaggcaatggcgaagacgattatttgtactgcctcccagataataaatagatagatgtttgtcgtgaaataatggacaatatgggttattcgaagcttgagcttggattatccgccatgc

SEQ ID NO: 85360 - DNA, 541 bp, Zea Mays
gatgaagctgggttacttcggagaagctgaaaagaagcttattcgttttgtcggagaagaaaccactccagaaccgaaggacgacgaagtagtggttttcaaaagctttttcagggcaggattaaggtttcctttgaacgagatgattggagaagttttggataattttgagatttttcttcatcaggtgacccctaatgccatcgttaggctcaacattttcatctgggcccttcgaagccaagggatggacccaaatgctgaagctttttgccgagtgcatgagctgcattaccaaacgaaggccagagaagacgggctacatgaaaattttggttgttataacttcgcgtatcgcaaggatacgaaggctccggtcctcagctatcgcaccaagcgtccaactggctggaagagcgagtggttttatatcaaggccgatgagaagaagagggagaagttgaagatgatggtcatgagcccactgagtttaagcttcgggatgaccagacccttgtgcaacatgaagccagggtcacca

SEQ ID NO: 85361 - DNA, 457 bp, Zea Mays
atccaccccttcccttcatgctatgctgaaaccaatcactcaaaccctaacttcagctatttgtattcggttcgaatctaattaccagcatgtacatgtattatgcctaccaacatcgattttgttttgcaaattttattgggtgtacatgtcttttactgggtccgcgccttgactcgatttgagtctgtatatggtcttggtggctaattagccaaccacataccgcagccagaccatggcagcaacccctgtgtggattggtcagtaagcacacctatattaactcgtgttgtgccaatcgaaggtgtcaccctgcctagtgtggttccttatctgacaccaactcacaactcggcatgaaacaactgatttttatagtttcctgtagatcaatatgaaagtgttttcctcgcaaaaggggaaaaaagaagagatactgaaatttagtgcctat

SEQ ID NO: 85362 - DNA, 296 bp, Zea Mays
caagaatagatccacctgtccttgccatgcataatcccttggactgccatgattgtgtccaaaaaggtgatgtattcctcatagggttcgttggacatcggagtgtgaaagttgtcacggaaattggtgccttacaagaattgagctagagaacaattcttccttttggcaaaataatgaagacatgtgaactccattttgagaagcatgttattccaaatgtcctgcaatatggcaaaataaataatgtccccatgaattggcatagcaatgcccctataatgattggataatct

SEQ ID NO: 85363 - DNA, 603 bp, Zea Mays
cgcaaggtgaggtccccgaccgtgaatggcggagcatgtgacaccccagtgtcacctagggttcttccctaagctaaccccaacctattatcacatgtaaatctagtaaaaggttgaacatcaaaagataatttagagcaaaggtttataatgaatcttcttaaactctccttaatcttgtcatgaaccttgagagagaaagactctcaaaccctaataaatcctatgtaagccaagttaagcataaagggtaattgggagaagtcatgggggaaaaatgcaaattttagatatgatcaaattacaaagttttagttcatcaaataactaacaaatcatagtaagagagtttggccatttgtttttttaaaattccaaaatcagcccttgaaccatgaacccttggagaaattcagatttctgaatttctgaatttcagacctctttccaaggatcaactgcgttctctgcttttcgaaactcaaaaccaggagatccaaatatcaaagttgtgccaaattcccttgaacacgccctggaaaagtttgaactcaaaccaaattcatttgacacagttttggcgcagtttgacctcgggaccag

SEQ ID NO: 85364 - DNA, 416 bp, Zea Mays
aacagaaccgttattatcactggcggtttcttaagccgggcccacctgttattttcactagcgcgtagtaacggaaactgctagtgaaaattcgtgtgtacacgctttgagctcttttttaactagtgacacttgattccaaacaagtactaatgaccttggtaatacaagccctccacatgcgaggcaaaggaaagtaaaaggtaaagtaggtattgtagtagatgtggctgagacagtaggtaataaagccttatcgatttgatgattagaaaattgggtcgcatggatacaacaacaaacgagcctgtggtttggtatgcacatgacaggagttggcgcgcgccacatgcgaggatgcaaaacacaagtatagtagctcattattgccggtctttcgctcatctgtagcgtca

SEQ ID NO: 85365 - DNA, 445 bp, Zea Mays
gatttaagtgcggaggagccgagggattgaccctccctcttcgccacgcctcggccagcctcgtcgggaaatcgtgtgagagagaccggggaggaggagagagaatttcggaccgccaccgtccgactcgtaggtagtgtcgctcgggcacccgcggggcgttccagggccgcggcggggcacctgaaaacctcggcgaccaccaatttcgagctgggcatcgctgcgctagagcaattgctcgccgtcgtcctcacgccgtcgcacctccgcctatccccgtggccagaaggctcccggcgacaattcgcggtatggactccctccctgtactcgcgtccgcctatatcgtgtgtagtagcgtcctgggcatcggatttgggcattcgggctgttggtgactctcgccggtgatggcgccaccgcgggcggagtgctccgccgt

SEQ ID NO: 85366 - DNA, 308 bp, Zea Mays
gagattcttgttaagggggtaggatttgtaatactcaaaagtgtaataaagagaatagagataatctcaatagtttgtggtctctactaattattgcatgtgatcaacactagttaaaagtggatgaatagaacaatgaacacaaaattaatctgtgcatcatgctgagtttttatttgattgtgcatttgtgcttaaaaaatgtatcattaatagcatatcaatggatccatagaattcaaagtctaacttgaaaataaaaccatgaaaatagaggagagaaaggaaaattcaatgattttaaaaaa

SEQ ID NO: 85367 - DNA, 651 bp, Zea Mays
ctagatttcagcaccgcttatcatccccagtcagatggtcaaaccgaaagagtcaacaaggtcctcgaagatttactcagagcctgcgtattaaccttcgacagagattgggagtccagtttgccgtacgccgaattctcatacaacaacagccatcaggccagcatcaagatgtcaccatttgaagcactgtacggaagaaaatgccagactcccctaatgtggtccaatgtgggggaaaggacgcaagaaggtcccgactttgttaaagaggccgaagaaaaagtcgctttaatccgcaggaggttacttgaagctcagagtcgacagaagagttacgcagacaataggcaaagggaactcagatttgaggaaggagatttcgtttatctcaaggtctcctcgacgcgtggtgtcaaaaggttccaaatgaaaggaaaactggcaccatgtttcgtcggtccctaccctgtcatttcccgaataggacccgcggcataccgtcttgagctaccaaaatccatgtcagatattcacaatgtgttccatgtgtctcaactccgcaaatgcctaaaagtaccagaaacccgcatcgaggcagaggcaattcagatccaaaaggatctccagtaccgggaaaagccagtgaag

SEQ ID NO: 85368 - DNA, 370 bp, Zea Mays
ggtggctgttgtatatatagtagagagagaaatacatggcctagaccaaggccctttacaacaacaaacacacaataatctaacacccccgcagttgaaactgtagccacgattgatgttgagattggagtgaaacttcgagaacaatgaggagagaggacttcctcaaaccagtctaaacccccttctcaagcacttcgggcaaagccatcgggatagtggcaccacaaaatccccctctaacctacaaatttacttgtcgttgaaaccatgatagttcgtatccaacgagcaggagtgttgcaggtgcgtaaggctatctatgagttgaggcaggctccgctcgcttggatcgtgaagctagaagcca

SEQ ID NO: 85369 - DNA, 881 bp, Zea Mays
gacaaccaaaggattctatggttcttcgtaagactttgtctcatcgggttgttgttgacttgaagccaccctaaacccttcattaattccccgatagctagcataacattttcttgacttcctaacctctaagttgcttgatgcatcggattcctctgcaagtggctattgtttatcagtgtctatgaaaagtgtatataaagactgtttccctttgcaattgcctggtgctgctgatctagcaactaaggggcttcttgaagtatgtatatgaacattgtttcccctctctttttcttcttcttctagatttgtatgaaatggaagcagaagtgtgttgttgctctggtgctttgatttcattgcaaatgggatatgatggcaggaaggtgctcaggacatgtgtttctttgtagccaggagcccaggagagtctgactatcattcaacggataagaacggaccagcatgggttcccatgctaatggcagcacctgtgcaggtgacggtcctccaccaatggagaagcggaaagaaccggcttttcctcttaaaacaatgccactgcatgctaacggctggttgaacaacatgaagctgtcctcgcctactgctgtccctgtgaacattggtaacagtgttgcttttgatcccatctaccgagcttggactgtgagtctacatcttacctactaactgagacccacgtagtcgtagctgtaagagctggcattgacagccagtttccttgtcatttgcagcagaagtatccttcagctctgaacgcgtttgaaagaattgctgcctgcggcaaaggcaagaagattgtgatgttcttggttcctccaaagaaaaagatggcccaagagttttaacttttc

SEQ ID NO: 85370 - DNA, 601 bp, Zea Mays
ttgaactatgacgagtgggccaataagatgaagtcgcatttaatcagtgtacatcctagtctttgggagattgtcaatataggtatgtataagtccgcccaaggagaagagatgactccggaaatgatgcaagaagttcaccgcaatgctcaagcggtgttcataataaaaggaagtctttgtccggaagaataccggaaagtccaaggaagagaagatgctcgtgacatttggaacattcttaatatgtcacatgaaggagaccccaaagcatagagacatagaattgaagctttggagagtgagcttgctagatatgattggactaagggtgagtcacttcaatcactctttgatcggttaatggcgttggtaaacaaaataagagtgcttggaagtgaagattggagtgactccaaggttactagactattcatgagagcatacaaagaaaaggacaagagtctagcaaggatgataagagatcgtgacgactatgaggaaatgacgcctcaccaactatttgcaaagattcaacaacatgaatctgaagaagccccaatcaagacaagagactctcatgccttgatctcaaatgaac

SEQ ID NO: 85371 - DNA, 1043 bp, Zea Mays
aggaaattggccttgagagcaaaagaaaagaattgtctgatcataaaagcaaatttcaaggttagtctagcagaaatactcaccagaacaactcgcaagggttccagtttcgctctggaaatcagggtggaaataactatcaaatgcaacgctctagacaagaaggtcagagaagcaatcaaacttagaaccagtagaggaacaactcttagaccaaccaaaggtctggtgataattcgcagtctcgtcaaggaagcgccgtaaacacacaggccaaaaacaacagcaacacaccagtccaacccaatagctacttcaagtgtggcgaatttggccactatgctaacaactgcccaaggcacaaccaacatacacctcagaagaacagcagccagagaactaaccagaacacacctgctcatggatctgcgcagaacaaaacgccacagaaccggaatagaggaagggttaatcacgtgacagcagaatcagttcctgaggatgccgacgtggtgtatggtatgtttcttattaactccattcctgcttcagttttatttgactctggagcatctcattcatttataactgagtcattcatggtaaaacataacataccaaagtacccccttaagaagatgttacgtattagttcaccgggaggtgatataaaggccacacactcatgcctccatgttaatctcaagattcaaggaatatattttctagtcaacctagtggtcctaggatccaaaggtattgatgtgattcttggatgtgactggttgaaaggttgtgatggagtgatacaatgtgccaaaggaacaattatgttgacaagtccacaaggtgatagaatccaagttatcactgacatgtcaacagatgcagaaggagaggcaatggtaaatcacttggaagaaaagcccttggaaaatatcaaggtagtgtgtgaatacccagacgtatttctggaggaattaccaggtatgccacctgatcgtgatatagagttttctattgaattattacccggaactgca

SEQ ID NO: 85372 - DNA, 414 bp, Zea Mays
gacaaataaaaacacttggcatttggtttctgaatttcctcgtcttcaccaaagtcttgcccaatcgcaactgccatcggctcagtgcgggcagagtcagatgattctccggccaacaggctaaaaacatcattcatctcagcatcatcagtactggacgacatctcaaagtaagtctacttctcagcctcgggaagatttcggagtggagcaattaaggcctcaatgtcctctgaggaaggtcgcactctatggctcgggctgccatctcgaacaggacgattggaaacgaaatcagaaaagggactctgcggaggcagattccaggcagagtaagacaagggggcacctgcatttgaaaccctgccccttagcattagatcaagttggcttagcaggtcctcattgggaatt

SEQ ID NO: 85373 - DNA, 656 bp, Zea Mays
cgggttgattacctaaaacataggggctcttttgcaagctgatgcgttcgaaggggtattgtagaatttgagccgcacgattaagatctcgtggtctggattagatctgagctctcgtaggcacgcgagccataagatcgataatgcacgacgaggattttattaacgcgtgatctgatctctgccctacgatcccgaattagcgacctagatttgatctcgcgaatggttacacattcctcaatcacagccacacgcagctgatccgacggcgaccgacccatcacctaccccagtcagagctgagcggcagcgtagctctagtctccgtggcccacgacgatgcgccattaccggggcaacagtcaatccccaccagcgcactatcccccatgcaaacaggtgcaacgctaccctaagatcccaacgaacgacataaagtagacgcacttgcgacaagggtgacacccaaaccgccccacaacacctagcagttcagtggccatacccttgactacgagcactcaactggtgacctcccctaccctacttaccctaccgattggttctacatgatgcggaggtcatagcggatatacagggaaatgttctcacattgcttggcgcgcagaagcctcgcccacggcgcgtcgtag

SEQ ID NO: 85374 - DNA, 690 bp, Zea Mays
acggactccccaagatcggagagggatgctacgatgcccttcatctggcggtagtactcaatgactgagaggtacccttggatgaaggtgggaaatgttgtgtcgacgtggagaacgtgagcctcacgattaccaaggaactctcttagatggcaacctaggcctgacgggaagtgcggccatgcccatggacgacatcgtggagctcaatggtgacgatctcgaggatccatgagaggaccacactatccacgcgccactaggagatagttacggacacggtgtcggtgaggacatggtcatcaaggacatagagctaggggtgaggaggaaaaggtcacaccagtgggcataggtggaggaagttgggtcaaggatgataggaactagagattggatgttctagacatctcacatctaccacctatgcatgtaggttggcaataacagttgattcgtactccaaaggaggggtgaccataagcgacacggggggagactcaatgtagggagagccaagcagatgacgctcagtgttggacagctactagggaagggtagctgccatgttgcgttcaagctcataggcgaggatagcagcacgtgcgtgctccctagcagcagcgacatccaccttagcagtggtgagggctatgaccatagcaggggcgaccacaacaagggctcggg

SEQ ID NO: 85375 - DNA, 1092 bp, Zea Mays
tgtaagcatagttattgagaagaaattagagataagtaagcccaaagatgggctgtcagactaaaacaatctgaagattatatgatcagtggcattggatcacctttggagacaaattgtggctaatccagtaagaatttgtcttggaatactataacaaagatgaagatggtatattggactacaactttgctgtggagcatcggtcatgttgccatggaaatttgagagaaaattaagcccaaacattgactgtcaggtgcacttatgggggctcgcgatggtacagtaacctgaattggatcaggctgccagtgcagaactctcaccgtcgacgaaccctctgccacgattcgtgccatcgacgtcccgattcgtgcccagagtggatagataacgtcgcggggtgacaggtgtcgccgtcggtgaactggacgccactccggctaaccgccgtgcctctccccttgttcactgatcccttggatgagattctcaccgtcgttgagccaccaccgtcgtccgccgcgtgtcctaacgcgttaccacgtcgcagttaaccgtgcgttgcctgtccgatgatcaccgaagtggatgacacggggtttgccaccaatcacgtgcgccagtaaactcccctcctccgaccgccacgcgtctcgccccaaattcatcagccaccgcttaacaaccctataaattgatggctaggtctgttgcaccatgtaatcacgaagccgaagcacccgctcccacccttaatcgatcaccagagctcacgaatttctgatttcccccaattcggtttccgccaccgtgaaacacaccccgtcgtggtcagcccaattcaggtcagctcctcccctctgcttccttgtttaagcactcttatacgtatgtgatactcgccaacccacctaattgaactggaaaaccactggtcaccgggaacgtgcgcaattgtcctcatcgtccgtggtccgcatagacagagcttgatagactaccaaccatggaattaagttgggggaattgatcggggaaggtccaattcggtgtcagccgctcgaggtcaccagtcatggctccctc

SEQ ID NO: 85376 - DNA, 554 bp, Zea Mays
taaaaattgtattaatttaggtgttttgcatacaactctttggaattttcagaataattaaccctagctagactttctatttatgcatatttacatttttttataccgcatatataagagtttgtacacaatagttaccttggctagcagtatacggaagactgaccaagtctaatgatcaccacttgtgacagcaagggaaccaaactttcgaactcgtatcctttttttctgcatgggttttggacgtgaagtatgcgattgccttggttgatcagccagtggaaagatgaagcacacatccggggctttccagcttcagcttccaaacgcaggcttgctcgtcagctgttcttccgtaggacttaccgagaggatatggcaacatcgcagtgagctgacagccgcctcacacaaacaccatcacatacagatagctagcatcggttcctgatacaacgcactcgtctcagatagggccattaacctcatatcgaatacaacgatccgagaagtgagagcacggctacatatacacactaagatagagccag

SEQ ID NO: 85377 - DNA, 1405 bp, Zea Mays
gctgtttcaaattctgcccaggtagcgtccctgacggccgcgctgaaggtatcccaccatgctagggccatcccagagagttgatgagcagccaattgaacacgctgattttcgaggcatccgatggcttccaatttcctcttgatcgtgcgtagccagtcatcggcatcgaggggattgctggatccagtgaacgtgggaggcttgagtctcagaaattctcctatcctgtcttgtggtcttccaccacctgggcgctggttctccagacttctagtgaggacttcaatgagtcgggtctgattggctagaacttgggccaaatctagtggtagttccggaggtgcggggaggtgggtctcactcccttctccgccagcttctccttctgctcctaggggaaaccctgctccaatcccggaggcggtaggcgtggttttatctgaagccatctgccaggggaaaagagttactaccatgcacatgccaaattttttttaacaagttactttattcattacacaagttcattacagcatacaactatcataagttcattacacacgagtgctatctagggtactcccgaactccttctctaaagtgtccccaaaatccttgagaaggtcatcaaggctggctagggacatttcctcggtgtcggacgagttccctattctggtaggaggtagggatggaggagcttcttccttctgctcagtctggcatccttggcttctggtcttcttgcggatttttcttgcgggggcgagcttctttagcttcttgtcgtaatccatcttcagagtgcagtaggcctcacgggtgttggtttcctcaccttccgctatctcgagactctcttgaagggacacattttcccttgtaagttccctgacttgttgctccaggctttccacccgggagtttaggtgagtgcagtgggaggcaaggtcatcatattggttatcgagagtgtggaggtatccatccatgtagacgatggtgtggtcatcctcggtagggtctctgcctgacagggcctgaagtcttttcctccaggcgggggtatttttgttgctgggtggaaagtagtgaaggggggtttcaaagattactctgttgtagttctggcatagttgtcggagggcttttcgggcaacattctggcaagtatctgggaagcggtgtccagtgaaagtgacttggaaagaaggatggttcgggtagtttcggctttctcccaggtagactgccatagagcacttctccattccattctcgagatattccgtccagacatattctggcttcttgcggatccccttgcaaagcgcacaactttgcaacagatgtgggaacccctccacctctgagcagtaggatgtcctaatgaccagagagt

SEQ ID NO: 85378 - DNA, 441 bp, Zea Mays
ctcgaataatccaccacattccacgcgagtacaagctccagtgtatctggcgtcaaagtgtgtgtggccatcgaggctacgacaacgaataagcctccgtaacaagcgcaacaggcgcaattgtggctcaatagtcggggtacaagataagtccacgcaacgtgcgcaataggtgcaattgtggctcgatgatcatggcagacgaaccgtgcctgcagggcatgcgaaaaatacgcgactcggtgatggcagtctgactcaacgggagtggtccgactaagtgagagtgcaacatagcaatcacataacgcaaccaagttcgtacgacacaaataatgtgtcatgttgccagtgcgcagtcaatatttagccaatgtcataacttagccgattaataacgcagcctgatcaacgtgtccgaatacccaatatacaatttaa

SEQ ID NO: 85379 - DNA, 1093 bp, Zea Mays
gcccgccagaagcgttcacgccgagtgaaccgcccagctgcacttgtcgaggagaagaagaagaagaggcgacttcagcgactgtcgtgcctggatcaagatgttggtccttctgcgttgttccttggtgatggcctagtggacgccattcccgaggtcaatgctgaaggttgtgatcatgctcaggctgctagtggtgtgtttgacgaggacgaagaggaagaagaagaagaaattccgctgatctgcaagaacagccatcactatagaggcagcaacgagggcaacgatattactcccaagccttgtcggcactcatcagccttcaagggctttcaatatcagactttgatcaggcactggaagaggtcattcctgaagatattttattatagcctcctaaggatgacatttcgaccatatgttcagaggtcccggatggtggtctttcactacatgattctgctgggcaagaggtaaccagggtggtgtctcgtgcatcatcgaccttagagggtagtctttcatgcaaaagcgctgatctgcgtcatccagctcctatggatgtggctgaggggccttcagccctagaggtggctactacagaagacccagcccccgagggtggcgctagtagcgacccaacacccgattatgacgctggtagcgacctagcccccgagggtgttggagcatgctccctctctactgcttccatggacatccatgttggatcgcccctagtccagtccaaggaggctgtggtgacgcacgtttctatggctctcgctggtcaagtcgctttagaagccagcgaaccagacgccaggagcctgccgcctgctgatggggctgaatttaccacgagtcatgctcttgagattattcctgctgatctccactcgtcgagccatgcaccgactcttcctgctttgggtcttcccctgttcctttccaatcttcaggtgagtcaacttgttgctctttattgttcgtaccgacgaattatcttttttgcttatctatccatgaccacaggattttattggcggtgtattcacccaattgagatcttgcggtgctactgttcccg

SEQ ID NO: 85380 - DNA, 580 bp, Zea Mays
gtaaaagcaaacttcactcccttgatgcagattcttctcttgtttagctagctatccagaagatataacttatgcaatcaattatattggtgtaaatgtgtaattaagcaatctcgtgcattcaatcgtaatataacagtgattgctattttatatttaaccatttccacctaaaacctaccagaatggtactagcttttagatagataaaaagggtcaatcagaatcccattttacatttctagatgaacctaccagaatgtttaatgtgattctggcgtgacatgcacagagaagcattaggaaaatacgacggtgacgactcacgacacgagcatcaaaacaatctctaccctccccgtgatgagagaacacagaacagtctgtacccgcttgagctcgggccaagagcgccgatacacgatacggcagccgagcacactcttccccttcctgacctccacttcctagctcggccccggctccgcatctatctatctctcgccctgccgtctccggagaccggagctgctctcacatccccacgcgcgcgccctcgaccccgaccacgtcccccgcc

SEQ ID NO: 85381 - DNA, 1033 bp, Zea Mays
cggggtcggctgcgtgcgtgcgcggattccgggcgtctggttcttgcgccaaactaacccttggcaggctataaaaccccgcatccagtcccccttctctcctcgacaaccccaatctccgctactggcgccgttcaagaacgtctagctgcagtggtgaagaaagagaaaccccgtcgcgccgcgtgaacaaagaaattgaagctgcctcggccatcccttgatgtcctggcgtacggtgtgctataggctctgttgattgggcgcgtgatcaactggaatcaccggaattcgtcgccagtgacggaggttcaccgtgccgcgtggacagcttcgccttgcctcctaaaccataggtaatgccccttggatcgattcgacaccttctctgcattgcttagcacctagttacgctttgaatcaagccctggcatgataattggatgctccgcggtcatggcgccgccgtgggtagggccggcgtgctgccgtattccggctgggagaagaagacatacttctagccgtggatccatgaaacagcaatctagattagatcagggttcaaactaaatgtgcaccgtccgaccgtacacgagtggctaagattagttggaggataccgcttcgcccgatcgcgatctggggcgttgatcttccatcaggcggtcggcgggcatcacacgactcattaaatgtggaccgttggatctagatctagggtccagcgtagtttaccgactcacctacgccgcgatctgatctcgtgcgtccgatttggatcgggcgggcacaggtcagcccataccccttcgcgggcaaagtttcaaatagaccccttggttttcttcaaaagaacccgccgtcccccgcggggtagatctgtgtcttggggaaatatacgaattagcccctggtctttcgcggaatagtgtccccagtccaattagagaataaaagggataagcaattcaaaaaaatgattttcagtttagaaataaattcagaaacttatataattcatattaaattc

SEQ ID NO: 85382 - DNA, 302 bp, Zea Mays
catgtggatatcggggagacgctgatgttgttatggtgtgttgatcggcaaagaaattaaggagcatgtgtaaacttgttgatggtggacaaggacattcaattacttccaacgcatcgatatgttctactttatgttgtgttgcatgtctagtgttgatgatgcataatcctctattcgcatgttatcttgattgtatatagtagatatggtagcgtgtaacatacacatgtccctatagttgtagggggctaggtcatgtgcaattttgtatatgggtgatttgtatatagacgatatgt

SEQ ID NO: 85383 - DNA, 387 bp, Zea Mays
cgatcgctacagccgaaacgttgttgcacatcttattgccatcgttgatcaccagagcaacggtacccgatcgtcaccccttagatctagatctaacggctctcatgcaccaaagcgaacgggtacgacatcagctaatcttcaccgttcaatcccagatcgacgacatagggctcatcttcgtcccacccgccagcccgaggcggcgctactcacttcacaccgacgagctcgtcggagcaaggttatacggcaccccggcactccactccgtccatcaaaatctgaaaaagaacgcgaagtaaacgagggagtcgatggagaagtattcaccaactactggtgctccgaattatgcggaccatggagatcagcggcacggcaacg

SEQ ID NO: 85384 - DNA, 878 bp, Zea Mays
cgagaaatgggttgcccgatttcatttcctggttcaaacgtaaggtacgtgcttagtttgtcaaagagatccgtctatgaactcaatttagcgtcttttaacctgcgaatacttgtagggccaaagagatccgtctatgagtgccgagttgagacaagtagccaacggctttgcttatagggtcaagaaatattctgggtatgacgtcaatggataccgttttcgcacaacaaactacgacaaaagtcggcccaatcggaaaacaatgtgttctggagtctttacgcctggcctttacgatgtcgattattttggacgaatcgaagaaatatataagctcaatttttatggttccaaacctcttactccactgatattcaaatgtcattggtttgaccctcaagtgacgagacggacacattctaattttgggatagtcaaaattcgacaagattccaccttaccaggagacgatgtctatatcgtggcccaacaggccacacaagtgtattatctcccatatgcgtgccaaatgaaagaacatcttaagggttgggatgttgtgtataaggtatcaccgcacgggaggttacctattcctaacgatgaagattataacttagacccggacacatatgatggagaattcttccaagaagatgggctagaagggcgatttgagatagacttaaccgaagctatcagaatggacgtagatattgaaatggttgttgatgaagacgatgatgaggtgcaaaatgataatgacttagtaatccttgaaggcaatgacattaatgacgaacttgcatcttccgatggtgttgactatgaaatggttgatagtgatgatgagagttatgatccggctaaccccg

SEQ ID NO: 85385 - DNA, 519 bp, Zea Mays
gtatatatagccccaaaccaaaaactatctattggaatcaagtagcaattatgtacactcaatggacactctgctacacccacaatatacgccggtgcatgtccatatcagctagcccttggaactagttgatgtcgaccattgtgtatggtcatcctgtgctaaatcctttgtgttatagcccttcttaggttgttatgcaacctctataagtacctatggtggggtatctggtgcttcactagacatgtctaatgccttatggatctcctaatcatgctgcagacctctctcagtgccatattttgtgcctttccatattttctgactcgttcggtgcgacatctaatgcatacatgtgtgtttggtgtactctttttctatagccctttctttagtacaatgacacttctatctagtgacttatctgatgtctcgccggacacgtcttgtgctgctgagcagcttgttttctttgttttttccatctctttgtttgggctttttcaatcttgtgat

SEQ ID NO: 85386 - DNA, 347 bp, Zea Mays
cgggatgacctcaacccagcatcaagcacatcagcacaaacctccatcacaccatcatctgctggctctaataacaaatcctctggaaccatatcctcaagagtctgatcaaaattcgccagggacaattcttgcagaccaatgagagcagacaaggcaggtgaaggaactccactactttcaccactaccaatgaactgccgactgtttttccaagtcaaaggaacttcatcctcttcctccccgtcgacttcattagcaacacaggcagcacccccattgggatcagcagcagattgggcacacccattggggtcagtgtcaacaaattcagtcgcagacacttc

SEQ ID NO: 85387 - DNA, 455 bp, Zea Mays
cgatggtgccgagtagcaccaaatttggacttgtgtccatatctatagatgctagtagtgatatcaatggtgccgagtagcaccaaatttggacttgtgtccatatctatagatgctagtagtgatatcgatggtgccgagtagcaccaaatttggacttgtgtccaaatcttgactacctcatccctattctctgtttgggacttatatggagaatggcatcggctgaatgcctaaatcgggtcgggaagcacggagcagatagaagtgcactttccaatgcagttagacagagaaggcatggctgtgatgttataatgttgaaggacaccaagaagagattatggcctgtcatccaccaccactgcccgttatttgtgggcttcaccgagggctggaaacatttggtgacagcaaacgaccttcgggctggggacgtctgcgagcttgttaag

SEQ ID NO: 85388 - DNA, 374 bp, Zea Mays
cctttcaggggtaactttgttacaatctcactatgtggaaaatgtattgagtcgctttggttttagtgactgtgatcctgctccaacaccttatgaccctagtatgctattgagaaagaatcggagaatagcaagggatcaattgacatgctcccagatcattggcttgctcatgtaccttgcaagtgcaacaaggccggacatctcatatgttgtgagtaagctgagtcagtttgtgtcaaaaccaggagatgataactggcgtgctcttgagagagtgttgcggtatttgaaaggtactatgacatacgttattcattatactggaatcccaaaagtgttggaaggctattgtgatgccaaatggatttctg

SEQ ID NO: 85389 - DNA, 324 bp, Zea Mays
ttcggaagctccgcaacacgcatcccaaatcccccgaatcccgacgcccacctgaacccattcgcgcggacccgtggtggcggccccaggcagcgtggtgcatgacgtacacttacctcccgatatcctaaaggcatggtcatcctgtcccactgtttttttcacgaatctgagattcttggctgttggagtttgctatttttgcctgttcttgcaatgctgtcaccttcgttgcgtggtctagaagacgttccttttgcccagtatgaatggcagagctgccgtcgctttctttttgaaactgtttggcagtccgtgtggtct

SEQ ID NO: 85390 - DNA, 784 bp, Zea Mays
tgcttctgccgaagcacctagcatggaaagcgagaatacaaagaaatctgccaaagctagcatgacgcaggttgcagctgaagctgggccctcggctcccgccgaagcaagacctctgtagtttatttccttttcagtatgtgctcatcgtttatttttgtagggcttaattcggaactaggctttaaagatctagaagaaagcagaagattaaagctgctagctagcgcttggaaatctttggtcagaagttattacactaaggaatgaagctcttgaaaaagacaaaatactgctctccttagtggataggctaaaaaccagcgaagcccagctgaacgcacaagccaaagctcacaaagccgaggttgaaggtttaaagaagaaacttgctaaaaatgaatgaagatttcgaagttgcgaaggcgaaaaaaagaaataagtgaaatggaaacagcaagggtgtagaaaaatattgaaggacttcgggattccagagaaaaatgctacgaagtatccatggattgtgcaaggagactaaaagatagttttgcaaaggtgggtgcatactcatcagagcaaaaatttatccgaggcgatctcgaaggagttattcaatggatcggcgaagaggatgaagcttttgaagaaatactcaacgaccgtggggtttttgtgccttcgccgatgcccgaggggttgtaacaggtttggagaagagtggctgtgaacatgttaaggctgcagcccaggcataaaccatcttctctgtagacgatacaaa

SEQ ID NO: 85391 - DNA, 309 bp, Zea Mays
atcccctatcacctgcaacgccttcctctaccttgccctctatccaaggggaaccgtttctctccccctcgatctggagctccccaacatcaattcccatgactggtgttggtcagccagcgtccacgccttcgtttcccactcccatggccaccaccacggtgctccccttcccggcgtcgaccaggcacaagtccggtgatggagccctcacggggaacatcacgacgacgctaatcacgaactgtgcatccgcaagacgagcctatgagctccatggcacgacagagtgcgtcctacccagtctac

SEQ ID NO: 85392 - DNA, 958 bp, Zea Mays
ccgccgctcgctacgtctataaattgaccccgccacgagctccgtaaggtagttaagcgtccagccaccaaaaattagcctcgatcgttcaccagggtgtgcgaatttagaactttccccaaatccgcgcaagaacaccgtaggaaagacctcgccgcggccagctcaactcaggtcagtccaagtccctctgttgcttgttctagcgtccctaggccctcctaaagctcttagacccgcccaattgaattagaccaccacccatcgccgagaacgtttatgatcatccgcctcacccgcggtcaccatggtcagggcgtctctgtgtgtcgttcctgaaattaacctaggggaaacgttctctaggtcctgaatctggtttaagccgaagctaggcgctggtcatagccccaatcggccggtcctggagctcgccggacttcggccgcgcgtgaacgtcgtcgtggaccttggtctgcaaagaaatagaacttggaggacccccgtgtaaactgtcagtgatacagaggaacagtgaacgaacgtgtatccagttagtctataacccgagggcccttctgcaaaaactccacagcgggcgcgggcgcgcgcgcttttcccctctgaactgggccgttgggctgaaatcaacccactactgttgctacctttttcttttctttttattccagagctaaaacaattatagaaaaatgtagaaaaatccttaaattgtgaaactaattttcctgggcttcttattttccatagtatttaataaaaaaaagtttcatgatttttagtttaaataaggaattttaaggcatttaaaatagcttaaagaaatagttctggaattttagagaattaataatacgtccaaaaatgcccaaactttttatatgaacttaaaacaatacttaaaagccatgggtagaatttgaattgatttggacca

SEQ ID NO: 85393 - DNA, 382 bp, Zea Mays
ttcacgttggatcacacaagagtttatacaggttcgggccactgaaatgtgtaacaccctacttccagtcgaggctgagtatttgagtttcgctggtgtacaagagctacagacgagatgtgggtggtggagagcgagttctcatgttgatctagtggtggtgtagttgctgcgagagggcttatgtgctatgaggtggtggtcggatgtgacaagctgagatgagagatatgatgagatcatagggcaccccctcggccttatatagacaaccaaagggttatccctttacaagtcgtgatgactataactctacatgaatcctccttttaacgcgacatgcattcctgcttatccagagttcagttgcccttcatccgag

SEQ ID NO: 85394 - DNA, 444 bp, Zea Mays
attatctcaaggaaaattgccctgtatttaaaccaaccaatattcagtttcacgctctaatcactgtgcaggagcatccccacaaaaggcatcaccatcaggtccgctagaagtagatggattactcgaagtacccgatgaagtgagtacatcagccacaatgtcgttaggtaccacgacgccaggcctcttcatcaatatccggccagctcggatcaccttatccatcgccttgtcacaccacgccttcatggtaacacggtcgtcttccaagaccttgatatcacgacgagcggtttttgtgtcgctacgagcagcttccagctcctgcgacaccagtttcttcgaggcacgaagctccttgatgacggaatccttcgaagacaaggacttgctaagtttcgacacctcatcctgggactttttcaactcgctctttttact

SEQ ID NO: 85395 - DNA, 516 bp, Zea Mays
ctagcttccatttcacacttagtttagctagctcgtagcaggtgattattctttgagtgtaagctactatattattctcgtactaaccagcaaagtaagaatatttgcctgatatcttgtatttgagaaagcatttttagtcattgcctattcataccctctaatcaactatcagttatgccacattctattgctgcccattcaaaaaacctatcactctcaaagagggcatagacgcctactataagtgtgagcatctcattgttataggacccccctacataggtggaccaagtgttgtgggtgacaacatgaaacccgactcacatctcatctatgtcactagtgtactcccacatagttttggtgtgtctttgaagcagtgcaatcctttgagcaaagaagtgggctaaaagtttgttagtctaatgatcggtcccgataagttccttgatcctcacaagcaccagattttcggtcttcattcatctcgaggatatcctgccactagagcat

SEQ ID NO: 85396 - DNA, 522 bp, Zea Mays
cgtgcaaaagacttcattttctttgacatcctattttaacaacaacaagttagtacataaatcgacaataaaatatgcaacaaaatcataaaatatgcaataaaatcataaaatatgcaataaaatcatgatccatactcgtcaatcgtaatctaatcaaaatcaggatctagtttctttcgtcgatttaatggacgccaagtagctttcttctttctcgtcactcgttttcgttttggaggaacctctacatcattttgatcacctaataaagattcttccaacatttcagtttgtacattaaacgtgcttgtaagttcttcgtcttggaaaatcccagcagcccccacttcgtgctcgatttgactttcaacataaccagcatcaccaggagcatatagtcgttcacgaggattaactttgtacactaccctccaatcaaccaaaccctttttcttagatggatatgtcatataatacacctgctcgcattggtgggcaaggattatagtgtcgtggcct

SEQ ID NO: 85397 - DNA, 313 bp, Zea Mays
gttattccagttggtaggcaacttcccccactcgctttaggatcaagaagggcccaataaagcgaggggacaacttccgtttaactttaaatctcctcataccccagatcggtgacaccttcaaatacacatgtttgccctccttaactctaacagtcttctccgggtatccacatagcttttctgtcttgactgcgcaattcttaagttctctctcatcaaccgtacttgtttttctgcctcttgtataatttctagcccaaagaattgcctttcaccaatttgatcccaatatagaggagtcctgcatttt

SEQ ID NO: 85398 - DNA, 348 bp, Zea Mays
cactcctagggtctcttgcaaattctgtatcaaaacagttgagagccttccaggcctcgccatctgagggatgcaccatgacatccggatcttgaccctgacgttccccttccttatgccacctcatttgctttgctgtctcttgatttagaaagagacgcttaagtcgtggagtgataggcatgtactggagttgcttgatcggcactgtcggtaccctaaatcaggggtaccctctcctacagcatgaagacaccgcacccatgcgacgtctcctagccacgcggaggaccgcgcctgaccccaccggatgggcaggccaaagggcgccacgtggcaaggaaagac

SEQ ID NO: 85399 - DNA, 842 bp, Zea Mays
aaattttgctggattagctaggcgcttcgcggtcatggtccgacgagggtccaccggtcctttcccgataggtgagagatagtatcgagtactgaaaagatgggttgagtcatcttacccggtgttggcttggcatcattggacatcggtgtcacttgctacgttatgcggccatctccccggtccactggtcgatcttgtgggttgtgcgaccccaaggcgcacgttatgtctgtcctaattctgcaaatcaaaaatgatgatacatcagttactatctctcactgcttaccagtatggaccattggtcgggcggctgtagcttggtgtgttagtcggtcgttcttggcttggcgttgttcggcttcctcccctagcttgttttcatagggctctactcgccccctcgtcgccattgccttgaatcgcctccacctactgtgaggccaccatggggttctggagccactctttaaatgacaaaaattgcctagatgccctcatctcttgtgtgctcctctacgagggagactacctgctccccagctctgaagatgttctagatccgtaggcaggcttcgtggtttcatttgtgcacttacacgagagcggcctcgcaatgcctccccaccccttcttggtggggctattgcaccattataatatctagctacatcacttgaacccaaatggggttgaacacatggccgctttcgttgccctacgcaagggatacctcgggatgtcccccccatttccgcctctagtgctacttcttctcagccaagttgctccgcaaactgtcgactctagatgcccaggtgaaggcgaaccaaatcgag

SEQ ID NO: 85400 - DNA, 654 bp, Zea Mays
cttctgaggtcggatggtccggtcttttacaagatagtttgacttttaaggccgaacattcaccgcagcataaaaccagtgtcgcgaacgatccggcccctgagaccgaagggtctgctgtcacacaaagatcatctaattcctctgtgggagacataatagaggaattcagagatctcgacaaattaggacaggggtttacgtcggccgatcctttggaggaaattgatataggagatggtaaaactctaagaccgacttttgtgaataagaccctggagactgatcctagagatgaaatgatcagcctattgaaagaatattctgattgctttgcttagaattacactgagatgccgggattaagccatgagatagtagaacatcggctgcccattaagtccggttttagacctttcaagcagaaagctagaacatttcgtccagaccttctcccacgaataatggatgaaattcaccggctgctacaagctaattttattataccttgcagatacacagagtgggtctccaatattgtgccggtggagaagaaagaatcaggtaagctcagagtatgcattgatttttgcaatttgaatagagcaactcctaaagatgaatattccatgcccatagccgacacattgatca

SEQ ID NO: 85401 - DNA, 381 bp, Zea Mays
gtccgcctgtcaactggccgaagtagaatttagggtggtggctgagcacattagcactagggacttggtgcaggaatacttaccaaacataactttcccaccctctagtggatggggaatgccaaagaagaacgaagagggaaataagtatgatcttgtatgccttccttatcggtttaaattccagaaaagttttagcaaaccatgcactgaatggtttggagctaatagaaacaatgcgcaacgagattcttggaaactacacgaagaacgaagatcagctgatgactgctgccttcggcacccgaccgaaacgaaggttgaaccttgttatggatgctattaactttgagtattctaactatgaaaggcttgacgaag

SEQ ID NO: 85402 - DNA, 492 bp, Zea Mays
aaaaaagaaaccaacaataagctagcaaacagacttgaccaaggacacaaacttagagctactgtcgggattgcaaacaatgggcccaaggcctcggaaacgggaacgacaggtggcgaacacgtggctgagagcttgaatgtcttgtcaagcgtgtcccttctactacgggatgtgggtatttatagggtagtcgagggtcggtgtcctaaaatacgcccgtacccccggccacgaactacattcctagaatatgttgtacaacatggtatttatagggctatgcacacacgccccagttacactaaactttccacccttgttaaccactggtaagtggggccactcaagagcggggtggatcctcatccgtgaggtagacatcacaggtgttggcttattcctgtcgattagggcaaggtcgctggaccccttcgcctagagaagactttcttgaagccctcactagaaagggccttcacttccttgcct

SEQ ID NO: 85403 - DNA, 295 bp, Zea Mays
gtcatgagtgtatagacttgggggctacatgaaaaagttagggactcgactagaagatagaacaagttagacatagatatttcaagaagattcaataaaaaattctcatctatctgagctaattgttttaatcaaatggctacattcaagaatatataccgagggtacctagataaagctcaacaagaagggtgcgtgtgggtaggcccatcggctcagccgagagcccatggactcaattattatgattggaaggaggtataccaccaagaggattctagaagcacaaacaagg

SEQ ID NO: 85404 - DNA, 724 bp, Zea Mays
agagagaagaggagagactttgagagagaggtagagagagagcgcggacggagcggcgatggctgcaggcagcggattggtgtgagagagaggcggagcggcttcgcggtagaaagagaggcgaagatcgcacgagggaggagaggcttcgggagaggtaggcagagagcgcacggcacaaggggaggataggcttcaggagagggaggcggagagcacagggcggcggcgtggggcgtggaagggggcagcagatgtactaggtcatcacgggagaggggttttgggttgagcctcctggcaggtgggcttagtgggctgtagactcatgaggagaggagggggttaagggttgctgcaggcctacatggtggcccaatatcatgtcttttctttttctcctttttaacaaaaacgcttaagcacacttaatcacgattaattgcgcttaagctttttcaccaccctagcgcgcgctcagcgcgtagcgctttcttgaaccttggtttatgatcacattgttttagagatgtttacacttgctatttttaatgactgctattttactgtgttgacactttgcattacaccataaacagaacttggaagagttgattatcacattcaaccaccagaatacccaatattattggatttagtattcggaatctgtaaatgatatgaaaatggaaactgtgtagctttgctagaaattagagggaaa

SEQ ID NO: 85405 - DNA, 758 bp, Zea Mays
gtttggaaagcttcatagtcaagccaggattggctatccgcctagaacactcccttgagatgactgtcacctctccatctaccacaggtcattgatcaagcgtcgcgggacccgcatcactgtcatactagagattttccacgccggccggagagtcacagacacagacatacggatacggacaagcttggacagccacggtccaagattgaggcgtggtgcagcgtggcttacacggcgctgcgacacctgcgtgcgaattgcgatgcctcgcggtagaatcacttggccacaggcgtggccaagtccacgaagaaaagtgttgcctatggttcaggatttcatcggacatagcagattgtttcggagaaacatgcgtcgcatctgctgaagaaaagtacggttccaagtcccgtgctcgcccatcctgtcatcctgggcgactgatcgggccccgtgggtggtggtggtgggtgatcaccttccacagcctaatcagtgccagtcaccttcaccgtcgatatatttttaaatttttgatacaaccggctattcatctgtattcgtttcacttggctgcttgctttggttacccaaggaaaaaagcactgaagtaacggttacggccaaacaccgactgttccaatggcgacgcccgcgctggtgctcctaccggagtgggggtccggccacctcatgtccatgctcgagtcctgtaagcgcgtcctcctcagcagcagcggcggcaaggccttctc

SEQ ID NO: 85406 - DNA, 515 bp, Zea Mays
ctttgtggtcggcttttggaggtgctatcctggatcttggcgagggcctcttctccatggaggtggcgatgtgagaacttagagcgtctttatccatgtctgctacgcggtgtagagcgccccttgggtcagcgacgtaggagagggatccaaagtggatgacctccctagcagcgaagctgaagacattgtcgaagacagacaaccatggagctaccatgaatcgacggtgaccccctattgctttgagtttgaggattacatatggttgccaaaggtagaagatgaaatcgacctatgagtctagtagggtctaacgtttttgtaggggtatctcttccgccttatatagccgacttaagagatctccttgtacaatctcggtgcacaactcctgccaactgcctttcactagaaacacaccacatcttccaatgatcagttggtcctcgcagggcgtgcgcgcagctgcatgtgcgggacacgctttcagagatccccttactcggtgcgtg

SEQ ID NO: 85407 - DNA, 808 bp, Zea Mays
gtctatgtccgtacgacaaaaaaactatgtactcatatgtatcatgaaagggtagtcaattgcaaggtgtcgagaaatagtggtcctaataatataataatgatgacgctcgatcgatggtaatgacgggttcatatagctgcacaccagactgtacaagcgcaaccaaccaaccaaaagtccaaaaccaagttaagaactcaaatactagggctgcgcatgcgtgggttaacatgaatttgggtcagtttttgacccacccatttctagactggtttatattatgagttactcggttccaacgatacatactcctacagcttattagcggcatattagcgggaaggacctgatgtcctgatgcatgcaacgagggtagaaagaaatatgaccaacttgtaaaaaaaatagacagctctttgctaaaaaaataaaataaaatacctttatagtgtcaaaattgcattgggtttgtcattattttctacacatgcagagcaagtgcatttttaacaaaatcgtttaggaaaacgactcctttttttatttgacgtataagacaaatgtccatagtgctcacaatatcaggcgtagggtcgcgaacctgacatggatggcaggtgctgggcagggaggcgacaacgagcgctatagaggggcagggcgtgatgcagagaggggggcaccgaagagggacattaccgggagctggggaagaagccgcttggagttagttttttcgggtgcgacttctcccgcaaatatggctccaactgttaattgctctttcttgatagctgtttttttg

SEQ ID NO: 85408 - DNA, 971 bp, Zea Mays
ggccaatatgtcgggcccgtcttcaaccaccgagccgaccttcgcgggcacgatgtcaacagaacccgcatgcgctggatctctgggtgagccccgttaaagctgtccgcggactccatggagtctatttgacgggcctcgcgacctcctcgcccccatactaatccttcacctcaccgctaactcgcctgagtcccatcacaaccaaccgaatccagccgccattgccaccgataggagaggagcgaaggatagcgcttcgacgtgggtcggcgtcagaaaagtgttgccggtgctccgccgtagcacgccgtaaagttttcaggcctcgcctgggtgaatcgtcgaccgaacctgctgggaatttctcgccgcacttgttcctccgccgcggctccgccattccttcgcgaccaacaccctgcgctacaaatatctcgggtacgattactttatcaagttcgttgtggccccgtatcatgtaggagcgggcgaattggaagctagggcgctcgtgcactgggtttgggcttctccgacgaagttccaccgtgaaccgagggcggcgccgccgtcgggagcccagggttggcaagataaccaggaaccgtcgatctcctggtgaatggatgagattagttcctggggagcgattcgatctagaccgtacattggatcgagcgattgagatgcgctaggcttcataaaatctaaaccctagaatcccgatctgacggtggcgatcgtgtaacgtttcaggccactctagatctaatccgaggcacacattttagatccaacaaccctgatttcaggataccccttcgcgagcacattagtcaaaacagaccctctgtttttatataatgaacccacagtccattgtaactgttgactttgtctcgagtttcttgtcccgaggcccctggactttccagaatttgaggcccagtccagagctgacttaaaat

SEQ ID NO: 85409 - DNA, 425 bp, Zea Mays
tgcatggtacagtaacctaaataagatcaggtgcaatgactctcgctgccggtgaactcgcgccatgattcgcaccggccgccgcaattcgtgctctgtggcgcacgaataactgcgagaggtaaaaagatcggaagggaggaggatttggtcccagatgtgagcttatcgaccgcactcgattgcctggcgatgtgtctgcggccgatgtcgacggggacgccggcgatctcagtcgcaccacaccataggccgttttaccatgtcatcatgagtcgtggagtgtaatcagtgactgtcataagaccttgccccaatacgcgccacagtgaactccctttagtaacaatatcccttcaccgtcgtgatccaaatctcgttcaaattcggagcaaccgtgaccggcttctataaattgagcgctt

SEQ ID NO: 85410 - DNA, 496 bp, Zea Mays
gtttaatgtgggatcaggtagagccgtccatcagggatctaaggcctagattaaaacagcgaactggtatgctattagacccactcgattccaaatccacagctcccacgcaaccatgccatcaacaaatccgaactgcccgcagagacatcaatggcccagttcacttctggccgaaccagaccctaatcgtggcagtcggtggacggatcagcggtctagggtgcctcgttttctttgatggccgccagcagcagagctctactcccgcggcggcgccataatctctggtgacaaattcccaatgcacaatcgccctaatgtctacccaaatcagtggtacttatcacagacatggagaagaaggcttggaggggtttcttaccggcgattgggcggcggttcgatctggcgatgtcgtggggcggctctgcggtttaagtaaagtccgacaacaaattcatgtcgccacggacccttcccacacccagcgagg

SEQ ID NO: 85411 - DNA, 409 bp, Zea Mays
ttatgttttaaatgtggagaacggtggggccatttacaccgttgctcgaccagtgttccactccatttggtggaagaaatgtgggaattggctatacaaggggagagtatgtctgaggaagttaatgacgacaacaatgaacctacagccgatgaaagcatccaggccatatatgtagcagctgttaatgggagcgaaggtagccaaacaattcgattgtgggcctcggtgcattgtcaacaggtgtcggttctagtagattcaggaagttctgccagtttcttgggcagtcatcttatgggagtcatgccgggggtacagttactggccaagccagtgagggtcaaggtggctgatggaagaacttttgtgagcaaatattgggttcccaattgcaagtggctttgtg

SEQ ID NO: 85412 - DNA, 271 bp, Zea Mays
gggaatccacaacgagttcaccaacttcacatcacgccaagaatcctccaagcaattgaataggatgagtttggggtgtgagagaaggagtgaatgcaattttttgatagtagtctgcagtacattcgtgaggggggaagaagtgaataaatagagagatatcctaagggttatttataggactctcaaaaagttgttatatgtttggtctttttgcgcaaatcccgttcgaaccaagtttaaatttgattgaatcgagatctaccagaga

SEQ ID NO: 85413 - DNA, 872 bp, Zea Mays
ccattaacaagattcagagatgcttcgtttggaaagggagtcaggatatcaaaggtggccattgtttggtcggctggcagtgggtgtgtagacctcttgaattgggggcttggggattcataatcttgagttgatgggatggtccctacatatgatgtggttgtgactcaagaaaacccagcctgatcgattttggcccggcatggattttgttgttcacccttcaacagctgttatgttctttgtttcagtgtggactgtaattggcaatggcacagatactgttttttggttggacatgtggctggatgggaaatccttggctgatatagctcctaaactgtttctatcagtacccaagcgacatgcgaggacaacaaaggtccgagatgctttgcaccaagctgcctgggtcaatgatatcagggggacctgtcacctcatgcttttggggaatttttcttgctctaggacctgctccaagatattaacctagatcctgacattcgtgatcaacacttatggtccccttctgccaatggtattttccctccaaatcagcctatggccggttctttgtggggtatgtagcttttgattcatatggtcggatttggaagaactaggcttcaccaagatgcaaaattttcatttggctagctactctgaataggtgttggacatctgacagattagagaagagaggactgcctcacccgaaacattgccctatgtgtgatcaacataatgaaaatgtgaaccacttgcttgtctcatgtctgttcgctagggaggtgtggttcagaaccgtctccttggtcggccttcagcgttgtgttcctaggccagatgatctggatctgcaggaatgg

SEQ ID NO: 85414 - DNA, 672 bp, Zea Mays
aatatcagcctcgtggcccttctttttgcaaacctgacacctgggcctgttgtccggcccacgtgtgttgttgttgggggcgccatgttgttgacgaggtggcccgctggagcgcccacggctgcgaccagaagacccaccgcgcgagcgccctccaccaccgcgtcctcgcggtgtgccacgccccctactagccgaattgacagaggaacgcacgtcggtttgtagcagatccattcgctgctcgaatgcgagtagttgggagtacgcctctcccacgctgaggggttcgatcctggcggtgagggacgtgacgatcgggttgtagtcgtagtcgagcccggcgaggatgtaggagaccagttcgtcgtcgtcgatggtcttcccagtggatgtgatctcatcagcgagagaccgcatcttcccgacatattcggccatggagaggttgcccttcttcatcgtggcgagcgcaattctggtgttgacagcgcgcgctcgagtcatcgaagagaacatcccctcgacggctctccatgtttcagcagcagtcttgcaggcggttagctgagactgaatagaacttgacatatttgaaattaaatatcctaggacctattgatccgtagcaacccactcttcataggcgggattggagacctctgcttcgtt

SEQ ID NO: 85415 - DNA, 487 bp, Zea Mays
ccaatgatgaaagggccagcaatgttcagcataaccatcacaattctcagtcttcgagcatgaagcagacttcttttagaccaccggctctgaggggcaaaggaggaagaagttttagtgtggaggaaggttcggtaatcaacccagaaagctgtattgtcttttttgtggcaaggacaagggccacacaacaagaacatgccaggtcacaattcagaagcagaaggaaattgccgaagctgaggcgcgacagagtcagccaaagcaagtcctccacactgcttcatgttattccccatacatcctagaatacataggcaatcaacaacatacgacttttgttgcttcggcaagctattccccagcttcctggccctagttgccaccaccaccaccactgatccacaatcaatagccagaagggcaatcatactcctcaatagcgcgaccttcgggaggagtccgaagctcgcacaatcaacaacac

SEQ ID NO: 85416 - DNA, 880 bp, Zea Mays
gaagtattcgcccccgaacgaacctcgaggcaccgagcccggggtcaggcgtggtggagccagacatgggggccgggcaaaccgaagggaaaccactcgagtggatccctcacttggcccgagactaacaagccataagtgaccaaccacgttaactatgcctggcgctgagctgcggtagaggcgccagtctacctcccactcatgacctacgaagcccctcgggctgcagcacactcatgacctacgaaccccttggaccgcgatgcatttatggcctgtgtgccctcggcctacggtgcactcatgccctatcaaggctaggcctgagtgcgcaagccgcatgcagggcacaataagataagttgggcgagacccaggctacgaaggcaaggggtcggtgtagctcgaataatggcgcccaggccccacgctgcccgctccgttcgtcgtaaagattgtgacacaaccagtcgatcgagacgctcgcatacgagtacgacttcaccatggtaagatgctcagtgttaccatcgcccggtgactccttctcaaggaagccaccaatgaccgaccctcccccttgtcctataaaaggtggaggtcaaccaccaaatagaggggcaaccaaataaaggatggaggacgcatcaatgaggacccaaagaccagagctcccctcccccgccatggcaagatttagttaggactccagttgtgtaacccttagattcaccttatccgcacaagacttggaagcttctcatctctctcgctcgcttgtaacccttactacgagtattgatcaacaaagctaccggtggcgcgagccgccgaatactggatatagggacgttctgcccgaaccagtataaatctt

SEQ ID NO: 85417 - DNA, 284 bp, Zea Mays
gaaccaacaactttggtaaagatacattcactaaagttgggtttaagaattggaaaaaagcaaaggatgtattcaaggaacatgtccaagcaattgatggttctcatagttatgcgaggaaacgtgccctcaattttgcaaatcagagacaaagtgtagctcatgtatggtcagcgacaagtgcagccgaagaggaggcatataaagcgtgttttcctatcatgttaggcattgcaagatttctccttttgtaggctcttgcttttcgtggacatgatgaatct

SEQ ID NO: 85418 - DNA, 369 bp, Zea Mays
ttggtttttagcttcgtcattttatttttgtggcttcggactgattaatatttcctacttcagcagaattatctccgcctccggaaccgttcgatcccctagccgatccagaaatgaagaaaacgttggacattataaacatggctgaatccattgttgatgaagtcgtcaacaaattgttgaacgaagttgcagagaaagtccttaaagaggaatatattttgttataacaaacattttgaaaagcttgatgtacataacaaatgaaggaagattaggttcctattgtaacaaaactgtgtaatatttagagtatgtaatgttgaattgaatatgtaaattattgcagtttatttctttgtgatgtat

SEQ ID NO: 85419 - DNA, 293 bp, Zea Mays
gaatgggtcgggcttccgaatccgtattctctgtatacttttatacggacacacgactcgacatatcgcaaaataaacgcgctatatcgatgctgcattgagaatgcgatccattcagcaagcgacgacacgcatcgtttacgtggatgagtgttagtgcgtcgtccagacacggattttgcactaaaaactttagttgtcgagttcggcttcggtattcaagactgtatttagtcccgtctaattttacgattctcaccagctgtcgatcattcgctttaacgtcaaggatc

SEQ ID NO: 85420 - DNA, 531 bp, Zea Mays
gagaaatcaacattttttctaagtctttttaacccgttttcaaagattaaccatgttcacctagctcctaaactcaaaaccaaatgatccaatggacaaagtggcgcctaaatagctcagacacaccctggtgaagtttgaaaccaaaccaaaactgtttgacacgccttggcctgatttttgtcgcgacccgagctgagtgacagacccgacttgacacaagcttttctcctcaccctaaacatatctatgctcgggactcacatagaaaagataggatttagaggagggaagagacctaatagaggatctttgccaagatacacacgttagtgcagctaaacaagcacttggacatgggcagaagcaaagctcaacgtgttcgacctcggctggcactcgggaacacgctctaaccgcgcctgtgcacgccacgagctccagtcgactcgattgcatgcctagccccgcgctcatgctcacgccttcgcctataagaagcccagccccttggctttgccctcccgaacg

SEQ ID NO: 85421 - DNA, 384 bp, Zea Mays
accaaagttgattcagttgtacatttacgacactgccaatgaggttcaaaacagaatgaattgcctaggagatgagatcaacaatcaagataatttggattctgatatagtcaatggattaattaagatgctagacgatcacaatccattcgcaaaaaaattccgcatggcaagagactgtttatctgataatgaaagtgaagatttcattattagactcattggagctaaggaaggtgaccctgtccagtataatttaccaaaaatagatcaacttgccatgttaattgttggggatttcagtttggacacattcaagcgtgatattatcattgaaactcgaaacaatgaacttaaacgaatatcctcacttcatctagctta

SEQ ID NO: 85422 - DNA, 292 bp, Zea Mays
tgagcttcgtattacatgggtcccaagtgattcttgcaatttctcccaaaatcgtgccacaaatggtgctcctctgtctgatactatagtccttagtattccatgcaaacgaactatctggtcaatgtagatttccgcatacttttccgtcctgtgggtggtgtgtaccggcaagaaatgagctgacttggtcagtctgtccacaacgacccaaatgaaatcatggtgccgggaggtattgggcaatcccacgataaagtccatgcagatgtcctcccatttccaacatggt

SEQ ID NO: 85423 - DNA, 646 bp, Zea Mays
cggctcccatgtaccatggaacatagtggtcgactggtggggtcaatctcacctatgattggttgctggccgaaggtagcaacctcaaacgccactatgtgtagctagaggtcgatggaggcgacttcgagcatggtggagcttagcggggtgctcatgaaggcaacctcaaatgccatgggtgaggcctgtgtcacccatcgcttgatggcagcagcgcgcctgtcgaggcgctgcttgagatctatggcaagacgcttgaggcaccgcttctccaccttgtgccaaatgtcagtgagctcaccttggctaagcttgctataaggcaagtgggatgtcacatcaatcaaggggcctggctctgaagcctccccctacctagcacgccaaacgttcgaggcgagaaacccttcgctcgggtggcagagtgcacccacccctgccccccttcctgggggcggctgagatttgcatggcttacgaaagaacacaagaacataagggtttagagtggttcaggccactggagtgtaataccctacatcctctatgagttgtacatgttacaagggagctaggcttcgaccggttggcccactagtaattacaaagtagaacatgaggcgtaggataagcctagtgatgc

SEQ ID NO: 85424 - DNA, 393 bp, Zea Mays
atttttcttattattgtaggaggcatacaagttcttattttgcaccaagttagcgctagaacctccctcgtcaaacaatttctttccattagtgtacgttatcaccaccttctcttcaacaccaagagtagcaatgaggtcagtcacattgaactcctacgtcccatgatttagataagtgacaaagcctggtcaagtaggcagtaacttagcgataatatagcaagctacaaacttgttagctaactcacactcattgatctagagctctttagctagcaatcgtatctcatgaagatattctactaggtcatcgaccattttgtagtcataaaattgttccatgatgtacaatccattgtcaacattagagacctcgatcttggtcttaag

SEQ ID NO: 85425 - DNA, 629 bp, Zea Mays
tgttaatcattttctaaatgaatttccatagtttattccctgactggactgtgcgcattaaatcacaggagtgcaggggctccatggtaagaatccccaaacacagtgtccaaagcggatggcgggttgattctaaaataacagagggtctcttttgcagttttacagggctgaaggggtacgatgaactactggccgccagatctattttcaatgccctggattagatccacaattcactaaattggtatgtaacgcagctcatcggatcagagatcaacagtttggattttatgatacccgatcaacgatcgacgctcggatttgatctcaacggtcactatgccacgatcccgaagaggtatgcctatctaatcgtggccacccacgtggaaatctacggctccaatttacacaccccatcttctaatccagatcgcccaatctggatcccatagcacagaacatcccccccatctgattatggtcgttcatcacaaggtcgacggtggcagcaccttcttcttcctttactccaacacatgacgccgcagggccttccctgtggtgggatctatcgcacaagccctaaggtcaactcggccctcgaatcctacccaccggatggt

SEQ ID NO: 85426 - DNA, 714 bp, Zea Mays
aatcattccctttttgcgtccggggcagtccggttacgaagtccatgcctatttcttcccacttccattcaggtatcgagaggggttgcaataggcctgcagatttttggtgctcgtccttcgttcgttggcagatgtcacaccgggccacatactgagctatctctttcttcatccccctccaccagtatctggttttgagatctaggtacatcttggtagtccctgggtggatggagtaggttgagttgtgagcttcttcgagcaggacctctcgtgcctccccttttggtacacacagacgatttttgaaccaaaggactccttggtcatctgtcctgaggtccgggagttgttccttacgagctttctccacaagtcttgctgtctctgagtctagacattgagctctgtatatgaggtcttccagtactggtctgacttcgagactgacgttgtttcccagacatgtatttagttgagctgattctttcttccaatcttctaaaaagttggtcccctttattccgaatggttttcgactgagggcgtctgctaccacgttggccttcccggggtgataatgaatttccaggtcataatccttgatcagctccagccatcttcgctgacgaaggttgagatctggttgagtgaatatatacctcagactcttgtgatcggtgaaaacgtgacatttgttcccgattaggt

SEQ ID NO: 85427 - DNA, 3925 bp, Zea Mays
tgcaaatcagaaatagcaaagcatgcttgtcgttcatttcagtttctatttatccttagcacacctaaggtgcagatcccacttgacattaacatgttagtgtttcccttggttatttcgtttgatagaactatagcccaacttgtcgcgaagtcgcttcactcaaactggtggaagaatacttgttgtgagagaagggattgttttttgtcacaaagttaatgcatccttttattcaattatttgttctttttacaatcctttgcaaaattcctaaatccctagctgaacatatcattacactattagatagtacatgactaacattagaactataaggtttcatatcttagtgcacatatcttagctagaaccaacatcatgtcatttaggtagactcttacatatgtttacatacaactcactctttctaatttaacagttgcaggaaactcccactgataaaggtaaaaagtttgagcttcatcttcagtctcctccaaggaggtgagcctcatttaatgttcacctggaaactgggttaagatggtggtcaatcactttagtttttttgcaaaacaataaaatcttgtactgtcatcaatcgccaatccctatcatactattatgtacaatcttttattgagcgcgaaagagtagaaagagctaacatagtaagccaatgcacaagaaagtctcactaggaattcataataaaaaatacccaaaactaaaagaaaccaatactatgtagcgtatatgaattcattataaaaaaatataaatgaatccatcttagaaaataccaaataacaatgattcctctgacctttcaataatagcatagaaactacacctttcagaccattgccttgattgtttcatatgttttgcctaaaaatgatacaacttacatctagaatttttgtgtggattttatttgtcatatctatggtctgcaggcttccagctattccagatcagaatcttgtgtgttcaaattggtgccttcctattctgtgtacaaaaataattgctaaatactgattacatgacaaaaccactttgtcaagactctacatagttcttgtgtacgtacttggcttcctattttgtgtgtctagcagtgtgttttctgtgttttcagttatgactattgttagtgtatttcaaaattaatatacttcttacattcttagacatataaagtcacattggggcactagatatttcacacatggaaaacaagcagatgaatgtaactgatctaataagagtaacttcctatatgtgcttgtagtttccagttaatacttaatttagtgtctttctatggaaacgggaaattaaccttgcaagttgtaacaccatttggttaacatggatgtggtttgtagcacgtgaggggtagaacgatgtccgcctctttcatttatggttcatggtacaagtctatgagagatgtctgttaattgaaaatcatgatggttcatatatgaaacagaataccaatctctctagaaatataaaagtatcaggggtcagagattaatctcgttggggactgcaactagacatcactcggttctagatcaaagtagatttattagggttttaattttttggctgagatgtgtcaagttactcttattcatatgttccatttttacctaatttgggatctcatgatctttgctggttctttcaatatgttaaactgaaataacaagcacttagcagctagcaacatcaagatgcaaggaatctcattgtcctagatgttaaactaaaatagcagttagattttcctagatgttaaactgcagtagcagttagattttccatgcaagatccttaaactgatcacttaatgttcacctggaaactggtttaattgttccgagttgagagttattgtattcatcattagtgatgtctctatctttctatataggctcaagtaacctgtttctatttgattttggtgcccgaggatcctactccgtgagaccacatcagtcgtaaaggaggtaccctattccaatactgcattaggatcgtttttgtaccaacctagaatgtttgcaaattttattcttgtctatagtaagtagtttatatccatgattttagtgttttagggttgaacactacgaaaataaaagtggtagagaagcagtactgcaagtacctattttttcccatttcacttgtgctcttcgatagaatcctgtgcttcatagaaaaattctagagcttcatgacataaaatcaatcgtgtaggtggtaacctattttacttgactgcattgggatgttctacaaattccttttatattttctattctgtgctaatatcgtgtaggtgtaaccgtgattttagcgacgataacaagagcatgaatttgcaagatttttattgttattttttgcttcgttctccatatgctcaaatccacaaacatattatcacaatatttatttctgagtctttcctcttcccctgttataagggagcattcccaagactactcacttttgcggtagctatgctatgcacaacaaaatttataggtatttgtacaaaaacaatgagttaaatgcatctacctaccaatcttactttatggtgctttaagtttcttctagcgccacctaatgcagtactccccatacacactaaaacaaccgtagcaaattgtttaaataaattgtgatcactatattttataatatgcaactcgtttggtttgttgatgatatttttgatatcctatttattcctttcttatttttctgtacctttataatgatgctatgatcaatactaaaagatcaatgtcaccatctgtacttaaccaaaataggacggttgcagtcatacctcccttccttttagagtctccataagtacacatttcacatgtcgcacctttatgcatgggccacctaatcaaaagtctgtgtttcttgtagtttcatgttatttgatgacattgaagtcattggctttccaaaaataaagagtgttgttgtgaggatagttgttatgttccctagacgctatgatagctaacatttcattctataggacatcgctgtgagttgcttcatcaaacattaaaataaagtcaatatagccatgtaattctctgactcatatgaccttcattctaaaatgtataggggtcaagaatcgaagcaatttcataccatgataatgtccaatgattcgatgccttactccaacaaagatgtacatatacattgcatggaatggcgttttgtctaaactgtgggcgtggtaattttggaattttggacatagtctagaattgaccttgcgaacacatactaatgtggagctattcaacatgccaattcaattctctccatatcctaaatatcttataccatttcatgaggtggtccaataatctcttaagacgtttgtaggtaacgaccagtccttccatatagtttatacttgtaccaacttaaccctttaaattaataaaatttaactaacctcatgtgaattgctcagtcgttattagcataattatatatttggcgtcattagagaatttctgtggaaaacctacagagaggtcatactaatggattccaggtcactgattcataactacattcttttttaaaatattgaaaatttgttaggtattattcaaacaatcaaagctttatttataggtgggatataatcgttgtggggatatttactgacctcttgcaatgaaaagctctacgataggtgttagctagagaaaacaaaaacataattattggaactatagtatgttgtaacaagatacacattaatttatcctttacctaaaatattttgacatgtacttaattttaatgcttattaattctataattctatactataacaatagga

SEQ ID NO: 85428 - DNA, 860 bp, Zea Mays
tgcaccaagccacctgtcgattcaaacaactggtaaataatcctaagcactattcacatgtttcactgacaatctcactgagacccctcccactttcgttccttcacaaactaagtccacgacacccagcaagagaggaagtgagcttggcttggccgagacaagctacgacatgagctaaaaattacttctacaccaaatccgacttaaaatgtaggcctatgaacaagaaacgaggctcggaacctaccccaaaatactagaacgggctctcgcgagaaccgcggcgaggtgaccatgttcctacggctatggcacggtagggctcaaactgaagatgtaataagcttcatggactttccagatactgagaacaaggattggtcaagccggtgtagaagtggatggaccagtcaccgtgcaagtggcattccacggcgaagtccggcgatgaggcagcgttcccggctatccactgcggtagagtttaaacggaaggtacgatgagcaacaggggatcataaagaagctaaaacacataatataccagaattaaacaagcgacaggggctcagccacggcgaggtgaagcgcgacagcaccggtgaccatttctggggaaaaccgctgagaagaggctatagtggatgaacaggcgattggacaaactggacatgtgcgtaaagaggaggtgcaacaggtggcacgaccaatttataggtcgttggcgagttggccgggcgattccagagaggttcatcgtggcacatgaatggctggacgtggcacgccagtaacaagatgggccagggcacacttttatgcgtgccacgaggcagctgtgtggcacgacaatgaag

SEQ ID NO: 85429 - DNA, 533 bp, Zea Mays
gccagtgtggtggccacttggccaatactattatacacatacgcgcatgcatgctcggtgccccagcgcatgcccgcatcgattcgagcgacgcatcgtcatgcaacgcacaacacaacagaaataattacaaaaaaaaaagacaccccatgccactccactttcataaaccaaacgaggctttaaactttcagccctgtctacatgccatgaacgtaactcccctcccgtgcgctattgttcatcaccgatgagtgtccagatcacgcccacggcctaccacgtctgtcgccttgcgactgtctggcctcgactgtaattagctctgttttggtttggttctgcaacatcagggatctcttggctcctaactttaccttttctcgatattcaagagccaaaattccatgataagcaagtttctatgtatctaaactttgttttagttactatgtatctaagtttgattccactcaagaacgtagtaggatagcagcagcgagctacacaacacactccagaacaaactagcg

SEQ ID NO: 85430 - DNA, 287 bp, Zea Mays
gaatataaagaattcaaaacaatagatcacctttgaaactaaaaatagtgtttctatgatattgagggcattgtattcgctcgagagggtattagagtacaactagtggatgaagacgttagtgggctagctaatgaccttttgtgataacaagtttcttataatcccgtctattcatggcatacttagatggtgtttatgtccactcaagtaaaacaccaaacatcaatttgccacatcgtttctcaaaataaaataaagaccatggaaaattttgccaaattgag

SEQ ID NO: 85431 - DNA, 468 bp, Zea Mays
tttgtgaacttttcaatagcgacgagtatgtgagtataccctccttgagcttttttgaacggtccaatcatatccaggccccccagcacgcaaagggccaggttacaggaatagtttgcagatgttgggcgggcaagtgttgctgctttgataggaactggcatgctttgcatttctgaaccaactctgtcacatcattctttgttgttggctagtagaacccagagctgaaggccttccctaccaatgtccttgatgctgcatgtacaccacattgccctacgtggatttcatctagtagctgctttcatgtagccgaatgaatacacttcatgaggactcctcctccacctcttctatacaacagacccccctatgatggtatagtgggccgactgtcttgcgatgcgttctgccatggctttgtcatccggttcttccacgttttttatgtacctggtaatcagc

SEQ ID NO: 85432 - DNA, 407 bp, Zea Mays
ctggtggtatgggctgaaaagagatgtggctgcacatgtggctatgtgtgatgtgtgtcaaagagtcaaagctgaacaccaaaggccaactcgactattgcacccgctaaaggtacccgaatggaagtgggaagagattggtatggacttcattgtcgggttgcctcgcaccccaaaagggtatgattccatatgggtgattgtggatagacttaccaaagtggctcacttcattccggtcaagactacttacaagggatctcaattggtagagttatacatggctcggattgtgtgtttacatggtgtaccaaagaagatcgtttctgatagaggctcacagtttacctccagattttggaaaatctttcatgagaatatggatacaaagttgagttttagttcgg

SEQ ID NO: 85433 - DNA, 1070 bp, Zea Mays
tggaggcaggtgctagggcactcttgggaccattcaccgagttggagtaagtaggcacggatgccttcaactgaggacaattattcttgtagtgactggggtctccgcagtgctaacagacattggctggaggttggttgcttgcaacggagggggtctgaagggagctttgaccctgctgactgaaacgtgacggggtgggtccagctggcttgttgaagcttggtcccttgggtggaaacccaaaggatcgaattctctggtgcctgtcctgctgctgagctcagaggacctagaactttctcttgaggtgacccttttcttcttctttagccctttctacttgtatggccttgtttgagagatgcgagaagctgatgaagtcttggctggcgaggatagtcttgagttctggtcttagcccttcaagaaatgggccatcttcttggcttctgtgttgacatcgtcaggcgcatagcgagctaattctgtgaatttgtgcacgtactcactgacaggtcttcctccttgagttaattcccgaaattcatcttctttgagctggacgatcccttggggcacatgatgttctcggaaggcggcttcaaattctacccaagtagcattcctgacggtagcgctgaaggtatcccaccaggatagggccatcccagaaagttgatgagcagccagatgaacacgctggttttcagggcatccgatggcctctaacttcctttttattgtgacagccagttttcagcgtcgagcgggttactggatccagcaaatgtgggaggcttgagtcttagaaaatctcccattctgtcctaaggccttccaccattcgggcgctggttctcaaggctacgggtgaggacctcaatgagttgggtttggttaaccagaacttgggctaaatctaatggcagctccggaggtgcggggaggtgggtttcactcccttctctaccgacttctccttcagcacctagaggagaccttgctccaatccctgaggcggtaggcgtggttttatctgaagccatctgccagggggagaggattac

SEQ ID NO: 85434 - DNA, 783 bp, Zea Mays
agtggcacaaaactgctgggaggactacgaaaactatgtgtaaggcgtatctccctgttctgcatacacataatcgtacggtccaagatagggcaccagacggtccgtcttcactctagacagttcgaagtgtggcaccaaatggtctaagactaggtcgaggagtccaggattatatacggattgtccgaccgcatacgccgccgcctgggtggcctatgtgtagattgatgtgggaccgaacggttcggcgaaggatgcaagacggttcgtgaggtggccgaacgatctgagataaggcctggacagtccgattgtggttagagtcgatcctatgctaggcccgagtggcgatggttgtgatgatgtagcgaacaacagattttagtgtggtaggttcaaccatgacttcgtgtgatgggaaactagaaacaacagattttttctattgtacgtgtgagtttcttaagtgtttcctttattccccgtatgcgttgtcgtaatttgatacccttgtaaatctatgtactatttaagagaccggatgtcattagattaactcacattggggttttgtgatgaaggtaggagaaatgttatctcgatctccccttgttggacaaccctgtggtgtcggtctaccttgaagtgcgcctgatatttttcttttacctcctcgtgctcttgggcttgtcgttgctttatgtaattttcaaatcgccattgatcttcaaccgacagactctctagagttggttttatgatgttgcttggagaaacttc

SEQ ID NO: 85435 - DNA, 326 bp, Zea Mays
gttggcgtatgccgtcgtgcgcttcgtcgcgcgatgcttaccgtctctttaaaattagtgcaagtgtctcgttgtgcgctctgtcgtgtggtgagtcgtttacctcctaatttaatctaaatgtcgtgttgtacgtctcgacgtgcgacccctccctttcattcaccttcaattgtttacaatgattagacatgaaacatgactttactttatgctaaacatagtgtctacattaacgcctttcaattgagcgagttgtttaattcataataatgtaacgtgatcgtttctcgactgtctttttctctttccctcttagccttaag

SEQ ID NO: 85436 - DNA, 1658 bp, Zea Mays
tcactaccatgtgtaggatgatcaggactccctggtttggtagggctctaagaagttggctcagctaggttaggtgtgacattaaggattgtcctgtctcacataaggaccggtttgtcgttactccttacctaaactcttatcaagtacaaccactcaagactgtatgggcagtcactgatctgaacttgcatggtctgcaccctagggttatcggtggctggggagcaccggaaggacatggagggtgaacattgccatcctagtttgggcaagggggtaaccttattcctttcagtataatcgttaaggtaaagtcatgcaagggaggaaagagttgtggaattcggatctcactatgttgagtttgatgtgtaaccatcgaaggttgacgaatgtctcctccaagtcgatgatgaggtcgttagacttcttagtcttcacgactatgtcgtcgacatatactgcgatgttgtgtctgacttggttggtgaagcactagagcatgcatcactggtatgttgtcctgacgttcttcagaccgaaaggcatggagatgtagcagaatgatacgaaggggctgatgaatgaggtggcgtgttggtcaatttccttcatggtgatcttgtgatagcctgagtaggcatccaaaaaggaaaggagctcacacccaatggtggagtctacgacttggctgattcgcaagagagggaacgggtcttttggacatgcatttttaaggcccgtgtagtcaacaaacaacttctagttcccattcttcttcttcacgagtatagaattttcaatccacactaggtggtgaatttctcttacaaaccctatcgctaagagcttggtgacctcctcgcctatggcctttcatttctccttgtcgaaacggaagagacattgggcaactggcatcgctgtcgactggatgttgaggagtgctcggtgacttcccgtgggatccctggcatgttcataggcttccaagcaaaaacttcatggttttgctggaggaagtcgatgagcatgccttcttgtttgtaggatagcgccaccttgatgtggacacgcttggctgagtcagtgggatcaactaggacctcattagtgtccgcggcggacttgaaggtgctagagccgaccttaggagggtctggagcatcctgaggcgtgctcttctagtgctcggccatccccctggttgctaccagtgatgaggtgagctcacagttggcatgttcacaggtgtaggcgaccttgaaagaggcgcttgttgtgatgatcctgtgaggaccagatatcttaaggttgagataggtgtagttggggacatccatgaacttagaataacatgatctcccaaggatggcattgtaggacccggaaaatccaccacctggaactgtaatcgcttagtgtggaagttggaggcatcaccgaatgtgacaggcaacgtgatccacctaagatggttggcctaatgacttgggatgacactgtgcaatggtgccagactggggcgtagcttggagtgtgtgatccccaagtcgtaaaacgtctcaacatacaagatgttaaagtcgctccctccatacatgagcaccttagagaggttcttcaggccgacaatgagcttaacgacgaggggg

SEQ ID NO: 85437 - DNA, 320 bp, Zea Mays
gggaaagcgtatcccagctttcatgaaacttcagaaaaccactacttcgttcgcctcgggaagaggaacagagttttctcctccggctctcactacaaatatatcatgaaaatacatgcccttcattgtctcaatctttcctttcttaacagtagattttttgaatacaacatagcttggcctccatggtcgatcttcggcatcatctgcaccactatcaacatcaaaatcatcactgccctcagaatcttccgacagtccagcaagaatttcaatggttattttctcagtgttggtcctttccatatcctcataaaacc

SEQ ID NO: 85438 - DNA, 1267 bp, Zea Mays
tcatatggttcacatatttgaagatttgcaaaagaaaccatgagatttgggcctaaatgcaaaaaggccactctagtgctcatgtatggctaagtctaaaaatcagccaatatggctaactttggagctttgtagatctaaaaatacaaagattttgcctagggtcaacataccaaacttgtagagctaatataggagaacaacttttctataggaattaagccttggtgtcatgagaaatttggagatatttagatccaaagtcgggctgtcaggcaaccctaagtctgaatcctcactagcagtgaagtgggatgaacttagggctcaattttgaataagatcctgtaactacttgatgatggacactataacaaagttagaaagggattatagggcaacaattttcctgctggccgacgatcaagttgttacgcaaaaattgaagaacatagcattgtaaattgctttgtcagaacgactgatgggggggtgaccatggtaccgtacaaaaaaatcttcagatacatcacccttcgccactggtgacccccgttccatgattggtgccgatcgccacgattcgtgcttcgggtttgtggattgagctcgacggtgaaaagatcgcatcatggatgagtttggactactgtggcctcgctgttccccgaccacttgcgccggcgatgtggccttacggccatcaccagagtccacgtcgttcaccgcaattgcaccacatctcaggcctttaaccacgtcgcaatagctcgggtaatcgatatcgagtgatcgccggagagctgccacggtagatgccaccaatcgtttgcaccagtgaccccctctttctccggctgccaccgtgcgagaccaaattcattggccaccgcttaaaggccctataaattgatggcccggtctgttgcaccatgttatcacaaagctagagcacccatccccaccttcaattagccaccatagacagagaatttcattcttcccccaaataatctatctgcgccaccgtgagatgtcgcgttgtgaccagccgcctctaggtctgccctcgctcttcttgtccgtgttttagcacccacacatgcttgcgatcgtcgtctgctcgacccattgagcttaacctcacttaatcaaccggaacatcttgatctgtgtatggtgttcgccatcaccgtggtcaggctaagccagggccgtaataaccccgtttaaagcttgttctagacttattttgggtcagtgatgc

SEQ ID NO: 85439 - DNA, 478 bp, Zea Mays
atcgtcgaccaaacctgctgggaatttctcgccgcacttgttcctccgtcgcggctccgccattccttcgcgaccaataccctgcgctacaaatatctcgggtacgattactttatcaagttcgttgtggcccgtatcacgtaggagcgggcgaatttgaagctagggcgctcgtgcactgggtttgggcttctccgacgaagttccgccgtgaaccgagggcgggccgccgtcgggagcccagggttggcaagataaccaggaaccgtcgatctcctggtgaatggatgagattagttcccagggagcgattcgatctggaccgtatgttggatcgagcggttgagatgcgctaggcttcataaaatctaaaccctagaatcccgatccaacggtggcgatcgtgtaacgtttcgggccactctagatctaatccgaggcacacattttagatccaacagccctgatttcaggatac

SEQ ID NO: 85440 - DNA, 482 bp, Zea Mays
tggtggttagggaagcatgggtgtatatatgtatgtccaatttattacgtaggatagaggatgcctttaaagcatagataggtttgggtaagaaagagtatggtaaggaaagactccatcctagattgtggattttgactcatctggtgatcccgcttgatccttgaagacttgagttggtgcttatcctttcttaatgaggttgatcatcttcggtctccaatcttggtgtcttcatctgagctagggagatatagttaaaataattggatttatgagtaggacatttttttaatcaataggttcacataaatggattgtgcaacttattgggagtgtacggctgagttgatctatgacactaacttaggcttaagtgacttaagagtatggcttaatcctcgtaccagcattaagtaacacactttagattggatcagatctagaataaattgatatggttattttagactcgataagac

SEQ ID NO: 85441 - DNA, 621 bp, Zea Mays
ttgtgacctggtcttgttgccatcttcaaccagtggtaggtggccctaatcaatgcgctatcatgcgggcatcgtgttgggggctttgaattggggattagcacacaagggtgcccgggttcatctcgccggcaatgactctgccatagaaggggggcaacgctgccgcggtttggttcctgggtaggagaagggttcggggccgtcgatttgaaatgggcagcccagattagttctagcgtactacttggggcatttggatttgtgtcgttggattggcatcctacggctcgaagcagatcgcgtctcattaagtcgtagccattagatcggtatcgtgcagctctggttacatccgggaggtacccttttgcgtaacaaactgcaaccatctgatcgggatcagaccgtccatgtcgcatacccgttcggattatgaaataaatctaatcacagccgcagatagaggatcagacggctatgatcataccataccccttcactaaggcagtttagcataataacccctaggatccttattattcaacccgcagtccagtgctacagcatcctgagtctcgagaagttttgtagtttagcccctgtactccctaaaaattg

SEQ ID NO: 85442 - DNA, 534 bp, Zea Mays
aaaaaacagcatattccttgttctcaggatgagtctctggaggagcaactcatttagttggaaacataactcctatttttatggtagaggaaatgacatgagagagctagagaagcctctttttttgtctcatcttctctcattttctaggggtggctccttctatttttacggagaaaacagtggaatctgccgtgtgatagattttttgaaagatctgtttagagagccattgaaagagctctaacagagacggcataaagatactccaggttatgtccagttactttgcttctgttgctcaccggtattggttcctatcactatcagctttgccacttgcatcttgttcctttgtccttccaccgctagtccatagaaaatcaactaattcactaatcacaagctgatatcttacgcagaaaccagcaaagtgccaagattaagtggctgactggctgtgatatcaccctgtacggtagagcaccacaaatttataaaggtgcgggattagttatagaacaacacatggat

SEQ ID NO: 85443 - DNA, 356 bp, Zea Mays
catgattatgtattgcttaacttatcgatggttggacaattaatatcatcggatgaactacccgacaattatccggtacctacccgagtagtatccgttatccgtttcttacccgtccgaattattaccaggtcccgtcctgtatccgtcccgaatcttaactacccgtatccggtctcgtatccgagagaaatacattagggtaggatacgggatgaccctgtatccggctgtatccgtcccattttcatccctaccgaagggaagccactcgagtgaattcctcgcctggcccgaggctgacccaccataaatggctggccccattaactacgcctagcaccgagccacagtag

SEQ ID NO: 85444 - DNA, 829 bp, Zea Mays
ctaatgtggaaacaaattgccactggcatatgctttttttaaaaaaatgtttgagaaagaactaaacacaacttgtgcgatgatcatatatcatttgtttaaaattgttagcaatcaattttataaatgaaattaggtgatggtatcctgttttgggggaacgcaaatgtcgcttgttatgctccagtttaagttgagtagcagcgtccacattgcatgcgaatcttgctcctcagacttgccagcactatatcctacactagaataggaaagcgccctatcgggcgctcagctggtccagagaaggtaactactgtggcattcaatggtagagttctcaagcttggtccagattcatgtcagtcaatgtgcccactgcccaagcttgtggtatgatttttgccaaatcgtgcagaagaaagacttagtttcatttttttcacgtatgtaattctatgatgcagatggaatgaaggatatataatgatgaagttgagagattatcagttgaatggttagaagccactggactgttagtgtttgatgcatgcaggaacaagcctactcaaatgaggggaacttagatggagtgcaggtcatttcgtggtgaacccttcagagttgtctgatgaagatgaggaattaggagcaatagaagatggtggctgcacttccaagcttgctcaagataaactacgcattacttctttgttcaagggcatcaaacatagtcattagactacatacatgattatatcactgctgcgacatcaaatccttttttgtattattttcttgtgcatctccctggttttgttacaggataaac

SEQ ID NO: 85445 - DNA, 629 bp, Zea Mays
aattcttggtgatgtcttttgggctgacaaatgcaccagcatatttcatgtatctaatgaattctgttttcatgcctgaattggacaaattcatagtggttttcatcgatgatatcttggtgtactcgaagaacgaagaagaacatgtcgggcatttgcatgtagtacttcaacgtctgcgagagcaccacctttatgccaagttgtcaaaatgtgatttttggctaaaggagatcaaattcttgggccacactatctctcaggcaggtatagttgttgatcctgataaggtgcaggaggtgatgaactggaagccaccaatgactgtccgtcagactcggagttttctgggattagctggttattatcaaagattcattctggatttctctagaattgtgaagcccataaatgagctgttgaagaaagaagccaagtttgtttggggtcagaagtgcgaagatgcctttcatgcgttgaggcaacatctgaccacatcaccggtgttagagcaactcgacagcagcaagccatttgatgtgtattgtgatgcatttgggactggactaggttgtgtcttgatgcaagacaacccagtcattgcttacacctcaacagcactcaggcct

SEQ ID NO: 85446 - DNA, 1210 bp, Zea Mays
gcgaaaaacagggcctgctggtattgattttataactttaggggacggcgggttctaattcataaaagtacggggacgttttagcaaagttgtcagccgaaggggtatggtccatcatgagccattggatcatgatccgatggccccggttttaaaacgctgcgatctattctggtgcgcacgatcgtgaatcaacggtcagatccaatcccaccaagcggtagtcccagtttaatccaagccgcccactagagaaccaacggcagaatccctatcttctctaccaacgctggcggcgcggcggcgaactgcgcacggagtaacgccgacaagcgactacaaggtgacctcgtccaagaaatcgagaacgggatgtggatgcacggagcgggtaccggcgaggtctgaccccgacgctccaagcttggcttctatcttgagtgggcgcaaaacaaagccaaggatacaacgaaccaactcaaggtgactcaccagcggtcgatgcaatttagcagacatctcgtcgtcgtgcggcttggcggcaacaatgaactccggcaaaccattccccctgccagtgcgcgagctcccatagcccccagcattcacccgtgaccaagaattccaggcggattcatagggagatgagcatggcgcgcagcagattccaaggctccctgcacccgcgtctctttctctgtattagccatggcgcagctctagctctccgttctaggggatgaggaggagcacgcaacgatcctggttttatataggagcggacgcagcatcgggcgatgaatccgggtgattagcggtgattgcggccaggcttgttacggagaatttcgtctcctggtcacgcgacgcggaagagacgggtccgactccagggccccacgcgccagcggaaaggctcgcgtgcaagtgacgtgaaggagtattcaggggattagcatgatgatgcaatgcttgcatcatgctgatgtaagcgcggcaagaggaataaaataacaagagaaatgaagaggacgtcggatgggctacggctaggtggtcaagccgaatgggtcggtttcttttcctttttttactattttctattttccaaattcctctttttttagttttcgaatttcctatttcaatcagattgaaattcaaatttcaaattatattcaaatagagttcaaacttcaagccaatctag

SEQ ID NO: 85447 - DNA, 706 bp, Zea Mays
gtttaattgaatttctttggataatttagatttgaattgcaagtctcccaaaaattaaaaatagtgaatgtaaaagcacaagttatggcctattttattaatagggaattttcgaacaccatgctcacgaaacatgaccgcaaacttgtgatccagttgtgtttaaaattggataaaatacaaacaaggtcataaaatcatgaaacttattgacatgtcatgatatcacagtagtgctacaacatgctaaattcactatagcttctcagtgccttttttgtgtcgtaatgcataacatgaccatatgaaagtatatatagttggtagcacagtagtataattatcatgcatgcatatagatggatacatgtacgtaccttgtccatcatcgtcgttgtcccttccatcgtcgtcattggtggaaccttttctttcttatctgtcatcaccgtcgacatccccatcaccggcactacatcctctggaccatcatcattagccactgatcggcgaccatcatcatcattatagacacgttcatcacctttgatgatggtgtagagccaagacgccatcactaccataaccggctctttgacgagtgctcggcgctttgcctagtgcaatttatcgggcactggcaaaacatgctttgtcgagtgtcactctcggtgagataagactctcgacacaaacctaatttgct

SEQ ID NO: 85448 - DNA, 300 bp, Zea Mays
ctttttaaagaaatctaatttatctttctgttgtttaggctttagttgccatttgagaagtaaccaagcagatattcaaggaaagcccagattcttcccaataaaacctatggatcatgactgatttttggtcatttcactaggcaggctcagcaaagtttgaagcaaactacaacgcacaaacaactaaatcatggagagtgttgagttggttgcttggcagtggatccactcccttagtatctattttcacacaggcaagtgcagatatggtggatattcatatctctgctagtttca

SEQ ID NO: 85449 - DNA, 396 bp, Zea Mays
aaacaaggtagggactaaactttagtctcttaattaaactttagttcatggactaaaggaaccaaacagaccctaaaggaaccaaacagggccaatataagacacaggtttcaaacacgtccattgtattgtgtcttatatttagagtatcatgtaacagtgtcagagttatacatgctctaaataaaaaatcattagacatcttgtcgcaaaaaaagaagctgcttctccatctgcataattcagtatttataccattttcaccgttacagaaaaagaaagaaaatgaacctagcaagcaaagctctaccgttcattaaagcagaagtcactttcactatcttttgcacaactgtgacatcctgttcctacgccaattgttacagttgattcttc

SEQ ID NO: 85450 - DNA, 485 bp, Zea Mays
tatatgttgttgtctctagaggttggagcttacattaaattgatgcacataatgcattctttcgtcatgggcatccactttcttaaaaggtgacccgttttgctgtgctcccctcgtttcacggcttcatcgtctatctcgctcgctaacgtgtggtgtggcagcttgtagctagctgtccatacctctccacaaaataccgtctgcctattttgtacacgcgccctccacccacacactcttcctcctcgtgcccacgtgacgggttagatgttggaccggaggttggactagcgcacgtagggaggtttgacctagtgcactggtcgactagggcttccagtaactattggaagccttgggctcttaatataccgtccccatatatatgtgtgtatatatggtggtagttaggttgaactttaattttatatactattcaggtcctcaataaagctgagagcacctagaggggggtgaatagg

SEQ ID NO: 85451 - DNA, 316 bp, Zea Mays
acctataaagagccctccctactattcctctgtcttgctgacatttgcacagatgtccctcgacttctgtttcttctctaactcaaccccttggccacggcgtgctcaccgccgaccaccctgttgctcggaccggccaagaacaacggtggctgtccaaattaactacggggcaagtattaccgacccgaggcgactctagaataggctctaattggattaatccggccctggatttgcctgcccacgatgacggcgatcaccgagaccaaatccaggcgttcccgatgagtggatgccgtcaagctcagttagt

SEQ ID NO: 85452 - DNA, 314 bp, Zea Mays
tgagtagaatcttggctgggcagaagtaaggtgaaactcacacagattggggaattgatttcaacgatgcggctagctacatcaagcactacttggtgtcgggtcatccaattggctcccagaataatatccacattctccaaacccaaaacaaggagggtggtcttgataatgtggcttcacagttgaatagacacactttggtttaattggttggttgcaattttacccccaggtgtggctatcatgaatgacccttttgcatgatagaaaggcagttgacatttagcactgaacttttggctaatgaaact

SEQ ID NO: 85453 - DNA, 1025 bp, Zea Mays
tcaccattcggagtgagtccacactagcatcccctcccgaacacaaatactattgtcccctatttttcaaaaccacaataggtatttagagagcatgtaaacattgtctcaaaaaattgagtacttgaaatcagatgtggcaccagacaagctatttaaagaggtcgacaactatgtaaattgtgtttatatgcatcagtgtggcaccattgtggcactacattccacacataataaccgctagtttcagaaactagatattgggaagccattggtgcgttcggtgtagtgggttggtaagcagcaaacacgtttggtgattgtgctgagtgggggtgtgatgtataatttcactcctttggactatttatacccccgaatttagccatcgaggtgtcttgccccttccaatgcatccacttgtgagtgagaaagaccctttccatggtgagaatattagaaaagtgataatctcgtggttagcgacctcattagtacatagagagtgacttatgtgcaactaccactctcataagacttggcatggccaagtgagagtcttgttcttgttagtcttggtgattgacatcacctagatggcaaggtggtgatagggatgagtgcaatgagcatctggagagcttgtgggtgacctaactcggacttgtacatagttgtgagtggttcaccatgctggggtcatgaagaaccagctcatagagagcagttggtccttgcatggaccaatggaaagcaacacaattgcctgggtgctctaatgaggattagttgagagtattggctcttcgatacctcaacaaaacatcgaggagtacactaaccattcccttacttttatgtatttactttttagcaattcatttcaaacatctacatttttagaattgacatgctagtatagggttggaaattagagtgtaaaactcttatcacatctttatgcactaggatgaagctggaattgtgtttaggatttaatttgagaaagaaattttagagaagct

SEQ ID NO: 85454 - DNA, 582 bp, Zea Mays
tgaaaacaaacttgtatccacagtaagataccatgaagtggaaataattcaacacttctttccggtgagcaaggctatctctgcaacattgtatcacttgtatccagtttgagcatacttgtgctctactatggccatagtattttggatcacttggagcgcatatacaattgctgagatgtatgtgtcgacacttgtagctttcaaataacacaattctccaattgacaagaagtcattttctcatgcacccttatggtttctcgtgaaatcccaaaacaagaatcaaaggcttctgatatcctagcctcatcagtgcgcactgagctaggttgtgaatgtcttccattcacaggataattcatatcctctaggtgtccagcaacactaggttggttaccaaccaatagatggtctgcatttactatctcagaaggtcttgcctttagctgcttgcaagcatcttaatcccaatttgtaaccatacttctccccctcttattcaaaatatcgttgcaatagggagttgagtggtgttccatttaaccactctttctggaatttccacataggattaatttg

SEQ ID NO: 85455 - DNA, 862 bp, Zea Mays
acatatttcagtggaccatagaggcacaggaagctctagaggcactcaagaagttcttaaccacaccaccagtactcaagccgtcatgccgagctacgccttgtcaaccggtagaagatctgctcctttacatctcctgcacgactcacgtggtaagcaccacgttagtagtcgagcgggcggaggaaggacatgcatacccagtgtagcatctagtttacttgatcagcgaagtcctcgggccctcaaagatatggtatcctcaagtgcagaagctgttgtacgcgatacttgtaaccgctcacaagctccgacactactttgacgaccataaagtcatagtagtcacaggatttctgataggggatattctccacaacaaagaagctattggatggatagccaagtgggcatgcgagctcggagctcatgacatagagttctggccccgcatggcaataaaaactcaggcgctgttcgacttcatatcagaatggactgagcaccaggtcccggatagcccagaagttactaaagtgtggacaatgtactttgatggctcgttaaaactgcaaggagcgggtgcagggattctctttattgctcctagaggtgaacaactcaagtatgcactccaactgttgtttccagcatcaaataatgcggcagagtatgaagcactggtccacgggctgagcatcacagtatcactcggcatcaagaagctgatggtatatggcgactcgttggtggccataagccagataaacaaggattgggactgctcgaccgattcaatgggcaaatactgcgcagctgtgcgaaaactagaagacaagtacgaaggattggagttccatca

SEQ ID NO: 85456 - DNA, 514 bp, Zea Mays
cgtgacctgaacctgaaccatccttgcagccttgcaggagtccagtagacgtgggaacttgcttggtttagcaactctgcttcgcctgtaatgcgctcacttttgagcttcgtggtgggtgcagtgcagtgcacacaccaagtcagagggtctgttaactgcacgagtctagcttatttctctctttctgtcagatcatacaacttaacaaaaggtactctagttcacttaagcaaaaaattgggcggatccagtaaccccaagggattagaacatgcatcctagcggtgcgaatgatcctagcttcttcttcttttttgttctgtttttttgggtaccagcagcatctgatggaacaagataatggtcgtaaacacttctgtcagcctggagcattagcgaaccggagcgtcctagtcctagcctgtatatatctcgccgccaagtgcagatcggaatcccaatgtttgaagaacaaaattttgccggccgcctttatgcgcttgctcttccg

SEQ ID NO: 85457 - DNA, 393 bp, Zea Mays
gtaaatcttgaaattcaaaatcttcttcctccaaaatgtcttcagcttgctctttccccttttcagtagctgtgctcgccgcagccacaacagattcttcttcagtcatttttaagagtatgttatcaataacttcaagcgtttcttccaggttcggatcttctgtggccccgggtttcagccccggcagcttcggctgcgccagtttcagcttcgaaggtttccgctctggtggtttcggctgtggcgcctttagcttcggcagtctggtcaatatcaattcttgatgccggtgtcggtgacggtgtcccatgaattacatctgctatttgaataatccttcgttttttcggcagtgcaagaccttcttctgccgaagctgccttgtccttc

SEQ ID NO: 85458 - DNA, 513 bp, Zea Mays
gttattaaaacgatgttaaaacgacgtttaaactataaaacactgatagaacagcgaaacactgaaacattttacacttcctcgtaaaacgtcgtttaacgacgtttaaacgtcacgttttgacgtttaaacgcgatatatagttaaacgccacgtttcgagcgtttaagttgcctgcttgtaaacgatgacaattttgtgcttaacgaccttgacatggatgatgaagaagaaacaaacaacagtggtggccgtggtgatgagcaagacaaggatgatgttggtttagatgatttggatgatggttattgagtgcttgagtaacacttgtgtgcttgtggttgtggacattgcattctactttagttgattttgtgctatgtttgtgattgtggactattagacatctcattccactttgtttgcggttgtcgacttgctattagttgaacttgtgttattgtggtaatgtggttgtggacttgtcattttgcacactattattatgtgaac

SEQ ID NO: 85459 - DNA, 356 bp, Zea Mays
agatggcagggcctgcagaaacttcctaacaacttcctcctcggtgtattcatcaccaagaactgccagttcacctgtgatgcgtgtgatctgtacaacgaaatcatccacgctttcgccgtcgttgaacttgagggcgtcgaaatccctcttcagtgtactcgccttcgccttcctgacgcggtccactccgacgttgcgcagtcgaagcatcttccacgcatcctgcgtcgttgccttcccagccacggctcccatcagctccggtggaaccgccttggagagtatctccaaagcgttccggtcgtcgtgccttcactcaccgcgtcccacaggttcctcgcctgcagcatcac

SEQ ID NO: 85460 - DNA, 799 bp, Zea Mays
accaggttccaatttcatttccttcctacctttattagcagcaatacgatacttttcattcatcttttcaatttgcaacttagttgtttcatgtaacttaagaatgaattcagaacgttgtgtagcatccaagttcactatttcagaaggtggtaaaggtagcaaatcaattggggcacgaggattaaaaccatatactaccataaatggactaagcttggttgcggaatgaatcgatctgttataagcaaactcaatatgtggcaaacattcctcccacaacctcaaattatcctttaaaatagcctgcaacatggtagataaagtgcgattgacaacctctgtttgcccgtcagtttggggatgacaagtagtagaaaacaacaactttgttcccaatttaaaccacaaagttctccaaaaatgacttaaaaacttagcatccctatcagaaacaatagtatttggcacaccattcaaacgcacaatctcagtgaagaacaaatcagcaatatgtgaagcattatcagttttgtgacaaggtataaaatgtgccatctttgaaaaacgatcgacaatgacaaaaacactatcactccccctctttgttctaagcaatcccaaaacaaaatccatagaaatatcctcccaaggtgcacgaggaacaggaagaggcaaataaagaccatgggggttaagtcaggacttagctttgttgcacgtggtgcaatgagaaatgtagcgctcaacatcacaccgcattcgaggccaatagaaatgagtaaacaacacatcctcg

SEQ ID NO: 85461 - DNA, 527 bp, Zea Mays
ttcgacgatccaaggggtcccaaaggcagccccacatcagcggtggcggagcaccactatctccttcggggcatccgactgcctcgaaaacatggcaggggccggcatactaccactcatcaccgcccctatcattgccaacatgaagctacatcatgtcctgattgatggtggggctgggctcaacgtcatcagtcatgctgcgttcaagcagctgcagatcctaggatcccgactggaaccctctcgcccattctccggagtgggccctcaacctatgtatccccttgggagcatcgcactcctggttacactcaggactgaggagaacttccgcactgagaacgtctagttcgacgttgcggaggttaacctccctttcaatgccatcattggcaggtcagccctgtaccggttcatggccattgcccattacgagtatttggtcctcaagatgtcgtcccctggtggggtcctcaccgtgcggggcgaccgcgccgctgcgcttgcagctgtcgagaagttgc

SEQ ID NO: 85462 - DNA, 347 bp, Zea Mays
ctaggcttgtggccaaagggatttccaaaagaaatgtgaggattattttgatacctattcaccaattgccagattgatcacaatttgtgtgctaatagcacttgttgcgagtcatgatctactcatccatcaaatggatgtgaagacaactttccttaatggtgagcttgacgaggagatctatatgaagcagccagagggatttgtgacgcatggacaggagaacatgttgtgtagacaaaggaaatccttatatggcctcaagcaggcgccaaagcaatggcatgagaagttcgatataactctgacgtcagcaggcttagtggtaaacgaagctgacacctgtg

SEQ ID NO: 85463 - DNA, 1117 bp, Zea Mays
cgcccgtgctgatgattttgcgcaggggccctcggccatttgaacaaacaataaagaaccattggcactatttatttgtctcactgacatttgcacttagacccctaagcttctatttcttcaccggataagtccctggcgacgacgcgttcacccgccgactatctctttactgaaatacgtcctaaacgacgacgacaaactaaaccaagtgctagactagcgtccccaatcccaggcgaccctaatctgtcccttaattgagctagcccgacctagagttcttctgttcacgacgacggcgagacccgagggtgaaccaaggtgttcccgacgactaggcgcgatagcgttcaaattctaagaacagggagcaccactatatcctaaggaagctagaacagacggtaattgggttggaactacctcaggtaaagttggccacggaagagctcttcacggcggcgatggcgaccgatttgggggaaaaaccaaattcaggcgctatggtggcaaatcggaggcgagggttggtgctctggcttcgtaacaacctagcagagctagctgtgcactcaatttatagcatctgagagcggtggctccgaatttggaagaggaaagctggcagccggagagagggggtgagtcaccggcgcgaactaccatggctttcaccggggcaatgtctcgggcgatggacagactacctacggcgatctactgtgacgtggtaactcttctaagtacgtggcacggctacgaagggcggcgaactccggcgaggacacctcggacaatcgcacgacaagtggcacggtgattagtccggtgataaggctccaactcttccctgcgatgagatctttcaccgccagtcgttatccgcataccaggtagcatgaatcgcgacgccggtgaggatcgcggtgcggagttcacaggcagcacgttcactgcatctaaagatcttttcattcaatgtaccatggctatcttcgtcagtctgtctgaccgaacaacttggagggctttgttctcaaatttttgtgtggcaactcactaatccatctgtagcaaagttgatctcctacaaaccagctttgatttcattata

SEQ ID NO: 85464 - DNA, 356 bp, Zea Mays
ctttggagataggagtacaaacgacaggagcagaagggagaaaagtgtgtaggatacaagcgtgcgagtagcacgctgaggtagtgaggtggggttcggaaggcgacggggatctgttcgctgaaaaccatggactcagaagaaaatggtgtgctggactgctggtggagcagcatgggatgggagtctggcacggccaaatggccaatacatcacatcacgtcgtgtccttttcttctccctcctcctcctcccagttcctgccacttggatgttggcggggggagcatgcatgcgcatctggtgaacgggggatccgaaaatcatcgggcgtcgtttaactcgctacgtacggt

SEQ ID NO: 85465 - DNA, 446 bp, Zea Mays
cgaccgattgatttttccaaaagtgcaaattgacaaacgattgttccccattaatacacttgagatgaacgacaagaaggtcctagttcagctggaagtggccgataaaggtaagggcaagagcatagtcaccaatgatccacgtatgccaaatatgtcgagggaagtggttactaagaaggctccagacaagagagatattgtaagactggaggtgctgggggcaagataaaataaagacatcaacggagatctcttagccggcgtacaccagacaattcagtagttatcaccagaaagtccaatgcttcataaagtccaatgtgtagaatcagacagtctgatgatgtcaagaatagatcaacaatatgtgcaacgaaggtgaacggaactgagaagcagtatcatactgcgacttcatgtaagtttgctaaatctggtcctac

SEQ ID NO: 85466 - DNA, 867 bp, Zea Mays
gctatgtaccgtgctacctgtacatcaacaaatttgttattttggttagttatgattttcgtctgcttcatcctgtacttatttggctaactatatgtttacaccaaacatagagtatataattcatttataagaacatgtttatacatacgtgtatgtaaaaactgcacggatgtatacagatgtatgtttgtgttgaaattcccatatggacacacgaggttaatcccactttgcttgtattttttcccatatgcctcgtgatccattaacacaactatatgcttatacatttcagtagatcactattcattaggataaacgtgtttatacatagaaatatgttttcgtaaaaaccggcatttgtttctattttttccctgtgtttcataatttatcaacacaactatatagttattcatgtcagcggttcactatataaccgatatatgtaaacatttcaataccacatgttccaagaaaatctcaaacgaaacatgttttaacatctagattacatatgttctcacacttaaacagttgtctactctaattgcaacaaaaaacacatattacaatccactcttgcttcatacatgttttataggagtaacaaataatttaactcgctgtcttctactctttccttaatttttcaatatctttgtttcttattgatttgatccccaacctaatccaacttgctttcaaacaaaaactatgatgctggtgtgtacttcataccaaacagaattgtttatagtagtctactctacaagaaggattttactcgcatctaaaaacataaatcatcaagctattgctacacatactcaaaaccaaataaaaaatatctaggccaaatga

SEQ ID NO: 85467 - DNA, 936 bp, Zea Mays
cgaagccaatgggagatagcatgaataacctgcaaaggagaataattgattttcttttcaaaaattataccatttatacttagccaaatcgtccaacaaacagttgcggcccctatcaaggataaatctctaatatcttttccaaaaaccccaagccagctcacaaacatattagaaacactagagggcttataaattccaaaagctaagtgaattaaactccaaaccatgtgagcaaaacgacagttaaataacaagtgcctaattgtttctaactcatgacaaaagcaacatgtcaaactgcctttccaattttgtttggctaggttatcttaggttaggataactcccctcctcagatatcacaagaagaccttaatttttaaaggcgctttgatcttccaaagtcgtttgtttaaatttggaattccgtttttaatcagggcttcatacctagtacaagttatctaggccaccattttgcgatcactacagcccatggttaggtcatatgcgccacaatatgcaaggagcatgtgtgtcaatgtggtgagagccaagttggattctcaccacgtatatgttcgggctctaactgttttgtgggttttttgtgtggctgttatttttgttgtgacgaaatcaagttctattggtacacaagcacaaaaacatgctcaaagaggaagaaggtttagtgtcatcgaagttgacattgaggtcctttttttataaggaagactttattaattcctagaacattacatcaagtggatacaagtccttgaaacttctccaagcctttgctaatgaaagcacacagctcttagaagaacgaccacacacacttacgcacactatagtgactatcaatccgaagactagaccgccagtccgccacccatgttcctagaaaaaaagacctggccacttgca

SEQ ID NO: 85468 - DNA, 312 bp, Zea Mays
agctctacataattatcatactgtttatcactaattaaccacgaaaaatatccaaaaactgctaatactactgctgtacgcccacctgcagaaatctgtttctttggacagccacatacccgggttcaaacggcgatatctcctaatttataactccgaattgggcgcataagtactcgttggaaaggcatgacaaagccctacttgattctcactgtttatcactaattacccacgaaaaattctcagaaactgctagaactactgctgttcgcccacccactaaacttccggacagcacctctaccaatt

SEQ ID NO: 85469 - DNA, 1310 bp, Zea Mays
aggatacgtgcaatatacacttgagcatatgtaaccactggatatttggttttaactagaagaaaatgagctgtctttgtaacccgatccactataacccaaatagaatcatatcttttggatgtctttgataacccaacaataaaatccatactaatttcgtcccacttccaatttgggacgagtaacgactataggggaccaacaatcttcatgtgcatagcttttactcgctgacaagtgtcacgatttgccacatagcgagcaatctctatcttcattttagtccaccaatagtgttgctttaggtcttggtacatcttagtactccatgggtggatataataccaagtgagatgagcttcatctagaatctactagcggagcttagtgtccttaggcaccactatgcgatctttaaaccctaacactccttgatcatcttttctaaagcaggtggctttgccagcttccattttctcttggatatgcttcatacccttatcagtcttttgagcatcaacaattctctgttgaagaacagactcaagccttagatgtgtcatggttccttgctgaactatccccaaatttagtctttccatttcttggcataaggtagtgttgaacaactttgcagtaaggcagtgacaagatgccctgcgacttaaagcattggccactacgttagcctttccaaggtgacagtgaatgtccaaatcataatcctttattagctcgatccatcttctttgcctcatattcaattctgattaggtaaaaatatactttaggctcttatgatcagtgtaaatatggcatacttttcccagcactagtgcaaatatggaaatcattagtcgggtaatgctcctcatgctggcatagctgtcttgaggcataagatataactcaaccttcttgcattaggacacatccaatgccaatgcctgatgtgtcacaatacacgtcaaatgacttctcaatatctggttgagccaacactagtgcagtggtcaatagctctttcagctactcaaaagcctcgttgcacttgggagaccatttaaacttaacatcattcttcagtagctccgtaatgggctttactatcttggagaaatccagaataaacctgtggtagtagccagctagtccaagaaaacttctgacttgatgtattgtagatggagatttccattccagaatgtccttgactttgctggggacaaccgcaattcctttagctgataagacatgccctaaaaattgaatttcctccacccaaaacgcgcatttgctgaacttag

SEQ ID NO: 85470 - DNA, 1170 bp, Zea Mays
acttccgagtggtatgccgactccggtgcaggatcacacatgacctcggacgctggtaaactctctgctatttcctcgcccacttcattcactcctacatctatcattgtgggaaacggtgccttgcttcctgtcacagccactggatcacacactttttctttcccgcatcgcaatttagttctcaataatgtgctggtgtctcctaacattattaagaatttaatttccattcgtcgcttcaccaccgacaataattgctccattgaatttgatccctttggcctttctgtgaaggatttgcaaaccaggaacgtgatcgccaggtgcaatagctccggtgacctctacccgttccatgcaccctacaccagcacctctgcattactcgctgtacccacctccctgtggcatcgtcgtctcggtcaccttgggcatcaagccttgtccaaactcattacctccagtgtcatttcctgcaataaagatgatgtcaaccacatatgtcatgcgtgccaacttggtcgtcatacacgtttgccgttcaattcatctagctctcgagcttctcacaattttgatttaatacactgtgatttatggacctccccaattgttagtgtgtcgggctataaatattatttggtaattcttgatgattgctcccactacatttggacgtttccgctccgcctcaaatccgagacttcttccacacttgcaaattttttcacttatattcgcacccaattcggcatcaccatcaagagcgttcagtgcgataatggccgtgaatttgataattctcaggcccgcacattctttctctcccacggcattgccttacgcatgtcgtgcccctacacttctcagcaaaatgggaaagcagaacgttcacttcgcaccataaatgacattctgcgttcccttttgtttcaggcaagtctccctccggcttattgggttgaagcccttcatactgctacatatcttgtgaataggccccccactacaacccttgccttctccacaccatatagtgctcttttttcctcccaaccctcctatgatcatctaaaagtttttgggtgtgcctgttatcctaatatgtcctccaccgcacctcacaaacttgccccccgctcttccttatgcgtttttcttggctat

SEQ ID NO: 85471 - DNA, 567 bp, Zea Mays
caaggtcattacatcaatccttgcacaaatattacattattaagcattttccatcaatgcttgcgcaatggcatcacgtacacctcccatatcttcttcatccacaacatcacttgtacaagcacccatgtatccatcgacataagtctcatccgatgcaactctatcaaaatcttcatcacttgaattactatctctaataaaattatgcaacgccatacaagcaattatgatctttttttgcttctccattgagtaccttgacacatttagaagaatacgccatttcattttcaaaactccaaatgaacgttcaatgatgtttctaagtgatgagtgagcatggttgaacacctccttcaatccaatcggttgactgctattttgaaattctagaacgtggtacctttgacctttgtacggtgctagataaccctttcgatttggataacctgaatcaacaagatagtactttccttgaggaggatgtggaaaatcatccttgtacttgttccacaaagtgtctctccatatccgtgtgtcatgagcagacccaggccatcctgc

SEQ ID NO: 85472 - DNA, 850 bp, Zea Mays
cctcaccgccggcgaccccgcactcagattcgcgctaggtgccacgattcatgctcaacagagtacagataactgctcggggtaagaaatatcgcattgaggatgaacttaggtcactgttccggtccggccgccgtgtccgcctgactcacggccggttaagataagctcgccggagttggccacctattgatcggttgccacgtgcctaggtactctaccacgtcgcagtagcatgccttggcatgtccgttcatcgccggtaaccttgccgcggtgaaagccacgcacctcttgcaccagtgctctcccctctcttcggatgccagcgcgccatgcaaaattcaagagccaccgccctcgggtcctataaattgagcatgccatcagctccgctaggtagtcaagcatccagcgcacctactcgtgtctcggattgtccactagagagctctaatttgagattccccccaaatcggtcaagaagccgtagtgtgagagctcgccatggccagctctccacaggtccgatcatgccctcctcgctcttgttttagcatccctgtgtgcttgtgatgcttctcgacccggccaattgagctagaacacgttggatcaccgagaacgcctggatttgtccgttgatcgagctatcaccgttggcagagagattaggggctagaaccttgaaattggttgaggggtaatggtcattaggggtcgaattaggtgtcaacctgcacaggagcaccgatagttgagttatccggctggtataggctcgccggagtccttgctccgccgtccatggtcggggcctcgacttgtgaagaaatagaaaaggggaggg

SEQ ID NO: 85473 - DNA, 480 bp, Zea Mays
ctcgggtgactaagagttatggaatgaattctcaatttcttgggaatgtatccgagctcccacacatggaaatgttcagttagggtggtatatatccctctcacactcaaaagagtcatagggaatgtgtagacttctctgtgtcacaccagacatgttcggtgtaccatcagactcgttggtgatgtccacattagctagccattagaaactagtgttgctagccattggaaaactagtatttgcctctaggtatctggtgtgccaccagagctcacactagacatgctcgatgccttattcttggctcagttgtatttccaacctctgtgagtgtcacattcgaggcggagttcgatgttgcactagatatgtctaatgccctttaacttcttgggcctctctacaatgttctttatgtgcccttctggtgcatgtatgtctagcatacaccggaaaggtaggtgcactcaatcttca

SEQ ID NO: 85474 - DNA, 1561 bp, Zea Mays
ctccgcatgttacggatgctgaagttttgcctggtccgagtgctgggcgtaggcggcgaagggcggtggcgaagcgtagagtgagtgagatggatggtggtcggcttcgtgtgggcagggctggcaagcgggaattgttgtcctcgccggttggggcgagtgtaggtgagggggagttgtgaagtctttttgagggtgaggagctgaggataatgctgtttaactatagggagatgggtatcatcccgaaggttgaaccaatataaggtgtgatgccctcgctgtgcgtatataactataatttgtatgatgaggctgtgtgctttcgctgatccggccatgttcataggggcgttgtgcacttggtctagcacgtttattatgtcagtccggctacacatgtagtcggtctttgcgcggatagtttttcgacgaagacttttgcacggatgtaatgtgccttcgattttgcgcactcgttgtgctagtccggctgcacctttaggcgccttttgcacggatagtcttttgaggaagacttcgattttacgcacttgttgtgctagtccggctgcacccttaggcgacttctgcacggatagtcttttgaggaagacttcgattttacgcacttgttgtgctagtccgactacacccttaggcgacttttgcgcggagtgtcgcacacgagggtagccagcgctacccctcgcggtgacttttgtattggtcgaatgccgaagatcgttgatgcggtctttttcaacgtaatttttgcgggggatttttcgcgtgtatattacatggctccacctcgttaaaaacctcacccccgggaggaaaagagtgagggccggaataaaactgttttgcgaattacaagggcgagctggccctgaggagttaaacaaaaaatttgcgaagattggcaatgttccaagaatgctctaagtcttcgccggatggcgttgtgagcctgtacgcgctgggggacgccttcgtcttgatgatgaaagggccctcccactgtggttctagcttgccccgggactctgtctgagctgtccggacgagtacaaggtctccttcgctgaatttcttcgggatgactgtgtggtcgcgccatgcttttgtttgagcttggtatttgtttagagcctgtagggcgaagacgcggtcaccgtcgatgaggtccttcaaagtaggctcgtctacgtcggggacggctgatgtgactgtccgtggtgacccatattttatttcttgcggggtcatggcctctgatccatatagaaggcggaaaggggtgaacccagtcgccctgcactcagtcatgttcagcgcccagaccgcttcaggtaacaggtctgcccacttgccttttttgtcgtcgaggagcattttcttgacggctgtgaaaattttaccattggcgcgttccacgactccgttggattgcgggtggtacactgaggcgaaggtgagcttggtgccaatggagaagcagaaatccttaaagtcttggctgtcaaattgcttgccattgtcaactgtgagttcg

SEQ ID NO: 85475 - DNA, 623 bp, Zea Mays
gatgttttcatgtagacgattcaatctccaaggaatcaagttgccgcaaaatgtttttatgatggctttcaaccaatgcatctcttcttttgcatgaagtgcttgttgtggtcacaattaaagagacatactcaaagaaatcatgaataatcgagcaacagctagaaaccgaaacaatgactaactgcaaccgatgggcaaagcaatggacataaaaaagcatgtggattttcatctaaaatctttttctgtaacccattaaattcacccctcacatttgaagctccgtcatatccttgtccatgtatcttagagatggataaattatacttatcagggatgccaaataatgttacctttaatgcttcaggtgtagtatcaacgacatggtgtaaagtaaggaatcgttccacgaccttccctttaacatcaacatacctaaatcaaggatagatttatgtcatacaacattgtaattataaaatagtgacaatcgacaagtttagtgcatgtacataccttagcatcactgtcatttaatctttcacagatatgtctcgtgactcgtcaataagaatagaaaaaattctatctttaatctctcccatgatcacatctacaat

SEQ ID NO: 85476 - DNA, 393 bp, Zea Mays
gtgcagtattagccttactggtcatcagcctacgaacatccgcatttgagaccaccacatgcctttcttcaaattcttggtttgacccctcatcaaatattttatcaaaaaatgcatggtctgcagcaaccgtatggatctcatgccagatgagagctgaataagacgtttccctagatactttgagaccaccacaaacagacagcactaatgcattgttatgcacctgcttgcactgcatctggtcatccatctcttcaactagctgctctcgtaagccatgtgaattactgaagccatcacactcacagaaaactggcacatcatgcacatggatgagatttagaacatggacaacaatctgatttctatctagaatcaactcattgctat

SEQ ID NO: 85477 - DNA, 2472 bp, Zea Mays
tctcccctgtccgctttgttggtgtgcctgtgtgtgacttgtttcagccagcggtgccggctggattggatttgatcgggaggtggtgatctggcgtgagggtggtgaccgggacggtttatccgtgcgggttaggttttgagggatggggctttcagggccatgtattggagctcggcccctccctgctgcaaattgcaattcccttgtttctgttctgtagctaatgcggtgctctcgttttcggttctgatcaatgtgctgggagcgtttgttctcgaaggatcggttgtttggtattgctggtttttccttattacttccccaccgttgtgggttacgacggcgcggttttttacatcgtggatcattgattgttcagagtattttatttattttcgactcggtgctctggttttggtttgagaacgcttttcttgtgtagttaaatttttctcttgttgcagctgtgatatttcaagcaacgcttcgtcttgacatctactgttcgtccttttgtgtttctgtgttagtacatttgctgcatgtcaatatggctatgtaaaaactaagcaagtgggacgtcacctttagtattttcattcatatattagtatatatcttcttgttcttgttctgtgttcaaaatggactttcattttcattgctcaactttgtatttcttcggtaatcccttccattgtgcaatttgaattgctcctttcgatgttggtactaccagtttttatttgtttggagtggacgatgcattcatttggaattgccgtgttcttgttaggggtatattctgcatttggtgttagtttatcctaatttgggtctaggagccaattttgtcccctaatttcctaattgtatgtcttgaataattttcgcacatgacataagcagtgttttttaaatgttatgtaattcagagggtacgtggacatttgaatgaagacaaacagatgaatgacatttactacttgagtaaacaaacaagacaatcaattcatacctggattttatattaatgctttggccatccaaggattcaaatgtgtcaaacgtatgcaagaaagcaactttgacttaaaatagttgtggaatgctcctttttctttaggaaaaaaacaaggtgattccatcatatgtgtgctggctgctagttcaggaacagagtttttatggggaaaagctataattgtgtcattcaaagaatattctaggaaggtaccttgaaactacactaggctgttttatatattgctcctacagcatgacagtgcaaaacttattgatggatattgagctaaacaatgaactttgtgtgacgcgttcttctctatgtcttggaatgtagtcatagttcttaactagggcagttcgaaccaattgctttgcatttatcgatggtcatatctcatatgtgcctccatacccataaattccacatgggtagaacttgcttgcatgcactgtattgaaatgttgtttgtccacagtattaagatatttgttggcttctgaaaaagcaacggttttatttgaccttggtagctccctagattgcacccgagatgcatccacgtgactccaaataaaccacgtgactccaaataatttttatctcaattttagggaaaattttatgcaagtggcattgtggaaactggaaagttaatggtaggccatggtataattcaattaagctaagctgggaaagtatctctttccattattctcctttttatcattcatctgccatttttttatatgaatactactttatgcatttctaccatgtgttcctttacaagaaattgttccttgcatgttgtttcttcttgtattgttttttcattcaaggttgaatggaaaaactcttcttacctgcagaactagaagctatttgttcatggagatgaaaacaatagatgatcataagctgatcgctgcagttactaccatcatattagagctaatcgaatgggtagtggcaaaaggataatgctggatttgagaaattctgatgtcttccttttgggttttttatgtctttgaattgacgtgctgggtagtgggtactcaggcttgccttggagcctatgctaattgaatttcaatctcccagcaaatttgcaaaatcatccatttacaatgaatacagacaattggtggaaaaaggtacaagaatctctaatccttggaactcacaaaatagtctttggtatttcctgggaagttgggaactggctatttagtagcaatttgaatgttcatccaatgcaacccatcttgttgcattttagtcttaatacgattaagaaaacagtttctgcctgttgtatgcttcctcatgcaagtgctagtcctccctaaacatttcagtgaatctagtttcaagccttctgactgagtttcagtgaagtctatctgtctatggatacaaataatgtattacagcta

SEQ ID NO: 85478 - DNA, 512 bp, Zea Mays
gagatgcaaacagaccaatcaaaataatataaattttgatgtttttggactgcgcttacaatgggaggtattttcgggaccagacaaatttccacagttgtagacagtgaaacagattaattatggatacacagttccgactctaattatctcggtcagatttaaattttgctgcaatactattgttgtcgagttctaataacatttacttagtacaacaaccacaaaagtgggtcgggatcccaaattcgtgttctcttaatccattagttttaaacaggactaagactcgacatttcgtgaaataaatacgcgagaacgatacaacatcgttcacgtgggcgagaggttgtgcgctgtccagacaccggttagcacctgccacgcgccacaatgccaggccacagagaaacatgtgcaatgcaagcatgaaagaatttgaaacacagtttaggaaccagatccgatttcaagaattagagtttgggcaagacgtcgatggctcaacccaa

SEQ ID NO: 85479 - DNA, 857 bp, Zea Mays
gtgctggtggatgttgcgaccttgcaggtgcattccgagaggaaatggctggaggtccagattcagcgtctccagatgcaaaatactgaggccatcagggacaagactgcaaccgagaataagagtcggaaccttctggagaagcatggctctcttgggaaagagaatgaggggctcagccgccagctgagtgaggtgaaagacactgcaacccaggcgcagacgaaggcctaggctgtccgggcggaggcccaagctgcccataagcgagctcctgaattagagctagagatgaagagcatgcacacctaccatgagagggtgaaagctaccacgcgcgccggcatggacagggcacatacactttttgttgatgtatatcatgatctaggcgcagagacagcccccttcgacaagtaagggggagaggtggggacccgctttctcacctggatgcaagagttggagtccctcccatctatcgtgacaggcctcatgttctatgcctcccacgttacctacgaatgggaagcaaatggcttgtcccgcgagggatgtaggcacttcaaagccttcaaccagagtaatgaggacttcgactaggaagtgttccaggttgaagatgtcgtgttgaatcattcggccagggcgttgtatgaccggatgtggggccccacggtcgtggagtcgtccgggagatggctggccgagcgatggcgtaggtgaatgattgttctcttgttgagggagaatgcttttgtttgatctttgatgctttgttattttcttttcgtaggcgctgagggatgagggatcgaggaccttgctggcttggaaatctctatggctactcaaga

SEQ ID NO: 85480 - DNA, 1586 bp, Zea Mays
ggtggcagtggaaccaactgggatggagcaagtccttcaaatttcttcaggagagagacgtgaaacacatcatgaattcttgcatttggtggtaactgaagcctatatgaaacagcccctatcatctgaatgacttgatatggaccaaagaatttgggccccaatttggatggtgtagctgaggtgacgcccacagcagtcctttgttgcaatcatagccatacccaatcaccaatgttgaattccaccactcgacgccgtttatcctgataactcttcatagttacttgggcttgcactagtcggtccttgatttcagcaagaaattcatccctgtcctgcaactgggcgtcaatcgcagccacctttgagtcccctgcttgataggagaccattggaggagggtcccgtccgtagacaatctttaatggagaacatttcagtgtcgattgatatgatgaattataacaaaattctacccatggtaaccatttcagccatgatttaggacggtccccagctagacagcgcagatacatggtgattattctgttaacaacttctgactgaccatcggtttatgggtggaatgccgagctcatttgtaacttcactccagccatggtaaacagttcaggccagaactggttagtgaaaattgtgtcccgatcactgactatcgagcatggcagaccatgaagtttgacaatttcgtcaaagaaggcctttgcaactgatgccgctgaatatgatgccccaaagcaataaaatgaccatacttagagaaccgatcaaccactgttagaactactgacttgccaccaacctttggaaatccttcaataaagtctgttgacaccatagagggaattggcaagggtaggccggctgggtgaagatgttgagtcttatgttgttggcaaactgcacagctgcgcacaaactccctgacacgttggagagctttagaattgtaaaatgatgtgcgccacctgtgagctgtcttctgcacgccttcatgaccagactcatgtgcttgggcaagaagtacaggccacaaagtggatgcatccgggatgaacaccttgccttcgaaacgtagtaagccatctgccattgtccagtcaggacttgcttttccctctgctagctgagcgcggactgcagccacttgagggtccgagtcaacctccgtttccaaagtagagaagagatcaaaggaaggggaagaaagggtatacacaattcctgtatcttcctctcggcgagacaagacatttgttgcgccattcaacttgtcgggcctgtattccactgttatatcatacccaaatagtttgctaacccaagtatgctgagggattgttgacagccgttgatcgagcaagaattttaagctatagtgatcagtgcggactgtaaagggtcggccccagacatatggccgccagtgtcgaactgcctttaccaatccaatcaactcccgctcatatgctggcaatttttggtgatgaagggacaccggcctgctgaagaaggctatggcaccatcgccttggtgcaggactgctccaaatccggagccg

SEQ ID NO: 85481 - DNA, 482 bp, Zea Mays
cgcgagattgcgtttctccggtgatggctccgccatggtcgaccatgcgccgccgaccgtagtgcgtgaggttcgggatgagagtctcggtagccatgggatccgatttgaacaactgtgattagaagttggggatcaactggtgctagccgttgatcttcgcgtagatagccaggattaaatgacacataacccctttcacgcgattgattctggccgttaatctctggatcgatggatcgggtgagttggttggtttggatctaatcgaagccatccgaaatagatccaacgacccacagttgccgataccctttcgtccgaatctttttgcataagagaccccactgttgtattaaaacaacccacagtccacgtcaggttaaggaactaacaaattggtcctcggattttacaaaacagcccttatactatctggatttttgacccgcagcccagcagtaaataataagggaataaat

SEQ ID NO: 85482 - DNA, 484 bp, Zea Mays
atgtaatcatcaccaaaggactttgcaatcctgggtctcttactctttcgagttgatacattgtcatcttgcacaggattatgtatatgggattcctcagtgtgttctaccagaataaaatgctcatggggtatcgttggttcatcactagatgtattatgtgtagctttcatgggaaattcgtcctcaaagaacgtagcatctctggactccataatagtacctaccaacatgtccggtactccagagtttataattaagaacctatatccaatgttgtgaaagcatacccaaggaaaacacaatcaatagttttcggtcctaatttgcgcttcttgttaattggcacattcactttggccaaacaaccccaggtgcgcaaataggagatatttaatttcctcttttctcattcctcgaatggtgtgatttgtttgttctttgtgggaactttatttaggacatgacacgctgtcaagatcgc

SEQ ID NO: 85483 - DNA, 502 bp, Zea Mays
aaggcgtgggcgcagcggtgtgttccttcctgttctcccttgagggtgcagcaatcaggacgacagtctgcagcgcttccctgccccggtttggagcgttttctccttttgcagggtgatccgtgtccactccttagtgggcgaggtggacaacgaagttcatcgagttggggaggccatagttgatcgaccatcaaccctttgggggatcctgagcctggcctcgtgcgggaccacgctctgttgtgccattggtggggtttttgttggcgcggttcgtggttttgccgcagcttcctttggtgatcctgagggagatgtcctctcgggtgaagtcgctatgcgatgcagaatcccctctacatctaccatgcaggagatggttccgaagtagaagactgctcctgggctgaaggtgatcatgcccttgaaaacaacgaccatggagtcagtgttgattgatgacgcacctctacttggcatatcagctgtcagtgtttgt

SEQ ID NO: 85484 - DNA, 351 bp, Zea Mays
tgaacatcgacggccccacaagtgtccacacgccacatcacgtgaaccttgtggaggcaaaggtgttcgcctcattcgacgtggctgggcaccgggactcacggcgatgggtcctggacactggcgccacgaaccatatgatcggatgtcgtggtgtcttctccgacctcgacaagaacatcgccggcacggtgcgcttcggagacggatccatcgtcaacatcgaaggccggggcaccatcctcttcgcctgcaagaacggggagcatcacaccctcgcaaatgcatattacattcccctcctcactacgagtataatcagtgttggccagctcgatgaggtggggtttg

SEQ ID NO: 85485 - DNA, 1003 bp, Zea Mays
ccgcgagcaggtaccgattcaaggtggggcgtttatgcatacggaatttgaatgaaaaagcttcataaatggtagcatggggccggggctcgggtggggagacgtgagccgcgcgttatgcttgcgtattttgccgttattggctgcgtaaatgcggcgcgggtcgacgtggcagttggtgggtctacccacgcatgcatcgattctaggtggggcgattatgcatacggaatttgaatgaaaaagatgcataaatggtaacgaggggccgggggtcgggtgtgtagacgtgggacgcgcgttatggttgcgtattttgccgttattggctgcgtaaattcgcatctgacgggacgagagtggtcagatcgggtagtggggtgacgcgcgcgtcgatcgggaacgtggggacggtcgcacgatggcgtgatgcatgtttatggaaatgtaacacaatgatcatgtaatcgtaacggatagctcacgtaaatcttgcgacatgcaaactgcgcagcaaatcgcgcaggagattggatcatgccatgaatataggccaggacggtttaggcgagtataggaggtgaaaaaaaaacgacctacgcacagcccccgcagcttttgttcatagctatcgaaaagttagggcatacacaaaggagacggcgatgacgacaccctgtacgagcgatggccggaatgctgtaactccaccggctgcgttaccggcgccaggaattgttgaagaaggcaacacagttcatcaaagtttgatgggaacaagtcagcggatacccatgcggacaattggtgaacatgagcaggacacaccacacattctccaaagccatgtaagttcaaaggaatacccatgtattatgttatacaattttcgtgcaagttatgatttcaccgaatacacatgtattagttatacagtccgtgcaatttatgaagtcctagaaattcgccatgctagaagctttttttttatatttgtgctatg

SEQ ID NO: 85486 - DNA, 368 bp, Zea Mays
tggtggagggaggaagaaaagggggagaacccaaggtgatttttgtgtttatctcttgttcattttatgcggcaatccaattgtttagatgttgcgtgtgcgatttggtagaagggctgtccagaattttaagggggtggacgaacagcagcagaattagtgatttctgggcatttttcatggagaattaagggaaatcagtttgggaatcatgtagaactttggcatacctttccaacgagtatttatgcgctcaatttagagttataaattaaaagttatcaccgtttgaaaccgggtaggtggctgtccaaaaaaacagattttcagggggatgaacagcagcagtattagcagtttctggggat

SEQ ID NO: 85487 - DNA, 663 bp, Zea Mays
aacttggctaatgattcatgaagtgttttgttgctatttaacatgagaatgcttaaaatccatagatataactgaattattgttgatatttaatccttatctggtgcacactagacacgccgatgatataccaattctaaacaagaatgacccatgtcaggtggcacatatcctatgcacactagacatatctggtgcctctattgcactatcaactcccttgtttcaaacactttttgagttgggttttatctcaaacttctcatgggttttcatggacaattattgcactgtcgtctcgctctaacatcgtcattagtcactcttcatgtgtgaattcaacatctccatgacatgtcatttgtactttcctccttggcctcttgaattattaaaaaatcaacccttccatttgaattcctcaattctgcaaatttctttattcataatcctcttatatttcattctttttcaacatttcttctacctcaaacaccaattcagcaagaataactctcaaattggaaacaaaacatgtgttggttagatggtttgaaaaatacaagcattcaaagatcatcgaatcaaactatttcttcattgataaatagtcacaacatcccaaaaagtgtaattcttatttttcgatgagttaaataattt

SEQ ID NO: 85488 - DNA, 471 bp, Zea Mays
ttgaagtggctcgtttcgactgcgcctacaacaccgtcatcggatgacccggctagctaagttcatggccatcccgcactacacctacatgattctcaagatgccaggcccgcaaagaaaccaagaaggccatcctcgacctccccaattcagatggccctcgcctccaacacctcggtggcacagaagcagctagtgacggaagtgaggacactccggaagcacaacctcgcgatcccagcctcggaggcaatcccggataccgcaacacgatcgactgaagaaaccaagaacgccaacctcggcctccccaatgcccacaagacagcgtccatcagctctagcctcaacgccgaataggaaagcacgttcatccggttcctataggataactaggacgtgtttgcctggtagcctacggacatgctcggtgttccctgggagctgaccgagcacaaattgaaggtctac

SEQ ID NO: 85489 - DNA, 752 bp, Zea Mays
gcaacatctccactcacccctgaatgaagaggacatccgggaagaaaggtttgggagcggtgatgcaccctttcccgttttcccttgagggcagagtagccgaaatggttgtcggcggcgctcgctagcccctgtctggagcattcatctctctccgtcgagtaatccatgtccacaccttagtgggcgaggtggacaacggagttcaccacgccagggaggccatggccgatcaagcttcagttacccaggggatcccaagttctgccttgtgtgggaccgtgctcctttgctccactagcggggttctctctagtgtagtttgtggtctccccatggcttcctttggcgatcccaagggagatttcctcccgggtggaaccgctatgtgatgcagagtcccgtccatgtctgcaacacaggagatggttctgaagcagaagaccgctccttggctgaaggtgctcatgctcttgaaggtgactgccatggagtcagtgttgatcaacgtcgcaccccctacctggcgcactagctgtcggtgtttgttaaccgacctcacaccatggggttatcctcgtgatgctttttggcaggttggcgtcgtcgatcgcgactcgatggttcatgtagtggactgacgggagaaacacacaagcttgtacaggtccgggccgcgcgagaggcataacaccctacgtcccgcggtgatcttagtattgggatgagattacaacctgtgaactatgaga

SEQ ID NO: 85490 - DNA, 336 bp, Zea Mays
gttactgtgtatgtgagggtgatagagaaaggatgatccaaataatattgactattgaatttaagtgagtaaaagagaatagggttatccagcgatctgaactattgattttaaaggtgttagtgtggatgcaatttgtttggtggattttgtggaggttatgagtgttgaggtaatttaattgagtggctttttgtaaagtttaagccggtgggttataaagggaggatatagatatttagctccctttcttggaggcttttaaagtgagtatgggattgtcccacgcatcacgagcatggctctaactctaaggcaaagcatcatctatctaat

SEQ ID NO: 85491 - DNA, 761 bp, Zea Mays
ttttgctggtatattacatggctccgcctcgttaaaaacctcacccccccgggaggaaaagagtgtgggctggaataacattgtttgctgaattacaagggcgcgtgggccctgagggttaaacaaaattttcgaaggttgtcaatgtttcaggggtgctctaagtcttcgccggaaggcgttactagcctgtacgcgctgggggatgccttcgacttgacgatgaatggaccctcccatttcggctccagcttgccccgtgattctatccgggtggtccggacgagtacgaggtcttctttgttgaactctcttgggacaaccgcgttgtcgcgccaggccttggtttgagcttgatatttgttgagggcctatagggcgaggacgcagtctccgtcgatgagatctttggacgttggtttgtcgacatcgggaactgctgatgtgcttgttcgggcgacccatgctttatctcttgcagcgtcatggcctcggatccatacaatagacaaaatggtgtgaatccggttgcctgacattctatcgtgtttaggtcccagaccacttcagatagtcggtcggcccatttgccctttttgtcattgagaagtcttttcttgatggcagtgaaaatcttgccattggcgcgctcaacgatgccgttggattgcgggtggtataccgaggcgaagacaggcttggtgccgatggagaaacagaaatccctgaagtcttggctgtcaaactgtttgccgttgtcg

SEQ ID NO: 85492 - DNA, 592 bp, Zea Mays
aagttaattgtgccatttacataaactgtaggctcgagacgtcctttcaacttttattctttgctgctcttgtttgtttatcttgaatgtatggtcaataggaatacaaatgtttatttgtagtatgcttaatatacttttggtaggcagttctttcgactttcaaatttccccaatgcgcatgcaccagatattccccaatgcgggaggttttggctttatggagacttcatgttcatctcttttgtcaactgcacctgaggatcaacccgcacttagtatatatggtcccatgcagtcagacattaggtatgcacacactctctaatgtctgactaggtacgtgcccatgcacggacaactcacaatttgtagcgttaggtacgtgcacactctctaatgtctggcaacaacaattaattttagtagtgtgcatctttgtagtacgtgcacactctctaatgccagatctaggagttcgacgcctccgcaagaaaaacgacgacgtcgcctgcgacactgcacaacggctcagtcgaggcacccaatgcccaccggcaccagtgagatgaggtaaggactgcagagacaa

SEQ ID NO: 85493 - DNA, 361 bp, Zea Mays
aatttctgtacagtacagatcaacatcaggtctctaaagtaaactaaattacacaagcatgcgtgagttcctgaaacgatcagaaaaggcaaatttaaagtcaccaaacctcagagctcgctatgctgcgtagaagtccttgaaacaccagcgaagagatctttggcaatgacaagcaaaccctttaagtccttagctcccacttccaggcaatccttcagcaattccccttcctccacctcccacttaatatccatgaacacctctctcaatggcccctaaaccgcaacaaatgtcacaaatcgacagagcaatgtgtgaatcagaggcaccacgagtgaataggtcagttacctcttcg

SEQ ID NO: 85494 - DNA, 948 bp, Zea Mays
agcctgtaccggccaagatacgcaatgacttgtgctctagagcagttggcacctaattcgacccctaataaccgtttcccctccatcaattgcgctaatccggatcagaatctctctgtccacgatgacggcagaaaccgagaacaattcgacgtgttcttggcgatccaggtctgtctagttcaattaaacaggtctacgagtagcaggggacttaatagaggctagaacatcaagcaagaatgcttgaactaacatgcaggcgtctggccacgacgaggtgttcacgagtgcggaaaactgatttgggggaagaaagaatttggagctctctggtggttaatcggaagcagtagcggatggtttgccttcgtgatgacttaacggagctaggggtgtgctcaatttatagtatcccagagtggtggctctcaatttggtcatggcgtgctggcggacggagagagggaagaacactggcgcaatagctgtgtgtctttcaccgtggcaagcttaccggcgacgagccagcaatatagagcggcttactgcaacgtggtgaagcttcaaggcacgtggcacccgatcggcaggcggccaactccggtgagcttatttgagccgaccgtgaagcaagggggtacggcggccagaccctggcgtgatctacggcgaagatctttttaccctgaagcgctatctgggcaccagtgagcacgaatcacctcgccggcgcgaatccaggcacgggggtctccgacgacaaggtgcactgcaccaggggtcttctttagtttattgtactatcaggacaccattcatatcatctgacagagttatttgcagggcatttatctctgatttctatgtagcaacttgtaaatctctctgtaatgaagttctagccctataattcagctataatcttgctatagtggccagactcaa

SEQ ID NO: 85495 - DNA, 455 bp, Zea Mays
ggcgaaggcagttggggttttggggcgaactattggcactgcaatgccacgattttctattgtacaactctagaacactcttcttcctcttggacaaatctgtggattctagcttggacttatttgcattgtcgtttggctgctatgacctccttttgcttttgtagtttgctgtttcgcatgctgagacttttgagcatgagtggatcctcagtactaacaccaaggtctttgttatgctagaggatatttcatgctcattctcatcaacagtgaccggttgtggtgttcaggaagtgcaaagtcaagaggcataggggacatggttcttgacaagttgggctagattttggcgtggcaaggctgactctatgcattgaaaggggcatgatctagagtctccgagctgcatgtgtagatgctcccctcaggagtggacgacctctggtgatggg

SEQ ID NO: 85496 - DNA, 614 bp, Zea Mays
tggccggtgatagcaacatgattcacccttcggtaatgatccttatttttccacttgttctaaatatctgagctagacccatctttgatcatgtggattacccctcgtaagggtggctagatgaagtcctcttcctgatttggtagtggagagggtggttggtagtgttgctagtttggttgtggtggtggggtggtgggagtgctaacctttcttggctggggtgttgctggtgctactggaggcagttggtggggtactggttatatttttgatgataaagtgggatgtgttgagggttgtctttgtagcaggggtattggtggtgataagtgtgtactaatggctctttggttgtttgtggagacgactctagccatgcagtctttggtttccatagtttctggcaatctttggtggagtgcacaacatcttcgccatgaaaggcatagtaaagttttctttgctgtggggctctctaccacacccacaacctctccatgtgctacctctatgcctttgatgtggaggataatcgcgaccacaaggggggacacggttggttgctactggatggctatgtcatggacttgcatgttagtaatatgccctag

SEQ ID NO: 85497 - DNA, 513 bp, Zea Mays
ctgggttgtatggctctagtgggggagaaagttcaactgcatcataaaatatgtttgttacttctaaagctaaaaaaggattacgaagctaaacctcaataaaggtacctataagtctcgcacgctcagtagcttcttcagctcttttggcttcttcctgagcgtcgtgagattctttttcattctttctaatagcttcatcagctatctcacggctgcttcggctgaaggatttttaatgtcgttggctgaagggtttttaatgtcgtcggcagaagctttggctaaagggtttttaatgtcgtcggctgagaaaacaaattatggctgaactacagccttggcatgttcgcaaccagctttctccaagatagatgtgcccccccgcgcaccagcaaaggcgcagaaatctcctcgatcactcagaatttcgtcaaaagcttcggtttccccgctaatccactggacaactccagggtcgccacggatgaatctctgctcaaaggaatatgc

SEQ ID NO: 85498 - DNA, 653 bp, Zea Mays
agacaccagttgtttaactattgaagctggaggaaaggttagttttgttgaacaagttgattcagttggtatgcttgaggaatcctcgttctctgaggggcttatttctaggacctaggaccatgaagttttgagtagcatacgtgaagatctagctgattaaatagccaattgtgcttataacaagaaatgaaatgaaatagagaatttaagcatccaacaaagatgccttttgtgtacttaacaaaaaaggggtttcgacactaactgcagaactatgaatattgtccctaaaaactcccgcaaactcaatatccagtccaattcaccagaaccgattgctccatttggttgtgtttaacacacccaactgccccagttcgtcataaaaaattgctcaggggaggctcagcacacacagccatatgcttccatggaatctacaccctggagcattgacaaagcccaacaaagaagtgacagggtaactactactaactgaaaggcctcgattttctaataagcctccgcaaagcttgaatccagagcttcacaattctgctgagccacactgtgagaacagagaagcacacaggccaatagcagttcagctgcctagaacaacaaccacttccaccacaagtcaacatcaa

SEQ ID NO: 85499 - DNA, 354 bp, Zea Mays
ttaagaaggctttttggactagagtatcgaacctcaccatataagaactgctcagtcttgaggctttaataaaaaatcattggaccatggttcgatggtgcaccagactcgtgggtaccgactactttggggttcaataggtgcacaatggctagctgacctagcggacgatccgattgtgcgctagactggtcttgtgctagctagatttagaaggcgccaatcaagatcccggaggaccagctataggacctagtccggtggtgcttcagactggtacagtgtgcctgcaagaggtagttttccagcatcttcctcaacagctcttttggccatttaggctataaataaatc

SEQ ID NO: 85500 - DNA, 647 bp, Zea Mays
agtgcaaccatgtcaaaaaagaccgcttcgacggtcttcggcattcgaccaattcgaagtcaccgcgacaggtagcgtagactaccctcgcgtgcgacacactccgtgcaaaagacgcctaagggtgcagtcggactggcacaacaagtgcgcgatacgaagtcttactaaaaggcactccgtgcaaaagatgcctaagggtgcagccggactggcacaacaagtgcgcaatacgaagttttactaaaagacactccgtgcaaaagccgcctaagggtgcagccggactggcacaacaagtgcgcgatacgaagtcttactaaaagacactccgtgcaaaaatcgcctaagggtgcagccggacaagcacaacaagtgtgcaatacgaagtctttttactgaaagacaacctcgtgcaaaagtcgcccaagggtgctgccggacaagcgaagggcaataggccacattacaatacaaatagattacatacacacaacgaaggatcaccagacccaccgcgcaaataaatacaaattgcgccctctactaccacacgacaagcgagggcatcacacactctacatcggttcaaccttcgggataatacccacctcccgataattaaacaacattatttttaattcctc

SEQ ID NO: 85501 - DNA, 344 bp, Zea Mays
gtcgtcgtgcttgagggtcgggggaaggaagatgccttgggcaccgtttgatctccggccgacggtggggatttgaccccaaggtacctcttcgtcaaatgaatacggaccgttgatcgccgatcggtgggtggcgagcggttttgtgctcataaaatcctgatggtcggattttgatctgatggccgcgttcccataccgattcggggtctgatccgggccgttggatctaatccgagcggctggaattcaccataccccttcggccaggctttttacgtaagagacccttacatttttagttactaacccgcgatccgtggttgctgtgcgctgagtctcgg

SEQ ID NO: 85502 - DNA, 349 bp, Zea Mays
ctactatacgcggtacttctaaccgctcgcaagctccgtcactactttgacgaccacaaagtcatagtagttactggatttccaataggggatattcttcacaacaaagaagccatcagaagaatagcaaagtgggcctgcgaactgggagctcatgacatagagttccggcctcgcacgacagtaaagactcaagcactagttgacttcatatcagaatggactgagcatcgggtcccagacaacctagaggctactgaagtatggtgaatgtatttcgatggctcgctgaaactgcagggagaaggcatggatcctcttcattgctcttggaggagaacaactcaag

SEQ ID NO: 85503 - DNA, 895 bp, Zea Mays
ttcaagcgcctcgttccttagcgtgataacttctgaccgaaggttcccaagggctatttggcagctttcatcttctgcattcttttgcgcccttaaagccttgcttagggttaagccctacaaaaaataaaggatcagcacacaataataagaaaagacacaaaaagtaatctgcttataagctaaaacatccccaccttcagattgttataggcaaggctgtcggcaaggtcatccttcgacattgcagacaggccaagttctagcttcgggaatcctatattttctaccatctcccggcaaatagatatttccttgttgcccaggaggcagtacaaaaaatcatattcgtcagtgtcattaaacacaagggatcccgagggatactttagatctttagcatattgcacagcttcggcaacctgctcctctgatagctttttccctgccaagtgacgcactataaattccaatccctcagtagaagcttcggcggccgagaatttagattctttgctggttctctcttcttctaacggtaatggagcttttgcagcatccgagggcccttgttcggtatccttttcaacaagctccacaggccctgtttttgcgagaactgagggccagcttcagcctcaacctgagttataacagcttcgacggtctcctttatatttttctcactcatgctgggcacttctgtagaggcaggagtcggtacctttgtcgactccatgacagcgtctagtacgctggacattctcctcctctttggagttattgcaggaatttttgatacctctgccgatttcctcaattctggctcttcggccatttttgccctagcttcggcaggacacttcggcagatcagctatttcagcttttggctg

SEQ ID NO: 85504 - DNA, 329 bp, Zea Mays
gcactacatgcatgtatgataatgatatattcctaagtaatagtgaaccgactaaacttatcttcctacaatcttgccgacttattctcatttggttccgttgtccaaggtggtcgtgcgggagaatcggatcagagctgtggataacgctcaaaccccacgagccgccttggcccgcgttcgctcattccctgcgtcggcccattctgcctgcagttctcccctggcccacaaaaggacgatcttgcgaaacaataggcccaaggcctttcgcgaggccttctagccttccagtggacccgggggatatctgtcccccacaagccccc

SEQ ID NO: 85505 - DNA, 641 bp, Zea Mays
cttggcactgaggtgactgattatcctgatcgtttggttctgtctcaacgcaagtacattcgagatcttttggccaaaaccaacatggcaacgtccaaaggtgtaccaactcctatgctgccaacagataagttatcacttgatggaggcgaccccttatttcctaaagatgcaacgagatataggagtgttgtgggctctctctagtatcttcttttgacatgactggatctctctttttctgttaaccgggtctaccaatatatggccgcaccaacctatgcattgggctgctgtgaagtgtattctacgatatttgcacgccacctatgatcttggtttatgcttcatgaagaccggttcttctcttctcagtgcctttttcggatgctgactgggctggtaatctggatgataggcgtagcaatggaggctatgttgtgtttttggtgggaatctagtgtcttggagctctcgaaaacaatctgcagtctactgttccagtactgaatctgaatacaaggcaatcgctgatgccacagctgaacttatatggatacaagttttattacgagaacttggtatacagcaggattgtccacctacactctggtgtgacaatcttggagccaccgacttat

SEQ ID NO: 85506 - DNA, 490 bp, Zea Mays
atttttacattaaaaatcaattctaaaataaatttcactacctccggtctgcgcgcataaaaacagagaaacctgggggtctctgcgctagaaacaccagacacagcgccaaagccgtgtacggcgggttaaatcttatgaagcacatgggctcttttgtgaaaacacgtgccgaaggggtatcggggtcttacgatcgtccgattagaaatccatggtccagatcagatccaggcttaagtgaactggtacgctatgcctaccctccgatcacgatccggtggccaagatttcatacccgaacaggtcagcgagtcatccaatcctagccgcccatagttgatcgcacggccaggggtgcaccaaccctagatctaatcaccgccacccaatccggaatggacggcccagagggcgccttcctccctagggctgagccacggtggcgccagagctccccccatggtggagccacgccggcgcaaaccac

SEQ ID NO: 85507 - DNA, 345 bp, Zea Mays
ggggtggtatccacataaagtcgtcagggtattcatagctgcagcctcggtggtgtcgtccgccctgaacccaatagtctcagagtcaagggaacgctaacccggctgcagagggtgagcctccaaagtctgccaaaccttgcaatgtgtcacctgatgctcctcgtatagctgcaccgtatacagagggggtgtagggtaaccggcggagcagagcacctcccacaagatggaagggaaatcctcgtgggaaaggtagttgaaactgaaatgagtgtctcctccattgatgggggtgggtgaagtcatctgtgaaagagggttagacgcaatgttatggtagtg

SEQ ID NO: 85508 - DNA, 1035 bp, Zea Mays
tgcttccctcgagtaaacatgccatgctgatttgccataggagggacgggtacaacatcaagaagaggcatagtcagtggtacaagcgctagggtggtcaccgtcttgtgtgccatggatgtgggcgttaggagtggcaccatgggtagctggaccggcaccaaaggagggcgccaagcatagacaacgttgtggttgctgcggaggggccggtggggagggcactggctgcagcctagtgggagagccacgagaccgcatggaggcctaggatgccacctgggtgttagaactatgtgatgcagcttgcggtatggtgggaatcggtgcagagcccatagaccgtggcccacgaggcaagcgtcgcggtggtccaataggcatcgaaggcgtcccaccgacctagcgcggacgcagagtagggagccaaggcggttgcaatctgaccaacagatgcattaggggtggcgagtccagggcactaggtgttgcacgtgtctgtagcgccaaaagctgcacatggcgtgcagtaaggaatgcccctacaagcaacaaacatggtgatggtgcaaagggaactgacacaagattagtgaaatccttccggaaatcaaaagtcgctcgaatgagagaactcatcgaagaccacatggcgagagatgataagacgatttgtgtgacaataaaggcaattcaaaggtaggtgggagtgctaagtgttgcagccaaaacgtaggaggaacactggtctggaaaaggagggagtgaatgacattgtttgtagtgtggataatggggctttaactattttccatccttacgaaaatcccttaatcatgtgtcactaacacatgagtcattgacatggcattttatttaccactcacctccaaatagtggcaaaagttaattttccgtggataattcgttcagcttcaccgttctgagaagaggtgtaggggcaggccatgctcaagtgtatcccgtgagagaggaagagcatttggacgctagagttatcaaacttgcgaccac

SEQ ID NO: 85509 - DNA, 671 bp, Zea Mays
ctagggcacaagtaattgatgtgacatcatgtagatcatgcctatgggacaatatgcaacaactaaaacttgttcgtaacatgagagctctgttcgaccaatggttttcagaattcttattatgcattgggaatgctattgaggagacatttgaagatgattatgtaaattttcctagcgagctatgtgtgccttacaccagtactaattttgatgtcaaagatctcattgataaagttttcccaatgttagaggaaaacataagaaacttgaactacatcacatcatgatctattttgtcgattaggaatcagaacgtcgttgacataaatatgaagcttatccatcattttccaggagagcaaatgatctatcacaactttgatattgtagtggatggtcctaacaatcactacccaccagagtttttgaattcgttgacgccaaatggattgccatcgcatatcctaaagcttaaggttaactgtccagtgattttgctcagaaatctagatctacttaatggctcatgcaatggaacatgattcatagtccgagcatttcaaagggacactatcacagaaattgtgctaggggaacatgcaggaaagagagtatccctttcacgtatacctctatgtccgtctaatgatgaaagattccccttcaag

SEQ ID NO: 85510 - DNA, 673 bp, Zea Mays
cccatgtacccgcctatgagggttagttcaattggtgggaggacccaaatagataaatttttgcccaagcgcaagagtccaaataagggggatagagtttcccattgatctgacagtaatgggtacctgagatgtagacatagatgtcatcctagagatgaattggttgaccaagtaccaagcaggccttagctgtgataagaggaatgtgaagttagtgtccttgtcaagagaggaagtcttggtggagttggtcttgtctggaccaaggaaaggaagctatcaccagataactgcccatagtgaggcagtcaatccgcttgaagccatcaaagtagtatcaaaattctcagatgtgttccccgaggatttaccaggcacaccacctgagagaaaagttgaatttgccatagagcttatccctaacaccacccctatttctaagagagcttatagagtgtccagaccagaattggtggaactcaagaagcagatagacgagttgttggagaagggttacatcagacccaacacctcgccttgggccaccccagtgttgtttgtggagaagaagaatggtacaaagcggatgcacattgattatagagctctgaatgaagtcactatcaagaacaagtatgccatgtccaaaatagaagatctattcgatcag

SEQ ID NO: 85511 - DNA, 515 bp, Zea Mays
aagtaataatgtgattaatacttagaactcttagtcgatagtagaaattgttttggcttatatagagaggtggtgacatgccaaagtagtcatcgcttcctctatatcttgagttgggtcaatacgcgttatgtgttcatgaattgggaagtaagcgcatgatggtttcgagttagagattagtggtttacgggtcgtatgatttggtcgatgtgtaaaaatacatgtgaatatgtatgtttataaaaatgttgtggtatatgttgtgtctcagatttcgataataataggctagccgacgagtatgttgtatagcggcccaggttgttgctcaggttaatcaacttgttagatggctttagttaagttcgtggtcacgatgaattgcatgctgtagtctaaatgcgtatgtttatgatcgcggatgaaaagtattagtgctcatgtgatgtctaagttgaaatgcaaattattgggtgaaaagcgcttcgatatacatatatgccggatttgat

SEQ ID NO: 85512 - DNA, 335 bp, Zea Mays
tgattacatctaggggggtgcttttcgcgcaacaaaccgagaacgtcggtgcttgatcgtgcggctctggttcatcggcgggtagtttgatcgtgggccgttggatcgtaatccagtgacccgggtgagtgccgattcacttatcggtaggatataatcctggccatgggatctaatttagatggcccagatttgacgataccccttcggatagcgcaattgtaaaagaaaccctgagtttagttagaatcaacccgcaatccatatggatggtagtctgagtctggcaggtttttgcagactgaaccccgagcttcggtttaattgacgcccag

SEQ ID NO: 85513 - DNA, 424 bp, Zea Mays
caataacaaagcactcggcatcactgaacatgatcctcacaacacaaggcactaagttgacatgccccccgcacacacgtttccatattctaagcatggtggccacaaaaaggaaacacgaaaggcgagcccccggtctgtgattggaatttgggttgcatgttcagatgcttgatcggctttctctgcatctcttaactcccatcacaaagtaattaattaatcaatttaaccgaaatgacacgcggaagcgtgccgtatcgtaactcgcaagtagagtacgtgcgtgcacatggaaggcagaaaaaatttcatgcctcgtgcgctccccgttcaacggaagccaccaagcgatccacgcatgcagcatgctgatggatacagcaaaaaatgatagcggaaaccgatatttttccgagggaat

SEQ ID NO: 85514 - DNA, 672 bp, Zea Mays
cgtctcaccctgcagttgtacaacaggttttcgactcaggggataagttggtggaggatgagagggaggaaactttgctgccagggaagaatagtgaacaggaggatgtggtggttcgtggtgctgcacatggtaagaccaaggaaggaaagcctccttattgttgcagatgcctgacaaagggtcatgtaatgcagggttgtactatagagctgtggtgtgatatctgcaattgtgatgcccataacgctgagagatgccatcagtttagaggggtaaaaccaaatgttgtgacttatgggtatgcagtcgatgggcttggttcttttcacattccttacactccatcgcagaagcatagaggggattcaaaaaatgctataattaaggtatcagggggtgctctgtccgtagtacaggtgtcatcagaacttgagcgtctggtgccggttaggtggaaatgggaggtggagtccgttggtaccaatgtgttcaagactcaatttccatctcgtaccgatttggagcatatgatagaatggggtgtggtccaaacaaaattcaatgcgtcaatgtcaatagaggagaaggtgttgctagtggaagtgaaatcaacttcgggcaaagtttgggttcagatcactggcatccctaaggagatgatgaattttc

SEQ ID NO: 85515 - DNA, 753 bp, Zea Mays
aaaacttcctgagatgttctatgttccatgagttcccaatttccgtgccgtccgtttgagtgagacgatatgatccaggccgagtgacttctgctactatgaatggtccttcccatagtggtgacagtttgtgccgcccttcccccataagaattcgccggaggacgaggtctcccactgcgaaggatcgatgtcgtatggccttgtcatgatagcgtctcagagtttgctgataccgtgctgactgaatcacggtgttcaatcattcttcttctagtatatcaatatcctccagtctggtagcctcagcttctgctatgttttcaaagatcaacctcggtgccccaaacttgagatcagcaggtagcactgcctccgatctgtagaccatgaagaaaggagtatttccatgcagagctcggctaggttgagttctcaggctccaaacaacataaggcaattctctaatccactttcctgcgaacttctcattcttgttgaaaactttctttctgagcgcttccaatatcatcccgttggctctttctacctgcccgttggctcttggatgcgccaccgaggcatatttggtctgaatgcttttttgttcgcagaagtcgaaaaactctgaacttgtgaaattggatcccaggtcagttatggtgctattcggtattccgaacctgaatattatgtcttgtatgaattccgctgtcttagctaaagttagagtagcaatgggtttgaactcta

SEQ ID NO: 85516 - DNA, 371 bp, Zea Mays
gagccgcctctacgaggtagcctggggcgtcgttgcttggcgtgtggtagctctgtgcgcggcgtctatgcttcaccgcatgaattgtgccatggcaccgtaacccactgcggctgcaaaccttctcgctctaatcccaagtatgccaatcctacctgcacccgccctcgtggtcacgttgttgcgtagagtggtgtcggccgggttttatcacctggtcaatcttggcgagcgtcgggtagccggtaatggcgtgagtggtgggtacgacggtcggctgggccggtgtcgaggggttgaagacaccatgattgccctggatcgtaggacggatggctagattaggtctggtgcatctgttcggctgggat

SEQ ID NO: 85517 - DNA, 805 bp, Zea Mays
tacacctcctatgccaataccacttgcatcacattcgatctcaaatgtcttaccaaaatgaggaagttgtagcagcggtgcttcacaaagctttgttttcagttcattgaaggcttggtcttgttcatctccccacttgaatggaacatccttttttgtcaaattattgaggggtgcagcgatcatgctgaaatcgttaacaaaacgcctgtaaaaacctgcaagaccatgaaagcttcgaacttggctcacatttaatggtgtagcccaatcctttattgctttaaccttctcttcatcaacctgaataccatatgcggaaataacaaagccaaagaaaacaacaaggtctctgcaaaaggtgcacttagcaatgttgccatacaatttctcttccctcaaaacagcaagtacttgatggatatgatcaagatgttcatcaaatgatttgctatagaccagaatatcatctaaataaataactacaaactttccaatgaaagctcgtaaaacatgattcattaagtgcataaaagttgaaggagcatttgtcaagccaaatggcatcacaagccattcatagagaccaaatttagttttaaacgttgttttccattcatcaccaagtttcatgcggatttgatgataaccactacgcaaatctatcttggtgaaaatgatagaaccactcaattcatctaacatgtcatcaagtcgtggaatgggatggcgatatcgaacagttatagcattgatagcatgacaatcaacacacatgcgccaagagccatctttctttgggact

SEQ ID NO: 85518 - DNA, 420 bp, Zea Mays
actgaaccaaaagctgaattcacatatgacagagagaatttgagcacagtttactccaaagttggtacagcaccaagtcacacttatttaagaaaacttgttcactattgtatggtcttccattttactatagaaaccatagtccataactccatagattagccacaagaaagctccaaagttgagcaaaactcactgaaattcagttttagataactgaaccaagtctgaaattaaagtctgacagcatgttttgtgacgtcattttctacctgttctaagcataatcaagggcatgacccttactaagggttactcccccaacatttatctccaagtttgctacagaaactagagcctaaaagtacatggattgatcaccaaggagctccaaacttgacactttttactgaaattcag

SEQ ID NO: 85519 - DNA, 2512 bp, Zea Mays
cctcgagggctgggttatcctcagcagcgcccttgggggctgaagcaccctcaatcgtacccacaggagctgggtaacccttgcatgtaacatcaggaaccaaggtgtccccatgaattaggccgccctcaaaggtcgaagaagcatggaaaactgtccgagttatttcttgcccgactggattactagctgaggaggtgtcatctgggacctctacacggatggcagcacttttagttttaggaagctccaataaaagatcttcagggataatctcctccagtgcatgatcaatggcagacatcgtcaacctctagagattaaccagccctgacagagcctgaattgggacatcgtcgctgtttttgctatgccaattcttgcgaatcaaaggggaaacttcttcttcatcctcttcatcctcgtcagacacgcgtccaccgactctggtgccaccacaactctcaatatcatcctcgaggtttgcactcgccgggccaccaccgaggactggggcagtagagtcagcccccagctccaagctagatggacgtcgaagtcttctctttcttttcttcccctcggcagacacggctaggtgacccgttcgacataattgtttatgacgaacaccttcaggacaaccagctccttcatcctcgccaaagacgcgcccagctgcagcgctcgtcaattcagtatgggcagatttagatgactcacccgctagcatactaagaacaacttttatttcagcctcatcagtagtcatttgcatctgaagatgggtctgtctctcctcttcagggagattccggtacgtagcaatgaaggtctcaatatcttctgaagagggtcgcactctatggcttggactgccgtcctggacaggcgggttggatgtgaactctgaaaagggcctcagtggtaacaaaatagcacagtaaggatattacacatgacaaacgtagaaactcataggcaacaacgcttaccgcaggaggaagattccaggcagaatacgaaaggggagcaccagcattcgaaaccttgcctcccagcatcaaatcaactcgacttagcacgtcctccttagatattcgcttgttggtaattcgagtaggtcattaacaccggtgtacaggtaagcagggtagactctatctttcaagggctaaatattcttgaaaacaaagtcgacaacaacagcttcagtagtcaagcctctgtccctcaacgcacatatctctgcaagtagcaccctggacttagcaagctctgaatctgtggggatctctgtccagctaggcgttcagacgtcgggttgctccgtgatcgagcagaaagtgacttgttatgatttttcatagtaaaccactcgaagcgccatcccttaatgatgtctttcaaaggaatgtcgagatactcagctttcctgcctcggcgaagttccaagctagcacctccaacaagctgatgctgccctccagccatcccaggccgacaatggtaaaggtatttccaaagcccaaagtgtggaagaattacaaggaaatctttgcaaagatgaacaaacatagcaatttgaagcacaaaattgggattcagatgagtgagatttagagagtaaaaatcgagaagactgcgaaagatgggagaaactggtagggctagtccccggatgagaaaaggcacaaagataaccgccttgtgagtatcctctttcaagacagtaaccccatgctagatccgctaggaacatagttccttcggcgatagaacaccaatttcaacaagatgcagaaggtcagcctcagaaatgacagaaacatggttaccagcgaaagggagttggctgttgggattgatcggagggatgtctgggctggtagcactctgttttcttttcctgggtgccatcacgatttttcaaacggagtaaaaggatccgagaactcagaaatctagagagcggcggagaaaaaacaagaactagggttcagagctcaagaggatgtcaccagaagtatgggttagcacactaagtcgggcgcaaaggggcaggtcgatagcttgggagagttttggttgtagcaaaataacatcactcgggcattacctctaaatgctagcgaactgtgagacataagagcggagtatgcaacagtagattggcacaaaaacaggttttcattcaccaatgggggaatcattacaaaattgagatcgactcattatgagtcggcctcccgcccctcgatcttacattacattaataattacattactacttagactatattacactactagttaaactacattattctactactaactactactactatactatactaatatttaagccggtagcactatgccactggccttaccgtcgctgccgtcgtcgtcaccgttgtccttgtcgtcgtcgtcgctatcattgccgccattgccgccatcaccatcgtcgccgtcatcgccattgcccttgccgctgtcatcgtcg

SEQ ID NO: 85520 - DNA, 1034 bp, Zea Mays
caaggactcttttgtgaaacagacaggccgaaggggtatctggtaattggagctgtctgattacaaactagcggcctagattaaaactatgattccacgaatcagttactcacatccaacgtccgatccatgatcgaaggccgaggattgcttgcgatcccgacaccctcccggccgcgcgatccctgatcaacgcgccagatccaaaacgacgacgaggtatctagaatctaatcgtggccacccgtccgaggaacaacggccgagacgcttcccttagaaatctaatctcgctcgtcggttactagatcaacgacaccgggcccttcccctacctccggtccaacaccggcgacctacagtgatgtcgcggcggggacgccataatcggaacacccatcacgccccatgctgcacaactactagtcgtgatgatcgcaaaatgaaattgacacgatggcgagttcggtaaagggagttctaacgatgctcacgcagcgccgactcctgccaatgacgcgctccagacttgtggcctcggcatcaaattgacggtgcccaggtcgcactactacccagccaccaccttcaacgcaatcctagagccaatgtggatccacccgactgcgcacagggcaccaatttgtggagagcacggtggacgacgacggggggccctggcggctactagccctctctctggcagtgagtatcacgaagtggttgcaggcgcgcgtggtcaaggggatgccctcccctttattagcgaggttggcgcatgccaggatccgcggaagacccgagcgtgtagggtggttggaaggaggtcgcgtgcggagatggcggaggtgttgttaccatcgagctcacggatagggtagaggggaccgatgcatgggcccagtgagtcagtggtagagacgcaagcaggcatggttgcgtgtgcgtgcatcccgttcgactgacaggagggccccgccccacaacgacactgggaggagagcagcggaggtgaggctcgagttgggctagat

SEQ ID NO: 85521 - DNA, 393 bp, Zea Mays
gtagatctgaggccctaaccaaaatcatcattgagattccataggtaacacatgcaaattcatttacgatgatggcttaacaattttctccaaatttagcaagacatagaaaagcacaagtacgtcaacgagatcattcctaaaataccaaatacaacaagtttatcctctaatacttaacttgcttattgaaatgtatacttgctcttgcctttagattatcatatcaaacaataaaaatgtaactacccctgcatggatcagaaacatacgtcaaacccaagtagctcagtgaccccgcttgggcaatccagggcttcatcacatccaacttgacctttgaccttgatgtatccacctaccatgcacaaaattgctggatcagagaaagcc

SEQ ID NO: 85522 - DNA, 450 bp, Zea Mays
ctgacggtacgtaaactgtgtgcatggccatacgtggatagatatccccactggtacgctatagtttataagaacaataataagaacgtaaaacaagcataaacttcgtatcagttacacgcagcgacccttcgaactgcaaaaaaagacccctaaaaaaggagcaccgtctcagaaacaccggttgcagaataatggagcttccttttcgtttctccggcgaccacaccgacagacctgatccaacctaccccaccatgttgtgatgatgacccaaatagaaacacgcccatttgcagattaagaaaaaatggtcagtcaatcacggcgtgatgctgcaaaaccagcagcacctccatcgcctgatttggacctggaaagtggaaaccacccgccgccgccggcggcggcggccagagcaacatgcctccctccgagatgtcatctcat

SEQ ID NO: 85523 - DNA, 601 bp, Zea Mays
cttaggtggccagagtttgcgctttttaatcatccctggaatcttcctctctggcaggcacacgatgtcgggggcataattatatcactttatttgtgtctaatacgtgtactacctcatgtgattgctttatttatctctacatgcaccgctcgagttaactaatccctagagcttgatggatccacggagtactttgttgagggccgggggctaggggtggcacaccaataaatagtatatcgatccagcagcacgacagatgggttcgtgtgtactgtgctcctcttgctaatttatgctggggctggctgtctacggtctacctgcccacggcgccgtactcattttgatttgtttttttagagacgacgtagacgctagacacagcaatgtaatcgtcatgcatgcatgtgatgtgacaataattcagttcagcgtcatcagcgctagctgctagctacaggtccatcggtcattcctctctccctctctctcattccattttcttcgtcgtatatatcgctgacttttttcttcattattttacatccactaaatattagtgccaaggttaatcacgtgttatgtgtcctgcacc

SEQ ID NO: 85524 - DNA, 910 bp, Zea Mays
agaaaggtcagtgggctgctagcataaattcctagactaagtaaataatgaatgtggacggcgggtttattctaaaataacagacggtcttttctgtgaaatgtgcggccgaagcggtatctgcgaatctgggccgtccgatctagggcctacgtgctagattagattggcgcgggttatgaatcggtacgtgtctgcagccgttggatcagagggcaatggattggatttaattagtctatatctattcgtgttcgcgggatcggaatctgacggcccatagctattttccccagatccaaacctagccgtcaatctccaatctaacggccagtggcccttcttccctctcccccaaccctaacaccggcgagatagctcccctgctcacctgcacggcggcgctacactggtgagatatccaattcgcgcactaacttgctaatctcccaatccgacagctcctacgcacagcagagatgaaagcgagaccagtgaagggaaaattaccgaggattagctcttgggtgaagccagccatggcgtgaggcagaaccggggcggtgtgatgtcgacggcgagaaattgactttggcatgcgacctcaccacccaattgctggcaccgatagcttccccaggcgaagacgaccctccaagacctcacttcgagaacgaatttcttccaacgacgacggtcgctggcggcggcacaactcgcacaaaccgccctcctccacacacagccgcgatattctctggtgggactaacggtggtccaatcccggcaactgggcacttaaataaggcgcgagagataagggaaggaggaagaacgagtccgcccgatctccacatcgccggcaaaatcgcgcgtcagttgaggtcgtgcgagcggagctggacggcgg

SEQ ID NO: 85525 - DNA, 283 bp, Zea Mays
acagacggttcttgaaccaaaggactccttgttcatctgtcctgaggtccggaagttgttctttgcgagctttttccataagtctcgctgtctccgtgtctaggcattgagctttgcatatgaggtcttctagcattggcttgacttttaagctgccgttgtctcccagacatgcattcagctgagctgattccttcttccaatcttctaaaaagttggttccctttatcccaaaaggtttttggctgagggtgtctgctaccacgttggcctttctggggtg

SEQ ID NO: 85526 - DNA, 689 bp, Zea Mays
aaaaataattatattaaaagaagagatgatccaaggaggtagtaccacattatcttgggtggtcataccagattcatttagaattactacccgggattgtcaacaacagattatctttgctgctcaaaccatgcacatgtggttcatcttaaattatatgcgaagattagcacaaataaaacaacataaacattagcagcccttgcattagtctaggataaattgttgtggtagggggagggataacttgtctgtggatgtgataaatcatttaaaagttcaaggttcagcttaacattctggctcagatctaagtaatttgtgtatggagtcaaattatgtgcgcaatttgctaacaatatttgaacaacaacttgagcagtccatgcatgggtgtaggtagacttgttgtggtggtggcagctaatgagtgtggctcagatctgagaaatggaggggaagatgatgtatatgtcatcaatatgatcggatacgcacagatccacccaaacgaaaatgtctgtagggccaaaccaaacatatcgttcgaacatacgaggaagaaaccaactaatttgccatctaaactatggaccaggggaggaggaggatggaatcaccttgcatggtatcgagtattaagcctacgcttgagaaccttggttggactgctatcaccgctgttgtgc

SEQ ID NO: 85527 - DNA, 893 bp, Zea Mays
gcttcaggaaccccatacttctggccatctcctgctagacagataattctttgttgtctgggaggcagtataagaagtcatcttcgtatgtgccattgaacactagggcccctttcggatacttcagttctcgggcatagtgtttagcttcaaaaatctcttcttcagataatctttttcctgaagcgtgtcgtataatataatcaagaacttcggaaggtgcttcgggagtaggagtgacaactttttcaggcagaatttgttctacaacttctttttccgttgccttttctccggtttccaaggatttctccttggcgggctctgaaggcccagcttcggtctcggcctggctctttgtagcttcggcttcggtcagctttgtctcagtctgcgcttttgaagcctcagcagttttccctggagtagagcttgaagtttttatcgtctccagcacatctagtacactgtccatccttttcctcttggggtcgctgtaagacctttttgtgccttcggcactgtcacttctgccgaagggcttagaacttctaatatttttgttcccttgactcctatctcttcaatattattggccttcggctcagctaatttggctgaggatgccttcggcattacagccggctcttcaatcttctgcgtaagcgcaggttctttggcttcagtagccgaagaggtctcaccaccaaattcaggcactgtggccagttcaatatagcgcggtcggtgagtaagaaccttcacctttttcctcttcggcgcgggctcgcttggagcagctgaagcaacatccttcccagaagttgcactctttctcttctgcccccgtggcgggtagcggtagtcagggtacataaatccaatagcataaa

SEQ ID NO: 85528 - DNA, 652 bp, Zea Mays
ggaagccaactacacccagcaggactacttcatggggtttgggcctgtcgtcgaacattacacatcaatgttcgagacggggcacttccccaacctgctgcaagaagtgctgcacgcgttgggaacctacgtccgcccctgtacgaaacaaggcgagtgagcgagcctccccgggcttgctactacatcactcgcatccacgtcagggtgatggatgcaggggataggggattcaggactctgtctgctcatgagtccctgacaccgctatctacctacgctgcttcggtcagcgatgctgccagacggaccctgtggtctctcatccacacctaccgacagcagctgcatgacacgaggttcaggcatcttcctctgcgtctgagtggaggaagccagaccagcatcgttccaggtggagctggtgaggagcgcctcaacaccctagctggtgtggtgaccggcctcaacaccgacctggacagtgccaccctgggtctctctagggtgcacttggagctggaggatgcccatgccaggattgcagccctggaagcccaacttcaaggacgggatctgcctgaagcccaggtccccgccatggcgttgtctccccgcaagaggcttcgctatggagagcccggatccgtca

SEQ ID NO: 85529 - DNA, 349 bp, Zea Mays
gtttattctcattcatcaacatatatggggtcttaagcaatcgatgaggaaatagtcgttttgatgaatacatgcgatgttgcctcgaccaaaaaaatctttaatgtattatgttcatcaattatggttcttgcaacagtgatcaaagtgaaattattccttttaacaaagccatttttaggagtgtatgttacaaacccttgacactttaagacctaatgttttagtaacattagaatacctattatcccttgcgcataccattatagttaagtcaaatcggcttgtagtcttacgagatcataccaaccgtgtttatgatatagccaccatcatatactagagagaa

SEQ ID NO: 85530 - DNA, 416 bp, Zea Mays
agtttgctatagagcttcttcctggaaccgtccctatctttaagagaggttacagagtatctggaccagagttggttgagcttaagaagcagatcgacgagttgtcaaagaaaggctacatccggccaagcacctcgccttgggccgcccctgtcctatttgtggagaagaaagatggcaccagaaggatgtgtatcgattatcgagctctgaatgaggtcaccatcaagaacaagtacccgttgcccagaatagaagatctgttcgaccagttgagaggagccagcgtgttctccaagatagatctgaggtcaggttatcaccagctcaggattcgaccttcagacattccgaagacggcattcattaccaagtatgggttgtatgagtttaccgtaatgtctttcggtctaacc

SEQ ID NO: 85531 - DNA, 1251 bp, Zea Mays
aaaataaaaggggaatagaaaacaaaagggatggaaaagataaagggagataaaagaagaatagaagaaaacattagtgggtctcgttgtcatttcggcccaactggacaacccccgctcagccaacacctcagcccatagaaccaaccgcgctcactaggatgcgtgtgggtcaccaacatgcgggccccgcgggcaggcactcacccttgcgcacacggtaccctgactggtggggcctcgcggtcagttaactgggcggacaacatgtcttctgttgctcttccgtcacgcttacgtgtggggcccactgtccaaaatcgtcatctccaaccaacgcggcgggctcctgtacagcaaaacggactccgtaacaaactcaagtgaatcccgcggtctccgcctgagctctgcgcgcgtgtttcggagggccagggcgatgctgggctatataagtgcagggcaccgcaatatccccacctgcattctgcctctagtgctggagagagaagatagaaagtgaccatgggaggaggaattgccgccgccatgggtacaagctcatgcggtcggtcggcgcgcgcagacggatctgtgggcttcatcgggtccccaggaatgtactcatggcttcgggaggaaggattggacctgggtgtgccctgaaatgctcatcgtcgtgagactgtcgccgctggtagctccacactgtgggcagctccactgccccgccatgtacggtaagaccagtgatctcaagttcaccatagcctcttcttcgggtagagacttctgggataaagtatcgcgctccaagaggctgatctggtggggctcatcggtcgccgccgtgggagtttggtgccgccgcctgtgctgactgggggaggaagaagggccctcaccgtcgatccggttgcggacggctggatctgtgctttggataccgcttcgggtgggagaaacgattgtcgttgatcctagatcgtatggccgattggggcactcggggtatgaccgtggattgaaatccaatggccccaagtgcataccggttcatttaaatgataggactgatctgggacgtccagatcagatcgggtggctaggacatgttcttacccctttggccaggacgtgttacaaaagagcccccaaggatttagataataaacccgccatcctcggcgatgttcagatcattacaaccaggtccaaatatttacgtgaaagaccctgtgcttcctgaaa

SEQ ID NO: 85532 - DNA, 481 bp, Zea Mays
caaactcttgtttttccagagaaggttgtagacttcttcttcgaccagggccagcggaccatggtccggtgaccatcggaccggtcgggtccaacggctacctcaggtagagaagatcggtgcaacgactagctgatgtggcaacggtgactatatgcaacagaccggtctgttggtcacctcagttggtaatcgtcaatcaagatcccggagaaggtgtgcatggaccccttccgatgtgcaacggatcagtccggtgcccgtcgagagcagaattctgaaagttttactaggaaggaggcaagagcgcctaggccccttgggactataaaattaccccctagacgcctccaaccagtacccaagcatctcaagagcacaccaatactccgaaactctgcgaccatgccctctagtgtttttagcatgatccgagcgcaaaggcctaagaacaagagcccgtcctcaagggcccctaaaa

SEQ ID NO: 85533 - DNA, 730 bp, Zea Mays
gccatggctgttgttgctgcctaagtgacatggtatgaagagaaatggctacattattgtgtgatagttttattaggatttataccttttcacatatgagaagtggcttcaagagagactgatactgggactgtattaatatgtaccatttcaacagttcaagcactatggaggaggagaacactccattgccagcaagtttggggtctcgatctcgaactcgaaccaagcaactcacaaagaagccacccatttcgatgcagaagatgcatagagcgacaacatcatcggcgttcggcaatcggtctaatgtttctatatctgtggtgagtatccaaaacttcaaatgctaatcttttgttgtcttcacattctttgttgtatgctagattgtaatgttggattgaaatgcaggagccaacaactaattctagagaggaggaagacaaggacgaggacaatagcctcgacatggaggatgatttctctctaagcctatcttcagaggatggtgggagctagcgtgaagatgaggttcataatgcaaagagaggagtcaaaagggcaaagggtgatgttccattatctccttcaaagtgtaaggtcaagagggtgaagcgagcagattgctggaagtattttaaggtggtcgaagttcaatcaaagaagaagtttggggaaatggtgacgaaggccaagtgcaagttttgttacaaactgtatgtgtatc

SEQ ID NO: 85534 - DNA, 827 bp, Zea Mays
cttgtgtcgcatcgacccgtggccttcgtagcctgagcctcggcattcctcgtcgtgttacggggcctatagatcgttagggggcttaggcctaggctcagtagggcataagtgagccacatgtctatggcctcataggtcatgagtggggatgtggcacgggttggaccaactcctctatcgtagctcagtgctaggtgtatttaatgcgattagtcatttatgatgggggcagtcctgggccaggtgcggaatccactcgagtggcttcctcttggttcgcctgtgccctttttggctccgcctcttccaacctccgggattggtgctcgaggttactccggggcagactctccctccgtcctccctctaacgcatgggccctaggggcccaaggatctggtccccaacaatcgcctagacgaccgtctacccgttttccatgacgacagatttctagcacactcaataagatcatacactaactcttcatcaacatcactacatcacagaaggacgttgttgggaccaatggcggttaaagcgattgtccgaaaggcaaggctggtctacctaagcttaaggaccttaaccaagagctccgagagtactacgactgagtcatcaagactatagacgacaggctcattgaccacttcacgtggacccatagttgtggcaacaaggttgttaggcgcccgaaatttctgctagacgtcaacatcgccacatgctcagaggagtgcaacaccacccttctgcaagagatgaactacacgatccatcaagcgatggcacgacaattagagatcctcctcaactccata

SEQ ID NO: 85535 - DNA, 544 bp, Zea Mays
caagaatcgaagggacgaaaacattagaagttctaagcccttcggcaagagtggcggtgccgaaggcacaaaaaggtctagcagcgaccccaagagaaaaaggatggccagtgtactagatgtgctggagacgataaaagcttcaagctctactccagggaaaattgccaaggcttcgaaagtgcaaattgaaatcgaaacaaaactgaccgaagccgaagctacaatgagccaagctagcgccgaagctgggccttcagagcctatcaaggagaaaccctcggaaattggagaaaaggcagcggaggaagaagctatagaacagatttttcctgaaaaagctgccgctcctactcccgaagcgccttccgaagaccttgattatattattcgacatgcttcgggaaaaagattatctgatgaagaaatttttgaagctaaacactatgcccgagaactgaagtacctgaaaggggccttagtgtttaatggtacagatgaagatgacttcttgtattgccttccagacaacaaagaattatcc

SEQ ID NO: 85536 - DNA, 810 bp, Zea Mays
gctgccagttgagcctgctcggatgtcataagagcctactgctgcgtaagagtctgaaggattgcagctagagcggggtcaacagcaggaggggcagcaggaacaacactggaactccctgcctcatgatcatgtgagcggggaggcataggaggtggaggtaggatcccaaaatcatcatcatcatcatcatcgtcaggaactgttgtgcccttagtctcaaactgatggaaagctgtatcctctgcctgaatgtctatcactggatcaggtactgacacttgatcctcaggggctagacggtaggagccaaagtggaggcgtgaggcctcaagagtgccctagaactgcggtggccggatcagttgtgcgaagatgtggcagagatagtgagcatatggtagctgacgccgggcacgaagtccatccaataccgtgtcctagatctcacatataaggaagtcaacaacatcaaactctgagtgagagatcagggcaccaagtagccagagctggatatgagtggtggcctccctataacccatccagggcagcagtgtccatctcatgagctgatataaatacttggccgctgtagtgaaatctaccggagagcgtcgcgacccatctgagaagggcagtcggaacaatgccgcgacatgggctgtagctggagcaactccgccgtgagggcgccgaggaggatcagaagtaccataacacaagctgtgaaggcgagtcgatgactcggtgaatccaaacagctggcgaatctggctagcatgcagagtaacatcctctcactcaaag

SEQ ID NO: 85537 - DNA, 340 bp, Zea Mays
gtcgaggctatggtcgaaaggcgattatgttaagcagttatggattaaagtacttgtttaaacataaccatattaatttaacaataacgctatgcatcaaataaagttacgctacatgtttaattattataaacaattgaaggtaaatttaaaagggttgtcgcgcggtgaaacacacgacggcacacacgaactaaaccgaaaattgggacaagttgtcgtgcgacgaagagcgcgacagcaggcacgaactagactgaacataaaatgagttgtcgcacggcgaagcgcgcgtcgcaacacttagattaaactgaaattagatgaatcgtcgcgcgat

SEQ ID NO: 85538 - DNA, 476 bp, Zea Mays
ttagttttaaccatcttgatagccaaacttatgagatcatggtaactaataaagtcatccactcttcttacacgaagaatagatgtcccaagttgattctttatagttgcaccgttcgcattggagaagtatgcatcgtaaatatctgcaagacgagttagctttgccacattgaacatagagaaagagtctcttggatccaaagaagaaaacatacaagcaactccaacgaaatctcattgaaacgataactcatctctatatttatggcatctacatcattatagaaggtatcaactcaataatgatggtcttcagtaaccattatccctttctcttgccttgatcatccccatcttggtcttggtgcatccatatttggtacctgaatgttctttgcaccacaaaaacattgaacttcagcaaaaaatgactcccaaccattgtttctcagatcgaccaaccgtgatttcaca

SEQ ID NO: 85539 - DNA, 409 bp, Zea Mays
attcactccaccaaagaggagcaactagttccttcaagcaggtgtatgagttgtgcgcctcgctcctgggcaacgacgaattggaggcacaatgtatcatccgtccttccctgacatcaccatcgaccatcaagcccccagcaaactaaatccctctcgagcatttgatcaaaaacctcacgcgcatggtccacaccggcaccgcttgagccgagcgcgcagaggagagaaaaaaaggagccgacgagccatccgtaagcaagccagggcaaaaggagcgattaaagatgagaaaagaaaggagccggaggagtccataagccgagccagttccgtttctttgagatatgtggggggacctgtgtcgtcgatacaaaggtagctgtagagatgttttcctacagccgat

SEQ ID NO: 85540 - DNA, 745 bp, Zea Mays
cggcgaaggctgcacgtgcggcggcaacagagctcgacatatgtgggaagcagttcagtacgacgacgtcgactaatacaaggattgacgagcgctggatgccctcattgctgcagtcccgcctgagatgcagttttcgctttcccagaagtgaactgccaaggaagcccgggacgccatcgttgtgacccgcatcggcaacaaccgtgcctgcaagaccacaccgtaggcatgggagaacctggctttcaagccaagtgaggatgttgatgactttgctctccgcctcaacactctgttgcagaagatggtgcagttcggcgacgacacctacaatgaggaaagagtcgtcgagaagctcttccgttgcatctccgagaagtacaagcagatagctcgctcgatcgagtctctgctagacctctccacaatgatgatcgaagagacgataggtcgcctcaaggtcgtcgacgacgacgaaccataggctctctctagacctatcaccattggtgggaagctacacctcactcgagagcagtgggagacctgccaagttgataggaagaagggggagtcctcttccacgatgggcggtcgcaaacgtggcaagctgcgcaaggcacgaggaggcgccaaggccggggcgcgacaacgtgctgagggtggtgcccgtagaggcgcccaaggcagcgccgccagaaaccagaagccggtacgagatgacacctgccacaactgcggc

SEQ ID NO: 85541 - DNA, 564 bp, Zea Mays
caacgatcaagattttaaatactatgatctacttgggtgtgcacgatctggatccgacggtcgcgatccagggctcgaaccggtattccacaatctgatctaaggcattaatccgtgatcggacggttcccgatcgatgtccagctcaaacaccctctcctacccctcttacagccaacaccggtcgaccgcgcacattcctacagtggctccatggccggcgcacgacgatccagcgatatcgtggcaaaagtttcaacctgagtcatcctacatttagaatagccttagatgaactcgaaagggaaacttaccagtgttggttgtcgccggcgtaggtcaatcgcgaggatgggcggatccacgactccgatgagcaattggtgggtgcttagtcaacgattccgcacgccagcgccacagacggcttccccaatggttcacacaagtctccagtctaacccaaggttcctgcaatggtggggaagtggatccacgatgacacggagtggactcaaggcgaggtcgtggctaactccttccttagtgggttgggtaccgatt

SEQ ID NO: 85542 - DNA, 328 bp, Zea Mays
ggaaaatcggttcaaccgaattttgaatccggttcaaccgaatttgaaaccggttaaaccgaatttaaaaccggttgaaccgaatttgaaaccggttcaaccgaattttggtccggttcaaccgaatttgagtctggtccagtctccgactgagttcgctagtgaaccgaaaaccccctggtggaatccggttcaactgaatttgaaaccggttcaaccgaatttcagtcagatttccctaacgaccaccagcttttggggcacctttatatacacctcccacactcttccccacggtagagcacgcacaaaactccatttctaacct

SEQ ID NO: 85543 - DNA, 811 bp, Zea Mays
atcatgcctagaggagccggatgactcagatcagtggcgttgaaggccagtgtgtcctcacgagctagaccaccctccaaggtcgaagaagcacgagagactgtccgggttgcctcttgcccggcaggattgcatgacagaggaacatcatctgggacctctgaacggatgatgggattgtcaacctcaggaggctcctataaaaggttcttgaggatgatgtcctccaatgcatggtcaaaatcagatatcgacaacccctgaaggctgacaagtgctgataaggcctgcattggaatgtcactgctcctgctgcgacgactattcttgcgaattaagggaacttcttcttcctcctcctcatcctcatcaagcacacaaccgccaacccgagcatcatcacagcctctgacatcgtcctcgaggatggtgctcactgggtcatcgccgaggagtaatgtggaggggctagcatcttgctccaagcatgataaccgccaaagtcgtttcctcttcgttttctcctctttaggcacaactggatggttcgctcggcgtgatcgtttgcgacgagcacctttaggtttctgaatttcttcgtctttaccaaggttctgcccaatcgcaaccgccattggctcagtgcgggcagagtcggatgattccccagctagcatgctaagaccatcgttcatctcagcatcgtcagtattggtcagcatctcaaagtgggtttgcctcttagcctcgggaagattccggaagggagcaatgaaagcttcaatgtcctctgaggagggtcgcactctat

SEQ ID NO: 85544 - DNA, 847 bp, Zea Mays
ggcatgtaggaaaacgatatcggcttggctgtcgttattgacaaggactttgtgcaggttccaacctgcaactttgcaatttatcaccagcgcgtttgcatggggcacgctgcaaagtcgacgtctcttgcatcgaaggtaagcgggttatgtgaccactttgtctggatcacggggaccgtgagggctacatgattgacctttggtagtgttttttcttctatcgtttgttttcaaattctatgctggaccctccggtgatcatatggatgactcccctaaaaggcgagtcggcgtactcttctttctttggtggcggtgggggggggggtagtgctaatctttcttggtgttgtaggcctggttgctgggggtaagcatggttgtaattgtgttggtgctgagggtggtatggttgtttgttttggtaatgaggatatggatatggatggggttggtaggtgtgagcgatggccctatggttgtttgctagggcgactctggacatgcggtgtttgatttcctttgtttcttggcaatctttggttgggtgccctgcgtcctcattgtggaagacacaatagaacttactttgttgctaggggcgtcagcctctgcctctcgatgcgccactagtgtggccttgttgcaggtggtaatcctagcgctgagggaggcgttcgcctagttgctgttgattagcaatgttatggacttggagctactggcagcactcctggtgggggtggtcttgttgtggggccctagtccacgttcagctggactgcagagtctcctttgggtttcgctgcaactcaactttcctatggtggagctcctctaagcg

SEQ ID NO: 85545 - DNA, 739 bp, Zea Mays
ttacataatttggcccctaggttccggatcaccttggaagacatagctggtgaaccatcaaagttatgatggcacatcagacagttcctttttgggcaagaaccctatctgaacccagctctggagtctttcaggcgcttactccttagctctgattccacaatggccgagccagggacaccagaaatgttctcttcctgctcagagtttgatggttgtggatcctctgagagaacatcatctaggaatttatcctttgggtagcccttgggaattgcaaaagacagggactcaagttccggctccagcaacgttgagggaatctctgacgacaagaaggacttggaccaattaaatgattctggctgaagcaaatttgaaaggaaaaagggcgaccattttttggaatcttcactgaaatgtctgggttccccactggagcaaaataattggcccaaatcctgtaaagttgagcaggccttttcctcttcaagtgcatctgaaacactggatctggttgccactcctgagcgaacatgaagttcatttccacattgtgaaagaaatggttattattatgcccccctcctgggcttctggtggctggccatcattcacaacaagaggatccaattgaataactgggccatcaacttcttgtggcccattaataggagcagcatttaaagcaaggacagcagacacattccctggcatcacaggcccaaccacaggatgg

SEQ ID NO: 85546 - DNA, 648 bp, Zea Mays
gagcaagtccgcgagacggggcgaccgattaggtccctgccgaataagtccgcaaggcagggtaatcgatcaggtccctaccaagcaagtccatgaggcggaaacccaagtccagtgccacgagtccacatcgaccgatacaagacgcgtcaccctaggccacagccagacgtgtagacaacaggacgatggcgcaccgaggggcagctatcgacatgaccgcacctcttcaagtacgaccccgagcacaccccactccctcgaggggccgatcgaccctgttcatggaggacctcatcatcagagcttctagaatgacccgaatatcagatagtgcgcaatagatacgccataccgggtgtatgactacacacgccaatgagtgacgcaggctcgtgacgacgggcaagaccgctcgtcgcacaactgctccatattactgacctgcaggccccccacgcactactacgagggtgtcagcgggagactcgctatagggacccatatgacgagaggacgagacagtacaccatgatgaaagtacggctgcacacgaccctacggacgacgtcagaagaacaacgacacccaagggccaccagccgatcttcctcatgtagaatacaagtccctactgtaaagtccaaa

SEQ ID NO: 85547 - DNA, 339 bp, Zea Mays
gcgatagctaaccacaggagtcttcatatctttgtggtaagtgaagttgtagcaaccaaaattctcatgaagcccatcttctctggccttcgtctgataatgaagctcatgcactcggcaaaaagcttcggcattcgggtctattccttggcttcggagtgcccagatgaagacgctgagcctaacgatagcgttaggagtcagctaatgaagatagattttgtaattttccaaaacttccccaatcatctcgctcaaaggaaatctcaatcccgctctgaagaaactcctgaaaagtaccacctcatcattttctggtgtcagagtggtttcttcccc

SEQ ID NO: 85548 - DNA, 475 bp, Zea Mays
gttttggatcgtcgattgaccaatgaacgacccagattggatcggtacctaacgcttcggcctgggagattatcactgtccgttttgatcggacgggcgatactggattagccctcataaaatctccaccataggtcttcgatcggacggatcgcgctaaatactgattcgattaagtaacagtctaatcgatgccgtccgtggggaatccaacggatacctttggtccataccccttcgcctcgacatttatgctaaagagaccctacgtttttttagaaataaacccgccatccccgcggggaagacctgagtcacagggaattttatgcgttagacccccgggttatttgttttatgtgcgcagtccagaggtcagagaaaaataatgaaggattatagaaattgatttttagtatataaataattctagaaacttgtttaatctatataaaattcatatcgcgaccaaatt

SEQ ID NO: 85549 - DNA, 336 bp, Zea Mays
cgggcagtattaccacttatttgcatactatttgtccctgttgtgtgtggcgttgctgattcctccctggtacctggcccctctgggatgtaggctcgacgtgtcgagactggataccagcatacctaaaagagttggcaacggcccctaggaggcagcctcgactgagacctggacctaaacatagcttcggctagggagagttagtagtacacgcataggacccatcgtctgacattagccatcctttgatacatgcacgggacctgtaggttttagtctgggaagccaagttgtgagtctggaccccctggaccgcggttccaaatactagga

SEQ ID NO: 85550 - DNA, 759 bp, Zea Mays
gtctggcaggaggggtctaaccgttggcgtacgactgacaaggcgggcccgcttggcggtgtgtgcgcgagaggggctgccaagtggagcccacatgtcggcgccacggggtggagttgggccgtgcgggtgaggaaagcctagtgggccaaattgcgtggccgcaacccgtttaggttctaactccttttctgttttattttcttttatttctctcttttctctatttccaatttccattttcaattcagatctaaattcaaatattgtgccaaattatcttcaaatcatattgggatattagagtatcaactttagaaatataattatatatatattatttgcattttcatatcctttcttttcttctcctttttcttcaaatcctcttctcgttattattttatttttttattcatataattattgttttaaaatgcacaaacaaaatccaatatgatgcaataatttatttgtgtcttggtaatgaatgatttactcatttttagacatgagtagccacatgcgatgataaatggagatttacacatattcaaaggaaacaattcctccttttactcttccttacaatttggatattacaaatcctaccccccttaaaaagaatctcatcctcgagatttaggaaggactagggaaaagatggggaaaatctatgcgaagctcttcttctctctcccaagtagcttcatcttcaccatggtgactccattgcactttgcacatctttatcacctt

SEQ ID NO: 85551 - DNA, 765 bp, Zea Mays
atttcaacgtaacattcttttggagctagtttgagcgaaaacaagattatgagctagagagaccaaaaagtccaagaaccatgacttagaaaagttggattgtcatcgcatatgtttgtttaagtcataggaacaccctcaaagtcagtcaataagatttggagaacaactcaacaaagacgggaaaatggggttgctggacaaagcaccgggggctcaccggattgttccggtggctcattggaccgtccggacagaggacaaaaatcaagccatgcaccaagttgtgctccagtctggttcggtgcacataaactcagtttggtgttcattttactaaagaggttggtcttggaaaaatctggagatggagcatcggaccgtcctatggcacatcggatagtctaacaaggaccaatagctacatgtaaatttcagaacagtcacctgccatacaactgttcatggtccagtggcgcaccggaccgacacggttcacgattcggtgcaccactgcgcataccgcttttgtgtagatttttccaacggctattttggttgttgggggctataaatactcccacaaccatcacaatgaagacacaagacccttcccaacttactacatggtaaggacaacatcttcaagcattcaatgccacacccacgccgcatttgatcgattcatgttttgagagacatagcggctagcgcatttgagagttgcaaggtcttgtgatcatttgagctttaattgtttctcac

SEQ ID NO: 85552 - DNA, 425 bp, Zea Mays
caggaacatcaactataatggcttaatgccatggtcggatcctcaactacaatcaaataattatcatttgtgattgggacattcgtggagccaattgtaataaatggtggaggattggacttcgatgtaggaggagcaagaatcacttatttttcttagtcacatgaaattgcgtaggtgacattattgattcttgaggagttaaagtttttgatgtaatcacctgaccttgacttgcattttgttgatgatataccaatgtttttagagggtatgaaacctaaaatccgtagcccccacattggttgtgtaggaggtgaaactagaggaccccataatgcacatgtgaaacaactcattgttgcaatgtacccaccacaatatgcttggattgatcatctttattgggagaagtagactctctt

SEQ ID NO: 85553 - DNA, 308 bp, Zea Mays
caatagaagaattttccgatgtcggcgagttggtgtagccgggatgcgagacacagggaggacgtgagtgcattgtggcaagtaaaaaggagaaaaaaagagtggaaatgatacgatgccgctcttccatggaacgtaattgagacatcattcattggtatgggtttgatttgtctagcaatcgttctgccctagtaccacgaaattgagaaatcgcctaccaacaaaggactatagcattgtccaacaggaggccgacatgcatgcagcatgcccaaaataatcttcctccgggtccacgactcctg

SEQ ID NO: 85554 - DNA, 542 bp, Zea Mays
aaaaaaataatgttcagaatcttacaaatatgaaattgtttgttgagtatgcataacactaacctgtcggggtagatccttatgtttaatcctctttgtcacaacttttcttaaaactcttgtatgtctttcagaaacattacgcttcttcagagctggcatgaagtcatcttcatcagaatcaagctgtactatttcattgatcaaagtttgactgtcaacatttggaggatttccaacttctggacatggattagactgttcttcacatggaatgtcaacactgaaacactcctggcttgactgaattgttatacgtttggggttattcggaggacggtccacgtgcttcattttttaaattaaaagctgcatacatagtacacaatattgtaaaaattaatctgttggatatgcatatgtatttattgtgtggtatgattgaatcaatgaacctagttgttttaaataccaagcataaaagcacactgtataaattttgcatggcaataataatgtctcaataaacatctgaatatact

SEQ ID NO: 85555 - DNA, 338 bp, Zea Mays
gtaatggtaacgttaatgtaaataaataacagtggtatctattaccatgggaatgaaaagcgttaattgtttggatagatatggtaacgttttccattctctttgtgctgtttggatagttcggtaataaaacaacaaccagaacacatatggggtttggttgaagcgagtgaagcaaagataatatagatgaagaaaattcagaaacaacaatatagcgtttggtttggtttctaaattttctgaatcagatgaagcacattgactactagcagacctagtagcaaaatcaccgatagtgaaccacagggagaggaagaggaagaggaagacggtgg

SEQ ID NO: 85556 - DNA, 894 bp, Zea Mays
taaatctctaagtctggcagaaaaaggaaaaaggaaaagaaggatcagtatcgggctgaaaccagcccaagcggcccatcaacaggggaaatctgcatccgcgcgcgcccgcaccagtagttttgcgtagagactcctggcgatttgaaaaccccgtaaataagctgcggtactgttcacatgtttctctgacattcacaattaagcccccgcacttctctctcttctcaacgccaggtctccgatagcgaatgacgatgagcgcgccctctggcgaacttgtactggcaagaatgcgcaacggccggtgtcctaacttggtttatgccgaatttagactttggcgatctactgggacacactaattcaacccgaacaccactcaaggctcggttcacgcatacccgcagcgttggagacattcttaacgcgttcctaatgttctagcgcagtatagcttaatcgaccaggccgacaaacatcacaagcatgcctgagtattgaaacttagagaacacgaacgagagcggacctggaaatggctgaccacggcacgaggtcacacggcagcgcggaaaaccaatttgggggaatcacgaattgaggagctatggtggatgatcagaggcaagggctggtgcactgggggcgtaacaacctagcgaagctagctgaatgctcaatttatagagatcaacagcggtggcgtccaatttggggaagacgcgctggcgaccgaagagaggaataagttactggcgcgagctaccgtggcggtcactggctaatgggctacggtggtcactgattactctccatgacacgcgacgacatggtaaaacatcctaagatgtggcgcgaacgagtgaacggcggcagccgcagcaacagccg

SEQ ID NO: 85557 - DNA, 752 bp, Zea Mays
tgagtctacatcggatcgaatctgatgaactcgatctagaaacgacgatttgctacaacaaatcaaggataagaaatgcaatgtatgatgcatttagaagggtttatacatttacctaccagttcatgaattgtcaagaagaactcggaatctttgtcgtcggcgtattcgtacccttgctgcacctacacatggaagaggaagaacctaggtaagtggagcgatgaaggaaagaggggataggggtgaggatgggataaccctgggaggcaaattggagatggaagcagtaagtggcagcgtcatgtggagtgctaggaaaaccctagcgcggcgagagcgaagggctgtggatggccatctttctatggaagtggggttttggtcgattctatcctaccattgcgggtcggtttgcatgggaagcgtggtagggagaagctacaagatattatccgtgtttggcatgacaaaggggcttcgggccactagaatccgcaaataagcggatccaaatagagccttgtatgattgtctgcatagatatacactgtatgtaaactagatatactagacatccgaaagttcagccctgcataatgctttgccatgtaagtatgtacattaattgtctagatagatatacactagacattgtatgattgtctgtatagatatacactgtatatagactagatacactagacatttgtatggactagcttactgaacttacactgtgtagatataca

SEQ ID NO: 85558 - DNA, 466 bp, Zea Mays
gcgcaaaccaaaactaacatccaaaatctaccactgaaactgagaacaacaactgaaccacacatgtacaagcctcggcttaaacctcaaaccactgccacatacagctagctaatccacgccagtggcatctggcaactcgatatcggggatgaaaaacaaaatgctacttgcgtctggaaaagctaactcctcccaaccttcctctcttttgtttcatcactttgcatcttcagaaaagccctagacatgttcattcgtcttgtggatggaaatatgaaacagcaccgttgcctgatctgtccttgtgtaaacctaagagataaatggacatgccaggcaaatgacctcagtaggagatctaactaatttgttttccaaaacaaacattattcgttggtttccaaaaggcctagcaatggcaacaaagcctaaccatgtaaaactgctttctggtttactgtca

SEQ ID NO: 85559 - DNA, 568 bp, Zea Mays
gtgagtcttccttgttgttgtcccatgcttagctctaagaaaggcttttaaaagtatgctttattcatcgctgcctaaaagggttacaaaatgggcacagatctgctttggtcggatgcctactatgggccctctccggaagtgttacgtccgatgacccctccgactcctaccatgcatggcgcctcctgtgctggtatcaccgatgggaccgcagcagttgggtggtcttcactctcctcgccgcaatgaggttcttactcggtgctcccagaaggacctagatctaagtccgagtccatgcaaagcgtgtcgaagatgaggtccctgctacatcggccatccctatgaactccaggtcatcgaaggtagggaggtggcacgggccaccagggcagcgatcaccactagggtgtgatgcaatcgaggcgggaaggcaccaaagctgatgtagtaggatgacatttccttgtcatacgatgcggagggctctgcgtaatatgcaaagaaaattgacagatcgtcagactaggggtttggccccatatgaatcatgatacgttgcctt

SEQ ID NO: 85560 - DNA, 670 bp, Zea Mays
agttactactatgcatatgccaaatttctttttcaaccaagttattttattcattacaccagttcattacaagcatacagttatcacaagttgcactacacacgagcgctttctaaggtacttccgaactccttttctaaggtctccccaaattccttgagaaggtcatcaaggctagctagggacatatcctcgacgccggacaaattctctatcctggagagaggtggagctggaggggctttcttcttccgttcagtctggcatccttggctcttggtcttcttttggattttcttcgtgggggcgagcttctttagcttctttttgtaatccatctttagggttcggtaggcttcacgagtgttggcttcttcgccttctgctatatcgagacactcttggagggatgccttctcctttttaagttccttgacctgctgctctaagctttccacctgagagtttaggtgggtgtagtgggaggaaaggtcatcgtagtggttattgagagtgtggagatatctggccatgtagacgatggtggggtcatctttggtaggatctcttcctgacagggcctgaagtcttttcctccaggtaggggtatttttgttgctaggtgggaagtaacgaaggggggtttcaaaaacctctttgttgttgtttt

SEQ ID NO: 85561 - DNA, 1008 bp, Zea Mays
aacaggtttgtttcgctggggaagaggtgattccaaagccaaaaatgatgaagttgtagtctttataatcttcttcaggaaagagttttgaagaagtttgaaatttacgagatgatcatgaggttttgaagaagtttgaaatttacatacatcagctaaccccaatgccatagttagacttagtgtgtacatttgggctcttcaaagacaaggaaagagtgccaatgctaaagggttttgtcgggtgcatgaactccattatcagacaaaggctgggtccgatggtctgcacaagaactttggctgctaaaactttgcatacagaaaagacaccaaggctcctgtgattggttaccacactaagtggccgactgggtcgataaatgaatggttttacatgaaggttgacaagaagaagagggagaaacttatgagtatggtgataagtcccttaaaattgagctttggcatgactcgacccttgtgcaacatgtagttgggatccccctgccagctggccgaagtggaatttagagtcatggcagaacatattagcactaggaacttggtgcagaatatttggcaaacagaacgtttccaatttctagtgggtggggatgccgaagaaaaggcaagaagggaaaaagtatgaacttgtacgacttccttatcagtttaaattccaaaaaagattcagcaaaccctgcactgaatggttggagctaatagaaacaatgtgcaatgaaattcttggaaactacatgaagatagaagatcagttgatgatagctgccttcggcatccatgaaaaacgaaggttgaatcgggtgatggatgctcttaactttgaatatccagattacaacagtcttgaagaaggggccaggggagcaaagagaaagagggttgtaagtaaactgaaaaggcaggctatccggtccgtcaaagaagatcagagagttgttaaaaagcagaaagttctagcggagtcgaaggattcggctccca

SEQ ID NO: 85562 - DNA, 275 bp, Zea Mays
aaaggacaggattacccgaaggaaaactctcaagttttacaagatacagtggaaccaacacacagaagaggaagctacttgggaaactcaagactttttagataagaatttcctaggctttttagcttcatgtaaattgtaagatatgtacatttgttgtaataaaggaatgaaccccataccacccctaccttgtaccaaaaataaggaaataaaaatatgacacgtttccttttccattacttgccctaggacttttaatctcgggacgagat

SEQ ID NO: 85563 - DNA, 391 bp, Zea Mays
attcggccttgtagattacggtaggttcatcctcattatgctttcttcacgacaaagcttggagtcttttcctccaagcaaggttattttgttgctgggtgggaagtagcgaaggggtgtctcagcgacttctttgttgtagttttggcatagttggcagagggcttttagggcagcattttggcatgagtcttagaagtggcggccagtggtggtgatcttgaaagttgggtggtttgggtagcttcggctttcccctaggtagactgccatgtagcacttctcaactccattctctcggtattccttccagacatactccgacttcttgcgaactcccaggagaagcgcacaactccgaagaaggtaagggaatcctcctacctccgag

SEQ ID NO: 85564 - DNA, 425 bp, Zea Mays
aatttgtatcttaacctaaactttaccctacacatgagatacatccatttcgtaattacaaacgtaactacatcaccacatgaaacgaagcatttcaacagtcacctaatacaatcacaacatcgcgactaatacctctagccaatccattcttcaaaccaactaacaaattaataaatcatctcaccaccttttgtcgagcacctggcgagcgtcacactagtctgcttttttctccactcagcctcctgagatttctctgctgcactaccatgtgacaggcagacgaagcgagagaaacgcgtgagcccacaagaaggaagaacgtcgagcatggtgggttgctagtcatgagaagtagggtgggggtagatgactccacgatgacatggcgagcgtgacgaagtcggaggggaggctattgg

SEQ ID NO: 85565 - DNA, 681 bp, Zea Mays
cttaattgtagtaattttgtataaacctgcatacaacacacatgtcataaaagcacacgtatgcatctttagcaaccataaaaaaatttagtatgttttgaatgtttcaaatttaatttcaaaataatcttaattttgagcatatactttcttaaggaggtttgaatttcacttgtacatgcatgctacagattacatgacaaaacaccagctctaaaatcgtgaataagcaaggtaatgttgctcgggattcccacttgtcatcaagcctcgtgttatattccatacttctattgccaacgtttaatcatgtttctttatctgctaagactaagatgcattttattagttaaattagctaggtgaaagacattgcctaaacccactaatcttgcaagtaggacttccccaccactactgaatgttaccatcactaagtatagctaagcatattatcggcaatccttcttaggtgcgggctctcgaccatcattgtccttaaattaagcttacattggatttctgataattatagtaagataacttatatggtcgatattccataagcactataattagcataccagttgatccaaaatagagttcatagacatagatataggtgctttccttttatgatgacatcatgtcctttcgtcatcatgggtatttgacatctct

SEQ ID NO: 85566 - DNA, 452 bp, Zea Mays
ctcgtctcgcccgagggcccctcttcatggaagagttatttccgcctcatcgagcgcgtcttggacaagaggatagccccgagcccagcctcagtcagaggtcacgggaaccgtgcagacgtgcgcattaaatgcgatgatttggacatctatcccacatgatgtcgcagtcaaacagggagcgatgggaccacggtctcatccactttcagcaactacgatgacgcatgcctgagaaaaacaggcgttgctccccccacgtcgtctattgtactcgaacaaccctggatggctggatgggacgtacgcacgtctgggcacggcctcacactcgggagggaactttgcctcacctgaagacggcctcagccttgggagaagacttcgtctcgtccgagctcggcttcggtcaactgtcctggcaacaactccccataaatcccgcaggaggc

SEQ ID NO: 85567 - DNA, 334 bp, Zea Mays
cctcagtccatcgtgccaagccatctattttgacctcactacctcaatggtccatcacgtcccgagcctcttgcacgcccttcaccttgctttgaacatggtttttcctggccaagtgttgctttggtcttcatattttttgttatgctcaattttagttttcgaacatactaacagtcaaattcatgtcaatgtctgtctcatcttgtgaattaaaccaactttccttcatacactaaaatataaaggttagtctacaagtattatcattaattaccaaaaccaaagcaagggctagatcttccaatgtgctcagttacccttatgacctcac

SEQ ID NO: 85568 - DNA, 400 bp, Zea Mays
tttctccatctccaatcagcatgactgcaaggcagtggccatgatgagtgcacaagcccacgtggacacaataggggccaagatgagtgatgagcagatggctctggctcgctcgctactctccacatccaggggtgtccaggaggtcccgaggagtggtgggctgatgacaacaatcggcacgctagcctctgcagtcgcacagtcaatttcagggccagtggacatctcccttgtttggaccacctagacaacaggcatgcaggcagccaaaggtaagcataccggcctgcatggtgagcttggtacctttcctgttcagctctcgaaggttcttctgatctgagtttggggtctcatacattttcttaccttaatttgcttaccacgtgttcttttt

SEQ ID NO: 85569 - DNA, 643 bp, Zea Mays
cgaatatttatgtgctgagtctgtgtactggctttgagcatctggcaatttgcggtctctaggcaacttccatgtgactttacttgcttgtatttaggaggatcgcccaacaaggtcagagccaacactaccttttagtactagttgtgaccaaagtaaccgtgcttttatcttcctttatttttgtttttttttgtccaaccctttacagcaatattttagtagttgtaaacaataatttcgcagtgctcgtctcttaggtgtaactgttgtcaatcaactgtttcccagctgactagtcagtaatttgtctaattccctcgacttcataccaggccgaacaataacccaactgttcttcaatttggcagcctgctgtatcatgtttgtcttgttttgttccttggatagattatcggtctagtgttctgaattcttcattgctttgccattggaacgcagaattaattcatctagttgagtcccatgcatgtgtctggttgctacaatcagaaatgcataggccctcaaagtccaataacaaacgtgtagtgggctggtaatgatgtttttttcattgatcccgaattctcgtcaaatagtgaaaatcggcttaattatgaggcaggagattgcttactgt

SEQ ID NO: 85570 - DNA, 425 bp, Zea Mays
ggagtcgattgcgtaagtgattgtgatatatatgttgtgtctcggattgcgataataataggcaagccgatgtgtatggtgtatagcggcctaggttgttgctctcataaatcaacttgttagatggctttggttaagctcgtagtcacgatgatttgcttgttgtagtctagatgcgcatggttatggtcgcaggtaaaaattagtagtgctcatgtggtgtctaagctaaaatgagaactagtgggtgaaaagcgctttgatatacatatatgccggatttgatgattgtggtgaatgcgtggattaattgtgtatggtagttctagcgcacgaaataacttgtataaaaatttgtaagtctgcttgttagtcctcatttgattaatttaactctaacgaatggtaaggtgttagaataattc

SEQ ID NO: 85571 - DNA, 750 bp, Zea Mays
ggggccaaagttgaggactttctctttttgggagccgaaagcttcagatccgctgaattttttgtttcttggaagcagccctctgtttgtctttttcaatttatcgcattgcttgccttttcaaaatgcttacaattctctttttctttgctcccccagcttcttcatcaagcctttcatagtccggatactcaaagccaagggtgtccattacccggttcagccttcgtttctgccgagtaccgaaggcagctgtcatcaattgatcctttttcttcgtatagttcccaaggatctcattgcacattttctctatcatttccaaccattaggcacagcggtcgctgaaagtgttctaaaacttgaaccggtatggcaatcgaacaagctcaaattttttcccttcttccatcttctccggcattccccatccaccaaatgttggaaaggttttgttagccagatattcttccaccaaatctcgagtacaaatgtgctctgtcacaactctaaattccacttgggccaattggcatggggagccgagctacatgttacacaatggcctcgtcataccgaagcttaatttcaagggactcattaccatgctcataagttttcccttttcttctcatcagcttttacataaaatcattcatttgtacaaccgataggccacttggtgcgatagacaatcgctggagcctttgtgtctttccggtatgcgaaattgtagcatccgaagttttt

SEQ ID NO: 85572 - DNA, 291 bp, Zea Mays
tcagctatttgaggatttctggtccagtttttgcatccagattcctgacgcttcgactgcgggaggctgatagatatacatatatagtaagtgtatattaggcaagttcatattaggcaagtccacaatcagtgtgattagcacatgccatgtattgtgattggcacctaccatgtacactcagcctgccatgtattgtgattggcacctgccatgtacactcagccacattggctatatatatgaatgtcaccacctcactgtggtgtgtggtgttttatccaatcttcc

SEQ ID NO: 85573 - DNA, 618 bp, Zea Mays
cttgtgttagtattttctgacccttgtgtgttttacccttgaagttaaacctgcacagcttatagatcccatggtttgacccctaaatcgactaaagcttccttatgtcaaaaaaattggtttactgtctgttcacgcaaaccatgtctagcctcgaattctttttggaaactttgtccaaaatccttattaaattctcctctgctcaaccaagaagccatttgagttgatgatctctcttttcgcctggatctagtaatattttcctttgcgaatcatgttgtggccttatcatccgaatctctggatctttcattgattctgctccattatctggttatctgctataacctgttctcatgtatcaaatgtggatcagtctaatatctcaatacgatcgttctcatactcttctctgaggatcatgacgctgttttatcgattttttttctctagacagtgtgtccattaggttcaatggatgttgctgttgtcttggttccctcgtgtctctgagaagctcagtaatcatgatctcttgagtgcttccttctcgtatcccatctcgtactaatctctggcctggtaatctccgtgttgatcataaaatagttctct

SEQ ID NO: 85574 - DNA, 311 bp, Zea Mays
tgaagactaccaaggtacattatggcatggtgtagatagcacgaaagggttcgctatcactagaggtcgctccaaggacattgctaccctaagaggagtagaggactggtggcaacggaacaagaagcccaatggaatcccagacattactaccctcagaggaccggtggtaatgaaacaagaaacccaaagcaaaccccttgtagtagaatagttcctggtgccttccatttctaggagaagatttgcatatgcttcttttgcctccctagttgggccacccttaccctcatcttctgctccgttatcca

SEQ ID NO: 85575 - DNA, 615 bp, Zea Mays
ctagccaacggcgaagagtgatgcagccgagttagtccagaggtgtgaagcctgccagtacttatcaaaacagcagcatctactagcacaacaactgcaaaccatacctgtaacctggccattcgcgtgctggggactggatatgattggacctttcaagaaagctcaaggaggatacactcatgtactggttgctatcgacaaattcactaaatggatagagttcaaacccattgcttctctaacttcagctaaagcagtggaattcatacaagacataatattcaggttcgggataccgaatagtatcataaccgacctaggatccaatttcacaagctcagagttcttcgatttctgcaaacaaaaaagcattcagatcaaatacgcctcggtggcacacccaagagccaacgggcaagtagagagagccaacgggatgatattggatgcgctcagaaagaaagttttcgacaagaatgaaaagttcgcaggaaagtggatcagagagctgtcgtatgttgtttggagcctgagaactcaacctagccgagctctgcatggaaacactcctttctttatggtctatggttcgaaggcagtgctacccgctga

SEQ ID NO: 85576 - DNA, 439 bp, Zea Mays
ataagacactaccaagtgcacaccggacagtctgcacagaggcagagcaagccgaggccaagccggagcaccggactatctggtgagcctaaactgagggtattttgaatttttttctaagaacatttgtgccaaaccaaatcaaacttataagcacacaaaataacacctattgagacagatattggcaccctcacatattctctcatagttttcaaaatattttgccataggctatgtagtttttagaaaaatgagcaattggtgagagttggcatttgtgagttacactaggggtttcaagtatgaattgagttgtgaatattccctctaagtgtagtaacacatgcatatctcaagaaccaatatttgcataataaagaacatttaagcacgagaaaagctaaaaagatagagcttgtcaaatttgagcctgagt

SEQ ID NO: 85577 - DNA, 860 bp, Zea Mays
acttagggtgaccactataccctactaacagagcaatcggcttaagtcggcgatgacttaagacggtgcaacatgctcacgcttactcgacttagggtgaccactataccctactaacggagcaattggcttaagtcggcgatgacttaagatggtgcaacatgctcacgcttactcgacttagggtgaccactataccctactaatgaagcaattagcttaagtcggcaatgacttaagacggtgcaacatgctcatgcttactcgacttagggtgaccactataccctactaacggatcaatcagcttaagtcggcgatgacttaagacggtgcaacatgctcatgcttactgaacttagggtgaccactataccctactaatggagcaatcggcttaagtcgacgatgacttaagacagtgcaacacgctcacgcttactcgacttagggtgaccactataccctactaacgaagcaatcggcttaagtcggcgatgacttaagacggtgcaacatgctcacaactactcgtcttagggcgacctctatgccttatcagccgagcaattggaataaatcaagaaaagactccaaaaccagcacgacacacttacttccgcaattgttcaggatgactgttgaattctaacaacagaaacaaaatgttatagtttttagcaccaaggacacattctagtaccctatccaccgagtacccgagcacaatgatcacgcacacatatagttcacaaatgcattcagtatcttcgaaacacatcgctacggcgaaacatctctatttggcaatgtctttcgcaggggcgattgaggaagaagggtgactcgaggcatcaggc

SEQ ID NO: 85578 - DNA, 826 bp, Zea Mays
gttgtattgagataataagttataagtgttgcgtgatatgagactcgatcgatgtagttaatattgaattggcctgtagagaggtggtgacatgctgaagtagtcatcgcttcctctacggttaagtcggagtcctgcgtgatgatgttatttatgggggtgaatgcgtattgaaatattttatgttgtgcaatatgattaggaagatgaaggatagatatgttgtttcggaaatgttagccaatagattcggacaggcgtgatagaggttgagtcacttatgttataaaattgatgctcgacatgttaggtctcctaaaatgtggtgttttaggtgacttgtgtgttatcccattttaagttgagaaaatgtttaagagaagctaattaatttgctcccacccatgttttgagtcgcaatgactaaaatgggttgaatgaacttgagatgtattacaatagctgtgtgtcgtgccggtcatccaaaaatggcgaaaggtggtgtgtgatagtaattgggaaatagtcacgacattagccaactcatgtcaggtaggagttgattgtgttaagtgattgttatatatgtcgtgtcacgaattatgataataataggcaagccggcgtgtatgctgtctagcgggctgtgtcgttgctctagctagccgactcgttagatgactttagttaagcttgtagtcactttaaattacttgttgtagtctaaatgcacatggttatgatcgcgggtaaaaatctatagtgctcatgtggtgtgtaaattaaaatacgaactagtgggtgaaaagcgcgttgatatgcatat

SEQ ID NO: 85579 - DNA, 1088 bp, Zea Mays
caaaaatgctccaatcgatcccaaatttttcaggcaccttcacgatacctccagtaacatattcgcaaaatctcacgccaatccaatatcccaggtttcaattttacagaaatccccatttttagcaatcgattccgagccgagtgcccaaattccactttcttcgcctaaaatctaaccaagcacacacttcactcatatgtacccatataaacctattcgtgaagtatcggctcaattccaagtcatttcatgcctcatttccaatttcaaacctcctatggcactattcctcgttcaaacgccctttttcgcgtcgtttgacctctctttcgccaaatcactcaatttctgtgccataactctctgtgtatgtatttattcacatttcatataattatgactatgtgactaatatgtgctcaccacttctgtcatttcagtgatctcgcctgcctgtgagctgtctcctgtcctgcctggattctcttcctctctcatgagatttccaggtagttatccattcttttgttatcctatcggctgctatcttctcgtgcttagtttttctcgctcacatgcagacttcaggtcaggatggtgcgcacgaagaatgtgttagcgccagggggaggagacgacgaggaccctcctcgccccttcaggcaggtcaaggggaagactatctatttggagcagcaggaaggccgcaagaagcagcttttggatagagcagcccaagcagctctagccacagcagcagtagctgagcaggcagagagaggtggtcagctgcagatatcatcagatcatattgcttaccgagtttgtcgactcgcctctcggcctcgctcctccgctccatccactcccgccactgctaccactccacctcccacttcacccgctccagtcactcctgcgccatccaccacctcagccatacctaccacctctaccactcctgcttccactgctcctcctcccgctcccctttccgctccacccattccacctgcccgctttcgggagcgagatgagactgaggtgcgaccactggttgccgatcctagattgatcaatcctca

SEQ ID NO: 85580 - DNA, 305 bp, Zea Mays
gaggttttacatggacaaagcaaatcagcagctaatcataacagtgctgattggttgatgagttcgaataaatttctctgtatcccatgaacagcaaaggcacctctgttagtatgagggacactttgtgcttttagactagaaatactatactgataatgttgttgacaagcttggcgataacgatcctgcgtactttagtctgctccttttggtagttaacttttatcatgtggatccgggaagaacagtgcattaatttgtgtcggtgatgtagatcttagaagtacacactactttgcaac

SEQ ID NO: 85581 - DNA, 550 bp, Zea Mays
cggtatgatcgacaacctgcaaagccagaaatgcagccatgtgaagcaaagcaactgccacgccttctgtgctcaacttcaggttaaaacaagacggggaatccctcgttgtttcagtaaacattaggttgcatagaataaatttatccgcaaataaataacagaacagtaaagccacaggatttcgtttcatatcatataaggatttcacagccttaggagacactggtaacgagtcagttggtaacgatgatattttattaaccaatctgtcgaatcaattgttatagtcgattgccgggcttctatattcataatatttacaaaatatccattctttgttgaatacaagtggttgtgagctctattggttagaatctaggcgtgcgagggtggagggagaccttttgaaccccaatgccacgcagtgctttgctcgttggacatttattttttccttttatttcgctggctgcgctcgttggaggagacaacgcacgaagcgagaaacttccatttaaatatagtagagatttgcacgtgtataaac

SEQ ID NO: 85582 - DNA, 915 bp, Zea Mays
tcaggctcaacgtgcacgcgcgggagttcgtcccggtggccagccctttggcggcggccgccgccggcggcggctactattctccgttcgtgcagctttccggcgatggcgggctgggcacggactggatgaacttctttgccgagccggaccccacgtcgccgtcgtccttcctgccggactttggacactgcgacatcctcagagctaccggcggcatcaatggctaccctaaccccaaaggcggcgcaagtgtggccgacatcgcagataagattgtcaagcaggttcggaacctcctcgcttaattattctgctgtttccggtgcacattactcgcgtcgcttgacgccgagtcaccgtcgcgtagaactgtagatctctgggaaaaaaaaaccggaaacgccgagagcgcatgctgctgcaggtgatcttctctgctctaatctaacagatcagggagccgcatgatctttggttccctcatcctgaacttcttcaatgatgcagacatttatttatcacaacttaactagtgacgtttttatttcagtgataattctcgtgattctcggatctacgttgtagatcatgcgctgttggacgtttttgatttgttttgtttttgcttttgggttttacagtggttgttgcccttatagtttcattgttctcacctttgtgcatgcaggtcgagtaccaattcagtgacacgaacttggttgcgaacgattttctgacaaagatcatgaacaaggatcccgagggctatggtacttaaaaaatgcagcaactttttatcgtacacaacaataaagaaaagagcctagagatctagaactgatgatgaaattttctatcttccattaaaacttgcggtggaaactaaatggtgtccaaccgttacgttttgtg

SEQ ID NO: 85583 - DNA, 709 bp, Zea Mays
gtaacttcgtatatatcgaatgttgaagaccgtcgtagcggtctttttcgacacttatggtaatgatgtatggagtttttttgtgggggcttttcgttggtatattacatggcgccgcctcgttaaaaatgtcaccccccgggaggaaaagagtgcgggcctaaataacattgtttgaagaattacaaaggcgcttgggccttgggtcttaaatgaaaatttttcggagattatcgatgttccatgagtgttctaagtgttcgccggatgacgttgctagcctgtaagcactaggggatgcctttgtcttgactatgtacgacccttcccacgtcggctctagcttgccccgggactctgttcggatggtccttatgagtacgaggtccccttcgctgaattctcttgggacgactatgttgtcacaccatgctttggtctagacctgatacttgttgagggcctgcagggcaaggacacggtctccgtcgatgagatctttggaagttggttcgtcgacttcggggacgactaacttgtttgttcggggggtccgtgttttaattcttgcggcgtcattgcttcagatccatacatcaagtggaagggtgtgaacccggttgctcggcactctgtcgtattcagggcccatacaacttcaggtaattggtcggcccatttgccctttttgtcgtcaaggatccttttc

SEQ ID NO: 85584 - DNA, 551 bp, Zea Mays
gggcgaactcagtgggccaggtattattggcaatttcgtagcagaggatcccgcccatggcgtgctgcggcccgccattgcgctccatcgtcggcgaactcagacccgccgctatatcgcactaaactctcgacgccgagaacctacgcgaagaggaaatcatagcgtaacaacggaagaaggcctcaccggggttagtgacgcgaagacgcccgtccacgatgcagcacggttccgcgacaggatcacaactccggtgagaaatcaacggcgcgccaactgatcttgagctcagagcttccccccgcacgacttccccatgcattccgcttccactccgacagctgccgagggtggaccggcaaccccgacgggaatcgaccgcagcggatccaaggcgaaagagcgctccgatcagcaatccgtgcgacccagtgacaatacagagctccaattcgcctgatacacgaactatggtgtggtacgaagctctcggacaagccccaggcacccactgacggcgggcgcgcgggatggatgtggcggcgtac

SEQ ID NO: 85585 - DNA, 679 bp, Zea Mays
gaaaagccgtcatcaaagtgtagtctgcagaagttaagtaaaacctctggcttttttagttctactggctttgtttgtcagtcggttgacttaacagacttaacttttctgaaatggtaaccttggtaaattgttaaaaaatgtttatccatacccctaggtgaaggccattttttgtgatgttcatttgtctgatgatatttgggatgatcaatgcttctaagatctaattagggtccccttgcccaatggtgtgcgtgcctccgatgctcacaaggtttggagcagtgacttttcaaaatcctatggtgtggtgcttcattctacatttggcttttgtatctcaatatatcttattataatatattgactccatagcaacacactgacatacacataacacacatcattgtaaaagtttggaacatgtttgaataattatcttattttaaaaagtatgtctatatgatatatagaaatcatagcaacacatggacaattaactaggcgtgcacacctgcgatactatggatatcatattaagactcaaaagtaggagtgcacacccgcgataccgtgccccccttgacaccccttgcccccgttcctcgtggcttcggcgccgcgaccattgccacccctgcccccgcaccccctaaggatttatatgatctccgta

SEQ ID NO: 85586 - DNA, 529 bp, Zea Mays
ctgagacgagaggcgtacgtacgtagagaaagaaggtgggcaacgtgtccatgtccaaaaacttgtgtgcagctagctagctgctgcaacaacacacccaatgaaaaaagatctagagagagaatctgatgctagctgggtatacaaactgaatcttggaaggtccgatgtagctatacgtacgagcgagagagctggtcatgcatgtacgtacgtagataaacgtagtagctgcgagcctccaaaagcgttcgttgctttcgacccccttcaattgattcgagcgacgacgacgacgtcgtcgtagtcgtcctcccctttccaacccaaccgaatcattcacatcctctccttcgttacacaaggaataatcacaattcgctgctgatcgagcagctcagattctcggagctccactcctccctgtatgccaagaacaaatgcatcacgtacgtctgccaaagctaaagctctacaacgacaaataaaacctgcacagtgtctatttacaattctcacttctggatat

SEQ ID NO: 85587 - DNA, 380 bp, Zea Mays
ggtctcagctgtagacaagtcaccgagcgacactgcgtttggccggaaccaggtcaccgatcatgatccgggggcgtcgttggagttggagaagcagccggtgtccggaaaggcagctgcaccggcaaagcggctggacgagcagcagcagcagcatcagtctttctcgttcctagagagcgtcgtccctggggttgcttttcatgcccgggctaatgctagcggcgaaacggggcccaggacctcgccgcaactgaccagatcgctgtcgcagagggatggcgtgggcaaggcaaaagccggtgctgacaaggttttagaaattgcgcctccatgtttaatggataaaccacaatatagcatgttgtgttaagtagcag

SEQ ID NO: 85588 - DNA, 352 bp, Zea Mays
caccggggtctctacagtgacccatacatcggaagaatgagacagcgtgccataccgagtgtgcgcctacgcacgctggtaggtgacgaagggcccatgacgacaggagaagccacgcccgatacgagcacactttgagactgatccgtggaacccattacgaagacatcagtgatgaactcgctacaagagctagagcagcgggaaaggacgatgtcatgccaggagtactgctacgcatgaacctacgaaggactacccacaccaacccaaggagcagatctctctctgtctttctctctccagtagaatacaagtcccactataaggtcctacccttgagatataaaag

SEQ ID NO: 85589 - DNA, 513 bp, Zea Mays
ggtcatcggatcggaatttagaactcgagcatcgttcgtcgacgacgcagggcgcctcgaggttagtcgattcttcaaccaggattcacagcgggtgcgtggcggatagctcgctgtggcgagtagaaattttcccttccgctaactaagctgaagtactactgatcatcagtagttagtgaccgagctggcgtacgtgaaaaacatatctaatccgcccggttgattaagcagattagttaaccaaacgaacgtgcggccgggtaggtagctatagcaggaagtacagatcacatttggtttcaagaagggttcagcaatagtagagtcgccaagcaaaaaaatgaaacaaaacacagcctaattaacgtgcccatggttgtatacccgcagttcgggtgtagtgttagattattgaatctaggtcctaacaatttgcagagaaggcctcgagttctaagatttagtacccaccatccttcttcatagaaatacatataaaataaattaatt

SEQ ID NO: 85590 - DNA, 517 bp, Zea Mays
cataattggtctctataatacattgggcttgatgtgttaatttgtcaaagggtggaacatagaaagttaacaaagaaagctgagactaaaggggagaatgttaaatgtgtccttggacttagtcaagagaccgatttggggtcaaccacgtgccctgattaggggcacacacctttctatggttgtggccctcagttatagacgatataaaaatcaaggtaggatcgacacgaaagccaacatttatgccaaccctagatgccacatgagaacgattctaatctacctcctagtgccctagtgaccagaaacacacgcaatttccctaatggttcccatagacactaacggatttacatcagtgactattaatgttagcttgctcatggtcctaacatacaagaaggaaagactcaacaagagggatgcactcaagtcctagagacgacgtcggcgccatccactactatggtcagcatccatcttggactcgatggtatggttgtctttctatctc

SEQ ID NO: 85591 - DNA, 799 bp, Zea Mays
atgatcatccctatgtttagtccatctgttcttgcattgcattggcgcaagttgtttttttccttttgtgtttatctattgctgtggggtttttttacgctgtcctgttcatgcgatggttggccattgaagagtattgagcccaccggatctgtatacgtgaatctgcgtgaagtatacgaaagggcggtgaatgatctctctggacactatttttctctgtttgcttgagaacgcgtcacatagtcacatgtggtgtttctgaattttcttcagcgacgacgccgctgttggcgcagcccctcaggacgtcttgggtcttggctggcggtgtcggcggagctcagctacaagaagatgacgtagttccctgggtcgcttgataagcagatgaacttggagctccgacgatgagttgcgaaagcccgctatcttcacaacatctctcccggcatgtatcggtatagatctattggcccaaataggcccatatgcccgctatcttcgaaggcaagaatttgatggagccaataaacatcgagttgcatgctgacctgctgctatactttccattagaagacaatttccaagtaaattgatctgggatatatggctataaaatggtgtcctctaccagttgccaaattattagaattctgttataacctgcactgagagagatccttggatatcctcaacctatcttctgtttaatagccctgactcactgtacgccgactggttattctcttgcgtactgcagaaaaatggtttgggggctatgctagccacactgctg

SEQ ID NO: 85592 - DNA, 455 bp, Zea Mays
tatttccaccttaaaaatcattttctacttacttttactggattttctaattctccggactgggcgcacaaaaccagagaagcacaaggtttaatctataagatttcctagactcagaattcactgtgcaggatggtgggctatttctcctattttaagggggtctttagcaaaacttatggccgaaagggtatgggcggatgagagctgttggatcacgattgagcgatgtggattagattgagacttcattaacgtggtgtgatctagcagcccttggatcagggatccacggtcagagactaacgtgtccccaaaaccgtccgatatgaattgaatggcccgatcctcgtcttccagctcctgacctaatcctagccgttccttagactatcgacggtcctggcaccttctcttcccctggccacgcatcgcgatggcactcaacagcccgc

SEQ ID NO: 85593 - DNA, 506 bp, Zea Mays
ttacaaatatctacgcgccctgcactccgcatgggaaaattgaattcatcaattggttctccaatataaatatgccctctgataagctttggctgattgttggggacttcaatcttactcgtagaccggaaaacagaaatattgctaggggagaccttaacctgatgttgaagtttaaggaggcaattagccagctagacctgatggaaatccccctccatggtctttcctttacctggtcgaataagcaaagggagccccttcttcaacgacctgattggttttttatctcgcaagaatggtcggtaatttacccagaaactcgcgcaacaacgttgcctcgggatatctctgaccatgtgccatgtctggtttctttcaagtcaaagatccctaggcctaagatttttaggtttgaaaatttctggctgcaatttgaagggtttatgtccgcctttcaaaatacttggattggtcagccaaaccttattgacaaagcgaagaac

SEQ ID NO: 85594 - DNA, 462 bp, Zea Mays
aaagaattggaggacatggtggaagggatggtggaggtggtggtggtgatagaggaggtgatggtggaggtggaggaggtgaggaaggtggaggtgacagtgatgaaataggaataggggagaatagtggagacgagggggtaggaataggtgaaaccaagtggaggaaataaacaaattcagaggaagtgtaagaagaggacaaaacagtaggaaagaaaggacgtgactcatcaaaggtcacatcccgatatactcgaatgcgacgagcgacaggctcctaacaacgatatcccttacactcagagtcatatccaaggaaaacacaccggatagattgtgcagtgagcttggtcctctcacgaggctgaagaaggacaaatgcaagacaaccaaaagcatgaaggtgactatactgcgatagtcgactaaagagacgctcaagaggagtgacaccatgaa

SEQ ID NO: 85595 - DNA, 351 bp, Zea Mays
tacaatatctaatgtatcgttggagcatttctgtggtcattgtggtgttaaacctaacaagtatacttggttttttactatggcgcacattgttcttgactctttgttctgctgcacattctctcttctacatcggttcctttgagttgcacattatccctggtatcttttcttggtacttgatttaaatttcgaacactggagtgccccattttgtacaaatgatggttggctaaggtctgaggcgattttaaaaatattcattttctttggattttaggtatgcctgatatgttgtgttttgtggtcgcaaaacttgtacgtataaggactaggcagagtgcaatgagc

SEQ ID NO: 85596 - DNA, 518 bp, Zea Mays
aataacaagaaatttgactagaccccctatatgcatgagtacgaataatagtttattctaagcatatcaaattaaaatgaatcatgtgcatattagatgggggttagataaatcacaagtgattttagtctatataaggagtggagaaagcatgtgaaagatattaaaagtataaaaaacaaaattgatgatactaaatgaactagatacatatatgataccaaactttgaatttcttgaagttgaatcacattgtgcttcctttcgataagaagaaatataacatccaaagttgttgtgaaggcaatccataccaactgtcttcgtttgatagtgtaactcatggatctgatagacgcattctgcaattggctctataccttggctttgtacagcccaaataaagaccatgggcctcatgatcgcattaggggtaagatggtgcagatatatgttaaacctttttagcactcccaccaccatcttaagcggcagaaaccaaagcccaactttcagaa

SEQ ID NO: 85597 - DNA, 639 bp, Zea Mays
atacgaaatcgtacgagcgaggagtggtcgaggttattttgaatctggaacatagatgctcgatccaatggccgctgcgttgtaccgattcaatcgtggttggatctaatcaggaccgtagggttttaatccgacgaccgagaaacattcataccccttcacccgtaccactttgcatatgggtccttatgtttccccaaaaacaacccgcagtccacattattaagtaaaccgttacgcaggggtcctggattttacaggattgacccgggaatatttccaaataatgcccgaagtccaactaaatttcagaatgagtaaaataataccgaaaaggtttttctagtataagaataattctagaatcttgtttaattcataagtaattcactttatttcctttttaatccattccagttgtaacacccctagtgttactatcactaaaacttgagcataacatcatgagcattggcatatcatgtgtttgttacacctagagtgcattcactaggcaaaaatttcaaataagttgtaatgatgtgatttgatgtgtgatttaccctagggtagagtgcttaaccctaaattagggcttatggatgtaagtgaagcccaaataagtaaaaacctgaaaag

SEQ ID NO: 85598 - DNA, 703 bp, Zea Mays
gtcgtggctaccgtcactcgttggatgaacggttcagattaggtaaaccacgtaccgcttcgaggaatggatctgggccgtgggttggatcgaacggtccctggtcaatctcgcccacttaaaaaaatgtcacccgtagattcaggatcgggcggctctgggcgcgtaccgattcacttatatggcgatctaatctggaccgcccactcatgatcggacggcacatattggcccgtaccccttcggccaactcttttgcataagagcccctccgtttctgcggattaaacccgcggtccactgcacgggtaaactgagtcttaggaaaacttacaccgggaccccttaacttctctgtttttatgcgcgcagtccagaatcataggaaattcagaaattccattagaaaatgatttgttagcacacaaataattgcagaatcttagttaatccctagaaaattcatattttgtccaaattgacccattttagttcctataattttataataatgttatttatcacgctgtgtctctttttcaacataaaaatggtattaaaatttatttcttaattaatctcgtatcaaatacataaaaccttaggaaattcataacttccccattttaattccgaattgactcatcccagttgcgttggtctcgtataaatatctactatgcaataataacatttatttttc

SEQ ID NO: 85599 - DNA, 615 bp, Zea Mays
cttaatcagggcgatgatgctcaaccttatttaaaattgcatgccattgaaaacaaacaaaaggcttctgcatgtctgcatgcctgtttactcattcataactgttgtggttgtgccttaggatggtcatttggattaatgacaactagcgcagttgcactcaaaataggatgactaaattggccagcaagaagacaagggatagcatggtttctttgattgaactaaggacatgatgagcccctctttctacgctacatccattatatatataactcattttcgggttcatttggtcacgggagggagtttgtggattatgcttctccccttgtactacttcataatttcgtaggtgatcttgaattgcttttatttgtgaattttggctccatcagttgggtggcattatttcttactaactcttttttgtttgtatgctggttatcccatctatgcatgtaggggtgcgggatctatttcgtttggaaaacatcatgtaattgtaatccacagagatatacacataagtttatgtttggaagcttactcgattacaaactgacacagacgcttctcatgaacttctataatatttcattttcatttctgttt

SEQ ID NO: 85600 - DNA, 351 bp, Zea Mays
ctcagcgttggaaatactctgttggctaagtactcttggaccaaatccctagtcccaatattttttcagacacaattctaaactcatacaaagcatctaggcatggtgcccccggcgtcatgttgcactgaggcctagtcagcccgaaggttaactccaacgggctctgtactagcttctcctttttctcatcaatcttaacataaaaccattcaaatttccaactggtcggccatttcgtgcgatagctgaccaccggtgtcttcatgtctttacgataagcaaagttatagcagccgaagttctcatgcagtccgtcttctctggccttcgtctgatagtgaagttcat

SEQ ID NO: 85601 - DNA, 1201 bp, Zea Mays
ctgtcaaacgagctaaacggggtcgccatggtacactgtctgaaaaagatctgaggcgcagtgcacctcaccgccgatcccacgacgcaattcgcaccgtcagaaaagattgcggtgagctcggcatggataaacatcgtattgaaaagatcgtggaagggcagtgaacatggaccctggcactggttcatcaatcgtgattcactagctccgtgacgtggctgagcgatcgacgttgtcatggctcccggtgatctcggttgcaccatgccatagaccatgttaccatgtcgtcgtaggtcatgtgagacatccaattaccccccatcgagaccttaccccattgagcgccacgattgatgaactccgatgactcatctcttcaccgccctgagatcatctttgtccaaaactcagagcacccatagccggcctctataaattgagtgttctccctatttcgccctcttgttacgcgctcagtgcaccactcctcacctcaatccacccaccatatcccgagaattcggaatttcccccaaatcagtcaccctcgccgtcgtgaggcatctcgccgtggccagtcttccccaggtcagttcatgtccctctaatccgtgtttttgcatcctctagtgctagtgaagctctcggtctcggccaattgaacgctaccgcgtcgtagcttagggaacgccgtgttgtcgcctgggaacaccatcgtggacattgttcatgtcgaccggcggttccgggttgcctctgtccaaattggcgcaagcaccatagccctagtaggtcactgattctttctgagtcgttggattgaacgctaccagcttgtataacccaggttgagcacgctggtgatcttgctctgctgttgtcgcggacagatatgatttagtggcgaactggtcgaattaagcctatggatgtgtttgggtagcatcagtgatggaactcgtatgctcgacaccactagaacgggtcaccgtcggcgagtacacgcgattctagccaggtgttcgacctgtacacggtcggggaccggagttgtgaaaaatagaaataggagggcttatatgcaatggtcagagagacacattaatagtactgagggactctttactagatgttcgaaatgccagggacctcggtgcaaatccgccagcgcgagcgtggacgcgcgtggttttcg

SEQ ID NO: 85602 - DNA, 271 bp, Zea Mays
cggaaagtccatttcacatgagccagaaactacttgcgtgcttacatttacacaagaacataacggacagggccaactgttcttagatgtttatttcacatgagccagccacagatggagatttgctctcaatcattgctccaccgtagcagtagcagcccgcatactctatatgggccaacataaacttgaatagtacaactttcagttgcattgttaattagcccaacatatatatgtgcgcgcaaccgattatccacgcctaaaacca

SEQ ID NO: 85603 - DNA, 592 bp, Zea Mays
cgggactcctctctattgggatcagactagagaaagacagttctttgggcctgaggttattcaggagacaaaagaacaagtctgtataattcgggagaacttgagggtagcacaaactcgacagaaaagctatgctgataatcaaagaccactggagtttgaggagggtgatcatgtgtacctcaaggtgccaccacttcatggaatgagaagattcaaagtaaaaggcaagttatcccctcgctttattggacccttcagaatctttaggtgagttggggagatggcctaccagcttgagctacctgatcatctatctgatgtgcatgatgtattccacgtgtctcaactcaagaagtgtctccgtgtccctgaggaatagctaccaatggaagaaccaagtgttcatggtgatctgacttacacggagtatcctatcaagattattgacactttaactcgagttacaataaataaagtgataaagatgtgcaaagtacaatggagtcatcatggagaagatgaagctacttgggagagagaagaagagcttcgaatagaatttccccacctcttccctagtcctacctaa

SEQ ID NO: 85604 - DNA, 397 bp, Zea Mays
gcatgtgcatgagagctaataacacttccgaattacgaaagaaaatcttttcaaaagcatgtttaaaaaggggctaagttgtctgatccgtgaaccatccaggctaggtggtcggaccgtctgagaactaactagaaagatgtgcagatttggttgtgtggtttaggcagtttgtaatgtggatcgtcctggtcatgtggttgcaccgtccagcagtactagccagaagggcctagtatttggctaagtctctggtgcgctgtgtggaccgtccgggcgaggggtgtggaccgtccgtaactgacttggtgaatttacatagggacttgcgtttctgggggttgtattatggactgtccgtgcctaagtcacggacgatacatgttctcaagtcgtg

SEQ ID NO: 85605 - DNA, 520 bp, Zea Mays
gttcctccaatggttgtgagcgcaactggagcacgttttctttggtgcacacaaaggtgaggaatcgactgtcacattagaagctccataagcttatgtatgtgaactacaacttgaggctacgcctaaaggatgcaattgggttcacaagtgtgcaaggggaggaggatccattttcacagttgatggagttgtccttatatgacacaaacaatccaatccgtcagtggatggaaatgggtcactcaaacgttgatgcagtgctagatgaggaggacactgagagtgacacaaagttaccatcaagcatcgtggctaaaggcactccaaaagaaaatttggttaagtgaacaaagaataatgtgggggacactcacgttggtaagcaaatgatgcagttcatgttacaaaaaacaagcaagaaaggaaagaaagaggtgactagcgatgatgagaccgatagtggtgataaaagtccacaataccaagagtctgtcgatagcagttcgatgacatcttc

SEQ ID NO: 85606 - DNA, 677 bp, Zea Mays
atgtcttataatcaaggtttagtgatgcaaatagtgtatacaagatccggacgtacctggcagtagtatgaagagatgcatttgttatgtaatgtttcctgacattttataggcgcgaatctgtgtctgccgcatcctacatggaaggttttttatgggggcgaggccggtcggtgccaaggcgactcaccttcccttgagagcgcggatcgagagccggtgcgtcgatctggggcgtctgattcgccttcatggatagcgcggcacggacgcggatgtagaggattgcgccaagaggtagcaaacttcgcggatggagagaatagggaatgggcggaggaaacggacacaattcctcgctgctggagagacctagaggaagcggcggacatgagagagcagggattgcgtctgtggatctaggcggatggcgaggattgcgtgaggagaaagcggacttcgcggaaccagagagcagggaaggtgagtcggatccgggcggatggaggaagcgattggagttcctcgcggctgggattgcgggacgcgaagagacgagatcgggatgaatgatagacaggctagggtgacttaccagcagtcaacaacctcccacgcagccgccaacaacctcccccgcctcgcagcaagagcttgctcgtggatggggcgggcgc

SEQ ID NO: 85607 - DNA, 687 bp, Zea Mays
tcagaattgagtataagaagggtaaacaaaaccaggctgcagatgctttatccagagtgggacacctaatggctttgctgtcagttgttgaagtgaagcctatgtggattcaagagatgattaattcttatgttacagatgaagaagcacaagtgctattggctcagttagcagtgcatagtccagatgaaaagggtttctccttgcagcagagagtgatcaggaagggtgatcaggtttgggtggcaagcaactctgctctgagaacaaaaattatagatgccctacataacagtgttgtgggggtcattcaggaggccaggccacataccacagagtgagaaggctattctggtggaagggtttgaaggctgatgtggtgtgctttattaagcagtgtgcagtatgtcagcaagctaaagtggagagggttcatccaccaggtattattcagcctttacctatacctaaaggtgcctggcaagatctcacaatgggttttattgaaggactgcccaaatcagaaggggttgacactattctagtggtggtggacagattttctaaatatgctcattttttccctcaaacatccttcctctgcagcaaaggtggcccaagtgtttttggataatgtggttaaactgcatggcacacccagatcactggtttctgacagagacaaag

SEQ ID NO: 85608 - DNA, 654 bp, Zea Mays
atacgcagattatgagattgtagattctgattgaaaaaagaaaacagataaatacagacaaccaactagtgcattacgggattaaccggattattaaatatcagtgtctgaagtctatatgcttaaatgtccaaattatcgtattgataacatctgaacatgaggatttaaggtacacttaacaactgtaatggcagcaacgcatggatatattgttccaaatatgagttaaaccttcattagaaacatgtgttgaatttacgttccatgcacaatatagatagaacagtaaaactaaggaatacaatttatttaacaacaccataaaactgtctcgatcacaattatacttatttaacaacgaataaaactacatttgccatagcataaaatagtactttatttgtaacatgaacgttttttaaaacagagcggagtactgcatttaaaacagcaacagagcaccacaggtctcgtttcatggtgcggagaacgccagaagtcgtccagcttcccgaggcagcggctgcgtgggcgcttctcgcgaaccgttggccacccacttcctggagaagcgcttgaagaagaagctgggtaagaagttgaccgtttggttcggtttctggcttctgacggccacaatctccaaagaag

SEQ ID NO: 85609 - DNA, 590 bp, Zea Mays
cttttgttgatactatcaacaacgaagccacgctcgggcgaggagaaagtcttcccgaggctatggccgagcttgctctagggctcacagtcgtgcagggaacaattgagggagtgggcacctacgggattcgcgggggggggggggggggcagttggccaaggccaagctcgggcaaggcagagtttgctccaaggctgaggctagcttctggtgaggcatagtttcctcccgagggccagaccatactttgtcgtacgcacgtcccatccggagttgtttgaactctgtagacgacgtgggggatcagtagtcgttattcccgggcatgcgtcatcgtagttggtgaaagtggacgggaccacggtcctgtcgctcctgtttgtatgcagtgtcacgtggggtaggtatccgtattgaatgcccatgtctttgcggttcccatgacctttgatcgaggccgggctcggggttgtcctcctgcatgagatgggctcggtcaaggcagaaatagttgttccgtgaagaggtgaccttgggcgggacgaggatttccccgagtgctgcccttgcctaagggcaggctcggg

SEQ ID NO: 85610 - DNA, 438 bp, Zea Mays
gtgtctcgggggccttggggttaacctctacctccctgctgatgaaactgattcctagccatttcacgcaggaaacgggtgctatcagcagtggcattaactaaggcagcgatagcctcagccaacatgggaggtacaggcggcgggttcgaagtttcctccccaccgcgggaagttctcgtcccgtcttgagcacgagttcttgatggcatctgaggaagaaaaacatacttaattattacatgccacaagtacaccacctttattacattatgccagactggtgctaattatacatactcactagtacaactcaactttccttatttaatttacataaggataccacctactactatacaattctagttatcttcgtccgtggctgctcccgctccactgcctgcttcgggagaacgatcatctgcgaggttcatg

SEQ ID NO: 85611 - DNA, 476 bp, Zea Mays
gtatctccatagatagccctaggtattctccataaatacaagtggtcctctagttgtagcctctcttagatgctccctgctatcaccatatgagctttcgactaaaacgctacaagcatcattccctctagcacactatggtgtccacaccataaacatagttggtgtgatctcccaagaatacaaaccctccaaatacaactacactggtgcatgcaagcaccaatggtttgaggatgtctaaactcacttataatcactaggcataacctagaccaagcgctaatacaatggtctaactaacctatgcaatttgtaaagcacctacactaatcatcgagtgatctttgagcacttggctgtctagtgctatattttttagctctcacacatctcaaatggtcggttggggttatatatatagccccaagtccaaaaccatacattgaaagcactacataaattctgcatactta

SEQ ID NO: 85612 - DNA, 322 bp, Zea Mays
agtttcttgtgtcagaacaaccccaatgatcttatcttcagctgcaatgtataatcggaatggtactctggcttgtggtgcttttaatatgggagtcgaagacaggtattttttaatgagatcaaattcttcctgctgctctgccccccagcgaatttgacatcattattaagccgaaggataggggtgaaggcatcaatcttccaggctaggttagaaataaaccttcgtaaataattcaccttgccgagaaacttctgcacttcgaccttacaggtcggaggtcccacattccgaatagacttgattcggtcagggtcta

SEQ ID NO: 85613 - DNA, 425 bp, Zea Mays
ggagattcgtgcttgccgtgcagtggataacggtagggggtaaaagatctcgcaagggggtggatttggtcgcgagtagaaatttatcaactttgcttgatggtcgtgcgacgtggccgagcagctgatgtcgtcgtggtacgccgatgaactcaattgcgccacgccatagctctttaaccatgtagtagtagtcgtggcacgcccggacttaccattttggagccgttgcaccggctggcgccacgacggactcacccgcgaaatatcccatcgccgccgtgtttgatgtcggccaaaactggcgtgacgcgcaaccgatccctttaaattgagcactgccctcgctccgcctctctgttaagccttgattccaccccttgatcagcgttctcgtgcaccgtagcctccagtcttcggatttc

SEQ ID NO: 85614 - DNA, 1668 bp, Zea Mays
gcactgggggcagtggcgcctggtactgcagagatgccgggagcagttgcatgtcctggagaaaacaaaagcggtgggcctataggtggcggtaccaggttagtgggaatgttgtccagaaaatcgaactcgtgggaggtgacagtgggtgactgttgggcaaaggggaaggtggactcattgaaaacaacgtgacgggaaagatgacatggttcgagagaagatcaagacaccggtatcgtttgtggtgaggtgagtagccaagaaagacacacttagcagagcggtgatcaagtttgtggctagtggtggcgaataggttggtataacaagtgcaaccgaagacgcgaaggtgttcgtaggatggcactgttttgaagagggcgaagtgcggggtggagaaatgaagagtcttggtgggtagaatgttaagaagtgttgctgtgtggagagcttcaacccagaaggttggtggaatgttggcctgaaatagaagtgagcgaatggtgttattggtagtacgaatgatgcgctcagctttaccgttctgaggtgaggtgtaggggcaggacatacggaggacaccatgggtgaggaagaacgtgcaggagctggagttgtcgaactcaagtccgttgtcacattgcacaactttaatggtgacaccaacctatgttttcacataggcgaaaaactgagtgagtcgggaaagcataagatttcaggtttaaaggaaaagtccataagtagtgggagcaatcatcaagaacaactaagtaatatttgtagcctgagacacttaaaatgggggacatccacagatcacaatgaatgagatcgaaattgttaaccgcacgagaagtagacgtacggaatggaagacgaacatgacgactcaactgacagacatgacataaagtggagctagcatccttattacacatgcgaatggctgatgtgagcttggatagggtctcgtgaccagggtgaccaagacggcgatgccaaagtgatggagtggagcttgcgacgaagctgtgtgtagcagggaggcacagggggtatagtggtctggaactattgcacctgacgatcacgttccgagacagcagatccttcacagaccaaccatagggatcaaattcaatggaacatttattatctgtggtagactggcgaacagagaccaggttcttaataagtttaggtgaaacaagaacattgttgagatgtaaaaaaccatgtaaagtggtggagccaatggaaagattggaagaagggagctgtcaccgacaataatggaggaaggtgcagtaagagagggatttgaagtgtttgatagggtaccggcgttggaggtcatgtgggaggttgcacctgtgtcgaagtactagtcggtttgctggggcggagtcagggacacagtgttgaaggctgaggcaaggaattgagcatcccaagatggagtggacgagtgtcccaggatgtcgtagagagcctagggaatacatccctgcagggcgccgttttgcaggttgtgctgcagtggggcgcctccctgtccttgtagagcgccatggacgtactgctgggtttggtgggccagcagtgcctggtgtggggcgatggaggccggagcagcgtaaatgacctgctgctagccgttgg

SEQ ID NO: 85615 - DNA, 809 bp, Zea Mays
ctggcgaggccgggggcgtggcgttgttgaagtgggaggcgagggcgcggacggggtcgaggacggagaagccataggtggtggtggtggcgtcgtcgtggtcgttgctggtactacgggcagcgcggtcgcggcgggcgatcttgatcctcttgacgagcttcttgaggcccttgtagtcgacgaaggcggccttccactcggggatgatgctggcctcgtactcccgcgagaacttcaccatcgtgggatccgcctcgaggggtcgacagggacagggaccggtatgtaggagtggtggcggaagcaaccctgcctggcgcgcggcttatataggtggagatggatatggaggaggaagaagagtggtttgccgctcgctaagagagagagctagtgcgcctgtgcgtggtgctgcgagggcagcctacgtacctgctaggctagcctagcccagccagccaggggataacaatattaggtcgatgcaggggagaaattaaataaaggcgagcagcagtgcagtgcaaagaaagaaagaaagaaactggtggaatgtgcattctggatgcgtgttgcgctgcttcgatctagtggagatcgagcttgcacttgcagttcattattcatgctgcgcatgctcccacaatgccctcaatcactctctctatctctctcactcacacacacacatgacatatgcatgtaaaaaaaaaaacaatacatataaatatttttttttaaaaaaaaatgctggtgtccaaggcaatgcgtaactatagatagagataccgtacgccgctgaaaat

SEQ ID NO: 85616 - DNA, 979 bp, Zea Mays
gtcagcttcagcaggtacaccaccagtgggatcaactccagtaaagacctcagccggtacctcttcaacaacaaaagcagaagggccagcaccctggtccaagcatgaaaatcgccgaagccgtctctttttcttcttcttttcttcagcaggcgcagccggacgactaacctggcgatgacgctttgggcgagtaccctcaggctttcgggcgtccgttgctttgtcaagctctggtataactgcaacagccattgtttcagtagggcccgagtcagatgattctccagcaaacatgtcaagcatagcattcatttctgcatcatctggactcgctggcatctcaaaatgaacttgcctctcatcattgggaagatcacaaagagaagcaacaaagacctaaatatcttcgggagagggtcgcactctaagacccaatccactatcaccagcaggaggatcagacacaaaattgaaaaaggacttaggaggtggtagattccaagcagagaaggcaacaggagcaccaacatttgatactttgcccctcaagatcatgtctagccggctcaccaaatccttagcaggaattctcctattagtaacctgagtggagtcggtaataccactgtacaagtaagctgggtatgctctatccttcaagggctgaatattcttaaaaacaaagtcagcaactacagcctcggcggtcagacctctctccttcaaaatacatattttagcaagcagaatcttggcctctgttacttccaaggtagtaggagactcaatccaacgtggagtgcgcacatctggctgtcttcccgatcgggggggagacttgccatggttttccacaatgaaccactcaagatgccaccccttaatgctgtccttaagcggaatatcaagatattttgttttccttccgcgccgcatttccagactcgcaccacccacgagttggtgctgaccccag

SEQ ID NO: 85617 - DNA, 340 bp, Zea Mays
cgaatgaggagtacgattaattctgttagagtcactatgctgttgatgccttgtgcgtaacatggggacacgcatgtgcgtgtgtgctgtggtgtattatagtggtggtggcgtaagatatttgattgaggtgtgcgggtatatgccgtaatatggttatactcgcaacgaggaaagatgtatgcattgtgtaacacgacacttaggtcgctattatataatcttgtgaaggatgctcatgatggtcgtgtgattgaggagtgatgtagtggcaagcgcgaagtaagtttagtttttcaaacggttagtggatagtatctatcggtgttgtcatgatttt

SEQ ID NO: 85618 - DNA, 671 bp, Zea Mays
agtattctaaaccctttcatattgagaatactaggctcaagttgtttattgcaaatttaatgagccctgatcaagatgtataatgcttctctctatttgtctttaaagtaaatgcatccattcaattcattcaaatacttgatgcacatctttagggggagccctttatcttgattatgttgagactattgctttatctcggtaatttcatatagtctcttgcatgagaataagttcctcatgaagtatgctactactttaaattcttgtctttcactctaaagtagcataattgctggattctcttactctaagcttaattgataatctaatacatatgttgttcttttgatcacatctgttatttgtttgatcattgaatgacttcaatcaacaatcatgcttcttagtgacgtatatactttcaattgatacgtatgttgttcttttgatcacatctgttatttgtttgatcattgaatgacttcaatcaacaatcatgcttcttagtgacgtatatactttcaattggtatctcttgatatgcactaagttaaaaggagaattcatgatacatttatgcaacttgtgatccatttgatatttgctaacaataacttgaaaggatcactagttgtagaactctctcttgtgcaaaatatttccatata

SEQ ID NO: 85619 - DNA, 781 bp, Zea Mays
gataataatgaaataaaataaataaatataaaaatatgcatatcatgctggaggtcttgtattgttgcaatcgtactcaaattttgaagacaagttaggtttgaaaagtagaatttgaaaataaaaggggaaataagaaaagagaagtaaaggaaaaagaatatacactataaaagtatatatattataaataaataaataataggcgttatcttcatattaagattttttttattggatatttggaaaactgaagctcaaacagaatttgaatttgaattggactcttaaatttgaaaaggaaaataaaatcagaaaaaaagaacaaaacgaaacgaccacttgggctgaattcggttcccctcggcccacctaaatcctgtcgcgccagcccaacttatgcactgatagccacttccacgtgggacccacagcctcacctaacacccgctcacgcacacctctcctatttcgctggctggtggaccatctctgtcaggactgtccctgacctcacggattcggtctcagcgaatcccgcgcacaccgcggggctcaacatccgtgcaacagaacgccgattacctcgccggggatctcgctcctcgtgcctcgctcggacttcgctactggagtataaatcaggcgtcacagtatcctcgttctccccaacctaatgcacccagttccaccattaccgagcgtagagagagaagaagcagcgccgccgccggcccggtttcgtgttcaccgccgtcgcgtccaagaattcgaccctgtg

SEQ ID NO: 85620 - DNA, 328 bp, Zea Mays
tctacacaagtacactaagtaatactacgatcagcactacactaaactagagcgtgatcctgaaccagtataaaccctctgtctcaacccacgtccaagtctcaacgattcactattcggtgtgagtccatgctagcatctctaccgaacacaaatcttattgtcccttgtttctggaaccacaacgggaaccacaacatgcatgtgtctttgtgtattgtataggattttgagcaatttgttcatcctagctaaccaatatagcatggcttgccctaaacttaaattcaaatgatcaaatgaatttaaactaatcctttgagattcc

SEQ ID NO: 85621 - DNA, 730 bp, Zea Mays
cggctgcccgattaaaaatgggccgaccatatcggatccaggcgcttatgaagtggcacgcgtcatcgaccattggatcacggattagcggttttgattttatgtttgcccgagctgcccataaccaccggatagaagatctacgactatgatcgaatccaccgaatctgtacgaggatcctctaatctggaccgttaacgccgatccaacggtcacaacgccatccccacctcagaccctgattgcgtggcgacgccaccatgcccacgcggtgaagttcgccggagcgcgacgatcaaatccccaggtgcccgactacccttgtaaatgggtgtagcagagagaggaagcaacagggaacacgacagaggggtgtattatctgcaatgaaccgcgcggaccccctgaccatggcatcatgcggccaacggtgaacggaccgttccggcgagcaattctcaatgcgccacccatccttttgcccggccatgcagtgtgaactatctggcgatttgcgcgacaccccaggttacccaatcatgcaccgaatggccattcaagcgagttactcgcgcggtggaatctcaccccaatctccgcctgctcgatggcgcgagggagctcaccatgggtctggtttggtttcaagggggcacggccatggatttataggcccgagcgcgacaggattctgacccagttttccccagctcccgcaaccacctccgg

SEQ ID NO: 85622 - DNA, 571 bp, Zea Mays
tccgtctgtctttctaccctctctgatacatcagcaggaacgcttctttggaagcagccatcgaacttagctcaccaccgatggttttggcgagggagactaggatttgcaacgagtgaacacgcaatccttcccgaccatcgacggcagcttcgaacccgtcaggtttgtctttgtagattcgcctcccatgcgattttccctcccttcttccactcttcagtctctgtgtcgccatcgtgcggacgcgcgcggtcactgactacgtgttcaccttcgacgtcgtcgctcgccacccgttcacctgcaactcttacaagcattgtgttcctcatcctctcttttgtctcctgccgctcaccacacattcccctgcgtgtctcacacctcattgccatcattcctgcacctatcccgaattcgtcgcgcctatacaagctgcaccttgcttcacatcttcgtccctcacttcgctcttgcaccgatgatgtcttcgtatatctgttgtatccccatgtcctaacatttttctcatcatctaggactgcagcttctagcagcctttgccgag

SEQ ID NO: 85623 - DNA, 2203 bp, Zea Mays
ttaatgcaatattaccttcaccagtctccttaattagcacatcacaatcatgttgcagatgtttggtgtggagatcgttagaaaagatgacagttaggggttttcctgcagattcacatgcactggcttcccgactgacgctcttttcaacagctatagggctcactgcatatttttcttcatgctcttcaatagggaaaaccaaagacgaaacatctggagatttagcaagtttaatttagtgaattgaaaatcttgaagcaagattactaagcaagatctttagaaaaaaaatagtgaataatcagttggcacaggtggatttagatgttcagcatacatattatcttcactcatcaatgttgcggagtttttattatggatacaggattaattcggttgtacctttatcagtctcttcagctattctgtcattatcatgctgcagagttttggtgtggagatcagttgatatgacgttagctaggttcttttcctcaggctcgttggcatttgcttccaagctaactctccgttctccggacacattgctttgctcttcatggtctgcaacagtgaaactaattgataaaccatttggtgattttggaacgacaaagtcttcctttcagtatataacatgacaataatggacaaagctaatgattagaattacacgtagccaacaatttgacttagaactcagtatgtttaaaattggtaaattaaacacagtccatacccggatcagcaagttcatcgtttaacttaatttctaggtcagtctgggcaggattaattcggttgtacctttatcagtctcttcagctattctgtcattatcatgctgcagagttttggtgtggagatcagttgatatgacgttagctaggttcttttcctcaggctcgttggcatttgcttccaagctaactctccgttctccgaacacattgctttgctcttcatggtctgcaacagtgaaactaattgataaaccaaaactctgcagtatgtttaaaattggtaaattaaacacagtccatacccggatcagcaagttcatcgtttaacttaatttctaggtcagtctgggcaggattaattcggttgtacctttatcagtctcttcagctattctgtcattatcatgctgcagagttttggtgtggagatcagttgatatgacgttagctaggttcttttcctcaggctcgttggcaggaacaggctggtcattacaattctcctgagctaaaacatctgataaagggaaagaatacatttaaaaaataaatgtcagatacttaaaagacatcaaatgacaatgaaacatatgcctagcttttgcagatagaataaatataaagcctattaaaaacaattagaattacaagtagccaacaacttgacttagaactcggtatgtttaaaattggtaaattaaacacggtccatacccggatcagcaagttcatcatttaacttaatttctaggtcggtctgggcaggaacaggctggtcattacaattctcctgagctaaaacttctgagaaagggaaagaatacatttaaaaaatgtcaacacagtgcaaacagcacaagttttcatcaccatctccgcagatcagtaacaagttgtggaacaagtattaatgcaatattaccttcaccagtctccttaattagcacatcacaatcatgttgcagatgtttggtgtggagatcgttagaaaagatgacagttaggggttttcctgcagattcaattgcacttgcttcctgacggaagctcttttcaacggctatagggctaactgcatatttttcttcatgctcttcaatagggaaaacaaaagacaaaacatctggagatttagcaagtttaatttagtgaattgaaaatcttgaagcaagatctttagaaaaaaacagtgaatgagagctggcacaggtggatttagatgttcagcatacatattatcttcactcatcaatgttgcagagcttttattggggatacaggattaattcagttgtacctttatcagtctcttcagctattctgccattatcatgctgcagacttttggtgtggagatcaattgatatgacgttagctaggttcttttcctcaggctcgttggcatttgcttccaagctaactctccgttctccggatacagggctttgctcttcatg

SEQ ID NO: 85624 - DNA, 280 bp, Zea Mays
gttatggataatgatacgctttggatttttataaccatcactacgtcagtggtttatagaacgttttgcgaaaagggcacagataagttatgtagtactagtacggtcgaatgagctcagtccgaaccggtcttttgaagaagctgtgtgcatatgctgcgtgtgccaatcatttacggccaaccctttcccattttcttttggtttcctttttgccaagcaatatccagccagcttttggtgagccccggtgggtccgcggcaggcctcagggctcccc

SEQ ID NO: 85625 - DNA, 419 bp, Zea Mays
tgaaatagatcgatgattacactaaaattcatacccatttacgttgttttggttcacgttttacgctgaaatccgcctaagctcacacgcacgatcgactccatatcttctgttctgatatatacggtaacttctaatttcgtgggcgtgctaatcacggtggtgtgtggacccacctgaacgaaccaatgaaaggttcgttgccgttgtcctgttatgcaagtctgaaccattaaatatgctagcataaccacgagtaggaaccaactacccgaccagcgaacacgacgctggaccaccttcgtccatcccaactcgaccccaccacgtgcgcaccttctgtttacgcaaaacataacacatgtttacacatgcataaacgtgccccacaatttctggatgggcagaggatatttttt

SEQ ID NO: 85626 - DNA, 356 bp, Zea Mays
agaaggaggtggccacagaagtttcaaacaaagggaaaaagttgaagaaatctcttcggaaaaagcagacttcgaccttcagcacctgggtggccaacaactttccgaagaggatatggcagagttgaaggaattttctatctcgtgtggctaccagcctggatcggtactctttggcggggttgacgaagaaatcatgggatgcatccgcgatcgtgctggtgcaaaaattataggcaccctgtcgaagagtgtcgaattcccgaagcttgagaaggatatcagctgctataggcgacaacacatcatagacaacctgttttattccaactttaaagtaagaacccttctacaag

SEQ ID NO: 85627 - DNA, 512 bp, Zea Mays
aaattagtgcgaacgtgatgttatcagcaaacggggatatttttatgggatggcttacatgctttctagagtccacctgtaggtcatgttcgttttgtcccaaatccatgggggattgagtgggaataaatccactactagtcaaaatcttcctcaatccacctaaatatccctcaatctacatggtttaggaataaaacgaacaagaccgtagtatggagatgattgttatcgtggttgttgcgtagttttatgttccttatctgtgattgagcttaagttggtgtaattactgtggtggtggtgtggcgaagttatatattgttgtactctttattatgaggcggtataacgtgatccagttttaaatctataatgacctaaggtactcatatagagaaatgtggatgttgtagaagtgaagtatgttttccatgtttgttattgttgttatttttgaattgatcattggatccaatgacacttgtaatgatatgaggttggcattaatg

SEQ ID NO: 85628 - DNA, 383 bp, Zea Mays
gtctatagagtcacttagactaaccctccccacatctgccctaaacattagggagcagagccaactacattcaaggctctagctaggtctagagaacctagatttttagctccagccatcacccaacatacacattcatctaagaagcttctctgtagattggccagggaagggggttccccattgaagatcactttgttgcggtgcagccaaacacaccacgcccccaaaatgatgacattgttgagcccctttttcctgccattgggtactctaagaaccatgtgtctccaccattccgcgaaagagggttcatcaacagcaggaataagatggcccaaaccgaaaggagataaaatactgaaccaaaactgacgggtaaa

SEQ ID NO: 85629 - DNA, 810 bp, Zea Mays
ataaacagtgtaatttagaagaaaaaacattgaaaacacatttctagatcattgaacatgttaagtggtacaccgcacaccacgacagtgtatggttcataaaccgacctacgatgtgccatctttatcggttaacaagttcatggacctaaaaatacatatttaaagcttatggacttaattgacatcttttaacaagtttagaaaccactggtgcatttaataccttttttgggagagctgaaatcactttcgatatatttgatctgtctaccggtatttgttgtctggcctggttgggcaagggtggccttagctagagagccaatttagcttgtttgagactgactccaacagaggccatgcaaatcgagcagccattcaagcctttggctagtgtctctggtttgcctgtccaggcatatgacacacggtttcaacgacacacaaaaaagcagcggtagtatagtccaacaaataaagcagatgatagggtcatgttcttagacacagaaaaaggaaatggctgcaagccacaatataagctattatggcttctttctctttccattctttttgcctggctcgtttggctgccctgttggaaggtgttttgtacggctacggtagctcgtgagcaactattttagctttgtctgtccatttagctgctctattggaatcagtctgagttaatcaaaaaatgttggaaaacataaagccgtgacccgcgaggcaagatggttgcacattgaaatgttttagtttgttcgatgctagtttcttgcctagctagctgcatgctatgca

SEQ ID NO: 85630 - DNA, 839 bp, Zea Mays
tttgcaaaaagccctatttgagctctattgggattaagtctgaaattcagagaattggctcaactttgaagctttgtaacttccaaattaggaggagtttgccctagatcaacacatcaaacctatagagctatgaaaggagaacaattcttattaagtgaccaagcactgatgtcgtgtaaaaattggagaaaagcaaacccaaagttgggctgtcagtcagccaaaaacctgaaattggatattcagtgacatgggatgaactttgggagtctttatgatgatgatccagtaagtgtttgagcatggttactctagcaagattgtagctggtttattaggctatcactttgttatagagagttgattcagtccttatacaaaatctggagcaaattggtaccaaaactgctctgtcaagtcaactgaataggctgcgccatggtacagtgaaccggataggatcaagttcagatcacatcgccgccgacgagctgtgcactcggattcgtgctcgccgttggcgattcacgctcagatcggttggatagcgcttggggtaagtaaatatcacgtcgtggatatgttccggccactaatttactccgaccaccgtacccgagctagtcacggttgcttcggatgagttcgccggagattgccacctcgcggtcttacgccatgtgcccgggcatcttaccacgtcgcggttagtcgtgttaggcatatctggtgatcgctggagggaccgccacggtgaaagccacttagcacttgcgccagtgcccctcttcctctccggccaccgcgcatctcaatccaaattcaccggccaccgc

SEQ ID NO: 85631 - DNA, 683 bp, Zea Mays
catcaagaagaaaatccaaggcggaggatgccatgggagtggtagacatggctgcgaaagggaagaaggactcgtcaaaaacgacatgtctagaaataagaatgcggttcgactcaagctggagacaccaatagcctttgtgttccgaggaatagccgagaaaaacgcataaggaggagcggggggcaagtttgtgaggtgctgtggaggacatgttaggataacaggcactcccaaaaactttaagatgatcataggagggttgggaggaaaagagggcactatatggtgtggagaaagcaagggttttagtggggagccgattcacaagatatgtcgcagtgtgaagggcttcaacccaataagccggaggtatactggcctgaaacaaaagagaacgcagaatgtcatttatggtgcgaagagaacgttctgctttcccattttgctgagaagtttaggggcacgacatgcgtaagacaatgccgtgggagagaaaaaatgtgcgggcctgggaattatcaaattcacggccattgtcgcactggatgctcttgatgacggtgccgaattgggtgcgaatataggtgaaaaagttggcaagggcggaaaaagtctcggactttagacggagtggaaacgtccaaatgtagtgggagcagtcatcaagaattaccagataa

SEQ ID NO: 85632 - DNA, 594 bp, Zea Mays
atcgcgaattctttgtcggagaagttgctccgccgtggccgcatccgccgtcgaggccgagtctattcacgctactaatcttggtgagatattccttcccagtctctctttcaactctgcttcgaattgtcgtgaccagaggaaggtttcgtgcggggattgggaggtattggtctggctgaccatggcaccaccgcgggagggggctgaacttcggtgaccaaagctgggtggacgcgaccagacattgtgggccatcgatcttcctaaggacgatccagattagacggtagaataatgtttcaccgtgaccaatgagaaccgtcgatctggcgatgactggtttagattaatagtaggcaacgcatttcgcgcagatagatttggtgcgtccaatccctatagtgcggttgtagttttgtaacggttcacgagtatgtaaatctaatctgagcccttgattcccgatcaggcggtcgcggtctgtggataccctttcgaccgggcgttttgcttaagagtcctcggagtttttgggaatcaacccgcactccgcagtatagtattatgagtcttaggattcttatgaggaag

SEQ ID NO: 85633 - DNA, 461 bp, Zea Mays
gagaagtggaagcataattagagaagttaggtggtgggcaggaggccacacttttgtctcttcgatgagagtgttggatattagggtgcatgacgctattcttgggtttgtttggttaaagcccaatagtcccatgcaatgtgactgggagaagaaaactctttcattcaatcatcaaggtgataatattcagttacagagagattgtaggcaagtaattgaaattcagcaggcaaaggctctacaagttcacaagtggttgaagggtaatgaagtgtgggcatttgtgttacttgagtaggtgtttgaggtagagttgacaacagataatgttccatggacataactaattatagaactccaataccttttttctcaacctacttcatttcctcccacaaggccttttgaccatcatataccattagtaccatgatctatacgagttaatgccataactc

SEQ ID NO: 85634 - DNA, 817 bp, Zea Mays
ctaagacacagagaacccaggctatggactgcgggttgaatagcaagttttttggggtctcttttagaagtttgctcagctgaatctatctgggcgagtatcagccgtcagatcccgatctaacggatccgttataacaacgaaggggtacgcgctattgaccgccgatcctgagatccatggccaggattttcatgacgcctcctcacgacacaaccgcccgattaacaatcgacggttcggatttaaaacgccacatatcattctagatccgcacgatcacgatccgatgggctagatttctatggtgtccgatctaatcctagccacgcgtctacgatccaacggacaccgatcacccatcgaacccgcacctagttgatctaatctgagctgtacagcacagatccaatggatagcacatcgcgttctttcacctagccagacacggtggctccgcccaccagggacggcggtgccatggcaggtggccacccacctcgcgcgcctgagttctaaacttcggtcctaacggtgcaacatgatgctgggattacggtgattgaatgggcaggtgacttaccaacggtgatgatcggaaggaagctgcccacgtgcacatgcagtttcgcgacagagagatgattccagtgagcaattcacctgacccagtgaaaccccagtgctcaattccgcccaatacgcaaacggtggagtgggccgcagcacctaggccaaatctcggaccctgcacggtggtgacaccatgatttcaccgtggcggaggatcttcctcccctatctcactggtggccga

SEQ ID NO: 85635 - DNA, 696 bp, Zea Mays
ctgttgcacttctctgaatatgtagacaattttttgcggcctaattatggtgtaataaatttccaacctatgttcctgcaaacatagaaaaatactcacaaccaaatctcgaggatgaagttgccagcattctaatagaatcaaaaatatacctgggaatcacggaaagtggcctcatccattgttagattagatgccacatctccaacaatcttgcatctctcatcatattttgtagaaagggattggacttgaatatagaatcgatagctgtgagttcatataaaacagcattagaacaaaaagtggccactcttacatgccatcgtatgccatcgtacaaggggcttcataggacataatcaaactataacacaaattataatgctcaaaagtcttttagcttctactaagtaatatatgacatgtttccactaaagatgaccccatgagatctatagacttgtaataattccaggagcatgtaacaatagacaacctgtacaaacaatgtgcttgacatatcacaaaacgtaacgatgtaaaaacacagttcaatatgatgaggcctgagatatagagattaagttttgttgcccttttctgcttctgcaagcacttcaaaaacgataagcatcttttctatgaaccatatggttataatggaaatttgttgtattgcggcatatatagaag

SEQ ID NO: 85636 - DNA, 309 bp, Zea Mays
ccgagggggactcgcggcatgcttgcacttgttgtcagcacagcgaggccaaccacgacccctcctgcctctacccatggttggttggagaaggagagaaagaagaagaaagcaacagatgatcgaaggatgagtgaagagaacaacggtgcaagcagactatttatagaggccaggggtgaccgtccacttcctaccacgctcgccgaacagacgcaagtattcaataagcaattcaagccgcctgaaaatgagtcaggcaacaggcgccgcttcgcgtaacacgacaccgtttggaccaaggtcaac

SEQ ID NO: 85637 - DNA, 415 bp, Zea Mays
cggcgacacaccggatccacccacgggcgggcatgagccaccccatgggcgtcttatcaggccatcagcgaggctctagagacaaagtactgtccaaagtttaaatcgtctaggttcatggaggtagattggtgatggatagaagaggcagctcaacatcccagtgacaatcctacgccatcttccgtttataccgaggatctagcgtttatacatgaccgagaatccgcaaaatagatgccatggcacaaaaatggcaaacgatacaatcctgacaagatggtgcacgcatccaatggtgaagcatggactcactttgatgccattcaccatgggaaagttgaagaggctcgtaatgtatgtgttgcgctggccacagatgggttcaatccctatggaatgaccgctaccccat

SEQ ID NO: 85638 - DNA, 447 bp, Zea Mays
aacaaatcgatcgcagcatgtggaagctcagataagaccaccacctctacgtatatcagatgaacacggtcgactctttcaatcatcaaaaaaccaatctgctacatcttttaccctctctctctacctgctattcatcacgtcttcctgtgcgatttgatgtcgttgtagatagcctttgtcgatcgacttcggtgtaactgactcaatcagcttcgtcgatccatgacgttcatcgctatgttcaaggccgtgggtgcctgtcgaccacggacgtttactatatgaatgccaaaactttcagtgcagcgtccagtatggctcgaagctgcacatgtgctccggtgctcccacaaggtgggattcgagcgctcacagtctctaggctgttcgcttagccttaatccgtaccaatttctaatgtttataccgtgtgttggaacccaa

SEQ ID NO: 85639 - DNA, 1139 bp, Zea Mays
tagatatattaacatgtttcaaacacttcttacactaagaaacactatgcaatagcaagaatgcaacaaacaaggcacttctagagatcacgccaacatagaacaaataactctctattgttttaataaagggaaaagaaaagcgaagaaagtaaagagtaacacctaaattttgagtatatagtaaataaagttttataccctaaaattaagggtgttacacgaggaggtggactggagctatcataagaaagagtggtgatgatcgttgctccgctcaccaggcgaagcccggcgctgccacgtatcatgcgacacatagtgtgaaccaccggggaaaccgataccgacctccggagtataacgcgcctcaccattaactacggacaagacatatacatgcccactctagcggtcggcgatacgaccgaagtacacggaccacacagtgtctcgtgtgttaccgaggcgggacctttgactctctgcaccgtgtgggctgctgccatcatggccccactgtagtgagcgaggtaccaaggcgaaggctgacaggtggagaagacatgacgacatcgcctgagcatccctacacacggtagcacttcagcctacgccgcaacctacttctacgctctgccccgattagacgagtcaagagcacggtgggcagtagcacttcaacctacgtcgcaacttattcttgcgctctggcttgattatacgaggcaagggcacggtagtccaggagatctacacgaagaccagaagaagatctgttccccacgaacatctgactgatgcgatcacgtgcgtccgagaggccgatagactcacgctcggtgcgtgacaaaccatcgcaggaaagagtccgccccttacactgcaaaaacatccaaagcgatctatacggattactcaggggctaaaggactacatctagcagatgtgcacccgataggcaaatggactcacgcccagtgtgtggcgaaccatcgcaggaaagggtctgccccttacactgcataaaaccccgagcaatccacatggattactcgggggatcggtggctacatctaataaatgcacttccgtgcatccaaaaagaggaccacacaagaaaaacctctatgcgactc

SEQ ID NO: 85640 - DNA, 381 bp, Zea Mays
tttttttccaaaactgagagtcagtctgtctttgtttaactgagataaggggttttcccttaatatatttttcagtaattattctctgccataaaccactagaattttccaaattccaaagccatttggtcaacagagcatcattcatagaacctagattcaacacacctaaaccacctaaacttttggaggagcaaaccgtattccagttaaccaaatgcattttcttcgtctgggagccaccttgccaaagaagccttttcctgagcaaatccaactttctaataaccgatttaggagccgggtaaatcgataacatgtacaaaggtacattagaaagtgaactattcagaagagtcaatctacctcccaaactcagga

SEQ ID NO: 85641 - DNA, 818 bp, Zea Mays
ccaaaccataacagaaaccccacttaccagtaggcgacagccctgtctgggtgtcgaacatggtaacacccccactaggtagtcgtcgatagacaactcctggcctatcccttcagtgtccaacaccgctgtttcaataacgcgtggtggcgaagatgcctttatgggcgccacaggtgccataggggggcatcgttgtagctggaacggtccccttcgcgctcgggcgcaacatcttggcatcgcgatgcgggtacatcagccgaagtggggcttttcacttcttccgctaggcctcttgatgatccttatccatcactgctaatacaatagcaccaatatttcttccgtaaggaaagattttcaactcacgagccaaacgagacgtaaaatagtcatcgccggtggcccggagaatagggtccttcctatgccatcgacccccggtaatcttcaacattcgcgaagatgtttcccagagttcaggcgaagtcataacctccccaggcccaacgcaagtccccatcaattcctcaacaaaaagcctagaggctttcggcctcatcttttccctctctgtacctttcacatctattttcctcttttgagttgctgtgaccatagcctttcccttcgaggtgccctcttcagaccggggcttcgcctgtttccctcggtcatccccagcatcatcagagtccccttctgggtaaggatcgtaccgcaagctattcaattcaaagactcggtacaacctgacgttggaaccgcgaatatcctagctccttatcatctcagtcttcgacacatatttacca

SEQ ID NO: 85642 - DNA, 594 bp, Zea Mays
cagcccgagccgagccagaggctctgtttcttctcccagccgcccagctctctgcgtctggcgatttccccctcgccgacgatctccaccggcggccatcttctccggccgtgctccggtgaccttgggctctcctcctcttccccctcggtgagcagcttctcctctccccttctctgctgttctctgcctgacagacagtggagctcccccctttctcacccttttgcaaatctttcaaatttctgtgaaatcccatgaatccagttggtaaaatgctttgcattatctctattgtgtatccctgcttgcttttagctccttcgggagggcattcccacctcaaatggccattttcctaaaaccctaactccccgcacaccacgtgctcggtgaaatgcccaaaccagccaaacttgctccaattgaacccaaatttttcaggcacgttcacaacacttccagtaacctacttgccaaatttcacgccaatccgagaccccaggcttaaatttcaccaaaattcccgttttgagcgatcgttttcgagccgagtgccctaattcctttttcttcgcctaaattcaaaccaag

SEQ ID NO: 85643 - DNA, 654 bp, Zea Mays
cggattttatccaatggaaggaagcaattcaagctgagttagccttgcttactaaaagaaaggtattaacatctgcaatacctacacctccaaaagtcttccctgtgggatttaaatgggttttcgttgagaagaagaatgaaaacaatgaagtggtgagatataaagcaagacttgtggcacaagggttcacacagagacctgatattaattttaatgaaacatattctctagttatgggtggagtaactttctgatacttaatatcattggcagttcaaaatcatctatctatgcagttgatggatgtagtgcctgcatatctttatgggtcacttgattcagacatatacatgaaggttctcgatgaaatcccaattccgaatccaaacacaaatcacaacaagtactgtgctaaacttaataagtcattatacggtttgaaactgtcggatagaatgtggtacaaccgactaagtgaattccttctaaagaagggatacacgaacaatgatgattgcccatgcatcttcaccaagaaatcccaaacaggattctgtattatatccgtatacgttgatgacttaaacatcatcggcaaccctaacgatataaatgaagcatgcagtcaccaaaagacggaatttgagatga

SEQ ID NO: 85644 - DNA, 723 bp, Zea Mays
gaccgtgagagagaggacgaacttcctttccatttcagggccagcccaatccagcctagcccatataaggaaggatataggaggccggcccgttgccgccactttaactgtttgtcggccccgatcagtccagcccatcaagatgaattgatttaagagctgggaaggggcactagcaagtcgaagcaacagatggcaaattagatgtcacttaaaccttagctaatcacgtgttcattttagatcaagcacacagagacacaatatttatccagtggtttaactcgtcacaaaggcttgtctaccttcatgttgtgagaaaaaccactaaggcaaagggtctcattccattctcgatctcaagtcaagagctctcgctcttgagatgagaaggtttttcactaattcaaaggataacttacagcaatctaagtctgcgacaaagtcttgcagctcgtggagaatgcaattgccgactaggagcaagctctaaggattgagtgaagaatgtcggcctagagaacttcaatgctcaagagaatgaagaactgagaaagaaattagtgttcttgttgttcttctcagtttgaaatggggagagcaatatgttgagcttggggatggaatgtgagtgaagggatggggctccaagagaggcaaagaggacataagtagtctttctaccatattctcctgtcaggatacgcataaggtgactgttgg

SEQ ID NO: 85645 - DNA, 685 bp, Zea Mays
gccaagtgggcagccaaactctccggctacaacatcatattcgaaccaagaaccacaatcaaataacaagtcctcggcggcttcatagtcaactagacagggccttcaacctccaaccaccatagcacaaataaatgcacgaacaacaaagcagaatatgaagctatcatcctaggacttcgcaaactcatagccctcgaagtaacaacgtgcatagtcaaaactgattccaagattgttgctgggcaaatcaagaaagattgcatagccagggagctcgtcctcatgcaatacttatcagctgtgcggaggctagagaaatagttgaaaggattcatactccaacatatagaaagaagtaagaatgaagaggctaacatgttagcgaaggcagcagcaaggggtgacccatacgctcggatgtattcttccacacaataggcacaccagtggtgagaaacctcgaaggcctcaaaatcacagatgaacctgtaggccaaaaaatcgtaaacctgataatgacctaggactcaggagcatccataaccttgtaccttcagggcctcactatcaccccactgattaggccgaggccaaaaggctaaagcaccgaagtcgtgacttcacaataataaaagggcaactataaaaaaagggattgagtcaaccattgctcaagtgtatc

SEQ ID NO: 85646 - DNA, 551 bp, Zea Mays
gaggctctcatcattggcctcgaaatagcccttagtatgggtataagcacactccatgcctacagagattctcaattaatagttaattaattattgggagtatatactattaaaaacaaggtcttataccatattttagaaaagcaaaaacgcttatatccatgtttgctgatttaaaagttcagcatgttgtacgaaataaaaatgaaaaggcagatgcactagctagtttagctactagcatgtcactaaatccacatgacacataggatgtacatgtggaggaacgtagagtccttcctatataggaagacgaagaggaagaagacattaattcaagtgagaggtctaggattaggaaaatatcaattaactacacctacataaatgatacgctttatcggcgttcaaattatggcattctacttgttgccttgccattgccaaagatgaagtgatagatgccttaaaagaagtccatgttggagtgtgcggagcgcaccaatctggacctaaactacattctcaacttaaacatttaggctattatt

SEQ ID NO: 85647 - DNA, 742 bp, Zea Mays
cgtgaaactcggctcgcgggggaagtggggggtggtcgacccggtataaagcagtgccctactcggccgccctgactcccgcaaactaggaccggcacatccgtagccagtgcacccgtcgccgatcgttccgccgccgccacagacgatcaacgccggcagcgaccacgtgcctacaaggaccgacgctggtgattcgactacatgctaggagtctgtttgttgcgatcgatgtgggcgtggtgtctagggtcacgacgaattgctcgtcgtgcttctctgttcgtcgcaaagccgctcctcgtcgtgggcaactcaatgggcatcaaatccatcgctggtgagtctctagtcgcatctgccatgtacgtagcactgcggtagacctattaatttggggtttagggggcttagacacaatccggtgatggtcgccggtgaatctgcgtcggggcgtcgtcggctcgtcgccttgctcggccagggaggaagacatgcccacgtttgttagattggtactgaacggctaagattagatctccctagaaccgaatcagggcggttggatcgcgatcgtgcggtccggatcgaataccgtgtaacgtttcactgagaataacgataagcgttgatcttagatcggatgatcgtgggagcgactccgaaacattcaatcttgactatcgatactatatcctacggctactatggctgaccggttcgtgggaagcacgttttaaac

SEQ ID NO: 85648 - DNA, 554 bp, Zea Mays
ctccattgcactttgcacatctttatcaccttattccttgtaactcgagtcaatgtatccaaaatcttgataggatactccgtgtaagtcaaatcaccctgaacactaagctcttccattggtaactgttcttcagggacacggagacacttgataagttgagatacgtggaacacattgtgcacatccgatagagtagcaggtagctcgagttgataggccatctctccaactcgcctaaaagctctgaatggtccaataaaacgaggggacaatttgcccttgactttgaatttcctcattccacgaagtggtgacaccttgaggtacacataatctccttcctcaaattctagtggcctccttttattatcagcatagctcttttgcctggtctgagctaccctcaattctctcgaattatacggacttgttcttctgcttcttgaatcagttcaggcccaaagaactgccttcctctagtataatccaatatagaggagtcctgcatttcctgccatatagagcttcaaaaggtgacatcttgagactgg

SEQ ID NO: 85649 - DNA, 484 bp, Zea Mays
tatttttcgtgctatttgagttgcttgcattgtgtttgccattttaaccttccttgcttcgtcgagtttgattggattttgagcttcgacattctaacaaccattgcccaaatggctgatgagaagaagatcattgacccggcgctggccggattttacgaagctatggaaaaaccaacatggagaagatcaccaatgagatgttagctgaaatatctgaacactctagcgatagtgagagcttcgatgtagaaagtggaaatgaagatgctgaagatcggccatggagaccgagccatgttgtcttcggaaaatcgactattaaacaagggcagattgaagcaatgagtgggaggtactttcatgatatttcaatcgtgagagccagaggggagaataatgttcctctgcccgaaattgacgaagtggtgatttttagaagcttcatgaaagctggacttcggttccctctggacaaaatgtt

SEQ ID NO: 85650 - DNA, 420 bp, Zea Mays
aaaagaaagggagatgcaggtataaatgagtttgtgttcagtaaatcataaactctagaaaaatagactgagtaacaagtacatagcatgccatttaaacagccttgttatatgattttagccaccaccaagcagcacaacatgaagcacatatgctttggaaggtcattacccaattgctaaagcttaacgaacaggcaccataaatcaatatgaaccaaaaaagaacttctgtatgtgaagcaatgtagtttatgtgaatatgataacatattatcaagtgtagtatgaaacaaaaacagatgccctcattaaatatcgctgcataaaccattctacaagggctcagcatcaccttcggtcagtcatataaattaggccctcccttcttctcttggtgcccaatttactcatcctatt

SEQ ID NO: 85651 - DNA, 1368 bp, Zea Mays
gttcagaaaaaccataaaccctgacaggtctggccttttccccctagtaggatatctagctagttaatacaggaatttgtgtgctcccacaatctctcgaaatttacacatttcaaagacgatgttagaccttgattctagaacctgatgaaacaagttgttttgtttgttaggctgaagtttgtggagcttattgacaagctggatgaaggttccatgtcctggagtgagttccagatcgtggtgaggaagcaccatgagaacagactgggaggtccatatgagaggttgcgtggtgcaagtccaaggcaggaggaatacttctactcaaatccggtccccggatgcctctgcaaaagggttcagagtagatgatacggatctatctggattgagttgaaattgtttagcctggttgatacgtgtccacgatgttcagtgtgatgagtgattgtcaaagagaccatcatctttgattcagtttgagactaaccatgacgtgagtatgtggtgttgtgcaccatgtctcttgatttgtggtacgcagatctggagtacaagagcgatcgaagccaatggtgaaggttaagtgattcgtacttatgaactggaagcggcaaaggacgaacaacaccattagacttggacgagtgaggggctaccgtgggtggccgacatttgtggatatcgatgaaaagtgctcatgaagaagtagatcatgttgactaagtcaaaacaatgattgatagtggatgcgccggatgacttgagtgatcgtgtggtcgtggaaaaccacagtctatgtgtaagtcggaccttgttgatcttggcaataaacaaattgaattggatgttgaattaggctaacctaaagtttcccacaacaatcaaataccacttcacaccttgtgcctaagagtgttttctattctatcataatttttgcatcctaggtcttcaccctattctagtaatataaagataataattgaattatgcaaatataaatgatcaaagtacggaacagttagaaacacaatatgtttgccaaggtatcggagagtcgatactcctcgctagtcctcgttagtgcacccgtgaagggtgtcgctcccccttgatacacgtaaggatctatggttgattctttgtcactctagtacaatgaatcacccaaaactgtttgcaccttaagttatgtcacccacaatcaccattgggtgatcatcaaactctagatcaccaccaaatcgtaggtgatgctgatcaccaagttaataaacacaaactctcacttgacctgaccaaggctaataagaatgatatatgcacattttctactctcaatgcattaatgaggctgctaat

SEQ ID NO: 85652 - DNA, 598 bp, Zea Mays
aaataatgcgttctaaataaagattacataatcgatacaatatttaattttcattatatcatgtgtacatatatacacaaattaaagttactccatattttttttatgttttgcacagggtctcctaaaacgacgggacgcccctggaaccttattaattctcatgttgatatcatgtttgtgctcaagaatccatggtgtctagaaggctcgctcgccgcgctcgccacagtacacctcttcgacaatctatcgtggccgcttctgaaacaaggacatgagcggcttcagtaacccgctacggtctcgtctgcccttgcaaacctgctgtgatgatcagatcagcaatatacacagtatatatgcaacaatgaagaatatatataacactattatttgtcttgtgcggagattatatattattgcgccttgtacccaccgtcagcttgccgaccagcaacgacgacgcagccgcccggcccgtctgattgatcttgacgttcttttcgctgtcatcacggttgctccttcttggacgcctgctctcgctgtgggaagggaggacgagcacgagcaccttcttccagctccagccgtc

SEQ ID NO: 85653 - DNA, 540 bp, Zea Mays
cttatttcgataaatctaaactcccactttcactaaataacttttttcaaaggggcggagccccctatttcattaggaaataggacaagagtcattacagaaggcatcactaagacaagctagcccaccagccactaggcagaacataacactaccagacaaccttacaatatcatactagataagcaagatacctagcatagtgtgatgccaaaccaaaacagattcataagctttgcttattacatcatcaatttcctcaactaagaagcgaggcaaacagagaggttcaacaaaagtaaagcatagaactaaagacacgaccgaccacaatgacagccaaaaactccattcaaccagaaatgcgtcgatcactcggtctccacccgttagcccggcaaagcacatcacttgctatctttctgattaatttgcttccttggaccaccatcctttttttccttgtctttctgacgaatagcccaggaatccaaccaaaagcaaccgagaaaaacgacattagaaggatcaagcaaaatc

SEQ ID NO: 85654 - DNA, 311 bp, Zea Mays
tacatgttaacaacaccatctcagcagtaaacaattaagaacagtaatgggcagcaatatagcacttacaatgaactccttactatagaaatgttctttaaccaaccactcccagtcagcttgtggaaaatcttcagggcagttcttaatgtcttgttgcatattccttgttggcttaacatagtgccgacacaagtcaccatgccaattgttccatagatccctagcatgctccatgatatcattttcatagacatcaattttaatgttttcgtctatgttttcaaacttgtcctaaaaaattgttaaac

SEQ ID NO: 85655 - DNA, 437 bp, Zea Mays
agtcactcaaccttagaagtattatataatcaaatctaggattaatcgagtcagacatgtatgggcaaaaaacaacaactaaataaaaagatggcttgaagaactcatagtttaattggttagtcaaagaccgggcacttcctttcaagctagtatctcgaccttgaagtctcttgatttagtctagacaccttcctttcatcactttgactcctgaacctaagcctaaagaaccttgattgcttcattgtgttgggctttaatagtatgtacaatatttattttgagattcatgattgattgtaatcttctcaacatgggtagacaagttagcatgaatgtgcttggtctgatcgcaagcttgtagcattacattctatatacaagacaactatggagttagttctcaatccgagtatcattccaatagaaagcaa

SEQ ID NO: 85656 - DNA, 800 bp, Zea Mays
cgagcattgatgtaatccagttttgcagtcggcaggaaagccaaggtgacccataagagaaatgagataatcccacctaacggagtcaaaggactttgagacatcgagcttcataaggagtatgggtgttttgttgtggtggaaccttctggccatgttatagacatagagaaaattgtcatggatgatgcaacccttaatgaacatagatcggttcttggatattatgttcctcatggaaggtgttatttcgagcgagaggagctttgtgaaaatctttgcgacactatgaatgaggctgatgggcctgtagctcgatcttgtcggagctaccattcttgtgcaacaagacaatgttagcccgattcagaagttcaaagttatggaagcactgactgtgagaatgcatgaccgccatgaggtctgccttaatgattggccatcaagacctaaaaaatgagcccgtgaacccatcaggaccaggcgccttgtctagtggaatttgcttgatcgtcgcaagaaggtcaccttcggtgaagggggccactaggtgggataggttcaaagtcatcatacccatggtactctagcttaaatcaacgatcctagggctagggtcgccaagcatggctgcaaagtggtcctaaactagcttctccatattcgcgtgacaaagacgcccaaacaccatcttgattcaatttatcaatataacttttcctttttcgagcatttatcttggagtggaaaaaattatagtttgcatctcccaccttgagataagtaattttagatgccta

SEQ ID NO: 85657 - DNA, 299 bp, Zea Mays
tagtaatttgttgtcctgtgggactcttttgttgatcacaccctatggcctgcatttagcctaggaaaacttcaggtagggaaaattacttattttagttttcgtttagtttttcaccatgtcgctatgcaacaattgacgacctatacaactcttgaattgttgatgccttctttgaaatagacatttcacattctggttggaacactctttctttggtactccacttgtttttcaacactcaggagtcatctctattcattttaggtgttaagcaaaatggaagtgtatcacatttc

SEQ ID NO: 85658 - DNA, 455 bp, Zea Mays
attttctacactattttattactttattatttactgctgggctgcgggtcaaaaatccagagagtataagggttgttgtgtaaaatccaaggaccaaactgttagttccttaaccttacatggactgcgggttgttttaatacaatcgtggggtctcttttgtaaaatggcttcgacgaaggggtatagtcgatcctgggccacacgatagaagttggacggtccagattagacactgatcaatccgaatcggtacgtgccattggccgttagatcttgattcaacgcttagaattttatacggttccagaccatccttgcccgcccactagcagatctgtggtcacgatctatcccagccgaaccgatatgaggcttctaatcgcagccatccatcatagatccgatggttgcaagcttatcccctaccccaggtggtttgaccacggcggcgc

SEQ ID NO: 85659 - DNA, 341 bp, Zea Mays
cacgcggtccgcacacaccatcgctgcgagctgtcgggaggaagaaagacgtgccttgccgttggatcgtagggagaggtggagattagacgttgggcatacctgtttggggaatagatctgagccataggatgagatcgaacggattaggatagatcttgattcaataaaatctgactgtctaactttgatccgttgtacaacacttcgtatcgctttgttataagattcgagctatccaatggctcaggcgggcagataccccttcagccgtagctttgcaaaagatacccctagtttctattattgaaaccgtagtcctgtcaatttatagaaccatt

SEQ ID NO: 85660 - DNA, 394 bp, Zea Mays
ctcctgtaacaaagaattatgctctgtagcaatatctatgttgtgggttgggtcatgatctgcggtagcatttgaactaggatgcgaagaagcaacaagagtttcaatcgattcatggtttgtagcaggatatgaattgggctgcataggaacagacaagttgtgggtagtttcttggtttatttcagcaattctttgcctagtaactctaattattcgctcctgtggaggtgccacaattcttttatttcctcttgttacttttgttgagatctgatcaccatcgttggagatgttggcacgaacacacttacgactttgggattcctgaatatgtagaatacaataaggatatgcaaatcaaattgattgtgaacccaaatttaaagacaga

SEQ ID NO: 85661 - DNA, 314 bp, Zea Mays
ggagagtcgtcggcggtggtaggagatggcgttcgtcttgatccagagacagagggagtagttgatggtaactcactggtcacaccacctcctgctctactgggtcctgtgatcgacgagatgagcataggggaagaaggagaacaaagggttcgacctcctatgtccaatattagctccagggagatggatacgcctcaaatactgcattcacatgtaagtccaatttttgtatttgattcttgattgattagattgttatgaacatattccatggtacaaacaacaatgtcaatgaatttgcaggaaaaaac

SEQ ID NO: 85662 - DNA, 394 bp, Zea Mays
gtcgtttaacttcttcaacggctccctactctaataggatcaaatggttcggtggtgcaccagaccggcaccgtaggcggtccgatgcactcacagaatgtgcatttcagccctacttcttccaacaactatttgggtgattgggagctataaatgcccccaactagcacattaaaaacacaagatctactcccaacaaccatacaccaagtgcaatcactcctaagcatccaaaacctcataagcacgcatttggtcgatttgagtgaagagagactcaatgcttgtgttcatttgagagttgcaaagtcttgtgctcttgttttgggttttgattctcgctctcacccccattctcacaagttgtaaattgaagtaagtggctcaatttctt

SEQ ID NO: 85663 - DNA, 637 bp, Zea Mays
cgaaccagatgatgactggctgaagtgtgttgaaaatactagcgatgagttacttggagcatattccaagtccgaagataatgcactatctggggccttcgggagctaaaaaaagaaaagattaaatagggtttttgatgctattggatttgtgtaccctgactatcgctacccgccacgggggcagaaaagaaagggtgcaacctctggaaaggttgctgctttggctgctccaagcgagcctgcgccgaggagtaaaaagttgaaagtcctcacccaccggccccgttatattgagccggacgtggtgcccgattttggcggaaaaacttcttcagctgctgctccaaaggagccaattcctcctacgcagaaagctgaagaaccggccaccatgccgaaggcaccctcaggcgagcaagctgaggcaaagactggtaaagataaggtcgaagagccaaagactgaaggaacaaaaatgtcagaagttttaagcccttcggcggaagtaacagtgccgaagatacaaaaaggtcttgcggccactcctaaaagaagaaggatggcaagtgtactagatgtgctagaaaaggctttaagctctactccagggaaaattgccaaggcttcgaaaatg

SEQ ID NO: 85664 - DNA, 388 bp, Zea Mays
gacaaggttaattggaaatttcttcataatatgatgattaagaaaggctttggtgataaatggagtgattgggtgctgaagactgtgaaaagtggtaaagttgctatcagaactaatgatgtggttggtccctattttaaaacacataagggtgtttgccaaggtgatcctttttccccactcctctttaatgtggcagctgatggtcttgcttgcttgatccaaaaagctaaagatgaaggtattatcaaaggtctcatcccatatattatttctggtggttgctgctgcttacaatatgctgatgacactaattttttgctgcaagatgatcttgaaaatgctagaaatctgaagtttattctctgtatttttgaacagatgtctg

SEQ ID NO: 85665 - DNA, 514 bp, Zea Mays
attagtttagtagctggctatgagttaaatgagatttgtcagaatttggtttggttgttttgcttctgaatggtttggataggttatgtaacctattatgtaggtcaaattgttgggtgtggccgagttgagctaagtcaccaattttggcgtatgtgaattaggagtatggccttatcttttgtagcagcattaagtaactcattgtagactacatcatattagattagataggatctaggttagattggatataactagattagactagttaaagttagatagatctaccagggtagaataaatattattagggtatgttataatcttttgagataggatggattatatggtgtaggtaagtcagaatctctggtgggttaaaatagagaggttatgcaactatcggttggttaaggtagttgcatatggccaagttggtatgtcgacctttatttactgcagagtgaattaagataaaacatgttctataggagtagagtctcatttattt

SEQ ID NO: 85666 - DNA, 502 bp, Zea Mays
cggaaagactcgcaccaaactctagagggtgaaggagaaacctttgaggaatgattcttcaaagtttggacaaaatcgaacggtcggattttcgaggatctgagtttgaaatgagaggagaggaaggtttcttggcggtcaagtggtgaaacacggctgaagactgaggagtgaggagttgagaagagaagggggggtttaatagacttggaccaggctagaccagactggttcaactgtgaaccaagccggttcaatcagtccgtgaaaaccggttcaactggtccaaaaatcggtcagattttgcaggtctaacgcgttaccgcagactgacactgcattctatcagcgcagtctgtccgcacgctagagtgttagaacagtcagtttgaccgctgaccgctgatcggacaggagcgggttcaaccggtatgaaccagggatagacctggtgaaaaccagttgagctgaagttggacttaaaagttcagttggtcttcac

SEQ ID NO: 85667 - DNA, 386 bp, Zea Mays
gtcttgtagggatgacaggtgaacactgccctccatcacaagttgaacttgttgctttttgtgtttgtgaccattggttgctgacatagccaactgatgtagggtgtctcgtcttttgatggtaagcagcttcatgtttttcgaagtgcctctcggtcgttgtatataagggtagggcggtgcgtggttattccttttctgcgcactgcttcgttcctctactctaccgctttttctcgcgccacatttctctctctgtcttgttagtgacgattgctctagcgtggatttagcaaactgctcgccgccaacgccgatacatgacaccgctctcttcttcctcatcattaagtattgtgccccctgctaggatatcgccggcggcg

SEQ ID NO: 85668 - DNA, 536 bp, Zea Mays
ggttactgtgctgtaccacgggttgcatgcatccttatccatggatctctgaatgaggggtcatttcttcagaggataagacgtacgggttgcatgcattctattagatgtcgctgctcaatccatcgattataactactgtttttcctctttttttttccccatacaatacaagtgacaaaacgagtggtcccacgtcctctcagactcgtgccagatttaccttttacctttcccgttccaagatataagctgcgccagctcctctgaagaaactagtgtttctaattgtagctctgaagcaaataataaatactagcatcaacgaacgccaacaacttcccctacgtctctgctcgtgcttccaaggaaaccgcgatccacagggtgcgatgcagtgttccagtccacgcgggattgtcttgtccgtgagaccgtgaccatggacaagctcgagacaggacgccgcctccatctcactgacagctcaactcagatccctccctcgccattattgtacatagaactcccaaccc

SEQ ID NO: 85669 - DNA, 1361 bp, Zea Mays
agcaagacgatccaagtcagttccctgaccctcaagaccgcgctccaaggtcgatgaggcgcgggacgctgcccgggatgaccccaacccgacatcgaacacatcagcacaaacatccaccgcgtcaccatccgctggctctgataatagatcctctggaaccatatcttcaagagtctgatcaaagttcgccagatacaattcttgtagaccaataagggcagacagagcaggagaagggactccactactttccccactggctacatattgccgactgttcttccgagtcaaagggacttcatcttcttcctccccgtcgttttcatcaccaacacagacagcacccccattgggatcagcggcagatggagcacacccattgggatcagcgacagatggatcacacccattggggtcagcgtcagtaaattcaggcacaggcacttcctcagcagcaagaaccgaaggaccaacgtcccgatccaaactagatactcgccgaagacgtctctttttctttttctgctcatcagcaggagaatcaagttgattggctcggcaagggcgtttcgggcgaacactgacaggtctctgaatatccgaggatgtaccagctttcgggagaggcgccaccaccaatgtcccagcaggagcagcatcagaagagtcctcggccagcatatcaagcatagcacttatctctgcatcactaggatccaaaggcacctcaaagtggacctgctgttcgtcatcaggaatttctccaagcgaagcaaccaaagcactgacttcttcggcagagggtcgcactctaaggcccaaaccgccatcagcaacaggtggattcgacacaaaataagtaaaggccttggaaggaggcaggttctaggccgagtatgccacaggggcaccaacatttgataccttgcctctaagaatcatttcaagccggttcaccaagtctacagcgggaattcttctgttggtgacccgggttgagtcagctagacctcggtacagataagccgggtatgccctgtccttcaacggctgaatgttcttgaagacaaaatcagcaaccatagcctctgcagtcagacccctctccttcatcagtccaacttcagccagcaaagcccctgcctcagccacctcctgatccgtgggggactcggtccaactcggagtgcgaacatctggctgtctccctgaccgtgggggagagaattttcgtggttctcaataataaaccactccaagcgccatcccttgatactatccttgagcgggatttcaagatagtcagtctttctcccacggcgcgtctccaaactcgcaccccccaccagctgatgctg

SEQ ID NO: 85670 - DNA, 459 bp, Zea Mays
aagatatgttactttgattgccatagatgttttctacccttcaatcacccctttagaaggcagagaaaggagtttaggaagggcaccatcatcacgaagggactgcccaagcgacgtagtgggatagaaattacagaagaacataggaaacttatcctagacgagagtgggaaaaagtatcaaggttttggtgaggagcataactggactcacatatgtggcttgcgggagcttccttatgctaagtcattgattttgatgcacaacatcgacgtcatgcatcaagagagtaacttttaccaagccctcataaatacatgcatggatttccctgataaaacgaaagacaatgacaaggtacgcatggacttagtcgtgatatgtgaccgtccaacccaagtgcttagagaaaacggaggcaaaccaaaagctgattgttggtccttgttctcaaatgtt

SEQ ID NO: 85671 - DNA, 490 bp, Zea Mays
tccatacccacgggtccaactgccatccctagcggtggggccgaagtggggtgaagaggaaccccctcggagtcagatggggcagtctgaggcgcgatgtagagcgtcgtggcgagtgcggaggtcggagtggcggagaggctaagctcctcgagaaggaggtcgttcttcacctctgcaaagttgggaaacagcttcatgcgagtgaggatgggcgtcaaatgatcgaagcgagggctcaaacaacgtaggaggttgagcatgatgccctcatcggtgatgggggccagagggtgcggagagtgtccgccatcatcttcatctggcggcagtactcatccacaaagagatcgccctaagaaagctggtgaaaggcggtctcgagatacagaatccgggtctggtggttgccgagaaactgggcctcaagggcaccccagatctggtgagccgtatcgtccgaaacacgaacgatatcctgaagttcggc

SEQ ID NO: 85672 - DNA, 716 bp, Zea Mays
cccgcctcgggcaagggagacaaactcaaggcaagaccatcacagttcgtcgggggacagtcgcattcaatacatatacctaactcgctcaggcatgcgggtgtacaaggacaacaaaactgctgtcttgtcaaagattcaccaactatgattacacatgtgactactgttcatgcacgccatgtgcaaactcccgatgggacgtgtaatatgacaggagcacaggctagccctcaggcgcaaacttcttctcccgacgcagaactcatcctcgggacaaagcttcgcctcgcctgagcccggtctcggctatctgctcccccgcgagtcccgcaggaggccactccttcaactgtggcgcacgtcttcgaatctcagaacgagtttggtcgcaacctcaagcggacttccacctcgcctgagtctggctctaacctcgatatccacaacggaggacgagcgatgtcatcagacaatacagagctaacacactacttagagaagccttttcccatacttggcactatgccaaccactacgatatgggcaacctcttgccaggggtctcaggtacgtgatcgagccctcggcctcagcctcggctctcagcagaaaccaaacggatgcaagtcaataacaagtacaagaccattcctcaagccataccatctacatcggtacagtgacatctcctcatagcgcgcggccaactcccg

SEQ ID NO: 85673 - DNA, 426 bp, Zea Mays
gagtagtaccgttgtggcttgcaagttgtagtggattgtttggtctgccttgttaaagtcagagtcctcgttgtcatttccactttaatactccaccaagaataatcccaaattgtagtggtttacctaatcgtatcgaaagtaaaggggtgtgtttaggaatgcgtggatattggaaagggattttgttagatttaaccgtcttgcgctcattccgcttggagaacgtcgacttgacgctggatgtggaaggcaatgaagaagtgtcggtcttgtagtagaccagcttttgcatccgcttcttcttcttcttgtcccttttgtgtgacttggaggagccttgtgatgcttccttattttccttgtgcttctcctccgagggcactctttctcttgacaacaccttttcttcgtgcttcactcccg

SEQ ID NO: 85674 - DNA, 501 bp, Zea Mays
gttcaactacatttgtgaggctctacaataggctaaccccatactctaggcaaacctaaaatgtagctcatcaaccagggttttaccccatttagaaggtagcagatgccataagaatgttagcttaggggcgttaatagtctagatgagtaattgtgtatgactgtatgagtgggagcaccatcttagagatagttgggcaattcaccagaactatcatgcggttagttgccctaagtactttaggaaaccaaatgagtacagtgtataagggctcctagtagttccataagacgggatttcatggtatgttagatagcattgattgcatgcactaggaatgggagaagtgcccgaagatatgacacagtagttatcggggtcatttcaagaaacctacgctgttcttagaggaaataactagtcctgacctttggatttggcatgcattttttggcctaccaggttcttgcgatgacatcaatgtcttatatcggtccc

SEQ ID NO: 85675 - DNA, 522 bp, Zea Mays
ggcgggtttattccgataaaacatagggtttcgtttgcaagaatccgcgactgaaggggtatggtcgattgtggaccgcccgatctaatcctgacggctaggattagattcttgcccccagattcaaaatctacggtgcatattttaattctcccggagccttccagatccacccgatcgaatcgcaacggccaggatccatctgcctgaatcggtatgacatgatctgattttagccactcatcttcagatcaacggctcgaacgattcttcccccatccccgtcactcgacgacggcaccgcccgggtgctgcggtggtccatcgccggagtcgcatgaaatgatgcctaggagcggcaatcctcgattcgagacccgatacacgatgtggaggacaatttgaacaagttgggtaggcacataccgccggtagagtcgaagatgggggttgcccatgatgcacgacgaactcgcaatggccgcaaggaattgcggccaccgagaccacctttcttccctt

SEQ ID NO: 85676 - DNA, 645 bp, Zea Mays
gtgagatctaggatcttctcgacctcgctgcgctacagcaggccaagagttctatgccgcggtgccgagagccaagggtcgacaagcatactccatccgcttcgtcggagaacgacgtatcgttgggacatatgctcgagtacgaggaggaaggcacgacacgtgtctcatcccgtcggcgcccaaaccctggccattaccctgggccctaggaaaaagaataggaggggcaaggcatcagccatcagaacaattagcgctacggaggatgcttcaatctcgatgaggatcgaatttgatcccccttctatcgggacctcaggcctttggtcgtcgcatcctccgagcaccagtaccatagcgcgcccaccaacatcacaaattacttgggagaatcaaacctcgacctctggctgggagactaccgactggcgtgttaggtgggaggggcaaaccatgacaatttcataatctggaacctccccctgtacttggtacttggtagactcggcacgagcgtggttggaaaacctgaagcccggatgtatccaaagataggttgacctcgaggaaattttcgtcgaaaatttctagggcacttacgtgcgcctgggaaacctgtgggacctcaaaaactgctggtag

SEQ ID NO: 85677 - DNA, 710 bp, Zea Mays
ctaattagggtttcttggttgcaagttagggttttgagcatcctagggtacatttagcacttaagctctctaagataacatttattgaacatttctaccaacctgttaagatcatcctttagtggtcatctcacatggcaacatgcttctaatccttgaagagagacattccaacctagggtcaagaatctcttttaccaagtcagatcatcacacaagcatcacatcacatgtttgttttgaaattttatcctagtggatgcatcctaggtgtatcatacataatgtaatgccaatgcatatgatgtcatgccaaagttttagttcgtgtaacaccaggggtgtttcaattaagcggagtgttaatgtgaacaagtgtaaggtatctagtctaaaaactcattactgtcatgttatttttcagaagctattaccattgcagttcgcaacgtttatctagaaattgttgctcttccattgatttagcttagtaggtacttcaatgcaatatgttcaaaggagttgagtgctgaagatttaaagcagttgagcacctcgattcctgaaatcctttgtcgtcttgtgatgattttcccactagactttttttatataatgattcatttgccgattcatctagctgaagaggctaaacttggatagaacaaagcgcaccctggaagctcgatagctgagggatatatccaatt

SEQ ID NO: 85678 - DNA, 447 bp, Zea Mays
tatgccctactaacggagcaatcggcttaagtcggcaatgacttaaggtggtgcgacatgctcacgcttacttaactcggggtgaccactataccctacttacggatcaattggcttaagtcgacaacgacttaaggcggtgtgacatgctcgcgcttacttaactcggggtgaccactataccctactgacggagcaatcggcttaagtcggcaacgacttaaggcagtgcgacatgctcacgcttatcttaactcggggtgaccactatgccctactaacagagcaatgagcttaagtcggcaatgacttaaggcggtgcgacatgctcacgcttatctaaaactcggggtgaccactacgccctgctagcggagcagtcggtttaaattgatgctgatttaaattggcactgcacgcttggcacgttcgcaatcacccatctta

SEQ ID NO: 85679 - DNA, 415 bp, Zea Mays
ctaaattgggcacgggagtgaccgcaacgctagtgattgcgatcaatcagtccgatccgctacccagcaccccagttaatggactcaaaacttcgtctgtcacctccgtcactctcagagtagagtaatctagcttccaccaccctcgtcattacctactactacacggtataggatagcaagggtggatcagtggacggcactgctggaaaaacaaactcagacttattaagaggggacaggctagttaatgcccagacccgttgcatgcccgagtcaatggctgtgttgtggctccatgcatggtgaacggcactgtgatatactccctccgtctatgagtttattctttttaggtttatcttaagtcaattgttattaactttgaccggttatactagatgtttcataagat

SEQ ID NO: 85680 - DNA, 426 bp, Zea Mays
tggtgcatgaagctcctaggccataacgggggtggagggggaaattgctgaccagttgaattgtttgacatcgcctgggaatttgtggcattgtttgctgggtccattctattatttgtgcacatgggagaaatgaagtgaaatggtgtaaactgaatggaatgcacattataatgtacaatcacatgtcatataaaaaggtaaacatgagaacatacgaagcatttatacaagcagaataatgatcaaaggttctgattaactgtttgactagcaacaacacaacttgatgatatcagagtgatcatactacaaattatttgacaaatccttacatcaaactaggttatgataactacatacccctaagactgaaacatagatgacaactgaaatgtcgttttagagcacacaacctaaaagttg

SEQ ID NO: 85681 - DNA, 375 bp, Zea Mays
ccgccgcagaagatggagaagttaaattttcaaaaccaatgcagcgactcgaggcatcccgcgcatggcccaacaaagccattaagtgcggagatcacgggtaagtcagccgcggggacaggcgtggcagtcagcgtgaccaagagcggaccggcaataattgcaccaaacgggcgtgcagaagcagcgagccaatcagtcaaactttggccccacctgcaggctcgtatcctcccctgaggcgggaccaggggccactgtcggtaccctgaatcaggggtaccccttactacagtatgaagacacggtgcccgtacggcgatctctagccgcacgaagaacagctcccgaccccaccacgtggacggctcaatg

SEQ ID NO: 85682 - DNA, 570 bp, Zea Mays
ctaaaatacatctaacgttgacacagatgtcagattcagttgtattgtgaactaagatcctccatctacgactctacatgctattcattcgtacaaatttatgtacctacacatacacaccatgttttgtgtaaaaaaatcctatatctaaaattgtatatgttgctcgatcaaaaagatcatttatttttgttattcgtaaccccctcaaactatatagcaaaaacctgaaatcttcctttcctgttttgacagccacttattgcttagaatcttcagagatcaaattagataacctacaacttctaaccggaaaagataatttccaaaagagactgaagtacaacagagaaaggtaatttccaagaaatcccttgattgttgacattagttttttttctccctcccttctccattacgattgaatgcaggctgaatttatccctaaactctatgattcatgaaacatcctttgatattctattgtctatgttgctaactccaaatagaaataaatgttaatcaagagatacacatcttaatagcactttcagaattttgtttttaatt

SEQ ID NO: 85683 - DNA, 401 bp, Zea Mays
tggttaaggagttatgatttatgggagatctatgggattttgatattaaactatattataaattgtttagtgtatatcatatgagagactattctataaataattaactcagcttaaaccttaattataacttgactagagatcatattttagttaaattataattatggataagttaacttcgattagaggagttaatctattaaacatgggctagacaaatttctaataataaaagtatggggtgcgataaatgttagtgtcatattgtataaatgatattgttttgaatccaacgtaattcgaacggatcaaatcggagttacggttcttaagttatgattttccgaagttgttaaatacttggcacgagataaattaagtaaacaattttaatctat

SEQ ID NO: 85684 - DNA, 890 bp, Zea Mays
ccctcttccgttggaaactaaaaatccagaaagtaggaatggagcctcttcattctcctctactcctcaaccaaacacaccataagtgagagagtgtaagagaggaagagagttttggaaggcatgacctagaagcgatggaagaaggcatctcctcagcactgatgccaagcctagccacatatgcaaagggatagaagctgatgtcatcgacattgatgttgaattagatacatgtgtggtcgatatgcagtggacgatccaatttcaattagtgaccggacaaataaaaaggatacatgcagaaccatatcagaattgatgttgccatatggcgattagactgtctagatgaaggtgtcctccttcaatgcatatgatagaatctcgccatggatcaaacaatctaagtatcataggagggatcgatgggtagatatgatgtgggttggtggctatttttagcatgaagttatggcggggatgttcgacgatggtgatggaggacacctaaacgcatggtcggggaacaacttggtctgatcgccactagagcagtgcaatgataggtcacaaccatacatagctaacaccattgcaacataggaacggggaattgttcaacaacgaagatctaaatggaagaggttggtgatgagagaaggtaggggatttttgttgtgctgcatgttataacaacgataagggcattatgttaataggatctttcataaacaagggcactccccccccccgcaacgaagatcaatcaccctaggagcacacagtgcataagcgatgtcttgtgccctagattggaacttgaactcgtgataccatgtaggatggatagaattggtgggctagttgattgtattgctaagcctcag

SEQ ID NO: 85685 - DNA, 287 bp, Zea Mays
cttcacacgccttttttaggcccaattcggcgccccagggtctcgcctgaggcgttgttggcctctgtgggcaatggttgtacgaggctggagcgtgccccactgactcggccactcctggcaggggaacctctggcttaggctggaggtgatgaccccgtgcttcatttttagtctcttcggtgtccatgggatgctccatctctcagctgcgggtaagtgcgtttgcacggtgatgaccacgtgcctaaatgtactgtatgtaacctccatacattcactgtaat

SEQ ID NO: 85686 - DNA, 2532 bp, Zea Mays
gcaagattaattcgcacaagttttgttacctttgccttaccagtgttattcaaccttgaatgcaatatggatgcgggtgtggctgggtggtaagtgcaagcttctccaccatgtcgctgctggccaagttgttgcagctacctccatcgatgatcactcgacatgaacgctctttgatgacacactttgtttggaacaatgtgtgccgctgattttgctccgctttctccatttgtgcgctcagcacacgctgcacaattaggctctcatagcggtcggcttcatctgcattaatatgttcttccgagcagccctcacttcgtgcatggtcggccacaagcaatgcaagtatatcttcatctagttcactactagatgagtactcaccatcagctttgaccaccaaaacacgcttgcttgggtagtcatgcataacatgtcaaaatcccttgcagcggtggcactgaacatctcttgttctacctgtggatgccaccgatgaagtggttgcagcaggtttttgcgttgtctttgctgctgaatttgcagggttgtcacgaggcttgtcgctagatggtggggctgctgttcgagctgacgatgaataacgtgcagcagcacgcccagttgatggaatacttgagcggggctacatggaaatattcctccctgcagaaatgttagtcctggtacttgcacgtcgtccttgtacttccctttcaactttgcaagctagatggaacaaacaggttatgttattgtactctttataagcaaggatgtcctgaatttcccagtttatcccgcccaaaaatctagccgtagcagattccacagcctcctctaaattgcaacgtagcatgcccatttgcagctcttgatagtattcttctacacttttagtaccttgctttaactgctgcagttggtttaaaagatcacgtgcatagtaagatggaacaaatctagccctcatgatccgtttcaaaacatcccaagtttgtggcatgttatgaggatttttttgccatgttctatccaccaaacggaagaaaaatcagtgaattcactagttgaagccctaacacatgcatttttaggaaaatcatgacaagtaaacttttgttcaacagccatcttccaagtaagttaagcatccggatcatatttaccatctaaagagggaatcttaaattttatcttattgaaagcaatgtcattgttatgtacctcatgtggacgctgtccacccataccttgacggttacgacgtagacgtcgctggcctcgatcctcaacttcggtgtcagcagcataatcagcacctgtattttctacgccgtcctcatccccttcgcctcgtcctctatgctgatcatttgtcttcgcgtggagctcatcaaagcgccttagaagagcagcgagactcttgtccacgtgagcaacattcgtctccaaacctgcaagcttggtgttgttggaaatctgtgcggcctccatttgcccaatcttctcatttctcgcctacaaatcattatcaattccaaaggtgtactccctcacttgcctttgaaaatgttgtacgatgcctttggtgcgaggtgtaagcagacctccaccatcctcatcctcactccctgtacctgtcatggttagcttgcagcaaacaaagtcacaagaagtttcgtaccaactaaaggaaataggtggtggcacactatatgtttactcacacttgtccattcaagttcttacatgttcttaccaagcaatgcaggaggtgtcggtagccagcaagaacaacacaaatggttacacaagcacaaccccgtgatgtagtagataatttgtggagctataggtggctgtaaacaaaacaaatcaaggtacatctagaatcacattagtcaaagcaagttgaatagacattcattgatggtcctatgctggtcctagtgccaaatcaagctagagacgtgagcctgaacacaaatattgtcagacactaagacaacaaggaatgcaagaaaacaacaactctattcccttcactttttttcttctcttttttctccttttctttttttttgctctttctttttttgggctaaaaactcttttgaaaaaccgaacaacccaaacaaaggaattactgcacacaactcctttgaaaacaactccaacatctcaacttccagacagcagcacgaatctcaagtgctattacgacgcgctcagaagacattagagagtaaatttagatccgttggaaagaacatgagataagctttccagattgtatttaaacatttgaatcggacatgtaacacaagatataggactattttcttccagtgctcagatctgggaagatggattcgtggaggcagaaatgacaacagaaatatgaaaagatttggtggatttcgtggtgactaaaacgttaccaaaactccaaactctaaagattgaaccactaagaaccatcaactagcccaaacaatgcaactgaaaattcaacaagcaaagaac

SEQ ID NO: 85687 - DNA, 572 bp, Zea Mays
ggggagtgtgctggcatgcaggcctcgcttcccatccatggtgcacgcatggcactgcccagtggggcgcactggtcggactcatatagcgcgcgcttgactccgctgactaagatgtggtcccgcgctgccatccctttcctccccttgtaccgaactctaaatccgatgccgccgtgctcggaacgggttgttgagatttcctcgaatcccgtaaaaactcgggcggccagctagggccgactggttctctacgcggatctatttagccgagctctcatccacctcgcgcaggcgtgatagccatgagggaagacacgaccgtgtgagttgcgccatagcccctatgtgttcaacgttgtcgcgccctttttgtcaagtcgagaagctccgccagttcgcaagtgagacggtggcgacctcgccgcgtagaacaagcgaccaagggcatagggattttttgccggaggaaaaccgtcgccgtggcttcactgctcgcgtggccaggggcactccttctccgatccgcggtaattagctcctcccaaagttcgttgcatccttaggatcgt

SEQ ID NO: 85688 - DNA, 881 bp, Zea Mays
cttacctctggactaacagacactgaatactgcatcctgaacaacgacacttatctggcggactacattaactgaatgcagatgcagaaactttcagtaaagtgtttgctgtctctccgatgaccaactgggcagcaggttatttggcgacatttctcccaccagctcacaaaactgatttaacactgatttgagtgatcagttgctggaatcttgctcgcccgagagcctttgtcaaaaagatctgccagctgttcttcagttgcagtataggtcagcttgattttcccttcatcgatgctgtcccagatgaaatggtaatgcacatcgatatgtttactttgatcatgaaacacagagttcttactgagtgcaatggctggttggctgtggctgtccaccctgatctctggcggcgcaacacctgaaccggtcatttcactgagtaacctggcaagccaaattgcttgacatgctcccattgcaaccgcgatgtattctgcttcacacgaagaagaaagagcaacaactttcttcttcgatgagagccatgagataggaatataggattacctccaagaaaaaagttgactccagttgtgctctttcggctgtccacgtcaccggccagatctgcatcgctctagccgacgagcattggttcccatcttttttgtctgaaattatgaagcccatagttccttgttccgactacataacgcagtacccgcttgactgcagcgaagtaatcctcctttggttcctccataaaccggctgagatagccaactgagaatgcaaggtctggtcaagtatgaagcaaatgttgggaatagtcccacacattgtgtgttatagaggagcaagtatggtttatatgg

SEQ ID NO: 85689 - DNA, 484 bp, Zea Mays
ctcgcaccaatgaggcacattcatgccaaggagccatgtccatgctcgtgcgaggcccatggctttggaggtcgccaacattaggaagtgccgatatggtagcaccgctgtgccctcgcgaggctcgctacagaaacctggtgctagccaggatagatgctatagcgggtagttgggtatgtttaaggttcgcgcgcgagaaacccttaggccggccagaatggatgcacatttgatggttgggcggactccgaggcaacgatcgatggctacgaagctctcaaacaatgtcgaatctacacgagttgagtggtgctggtagggtaggttgcaaatacatgacgatctcgatgcatgccacccatctctatgcatcaatcggcgtttcggacccgcgaggaccgtcaaccgaccagtaaatttgttgttgcgtgtccctgcccagatgggttgatgcaagatggaacacaagaggcaaaatgag

SEQ ID NO: 85690 - DNA, 721 bp, Zea Mays
gtgggaacttgtaccttgtccaccacatgtaagtgggtctatagggttaagacccactctaatgattctcttgagtgttataaggcttgtcttgttgctcgtggtttctagtaggaacatggccgtggttatgatgacatttttgctcctattgctcacatgaccactattcgcaacctccttgatatggcttttgttcatgaatggtccatctctcagtagctgatgtcaataatgcctttcttaatggtgagttgcgtgaggtggtttatatgcagccaccacctaggtattctgttcccgaggctatggtttgtcgccttcgtcgttctctttatggcctcaagcaggctactcggcttggttttagcggttcgcttttagtggtcactactattagtttctcagcgtctttgggagcttgtctggctttatattccttcttatatgccctccaatcttgctagatccgcttctgctgcttctacctcatcgtttgttcagtggcatcattgctcggtcatctttgtgtctcctgtctgtctacgctaattcatcgaggttttttaggttcagtttcatgtcatgagtccttgcatcagtgtcagggttgtcgtctaggcaagcaggttcaacttccttatcattctaatgagttagtgtcccatagtccttttgatcttgttcatttagatgtatggggtcctgctccttttgtttc

SEQ ID NO: 85691 - DNA, 856 bp, Zea Mays
cacctttggggccagagtctcgatgagtgtaaaggggagatgttggttcacggatgtacgaaccatcaaagaggatgaatacttcgatctaaagcataatgtgcaggcaaacgaatatcagggccattagatggacacatgacagtggaaacagagatctgtggattaaaaagatgaatagagtaccttctgcaaacagagaataatcagaactgatgcaatctgtgatctacgagtgagtatgacgatgatccccttcttcaaatgacatataggtcatagagatcataccatcgttagcatgatgggatttgtgtggcttgtgaaggggtggagggcaataggaatggaagaacttactcgtaccagtttagtggtgtctgtgccctcctggacttcaacaaacaacattctagcaatgatggcgacacccgacagcctgtgacatgagggagagaacctaagtagtgaatatggaggagatgtgctcgagcgatggtggagaaggaagttgggccacaaagcttacctatacgaaaaaagtgagtgatggcaatgcattctggccacaactcgatctagggatgaatgtggccatcgacagatgggatctcgaggcaatggaggcaccacggtagccaccgagtgtggcagcgacacgggaggggaacgaaaggcgctgaaaccctagcagtgcaaagaaaatgaagatgtcgaaggggcccaggagtgaagtgcctgacaagctgccccacttcccaaggatgcaacctctcgcctgattctcgtgggtcattgaaaatgggattcatggagaagcgcttcaaaccgaatctgttcgaaaagctatgcattt

SEQ ID NO: 85692 - DNA, 1069 bp, Zea Mays
aaattgtcaagcttcagtggcactcctcttggcgaccaagacacctttctttatcgcagcacagtaggggccttacagtaccttacccttactcgaccagacttgtcatttgcagtaaataaggcgtgtcaatttctttccaagccgactgatgttcactgggaagcagtgaaacgaattcttcgatttgttaaaggaactgctcatacaggactgaaaatcagaaaatctccatctaccctgctgagcattttcactgatgctgattgggcggggtgtgttgatgatcgaagatcgactggtggattcgctgtctactttggaccaaaccttatatcatggagtgcacgcaaacaaccaactgtgtctcgatcatcaactgaagctgaatacaaggccatagctaatggaactgcagaaggagtgtggattcagtcattactgaaagaactaaatgttattcagaaccggcctccagtcctatggtgtgacaacctcggtgcaacatatttgagctcgaatcctgtgttccatgcacgcactaagcacatcgaggttgatttccactttgttcgagagaaggtggctttacgcgcacttgaggttagacccattgcgtcaggagatcagattgcagacattttcaccaagccagctaccaaacaaatgctagaccgattcaaacccaatctcaatcttgtggcgacaggttgatattgagggggatgttaacaaagctgttacctctgtaacctacctggaagataggaatggttagctgaaagataggaatggttagccggatagatacgttcagttagcttcaacaccggataactattcacagttttatgtaaatccttttgtgtattctaatctatataatgagtgttggccgccctgattagcggcgagccattctgtatctcaactgtagccaaggtcaacaaatggccattgcgtcctatctgtcattgatggcattatgccagcataagctgccctgaacctctccaccgattagtagtcaagaacatagtctgcaatcctacctctattatccaagcca

SEQ ID NO: 85693 - DNA, 517 bp, Zea Mays
tggagatcaatctttgaaaatacctttgccccaacaagctggtcaaataacaagtctattcatgacagtggatacttgttcttgataattacttcatttaagggtctatagtcgacacacatccttaaggtttgatccatctttttcacaaaaattgcaggacagccccacggtgaggaactgggtcaaataaaactcttttctagcaaatcttgtaattgagtcttcaattctgccagttcatttgggggcattctgtatgatctccgagaaataggagttgtgccaggcttaagttcaatagagaattccacatcacgctctggtggcaaacctggcaactcttcaggaaacacacccggaaattctcgcaccaccagaatattgactaactctttgactaccacactagaagccctttccggagtttcctctagagaagacaattggagttttaactgacttcctcctaacactgcatttatctgaatagtccattttctcatgtcaataatgc

SEQ ID NO: 85694 - DNA, 1298 bp, Zea Mays
tgactaccagcgagtcattgtataccattaaccttttgatgcctagtgaaatggcgatgcttagcccgtaaaccaaggctttgtactccacgacattgttggatgctggaaacaggagctaaagcatacttgagttggtcacctccaagggcaatgaaaaggatccctgctcctgccccctgcaatcttaacgagccgtcaaagtacatttttcagacttcagcagcttctaggttttctaggacctggtgctcagtccattccaatatgaaatcgaccagtgcttgagtctttattgcagtacgaggttggaattctatatcatgagcttcgagttcacatgcccatttggctattcttccaacagctcccttattgtggagtatatctcctattgggaatctcgtgactactatgactttgtggtcgtcaaaatagtgtcggagtttatgagcagttagaagtactgcgtataatagcttctgaactcgaggataccttatcttcgagggactgagaacttcgctgaaaaagtaaaccggatgctgtactggatacacacgcccttcttctgcccgctcgactatcaacgcagtacttaccacattagtcgtgcaggagatatatagcagcatgtctttggccagctaatcagatgtagctcgacacagcagcttgagtattggtggtgtggtcagaaacttctttagtgcttccaaggcttcttgagcttctgtggtccactggaatttatccacctttttgagcagtttatagaatgacatccctctttcgccaagccttgaaatgaatctactgagcgctgccatgcacctagtgagcctctgtactttcttctgtgactgtggtggctccattctcataatggcttcaattgtttccggatttgcctctattcctcgatggctgacaataaacccgagtagctttccagccgataccccgaacacgcacttctttgggtttagcttccatcggtagcgcctcaagctgttgaagacctgttacaaatcctcgatgaagttgtctgagttttcagtcttgatgactacatcatcaacataggcttccactcgtttgccctagtggtcgactaagaatgtttggatagccctttggtaagttgctccagcgtttttgaggccgaacgacatggaggtatagcagaaggctccaaaaggcgtgatgaatgcactcttttcctcgtcttcatttgccaaactgatctggtgatatccatagtagcaatctaggaaggagagcatagaacagccagc

SEQ ID NO: 85695 - DNA, 724 bp, Zea Mays
ggcggtggtcggcggagggggtgtgagtagggatgaaaacgaacaggaattataccatcccatcccgtcccgtattcccatttaaaatcgtccgttttcgtttaatcgggaaaatgtgaaaacggtacgggaaccgggataggtatatccggaaacgggaccgaaaacggttggagatgtttcccgcccgtatttacggtatcccatattctaccgggaatttcccgttttatcccgttttacgttttgtgggtcgtgtgcgtgcgtgaaagcccatgagccatgaattcttggcccattggccattgtcgtgttgttgcccatagagaatttcatgtgcatcgtccctaaccgtaacatacataatcaataaacaataggagacggagagcacagacggacagacctttgggcgtggggctacagccagcaggactctgtctccagtctccaagtcaaagttgcgacgacagcttctccggttctccctgtggtggatagatctgctgctcgacttctccagttctccctacggacggcgcgtcggcacgccaggtcgccagcggccagcaccagtacaccaccgaggcaccgacgcacatcttcagcaacacgccaacacagctcgtcagctctaaatcaggtatactgccaccgcctagtagttgcctgttaatgttgcctgttgtggttgactggtaaattgatttttcattgctaaatt

SEQ ID NO: 85696 - DNA, 550 bp, Zea Mays
gcagtttgtgtactgaaatgttgctttgtgagcagtttgtgtactgaaaagttctttgcttgattctggtgctggtatgttcacaagaagatttgatggttcagttgatttagatataggacttgaaggtgcttgcttgatctccacctcaccatcgtcatgccctgcatgtcaaaggcccgctagtgaaactgcggtgactttttactgcaaggtattctataatggagaactaaattcatattgtttagaaattctttcataggcacacaacggttttgctaattactaactctcaatttaatgccagatgaagaaaattaacactttgtacaggtgcaaggttctgatgagcaaggtataggcaacagagcatgttaaagatacagtaaattcaatgaaccgatccattccacgtctcctatgttcagcttctctgggatcaaattcttctctgctcacaactagcaggcccatgcttattcccatagcgttaactgccagttcagaaagataacatgagtgagttgtagctacagcgtacttagca

SEQ ID NO: 85697 - DNA, 462 bp, Zea Mays
tgcaaccatcgaggggttaaggtagttgcatatggccaggttggactaagactccaatttagattaaaacatatttgtaagaataggatccaatcttattttaccagtattatctaacatgtttgtccattagatttgatcagagatttgatcagattagatgggacaagaattaaattggtgtagtcatattagactagataagatctacttaatttattttggaatatagcatgtttgttacactattatgagataagcaaagtggtggggataagtatgcttattaggacaagatgagtctctaagaataagatagaatcttttgagattagttagatctattagggtaaggtaaaatcttttcgagataagatggatctattaagataagagagaatcttttaagataagatgaatctattaaactagatatatttttaatagagaatattctgtgtt

SEQ ID NO: 85698 - DNA, 623 bp, Zea Mays
gcagccttccgggagcaccatgtgccccaaggactcgtacagctaaaggaagacgagttccgagaattgactcaagacggaagatctgtcagcgaatatgtgcacaagttcacggagttagcccgctacgcgccagatgatgtcagtaccgagaacaagaagatggctcatttcctgaagggactcaggccagaactcaagacaattctggctagccaagacttcctcaacttctctcacctttccaacaaggccatgcaagttgaaagggctaaggaggaagaaaaaggacatctcaaaagaaagttccaggttctccgggcacagcagtaggaccggcaccagaagactcgatcatttgggtttccacccaaagggcccaacttcagtagaccagctggacccactccgtcgtgattcagccaccagagtcagagctccttccattccccctcagtggcaagcaaccaacccccggcaaatgcatgttggcactgtggtgatcccagtcacttcaagaacaactgtccgcagctgaagccaccaggaccgtcctcctcaccgaccagcagggaaagtcagtctcttgtcaggcacagccacccgccagtgacccaatgatg

SEQ ID NO: 85699 - DNA, 716 bp, Zea Mays
atcggggtcgcctcattcccatggaggcgcacattgaatttactgctaaagtaaccaagtctcttcatagattgcagatccttctccatcaaagtgaaatgaccaatttcaatatatcttggcttcgaaggtctatccttctagagcaggctttaatgacgacgaagccctcatggctttagagataggcagggtatcttgtcgtacctctgaagaggtaggtgtgatcaactttgtggttgtccggatcctagccatctgagtggactggaaattctcgaagacgactaagtagaagccgatttctgaagcactagtggatgggaagcttcagcacaaaagttttaggcagtgggtagttgagggcagtaaatgtgttccacgactatccgctcggctgcttttatactaaaaaatgggcgctaagcaacgtgagtcgttgaaaacattcctgtgcattaccctcaacttatctccgtctgttcaacatctagatcaattgtttttattgaattgatctatcttcttcgtaatgagcttcaagaaggttttttcggacctttggcacaaggcctcccaattctatttttgcaatctaagctcgttacaaaggaacgaactcattccacaaggggctactgttgggggcctattatgctgaagatcccaatttaaccttcacttcaatacaaacaagtgtgtttcaggtacattct

SEQ ID NO: 85700 - DNA, 563 bp, Zea Mays
atcgaattcaaagatatggcacgcccaaattgccccatatcactgtgaccatttttgattgcagtttcagtttcagttactcgacactagtctgacagagcaactttgggcagcattttctttaatttttgtataacaactaaagatactgtctgcatcaaagttattctcctataatggctctacaaaattgatgtggtgaccctagacaaattcacaatagttttggatcttcagagccctaaagttagcccttcaacaatgttttcagacttaaccttagagctaagatagggcctttttgcaaataggtccaaaactcagggtttaggttgcaaatctacacatatgtgaaccatatggcttgaagtgtttaactttcatggtttttgcactttagtccaaaagtgcactaattttgcacttagccccctagggtttaggtttagggttttccacggttccaattagggtttcttgcactcttagggtttggatcccacttaagttcatccatggtgacactttatgacttcttcaattgaattttgaagttttctctt

SEQ ID NO: 85701 - DNA, 410 bp, Zea Mays
ggtctggttcaggattatgatgacgacgtctaccattacctcccataccttgtcgattacgtgcgaggtgttgtcgcagcggtgcataaacatcgtcgtcatcgtcgtcgtcatccacaggagagtgagctggggctagagttggtggtgggggacgagcctccagtacgtccatgtgtgtaacaagttcagcaactcgtcgatcaagctgctcatagcatgtcgaggcagagtcttggtattttttaaaagcttcagtcatcgcgcgcatcatctccttcaattccatctgagagacacactcatcgtcgttaagtttaggccccttatccttgtccatttgattctttggtcctgtcattgttagcacaaaacagagacaaaaaaggcaacaaacaatgtgaaccctg

SEQ ID NO: 85702 - DNA, 492 bp, Zea Mays
gtttgagcaaaagaagaaatatgagttaaagaatcaaaatgttcatgatccatgacttagactagatggaaagccacttgagatatttttctaagtcataggatctctctcaaatttagccaaagaaccttggataagattgttcaaagatcaatgacaagtcagaaactcaagttctaaattcgccaagtgtggaccgtctggccccttctagcggacggtctgcgacaccactatgacttcgaacatgaactataaatcgtggacagtccggcaaatcacggaccgtttggctataaagagcgtaccgtctgcacgtgaagatctggttcatcccgaaggtgacaagttgagcaaaaggatttttagagctagagcgaaccgtccgggaccaagggcagatcgtccgcgtgatgtcaccgaggtagatagtcgttgatctagtcgttggtctgtcaagcttatccattgagatgtcagaaccgaccgttg

SEQ ID NO: 85703 - DNA, 528 bp, Zea Mays
aaagaatagaagcctctatccaacgattgatcggtatacgcttggcattcttcattaagaaccgctatgaacagccgttttttggcactgccgaaggctaatgccatgtaattttcacaaagaaatggtctgtaacaaaaatcaaataacataatttattgaaaggaaacatgtttgtggtaaagcatatgagcctctctgttcaaagatcatgggcatacaaaggacaagaacaatatttctctacaataccaaaggctaacacctatcgatttttatgaaaaacggtctccaccaaaagtacaagtatgctatttgttgtaaggaaaaatgagtgggtaagaaatatgagcctcactctaatgatcacgcatacatctggcattcttggttgaaaaacgctagaaacggtggttttggcattaccaaatgctaacacatatggattattcacaaacaatgaacttctccaaaagttcaagaatgtgattaatttaaaggaaacatgtgtggagtaaggaatatgag

SEQ ID NO: 85704 - DNA, 1549 bp, Zea Mays
cgatcacggtcggaaatgatagcttctggcatgccgtgtagcttgtaaacagatgacataaacagctgagccactttgaaagctgtgtagggatgcaagagtggaataaaatgggcatagcgagaaaacttatccacgaccactaagatgctattagcatgagcagaacgcggcagaccttcgatgaagtccatcgacactacctgccaagcttgttctggcacggggagtggctggagcagtccaggatacttggatctatcgggcttggactgttggcaaatggagcaagctgccacataatctttcacctgttgtttcatgtaaggccatgcaaacagttgatgaatccggcggtaggtaactggaaatccagagtgccctcccataggactgtcatgaaatgcagatatgaccttacgctgcagatttgaattagcacctagccagaaacgacctttgtatttgatgatcccattctgaagtttgtaatggccagcaggtgaagcagtcacggccagctccgatagcagctgctgggcgtgaggatcctgttgataaccgtccataatttctgaaagccactgggggctactgctagaaatatgataaagctctaaggattcatgggggtgacgtgacagggcgtccgccgcaccattttcaattcctttcttgtataatattttgtattggagacccaagagtttggtgaaaactttttgctgccacggcgtattaagcttttgctttgtcaagtgtgagagactatgctgatcagtgtaaattatgaactcatcgtgcaggaggtagggtctccagtggtcgacagccatcagaatagctaggtactccttttcataggtcgataatcctctattctttggacccagagctttactgacaaaagagagagggtggctgttctgactgagaaccgcaccaatgcctgatcccgacgcatcagtttcaatggcaaacggggacgagaagtcaggcagttgcaagactggggcagaggacagtgctgtcttgagtgtacgaaaagcatgatcatggtcttgagtccatacaaaatgtgtgttcttcttcagtaactgagttaggggtttagagatcaccgcgaagtgtcatacaaatttccggtaatatcccgcgaggccgagaaatccccgcaactctcgacagtttgcaggtactggccatgaggtaacggcgtccacttttgagggatctgttgccacccctcgcgctgaaatgacgtggcccaaatatgcaatttcttgttgtgcaaaggagcatttggacaacttaatctgccactgatcggctcgaagaagactgaatactaactccaaatgctgaatatgatcagaccatgtatggttgtagatcaatatgtcatcaaagaaaacaagggcacatttccggagcagtggggaaagagtcatgttcatcgctccctgaaatgttgcgggtgcgccagacaatccgaaggccatgactttaaacttgaaatgaccatggtgggtttgaaatgccgttttgt

SEQ ID NO: 85705 - DNA, 430 bp, Zea Mays
cggagctaggtgagcccctcgccggacatcatgccccatggtggaaccgcacagtgccattgttcgaccttgccgtcgtctcgatcggccggtgagtcacccctaccaaacttgccatgatccctgctacaagtagcgcccgtagaatcaaagtaatacaaattggaccaccgcctggccttactccggtgagccgaccgccgttgggttcggcgcgccgctgtctgggtaacgtcgagaggaagaaataccttggccgtgattgaacgagggacgatccagattaggtcatgggttggtgacctggtgaacgttggatcgacaaccgacgaccatgatttgatgcggagggtagttttggcactttaaatctgtaccgcaggttggtgatcgggcggatctgatgggtcatcgtggggggaattgcggg

SEQ ID NO: 85706 - DNA, 748 bp, Zea Mays
cactataaatttctctaaattatagacattaattctactttgtaccatgtaatatgttgtgcttgtactaattttgtttggagctgttattgcagctttagtaaatacctgcctaccagaatcacctacatgaaaaaaaagaaaggacaacaaaggaaacaaagacctacctagagcttgcctactcacacactaaaagagccgcggagatgcccttttggcataagttgtgactttaagagtagtatgtcgggagcaagctagatgcatgagaaaatagtgtaggatccaaacttttatgttgaaaggagatatttgttggtactaggtttgggtcacaggctattagtaagtattagtgggcaggcaccaagtaattagacccatattatttttctaagtaggaaaggaaaggacatctgcagtatggcctatacaatgttgatgtggtcacccatgcatggaatagctagagaacataaaatactcagatgctcgagtgtacgaatttctttgtcatcgatgacatagcgatacatcagccacaaccagagattcctgcttgcctttgacttctccatcaacaggatcagatgctactcatgcatcagccacagcaccttctgtgccagtaatacttgatgctaggatgccaactacgccagagagcaatagaaacattgatgtttataagatcagctaattttcgcacccattagcgaagaactaaaatgcttctttttttatt

SEQ ID NO: 85707 - DNA, 341 bp, Zea Mays
ggtctgtcttagatgcattgcacgtaagtcggtgatccctttcctgccccctctccttgtggagcgtccaatgtgccacacaatgactggacagtcgagccacttggagagactgcactgtcgtctgcacgaggagcaagaacgtcgacgccaggagcgagagcagcaggactcttccccccgccttagctggatgtggagtctaggaggcagccctcctctgtgcctcagctagaggtgccccatgcaccacaacagggcaccccagctactagaggaggagaccccgacggagacgacgatggtggcagttcgagccacaccacgaagccttcagagga

SEQ ID NO: 85708 - DNA, 690 bp, Zea Mays
acaaagctagcagagttgtatatggctagattagtttgtctacatggagtgcctaagaagatcgtgtcagactggggatcacagtttacttctctgttttggcagaagttgcacgattgcttggaaacacaattgaatttcagctcggcctaccatcctcagactagtgggcagaccgagagaaccaaccaggtactggaagatatgttaagagcgtgtgctcttaaacatggtggcagttgggataagagtttgcctatgcggagttcccttacaataatagctaccatgccagtttgaggatgtcccaatttgaggctctatatggcataaaatgcatgactcctttatattgggatcaaactgatgaaaggcagttctttgggccagaagttatacaagaggtcgaagaacaagtacgtttgatacaggagaacttgagaattgcgcagtcaagacagaaaagctatgcagatacccgaagaagactgttagagtttaaggagggtgatcacgtgtatctaaaggtgtcaccgatccggggtatgcagaggttcaaggttaaagggaggttgtccccttgctttaatggacccttcttgatcctaaagcgagtagggggagtttcctaccaactagaattatccgaccaccttgcggatgtacatgatgtcttccatgtgtcccaac

SEQ ID NO: 85709 - DNA, 1557 bp, Zea Mays
cgcggcagtaggctcaagcttaggaactcgctaccgaggtgtgcacccccaactccgagttccaatctccttgattttttattagcaaaattagctcgagttgctttcgcaggatcataaatttctctagggatttggcatatccgcgagtgagcagaattagttggaggcttcgtgatggcgggcgcgaaggcggatgtagacgcagaaacaggagatggcagcggggtcggcagtggcggcggcggcctctttagcgagcagatgctgattgataagctcaacaggctcaacaactcagccactagcattgagagtatcctttctcccgtgtctactttcctgcacggccgcttgcaaatttggtagcatagggtgttgctgtctgtttcctcttgattaagtctaaagccctaacttgtaaattgcagtgtctatgagtagaactggctaggagatctaagtataaccgtcttgttctgttatgcacagtgcttatcatgttgttagtttggacgcacacacatataagaattacaaatcagcttgtgcagtgtatcagtattacagtatgtttcatatcactctacttcctgacaattctcttgattgttgattctagagtctttcttgtgtagtacattcgagaaaggctctaagtttagccatgtcgttctaacttttaaactggttcgcaattatactatagtgactactaatagatgcaatgtgcagtcttaggagttcatgttatcattttccatttcacaaagggaacagcctcaaaatacaatgaaatccatctttattgggaaatggaaaccaaacattgccaataatggcaacaaaaaacaaagacgtttagtccctagaaagttgaggcaggcctcgaaatccaacaggagccaccaataaagaggataacgaagtaaagagaaaagaggcattaatgatggcagtaacagtaacagtactaaccttaagccctacttttgtagtttgaagtaaaaggtgagtgcagtattagcatgccacgtgttgctctatatgaatcgatagaaaaggagaatcctatgattgtttcagtatcattgtgcatgcttctgtgtgaggaatccatgccatatgttatatacaactccatctgtatgcaagttgctgtgatgagatatactgtgtctgcatatattgctgtatgtcatactaaccattggtaccctttagaacaaaataacctcacccctcattaactttccatgcttacactcaacttaatctggtattctggtgtccactgttgaagtgtataagtgcattgcctacctttttctgagagcttaagcttttgaattgaacaactggtcggtgcatgtaattttacatggtatcaaaaccatatatccctagttcgaatcctggtataggcaacaagtccttcgccccctttattccacgtttgcacatctcaggtgagtgggggtgttgaagtatatgcattgttcagtgttcacctcttcctgagtgtttatgctttggggttgaactggtcggtgcagg

SEQ ID NO: 85710 - DNA, 500 bp, Zea Mays
aattgtataggctagtttacttgtaccaaaagttgtaccattcctatacgtggtaatgtatatgaaagaaacccctctgtaatggggtatgcggtgattaccccatacctttctacatggtattagagacttgggcctaggtcttatcccacccaccctaaacctagcgccgcccactcctaggtcatacttgcaccttcgttgccaccaattctgggccgcaacacatcctccgttgtcgcgccgcctgttccttgggccactcccccacttcctaacactaccaggtagcgccagattttgccacgccaccaccatctcccaaccctccagcatgacgatggagtcctagacctctagcaccatgtatggcactacctctggtgtctcctccagatcggacctcacatcggcgttattcacccgccatacaccaccattatcgtggtctaggatgatgttatcttgcttcgatatgtaccttcagagcttcagttggc

SEQ ID NO: 85711 - DNA, 411 bp, Zea Mays
tagcgttttagttcatttaatctggggcgtccagagctgatcgagtggataggattaagtcagacgcgcggtcgtcacttgtgccgtggatcttggatcggacgacttgtattaactcgcgggattggcgggcgctggatctaatctgtgcccttagttctgatccgatggccagggttcattgataccccttcgatcccgtacatttgcatatgagcccctgctttatatacaaaccaacccgcggtccatcgcgagagggttatgtgtcttgggaagatttacaccgtggcccctgtactatctgctatttgtgcgcgcaatccaggacccatgggaaattgataaatgaattagaaacatgaatttctagtgtatgaataattctagaactcatttaaatcatagaaa

SEQ ID NO: 85712 - DNA, 349 bp, Zea Mays
cgtgcgcgggcgtgcactggggagcgctagtgcgcgaacgggcgtgaaccgggggtgtcagccacggtcgaacacgtggaaccgtagcttctgcccgagttctaacgccgagtgggtgcaaatcttcacgaatttgggcaagatcgctgtgaaggatttgttcccctaacagtgctttgtattttgtgtgtggacgtcgcgcggttttaagctagggatagatagttgtagcgtcacgaaggtgccagtgtcagattgcctggtcccgaggtcaaacggtgctaaaaccatgctaaatgaacttggtttgagttcaaatttttccagagcatgttcaaggaaatttggc

SEQ ID NO: 85713 - DNA, 563 bp, Zea Mays
tgaatttcgaagctataaacaaacaacgagacaaaaaagtttttagaagggtacctatgatcgttgcgtgttcaacaacttcttcagcttcctttgcctccactcgggcatcgtgagattctttttcactcttttttatagcttcatcggccatctcacgacctcccttcatccaaacatcggaatagaacttcccgtccatcaaagtagcttcgattgaaggttccttcgtatcgtatacagagaaaatggcttatgcctgggttgcagccttaacatgttcacatctagtcttctccaaaactgctgcaatccctcgggcaccggcgaaggcacaaaaatccccacggtcgctgagaatttcttaaaaagcttcgacttcttcgctgatccattgaataactccttcgggatcgcctcggataaatttttgctttgatgggtatgcacccacctttgcaaagctatcttttagtttccttgcacaatccatggatacttcgtagcatttttctctagaatcccaaagttcttcaatatttttttgcacccttgctgtttcc

SEQ ID NO: 85714 - DNA, 349 bp, Zea Mays
gaaaatccttgaagccgagcgatgactaacgagtgccaacccccatgaggtcgtgctcctccaacagcagcaagaaggcaagaccaccagcattgccacgggcgtgagctctccgacggtgaagtcgccagaaaacatcggcacacctcatctggaggcccggaaggcggaggggcacgatgaagacgagaggagcaaggcatggttagtgcccgggagatcggtccctttttataggtagatctccccacatacgccctaaaacatcgcgggcgaagtctcccctgatgtgctccaggattctcgccctacgacatgggggctaggtcccacatgtcatacaaactga

SEQ ID NO: 85715 - DNA, 352 bp, Zea Mays
tggtgactcatgttttatttcctgtggggtcatggcctctgatccatatagcaggcgaaagggagtgaatccagtcgcccgacactcggtcatgttcagcgcccagactgcttcaggtagcaggtcggcccatttacccttcttgtcatcgagaagcattttcttgatggccgtgacaatcttgccgttggcacgctccacgacgctgttagattgtgggtgatatactgcggcgaaggcaagcttggtgccaatggagaagcagaagtccctgaagtcctggctgtcagactgtttgccattgtcaactgtgagctcggacgggactccgaatcggcaaacaatgttttgc

SEQ ID NO: 85716 - DNA, 365 bp, Zea Mays
caccaatgtgcatcatcatgtcggcttgtcggacgccaagacgtccctacttcaggcacaacaccccgcttcattgcggatgctccccttcgtatataaataaggcaacagggtcccttcaatggagacatcgagacatgaagctgaccagcagcagaacacaacacaagacgagcagcgcaccggcgaacacttagttctccactcggtctactcgaacttagatattggcacttgcctcaatcatttctagggacttggggacctcccctctcccgatgtgcttgtaaacccctactacaggcacctcgatgcgagtaatataagcctcatccccctctgctggaagtagggcctcgtgttgc

SEQ ID NO: 85717 - DNA, 359 bp, Zea Mays
ctcgattcggagttataatttaggagatatcgttgtttgaatccgggtatgttgctgtccaaaaaacagatttttcaggtgggtgaacaacagtaatattagcagtttctaggaatttttcgtgggtaattagtgatacccagtatgataatcatgtatggctttgtcttatctttccaatgagtacttatgtgcttggtttggaattatattttaaaagatattgctgtttgaatccgggtatgtcgctgtccaaaagagaaaaaaacagattacatggtttatcttgtaaactgttttgggctaattagatattggaatttaagtataaattgtatacaaaacttgtgcggaatttt

SEQ ID NO: 85718 - DNA, 618 bp, Zea Mays
caacaacttacattgaactaattggatgaccgacacttaaacagggtacctagtggtccttcctttgttcaatggttccatgaacatataatgatatctatgcccctttttcttcaacttttattccatatatttcaaataatttaacaatatctatttgtttgctcatgtagtgtaagaaacctgatgttgaaggctccgaggacttgctacaaatatcatatggttaattgatggaaaatcaatttgatcgttatgatattaatggtaccatttttcaacagaaaaatttgaagcaaaatgtctacttacagccacaaaaattaatggagtagcagtaagtgtaaataaagctgataatgaagttcttaattattatgatattcttgaatatataactgagtatatatttggaggtcgaagtgtctaatgtgtgtgatctttgattatatatggtttgatcctcgagccaacatgtgagtcgacgagtttggggttgtctagataaagcacacaccacaatttaaaggcaatgagtacaactttattgtgttttcccatcaagcgattcaggtgtgctacttaagttatcctcacacaagcttgaaggcttggtgg

SEQ ID NO: 85719 - DNA, 718 bp, Zea Mays
tatagaacacctcaggaagttttatccctagctgtatttcaaaagctatcgggacaataatgtactctgtaaagtgggaaatatgtcatcaataaagaaggcttcaagaatactcagtttgttcatggtcgacttgcattcttacttaactcggggtgaccactatcccctgctaacggagcaatcggcttaagtcggcaatgacttaagccggtgcaacatgctcgcgcttacttaactcagggtgaccactatgccctgctaacggagcaatcggcttaagtcggcaaacgacttaagctggtgcaacatgctcgcgcttacttaactcggggtgaccactatgccctgttaacggagcaatcggcttaagtcggcaacgacttaagccggtgcaacatgctcgcgcttacttaactcagggtgaccactatgccctgctaacggagcaatcggcttaagtcggcaaacgacttaagccggtgcaacatgctcgcgcttacttaactcagggtgaccactatgccctgctaacggagcaatcggcttaagtcggcaaacgacttaagccggtgcaacatgctcgcgcttacttaactcagggtgaccactatgccctgctaacagagcaatcggctaaagtcagcagcgacttaagccggtgcaacatgctcgtgcttacgtaattcagggtgaccactacgccctattgacagaa

SEQ ID NO: 85720 - DNA, 722 bp, Zea Mays
gtgatcggctctttacaaccgatacgccccggggccaaacacggttcagactaacgtttgcacatgtttttgaatgctgggaacctattcggagcacgtcaacactttcctgattagatataggtcaggtggcacgccaggtgaacattaaagcctggtcgtacgctaggatctaggccattgaccgagggaccggtgcccgccagcagtctcgggagcctcccggctccttgtgtcgcatgtcgtctcccgccggtgggttttgggtgtcaacaataggacaccgggactattagtatttggaaagaagaccatgatgttgcaatgtgagataactgtgatgacaaagttctagagtctgcgatgctcaaaacctgaccctacatagttacaaatattggactaggaagcctactagtaatcgtgtactcttttgaagcagggatttaagacctggaaaaagttgcaactaaacttatcaggtaatagagcaatcctaacacatctcttttcccaattatgacgtcctcaagtaacaaaatatgccatagcagatgaaacaagggatttcttcaagatctatctcacattgcaacatcctagaaggggggaacacacaaatgtatggggaaaatactggtgattgcagatgtatagtatgctatagtgaactaatagaatcaccacaaccctactgattgcagatctatgagatgttcaat

SEQ ID NO: 85721 - DNA, 560 bp, Zea Mays
gacgatttctacgaccgtgatcgctacgaggatcacaatcaacggcccaaactgaagtttccatcgttggacggtgaatccgatcccctcccatggctcaacaagtgtgaaacttattttcgggggatgcgcacactcgatgacgacagagtatgggtggcgtccctgcacttggacggtgcagcactggattggtacttcggcttcgagctcgactacggcctggtgccgtggcgccgctttgccaagtacatcaacatgcggttcgggcctccgctgcgacacaatagcctggcggagctgaaggacttgtatcgcaccggcaccgtggaggactaccagcgacagttctcccagctcctgtgtcgcgcgcaagacgtcacgccgcaccagcaggacgagctctttactgcaggcctaggggaacccttgcgaacggaggtcgagctgaagcgaccaccgaacctccaaacagccatgagcttggcccgggctcacgagcgtcggcttacccacgctgcactaccagccggccgatcgtcctcgaaggccctccctcc

SEQ ID NO: 85722 - DNA, 434 bp, Zea Mays
atcacaacccctagcattgtccttggggatggtgcccaccgggccatcgccaaggaataatgtggaggggccagcgtcttgttccaggcatgacaaccgccagagtcgccttttcttcctcttctcctcaacaggtgcagctggatggttcactcggcatgaacgtttccaacgagcaccctctggtgtctgaatttcctcgtcttcgccaatctcttgcctagtcacaattgtcgtcggctcagtgcgggcagagtcagatgattctccggccagcaggctaagaatagcatccatttcagcatcatcggtactggacgccatctcgaagtgagtttgcttctcagccttgggaagattccggaggggagcaattaaggcctcaatgtcctctgaggatggtcacactctatggcccgggctaccatctcgaa

SEQ ID NO: 85723 - DNA, 793 bp, Zea Mays
caagggcgtttcgggcgaacactgacaggcttctgaacatccaaggttgtaccagcttctgggagaggcaccaccgccaatgtcccagcaggagcagcatcagaagagtcttcagccagcatatcaagcatagcatttatttctgcatcattatgatccaaaggcacctcaaagtggacttgtcgttcatcatcgggaatttctccaatcgaagcaaccaaagcactaacttcttcggcagagggtcgtactctaaggcccaaaccgccgtcagcaacaggaggattcgacacaaaatgggtaaaagccttggaaggaggcaggttccaggccgagtatgcgataggggcaccaacattggacaccttgcctctaagtatcatttcaagccggttcactaagtctacagcgggaattcttctattggtgacccgggttgagtcagctaaaccttggtacaagtaggctgggtatgccctatccttcaatggctggatgttcttgaaaacaaaatcaacaaccacagcctctgcagtcaaacccctctccttcagcagtccaacctccgccagcaaagcccctgcctcagccacctcctggtctgtaggagactcggtccaactcggggtgcgaacatccggctgtctccctgaccatggggggagagattttccgtggttctcaacaataaaccattccaagcgacatcctttgatactatccttgagtgggatttcaaggtagtcagtcttcctcccatggcgcatctctaaactcgcaccccccactagct

SEQ ID NO: 85724 - DNA, 472 bp, Zea Mays
attttatggcactcactatctcattccatattttaaacttaactatgtaaataatgcagtctaaaaatagtgtttttcacgtccatataccatatgcacgctctgttgagcattgctagacgacgttgtgtcatcgcctccttgtcttctagcaagaatcgtcaagactctgttatgataatagggtcaaaatctgatgccacctctacaaaatatgcacacacttacgatatcgaaagacacatccttcgtgaagggtgaggagtgcaccaccctgacccattgcaaattccctacaatgaccaccaccacacggtgatggacatcctcgtcggtcagctcctcgctcatccacattaggtaggatgagtcctaaataagagccatgatacctcgagcgctacctcaggggctacacacagaggcgcatgatggcctgaatcacctcggatccatccagccttggtccttc

SEQ ID NO: 85725 - DNA, 886 bp, Zea Mays
cgaagtaatgggagagaggcaggaatggtttcagacccaatactccaagcaagacatagtgtgcacgatgggttcactaggagccggttaaagagggctctggaattccaacaaagacagagttatggcacgtggttgcactactatctttcacccaggatccatgaacagagggacacggtgtggtggtttaatgtggctttgacagcaattccaatcagctgcgtcaccaccttcaggataagtttcagtctgccacacctcctccgcttgggcggtaaaatgccccacgtaaccccaagcacagcgactggttgaagcagatctttacttgccgagctgagagggtaaaagaatggggctccatttactgacagcacaacaaaccaacagctgagtcaccagtttctagatgagttccagttctgcaccgttttccccctcgtctggacagtaaaaatatcccacatgatcaccccaaaactccctagaaaaactagggaatggaaatatttctgctattgatttctttttactcaagtctgaacatgttcaggtcaatagtaggatcaacttagccttcctttttctcctaagtttatacagcaccaggttcccatggcttaaaggaatttattcacctatacgtgatctcccattttgccacaaaactctcaattcaaaaccacagggatttgctgcacaggaactctaaactgatcattaacactgaaattcagtctatgccagatactatttccagtctgaaaattcagactacactaactgcgctgaacttcttcagttcgactgcagagccagattcatctttcttttgctcccatttcttcatagggacagagctacctccccacatcaaacttgc

SEQ ID NO: 85726 - DNA, 712 bp, Zea Mays
aaaaactacatgatatgaagtaatcatgggatggttggcaagaattttctctacgaaaactttgatggtgtgatcatgcttgacatagccccttcaaggctattactaactaggaaacagatgtgaacatgaaacttgtggctatcaatgatggtatatttaggaatacattagctaacaatattgagcatgatgataacagttttcagctgctatgtgatgtagatgatggattccttagtgctagacaactgaaaaagctagacataacgagaaaagatgggaaaacaccattgtatcaaggttgtctagtgagaaaattacgagccaacatgatgatattagagttgaaatctacacatagatgaagcaataaaggtttcagtaacttataatgtatagtgaggaaactactctcgggccttaacgagttgccaaaaaaggcatacctggcgaagccaatgatctactcaatcgacctcaaggttggataaatctagcatgtttccatgattgcatattttaccatggagatgaatacaaagtctcggatgcatgccccaagcttaaagctccatgattcaataaaggtccttcaaatgagggtagcaagatcagaggagggcttgtaaagggcgtttggtgttccccatatatctgcacgcgtgcatagattgcttagaaatgcaaagtcagccaagctattgcggag

SEQ ID NO: 85727 - DNA, 309 bp, Zea Mays
cgtcaacgttcgtcgcgatcctgtcctcctcagcctgcacgtgcttcatcgatcgggacggaaggacgacgcaacagatggagccgataccgagcagtaaggtgttatggactgtcggcccaatagtccatggtccagcccaactatatgatggtttgtgctacaaagaagcaaggaaggagaggaacggggcatcaaagaattattacagaaacatacactatctagtctctacttctcgacgactactgttcatcttctccacccctctcctctcatgtatccagatctcttttccttctagatcac

SEQ ID NO: 85728 - DNA, 522 bp, Zea Mays
gctcggattggttaaacggccactatgaggagcttcatgaacacatagagctgctaaaacaaggcttgaatcggacagggacttaccagagagggctggccacggagcgcagggctttacgttcgccggaaacagagaaagggggaaatcggtgtcacggcggctctggttgaaattagggttggggattgaggctacagggccgtaagaagctgtgttttcattgcgcgcaatcaatttggccgaagatggagagggcagtgcgaatttgacttcgactgagcttcactggtggagatgaaagcacctcgtcgtggctccttgctcaatttataggcacggcggcccaacagatgacccccggccacggatagtagcgcaagcgcatgcctaccacgttggaaagagatacagtgagggagatggaggcatgggcgacaccgcggcaaaattcaatggtcacggtggccgccggtgaagactccggctgggctagggcggtggcgccacgtatgggttatc

SEQ ID NO: 85729 - DNA, 528 bp, Zea Mays
ataatatcggcataatgatcgaatcatggatcatcatcgcccctgcaaactttgagctcaacttggtatgatgagctaaaattcttactatggctatttgtcgtgagctaaaatatttttaggaagtgcgtcatgtggtggtcgttagtttcgttgttgtgcttaggtttgtaagtaggtatgtgcgcgagtatgtatgttttggcatagattaaaggttcgtagaggagaaattggtacgcatgtgtgttgtagtcgtgattgcgctaagttgaacgaaagagtctcaagtgcatgtcgtgatatggttgtttgagataaaaaaattataaccgttgcacgatatgaagttttgatcgagtagatagaaaaaataatttggtttgtagagaggtgatgacatgttgtaagtagtcatcgcttcctctatatcttgagtcgggtcaatgcgcattatgtgttcatcgagatacacttcgcacctagtgtagggttgtgttcaagacaccgagtagactcttcaagtaa

SEQ ID NO: 85730 - DNA, 400 bp, Zea Mays
atgttttgtgcatcatcatcatctgcatcataccatcgcaccatattgcatgacatcgcatcatacatcactttgcactgatacatacactacaaaaacaaggaaaattgccccttcagcttcggcaaagattaatgagaagagtgtattactaaggcatggtccatgcttgtgacagaggtactgtcatacggagtttttgccttcgacaatggtattcttatgcaacgtctatggcaaagaaggggtatttctttctgaagcgtgaaaagaaggaaaggtgttttttcgtcgtcggctcaaaaatggtatgttcgaagtttccacgcatcacaaagaaatatattacatcaacatacatgaaaattgttgataattgtttcttacaaaaacaaaagct

SEQ ID NO: 85731 - DNA, 677 bp, Zea Mays
tcttcttctgccaatgaagacaataattcttagcgaagacctcaaccgacggttgcccaccatacgaagtcaccgcccagacaaacttcgccaacactgccataacgttcggcgtcagctgatggatttgaatttcaaactttcgtacgcttccactataaatcgatgagctggcaagcgaagtccagtagtaaataggcctcaaacacaaccaactcaccctctggctcggggacatcttcaacccccggtgcctgcccaactccattcccaaaataccccaaacgttgcatttcatgcacgtggcccgagtaaatcatcgacatctcgaactctacagtatggtcaggctacagctccacggtcgttgctggatcgctaatcgtcttctccaatggcgacgcgtttgaggacgcggtcacgccagacaacgacgaagaagaaaacgacaacatcacgttccatcgacggtcgttgtttgcttgatgcaggccagatcaccggcagtgagagagaggaaaaagccgaggcacaaaaaatgggagggctaggggtttttctgcaagcagatgggtaaaaatcccacagcggcgagtgcgctgtcttttagaggccagtaaaaatgcctcggtaaaccaacggtcccacagtaaaacgtcacctttaaacggtcacat

SEQ ID NO: 85732 - DNA, 1064 bp, Zea Mays
ccgaggccgaggtcgtgtcctcgcccgcctccccgtcctcgccgtcctatgtcactgtcgtcctatccaccggtgttaaggtgagagcgcaacgactcagacagcccattgtttcgatttccaagctccgctgcgtgcgttgcagcctaggtgttcgtcgaacagctaacttcgttgctgggttggtttgtccgtttggctatctctgtgtctgggctgtggtgtggcctgtgggcaggctatagtagacggtaggaaggtcctgccgcgggacactgaggccgatcttgggggcgtcgacgatatgaccaagctcgtctacctccacgagcctggggtgctctgcaacctcgcactccgatacaggctcaacgaaatctacgtgagtgtctccatcttttgcactctctctttaatctcacaatgtccattggttgtacaatagtcgtatcctgtaaaaagtccttctaggaggatcgtgggctagtggcctcgtgtaagatcatgtatgggtccaatatatgtggaagatgggattattttgtcgatatgtgcttagccatatgttgtgttttgtgggaacatgctgctaatgttgttgttctatgtgccatacattattccaacggttctgttttttcttcagacatacacagggcgcatcttgatcgctgtaaatccttttgcaaagctccctcatatgtatgatatgcatatgatggaacagtacagaggtgtgcagtttggtgaattgagtccacatgtttttgccattgctgatgcatcttacaggtacggaacatggaaaccagcttgcagtgtgttagcgagaaattagaatatggagttttacatggtatatttctctttcttgaagagcaatggttagcgagaactgcagccagtccatattagtcagtggagaaagtggtgctggaaaaacagagaccaccaaactcattatgcgatatcttacttttgttggcgggcgtgcaattggtgatatccgctctgtggagcaacaagttctagaggtaacattcagttttctcatcaattctttt

SEQ ID NO: 85733 - DNA, 525 bp, Zea Mays
tcacagtagcattgcgtacaagccacgtcatgctcaagggcaactagggaaatctggagcatcaagtagttttctccgatcatccaatgaacaatccgcttccatacatacatacaagtacgctaagtttaaaaagccccacagtgtttggtatttacccataacatttttcatgtgaaaacaaattgaagtgccaccattactattattgtttacccatgagatttttttccctgtgaaaataatcgaagtgccaccattactactattgtttaccaataacacttttcctgtgaaaacaattgaagtgttattagatgcagagatgagacccaagatagctgaatttggcatggcaaggatctttggtgataatcaagaaaatgttaataccaagcgagttgttgggacatagttactcgtactttaatcccaatacttaaaattaacctatggttggtacttggtaccaattcatcctcatatctttcacaaatgcaatggtcttaactgtggctatatggc

SEQ ID NO: 85734 - DNA, 494 bp, Zea Mays
ccagcatccgggcaaccgtcaccgacgttctcgcgccggactccactcagtatcctcggtggcgcgaccaggtcctgcagaccctccgccgctacgccctcgccgaccacgtcctccccacggtcgctgcaccgacggaggattggctcctaatggacgaagtggtgctctcttggatccatggcaccctcacggccgaacttcaggacatcgttcgcgtgccggacgatactgctcaccgtatctggggtgcccttgaggctcagttcctcggcaaccgcaagactcggatcctgtacctagagaccgccttccgccagcttgttcagggcgatctctctgtggacgagtactgccgtcagatgaagacgatggcggacacactccgcacccttggggcccccatgaccgatgagagcctcgtgctcaacctccttcgtggtctgagtcctcgcttcgatcgcgtggcccccatcctcacccgcatgaagccg

SEQ ID NO: 85735 - DNA, 376 bp, Zea Mays
gcgcattggattcaatcggggtagattagatcgggtccgtcgatcgttgatcaagcggtcatgctcacttgtctgtttgccgcggctagtgatccgttcctagcctctagatctgatctggacgaccgaaaatcaacggtaccccttcggccgggaatcttactaaagaatccctgggtttcttaggaataaacccgcactccaagcgccaatggtctgtgtcttgggaaaccttcggttttgccccttgctcttcccataaatttgtgcgcagtccagaaaattgataaaaccaggaaaattatttagaaaatagtttttagtacatatttaattacagaaacttgtttaattggtagaaaatccatatgaactc

SEQ ID NO: 85736 - DNA, 486 bp, Zea Mays
cgcaagatggtcggtaattccagttgataggaaacttctcccactcgcttcaggattaagaatggtccaataaagcgaggggacaacttcccattgactttaaatctcctcataccccgaatcggtgacaccttcagatacacgtgatcaccctccttgaactctaacaattttcgtctggtatctgcatagcttttttgtcttgactgtgcagttctcaagttctcccttatcaaccggacttgttcttctgcctcttgtataatctctggcccaaagaactgtctttcacccgtttgatcccaatacaaaggagtcatgcattttctgccatataaagcctcaaacggggacatcttcaaactggcctagtaactattattgtaagagaactcctcatagagaaaactcttatcccaactaccaccatgtttaagagcacaagctcttaacatatcttccagtacttggttggttctctcggac

SEQ ID NO: 85737 - DNA, 537 bp, Zea Mays
atgtaggttatcagtacgagcaactaggaaacctggctctgtttcttggcctgttgttgatccaaatgcagcacagcatcccatggaaacaaaccagcaatgggggagggggaagaggtagcttaaccatagctttctgttgcgttctcggtaggagtccatgctgatccatggcaatgcgcttgcattgaacgctatcactacgctggcatcagcagaagctccatggattatagcaatgtatgtaggagtagacgaagaggagagcaagcagattgcttttttccactgaggagcacagaagcagcagaagtacagtagtgttcaaagccacaaacacacagaggcaacgccctagtactaccaccaccaccaccgcaactttgttttgttttgttttgctgctgccttttttctgtcttttgccttgtggcttggcagcagccccctgccacaccacctgcagctgcacccgccgttccttctactgctggttatgaacagcagctccaccctcgtgccgtgccccctcccccc

SEQ ID NO: 85738 - DNA, 337 bp, Zea Mays
acaaagtatcttcggagctcatcagcattgcatgatcttggaaccttggattccttcgatgtcctttagcctaaatgaacctgatctattcgaagccgtaaccagaaaagggccttcctagttcacttgcaacttcccgctgtatttgggttagccacaattcagagcaccaagttacctggtgctatgtttttgagcttcacctttctatctcgccatcttattgtttctaattgatattttcttatgtgctcgactgcttcaagcatggattcttctatggtatctttccatacttttttgttgtcctcatcctgagttgaagctacaacccttg

SEQ ID NO: 85739 - DNA, 276 bp, Zea Mays
ttcacccctatccttcggcttaagaatgatgccgaattcacttggggggcagagcagcaagaagcatttgatctcattaaaaaatacttgtctttggctcctgtattaaaagcaccacgcgcaggagtaccattccgattgtacattgcagctgaagaaaaggtcattggggctgttctgacacaagaaactgagggaaaggaacatgtggtgacatatttaagcaggaggttggtggatgctgaaacaaggaagcagtgttacctgtggaaataa

SEQ ID NO: 85740 - DNA, 447 bp, Zea Mays
cacggtacctttgcttgactggaggttgcaaccgaagtcctcgaatcccagatgatcttggaaccgaacaccttcaattcgaagtgatacgaaaatctgtaggcggcaatgaagaaaaatattctgttagtacgtggttgatgacagtggacctactggacatgagggggaggggtgtcgcgggatcgaggatgaaccctagcaacacgacatcacgcagcggggttagggtaaggatggacgcgaggtacaccgtaccttacgaagatgcagacgcgatggttgggatgacgcggaaccttgacgacggagcaagggcggcggcgtcactgcggcaaccatacagacagaggaaaagggtgaaggaaacgtggcaatgcgaggagaagacggtggggacggcaatgggaggagggatccgtacctgcgtacaccggcggcgatgcg

SEQ ID NO: 85741 - DNA, 345 bp, Zea Mays
agggtacggtagtaggaaccaagagggggatgaggttttgaacttggtgttagcttatgacctgttgattgcaaatacctactttaggaagagggaatcacatctagtgacctttcacaatggtcaacactcgagccagatcgactttatccttgcaaggagggaggataaacgtgcttgcttaggttgtaagatgatacttggggagtgtgttatccctttacacaagcttgtagtggcggactttcgttttcgggtacatgtccatcgggacaaacatgtcaagattgcgagaacgaagtggtagtagcttaaaggggaagtggcacaaacgtttaagggcag

SEQ ID NO: 85742 - DNA, 413 bp, Zea Mays
aaaagttcctgatctgttctctgcataatatgttcgggtattataatggtagggaaatcctctcatttcttgagcatgcataaccatgaccacacagccatggttgaaccttgttgttgatacaattagttagttcctgttcctaactgaaaaattgtagccgctcaaatctaatttgcggtcatattgtgttcttttataatgctgcagaaatacactcaaaagtatgtgatccgttctttgtatattgtgttcttttatttataatggtggggagatcctctcatttcttgagcatacataaccatgaccacacagccatagtcgaaccttgttgttgatacaattagttagttcctgttcctaactgaaaaattatagctgctcaaatctactttgcggtcatattgtgt

SEQ ID NO: 85743 - DNA, 529 bp, Zea Mays
gatacatgaaatacattgtggatatctaacatggactttggtaactaaagacggtaagctgctagccctattctgccgatgataggataggggccaacgaatcgcggagctagcttcccttttgcttgtaatcttttgactccacgcattggggagaccttgaggtagaaaaatctcattcctcgaaactgagttctctccttctgttgtctgcgtaactcttttgccgactctggtcttcgagtagtctcctgtggatcagggcaactttctcttctgcctccttgatgaaggcaggtccttctagggtcttttcccctacgtttgaccacatcagaggggtttggcacctccttccatacaaggcttcaaaaggtgacatcttgatgttggcctggtaactgttgttgtacgacaattctgcatacgtcaaactggactcctagtttctatcgaaagtcaacacacaggctctcaagaaatcttcgaggactttgttgactctttctatctgtccatctgactgggg

SEQ ID NO: 85744 - DNA, 366 bp, Zea Mays
ggaaagagtagattgtagtggaaggaggtcaaagggtgagggacgagtgctcgtaggtgacacatggtgcccgtgcggtgggatgttgggcagtagcgatgatgcaccaccatggctaagaggtggttttgtccacaatgaggtggaggaactagagtagcaatctaagtagaagtgttcttgtggatccactggcattactgaggcgttgatgatagtttatgggataccaacttcaagtagtagcatatatgtagtaggtggaggtcaattgaagttatgtatctacgatcctcatagagaaggatgtagtatggtatcccgcggcatacaagggtggtgcttgcaagtggagttgtagtgagg

SEQ ID NO: 85745 - DNA, 478 bp, Zea Mays
aggctccgtagccactcaccatcagtggtggacgggtaaagggtagaagaaacctcagagcatggtccaccgatcccaactagtgaacgaatcatattcttcgggacgcaggccaacagccaactgtaatggaataacggaaatgcagcacctgcctgccgataccgttagtggagtcatatgtcacttgttcagaatgcagctaaggagcttttccacactcaggtgcggacctacgtagacagacaagggtccacgctcgggctcatttctatgttgcaagcagcagagtcagattttcaccatgatgttaccgctcagctcaactttctacgttgcaagcagcagagtcagattttcaccatcatgttcccgctcagctcaactttctacgttgcaaacagcagagtcagattttcaccatcatgttcccgctcagctcaactttctacgttgcaagcagcagagtcagattttc

SEQ ID NO: 85746 - DNA, 406 bp, Zea Mays
acggtagcggtcggagaaggaatgagtcactggtgtggtgattcgtggccttcaccgtggcggcctcaccggcgacgaaccagtggcttacagtgactcactacgacgtggtaaaatgttgaggcacgtagccaggcaggataacggcgaatgtcggtgatgccaacgcgactgcccatgacgggacacgatggcagtgggaacagtggccggagttatctccagcgcgatatttcttaccgaggagcgcttatctgagttcggtcgggcgtgaatcgcgacgccggcgtggatctaggcgcaagatcaccggcggcgaggaatctgagctggcgatccaatccggtcactgtaccatcgcgaagttcattcagtcggcctgacagaccaagtttggggcgaattc

SEQ ID NO: 85747 - DNA, 485 bp, Zea Mays
cgagggaccacttcgtgatgcgcccggacgcatcccgattccggacgatctcgccaagggctgtcgtggacaccactgacatagggtgtcggtcgacgtagtggaccaaacttccgcttggcgatgaggaccgcatagagcagcttctggatctgagggtatcgtgtcttggactttgtaaacacctcgctgacgaagtacacaagcctttgtaccttgagtacatgtccctcgctttctctttccactactagtgcagcgttgacaccctgggtggtggttgcaacgtaaaggaggagggtttcacctggatcgggcgcaaccaaaaccggtggcgaggtgaggaacacttttatccgatcaagtgcctcctgggcttcggtcgtccaagagaaatggtcacttttcctcaagagcttgtagaggggcattcctatttccccgagttcggacacaaatcgactgagtgcggcgacgcacccgac

SEQ ID NO: 85748 - DNA, 818 bp, Zea Mays
cgatgaggtccccgacggcgcaccgaacaggggggcgagctctggcgagctagaccagccgtatgacgctacggcaggagctccaaagctacagggaccaaatcagatgcctaccgtacctttccccccaatcaatttcgctagaggtggtctatcaagctctgtccacggtgacagtgcgggtgatcaagtgaactaaggtgttctggataacggaaggcttggctggctaaattgaagctagggaaaggtttctgggttcaccggagatgacgcacacgctaagttttgggctaggcacgagcagaaaggtggggcgacagaaagggtgtcatggcggcgttttacagcgcacgggtgcgttctggtgatgggcttcagccaaacttcaatttgccgcatccaagagcaataagagatcaaatactaactgaaaaagggagcaatttgataattactgacccgaggagcgctggccacgaaggagttcttcacggcggagcaagaacagaggagagagggatttgtgggttctttggtgaaattgagccgagtgctcgatcgcggaggtgcggtatgtgataaacaagtggaacccgggcgcaatttataggccaacggccagaattggatgaggaccacagactttagattgcgcaggcgagctcaccgcgcgacggaacccggtgatggcacggtggccgccgtttaaccggagcctgccacctcagtgatttgctgccacgttgccgaggatatttaccgcggccgccagcccatcccgaccgccgtggcgttcttatcgccggcgagggctg

SEQ ID NO: 85749 - DNA, 514 bp, Zea Mays
aaatcttgtgccggttgaccgggcgtagctcggcgtggtggcttgagtactggcgaagtggtcaggaatttcttcagtgcctctagagcctcctgtgcttctgtggtccactgaaatttgtctaccttattgagtaatttatagaatgacattcctttctcgcctagccttgatatgaatctgcttagcgctgccatgcacccagtgagcctttgcacctttttctgcgaccgcggcggtcccatcctcataatggcctcaatcttctttggatttgcttctattccccgatgactgacaatgaacccgagtagctttccggctagcactctaaatatgcatttttctgagtttagcttccattagtagcgtctcaagctgttgaagactagttgcagatcctcgatgaagttttctgagttttctgtcttgataaccacatcgtcaacataagcttccacccgcttgcccagtgataggctaagcatgtttggatggctctctagtaagtcgc

SEQ ID NO: 85750 - DNA, 772 bp, Zea Mays
cagaaaggaatcgaagcagccgtcgcatcttcaccatatggtggccgccggggagaccacgtcgtcggggactctgggttctccattgccgagcgccagtactggcgggaggctcctcgcctctacctcgcaccggcggatctcgtgctgttgggcgcgacctggatgatggtgttgaagtcggagttcggcgcacggccgtgacctgcactctagggtcggtcgtccctcctccatcggcggtgagtacctcgccctctcccatgctgcctgtaccggtgtgttgtctccttgcaccggcgtcggatacgtgggttgatgtgggcggcggcgtaagaaagaagaagcgtgagagccttcggatccgagatgaagggtggagattagatcgggctcataccctctgcatttttatctcggtcgtagatacggaatctggcggccaggattggacgcagggtttaatcgattcatggccatcgatcacggatccggcggtccctggggcataccgcttggtcagggatccgatctaatctgcgccgtgcgaagacaatccaacggtccacatgtcatggtaccccttcgaccaaccctttttgcatatgagcccctatagaatacagaaaccaacccgccatccctcgcgtctgtgcattgtgtcttaggaataattgcgtgttagcccctgcgcttctcagattttggggtgcagtccagtaaatagaaaatacaggaaaaagaaatagaaatctatttttaatataaaaat

SEQ ID NO: 85751 - DNA, 507 bp, Zea Mays
aaaggacaagagcttagggtctccctcttctcatttgttgccttgaaggcaatatcttgtggttcattgaaggagatattcccttgcaccaagtgtcgggtacccaagaaaggggtacccaaggcgaggcccataaacctcactctagcccatttaccgaccaagtctccactgagcaagtctgtggggcggggcgatcgaccaaatccccaccgagcaagtttgcgaggcggggcgaccgaccagtgtcttgccgagcaagtctgcgagacgggacgaacgaccaagtcctcgctgagcgaatccacgagggaggaacccgggccgcacacttgacccacgacgaccgcaacaagatgcaacatcactaaaccacgttcgaaccgtacatacaatacaaaaatatctctagcagacacgacagaacacccccgaatgcgccctcggacatatcctcgtggagacctcatcaccagagtctctatagtggcccatacactggaaagt

SEQ ID NO: 85752 - DNA, 600 bp, Zea Mays
gcaccagtgagtgacttccttgctagctcgattccatcccctctgggtgtagtgcggtctaggttgaagttcgggcacgaggaacatgggtttggtgtctgcggcaatggcgtccgccttgggtgggcttgcgcgcctgactgaagtgcaggggcggggtgttgtgaggaagacacatcgtcgacctttagatccttagcagatggctgggagtagatcctatggtactggttgggcctgagctcttctcggtcgtcgatcctgggatgagcgtaccagggtgggtcgggtattttaaacatctaggtccttgatctctgatcctgcggtcagcaaaggataccggttcacataatggctgatttgatctgggcggtctgatgtagatctaacggctcatattcaccaataccccttcgccccagaacaattccaaaagagaccctcgattttatagatataaacccgccatccatccaagttaaaagatcgttacaatcaggtcatgtattccatgaaaaagaccctgatcttctcccaaattaagccgttgtctagttgggatatgatctatataaaataaaccaaacttgagtttct

SEQ ID NO: 85753 - DNA, 550 bp, Zea Mays
gtgcggtggtctagtgttgccttcaggtgtggaaggcatcttcgcacttctgactccactcaaattttactccccttttcaacaatttagtcattggcttggcaattctggagaagtctagaatgagtcggcgataatacccagctaatccgagaaaactttgaatctagcggacagtggatggaggcttccaatccatcacctcttgtaccttgtctggatcgattgctatcccttcctaggagatggtgtgacccatgaacttaatctccttttgccagaaatcacatttcgagaatttggaatataaacaatggtctcgtggtcgttgaagcatgatgtgtaggtgcattgtgtgctcgtcttcattcttcaaatataccaagatatcatcaatgaagaccaccataaacttgtcaaactcaggcatgaatactgcattcatcaagtacaagaaatatgccgatgcattggtcagcccaaacgacattaccagatactcataaagtccatatcggctgagaagccgtctttgggatgtcacttgtct

SEQ ID NO: 85754 - DNA, 784 bp, Zea Mays
aaaaatataatagtgataatgaggtgaagaattaaaggaaaaaggggagaaaagaaaagagagtatataatataaaggaaaaaaaattatattttcagaattggtacttcttaatttcgcaaaataattgagaataaattttggcacaagtttgaactcaaattcgaattcaaattgaacttagaaaaagagaaaggaaaatagaagataaaaaaaagaataaaacaaacctaacctaagtgggccggccgctactattctggcccataacctccttcacctccgcgcagcccagtggggtatgggatctgtcgccgacgcgtgggcctttacggtcagcgggaaccagttccttgtgtgtgtgcgcgtgggaaatgggtgtgacaagcgggacccacctggaggcgactactctgtcagtcagctacctcatccgctccatgggttcgtcctcaaccgcaagcgcgaaatcggtgggtgatccgtggcggggttggttgtgcagggattacggagctaaaagccggacctgcgactgcgtagccctttccccctccatcgcgtgcccaccaccgcgaccaactgtatcagctgtgcgccaagattcgccatcgagagagagagacagagaaaagggagtgcggggaaaggctcgccaccacagataaacgacggtgctcgtcgtcgaccttgttccataggccggtccgagtcactggtggcgcatgggcggactgcgtggtgtaatttcgtccccaaggttcgccgcacagccatcaccgac

SEQ ID NO: 85755 - DNA, 422 bp, Zea Mays
cttggagaaatattattgttggaatgtgagccgcatatctgactttagaagaggaaaccattattcttagaagttagtctgttcttgatcagagatcacaaaaaaatatgcttgtggtgacagcaactcctccaggcccaagaaaaaaatgggtgaaccaccataattcctgacagatgtgagtacactttctttactgagaaggttccattacccctaatgtaggtccaagcatcgttattttactgttcaatgtagagaaattattctgccattaagctcctggtatgttttagaggggaagaaatcaattgttatgaatgttaaatcgttccataaccattttgatagtaatgcttcttctttttgtgatttagttcttacaggtgattgtatttgtagcctacattttgttttggggt

SEQ ID NO: 85756 - DNA, 465 bp, Zea Mays
ggaaaacctaaaaattataggttctgcatgatgcgatccacgactttgctgttagttcattctttaaagtcctcaaaatataatgtgcaaaaagagctcggccaaagtacaaaacaatgcggcgtatacatcattttttttcttcaaatcccattgtggaagaattctaatttcctgtccacgtcaggtcgcttttctcatgtgtcagatcaggtcaggtggccaatcctctgttgagaagagaattgcaatcagctagtacatatgcatccgcgtggcgcgtagctcattgtagcataatagtactcattcatcgcgtaaaagcggcacgtcgcatagtacgtagtagtttgtatatggaccccggccaagcatgtatcatgcctcgtcgacagctagcgtacgagaagcagctccctctcgatctcataacaggcatgcatatggctatatagctcatccatg

SEQ ID NO: 85757 - DNA, 998 bp, Zea Mays
ggtccccacttagatttttgtctggtccgcccgtatacgggataggatatcgttgtaccagaaaaaaatgttgcgcttgcacattacgtacaaaagagtgttgctgctatggccaaggccccaagccgaggcgaggcaggcccaaccttgcttgccacaaattttgtgatgatgattgcaggaagtgcggttctgttattctgtacatgactcttcgcttgcccggctcttctcacacgcgtcgcaacggtgttggacattggttcctcgctgcctcctgctcttgcctcttaggcatcggcaaccgatggcggccgacggccggtgacaaccgcgacggcgacaacatctgcacagcacttcttcagtcctcttcaaagacaactctgataaagagctatcgcatgtttgttgttttttatatataacgggtacaaggcaaggcctataaaccgtaacaggacacattgccaccaaacaatatccaaaccatacgtacagtaccaaggggatcacgatggacaggacgacacactaaatgtgtgctcgcacatgatgaagggtgacataaggacattgacaaaagacgaagccgtaacctcaaacttactaagaacacgttctgcgggacccatctggtacagcggcatgggcgtagagcaagctacagggactcgcatgacagacggatgagacagaacatcgtgcgaggaatacgtcagcacacgatatgtcagaaggagtcatgccacgcgcaaaacacgccccaagattgaccatagaggggcccactgcgcactatagctgagggaattagctgaagaactctctctttctctcatgtaaggaccgtcccttaaagtataagagggagtccctcttccctcgtacgcacgtaagcacacaagttgtaacacgcctcaaaataatactattgaaccttgttgtagtagttcatagattagctcggattctttataatcatatatggaaccatg

SEQ ID NO: 85758 - DNA, 477 bp, Zea Mays
cggtattctgatcctgaacattatctcctggataaattccactgcccttgctgaggtcaaggaagaaatgggcttgtattctatccacttcgtaaatttgtcaattgcaaccagtatatgagtataacctccttgagccttcctaaaaggtccaatcatctccagcccccagcatgcaaatggtcaagttataggaattgtctacagctgctgcgcaggcaagtaatactattttcacaagaattggcacgcctcacacttctagactaactcagcagcatcacttttggtggttggccagtaaaagccggatctggaagcttttcccactaaagtcctcgatgcagcatgcacaccacactgccctgcatggatttcatctaacagttgtctcccggtagctaagtggatgaacgtcatgaggacctctcatgcgcctcttctgtacagcaagccccatatgatggtatagtgggc

SEQ ID NO: 85759 - DNA, 362 bp, Zea Mays
gtagcagcagcagggaagtatcaactcataatgagttgatttgtaagtactgttacttcccttaatgaagaatgactttgtctcctcctgtaccaattactttgcttcgtagtaagtcgatctcttatttgtgaagttgattcattcggaatagtaactaaataactcgggcatcatatcgccgcttcaagggtgatggccgagctattattgtcgatatttacgcatttgaaatagagtccgagtgatgacgaaaccatgtcagcgtcggaataactgttgaccacgtcggcgctcttagatgtgacagccgagtgacctgtgacaacgccagcgttttttagagataaccgccgagcgac

SEQ ID NO: 85760 - DNA, 576 bp, Zea Mays
ccaccacagagaaggacaataaaccatgaattccaattttcaaaatctaaaacttgcttagaaactgataagaatcgtcaggactagaccgctagacctaggacgaaaggccttatgaatagagggagaaataggtggctaagtaagtaggccctgtgggccagtacttagatttttaaaggatgccctaggagcaccctttttcggataggagtcgttatttttctttcagcatgcatgcattataaaattggtggattaagaattaaggaagtaaaaacaagctaacccgcttctttccaaaccatccaggctcttttatttttttttcttccaccataatctttacatctgatacccttccgcagatgtattcacccacccccgctagcggaggagacactcgtttcaactctgacttcctctctcacgatggctttccttccatcttgtgggaagtgcttaactccgccggttaccctatgcccctttgtacacggtgcagttgtatgaggagcatcgggtaccacgttgtcgggtctggctgactttggaggctcatccccttcagccggg

SEQ ID NO: 85761 - DNA, 608 bp, Zea Mays
gattcgattcgtcgccttttgattggctagtgtttgcagtgaaacggggtgtgattggatgattgcgcagcgatggtgtaggcataacggtttaggcgtaacacatacgttcatgttgggttagcaatcatctcgatcggttttataagtttctatatgcatgttgttgcaccttgcattgtgtgatgtgctcagctcatctgctcattgctaacggttcctgagcaacgcttgctgcctagcaatttattgtttaaagttcaatttgtcggatgttgagccttagttctgtatagtgagctgagctgagtatattgtttgctcatataggctagtcttcacagtactacacactaacaagattcaaactctacttcatgttcagtgacaagaattctggaaaataggcaacatgcgtgtaattgatcattgttttgtttcaaactttcaattaaggacatgtgcatcaacctgtttacattgcttgcttgtggagttgtggtacaatatatatttgatgcatttgatagatatttgctcaatagtcatttggatatctggttcaactgcactatagccttatcttgtcatgataaagataccgcttg

SEQ ID NO: 85762 - DNA, 416 bp, Zea Mays
taaccacttgtcacaaggctccccaaattcatcttcaaatttatacttatagcgaagtctaactagtccaagatctacatccgaagcatctttttcagacatcttaggcatctcccacctagtccttagaggccatgttttaaacgccaaatactcttgaacaagatcccttgttccaacatccgtgcatacaacgttaaaagcaaatatagcgggttgagcatcaaaatcaatatagcaaattggtctcttgtacccaaagcaaatatggatgaaagtttgaataacccctttaatatcttccctctctttcaaatcattcttcatataaaaccacttctttgcccattcgtttgaccatttgctttggtatgcgagtgcagggaatatggctcccctttgataagcaaaattgt

SEQ ID NO: 85763 - DNA, 393 bp, Zea Mays
ttgccgtttgcttaaatgaaacttggagcaaaaagcaactgcaataaactgaaattgaatattcagaaactaaaactgcacaaactggaactcgactaaatatccagaaagtgaaactgcacaagttggcgcaaacaaaaactgaatattcttggttcagaagattattcagactgaactttgaagcttattaagttagttttttgtggtgtctgcaatgggcacaaacagatcagttacgaacagactgaggggaggtgttcgactgagcatgttgcttcactagttctcacttttctccgcggatttttcttgattcaccatcaccatcaacaacattgaagatcacctctaggttacagctgctattatgcacttggaaggtaatgtagc

SEQ ID NO: 85764 - DNA, 605 bp, Zea Mays
gttaaaatgaaaagtcacttatattcaatccacccaagcatttgggatgttattgaattaggtatgaagatacaaaatattggagatgaggactatgatttggaagaggcgacccaaatcgtacatcgcaactcctacgtcacaacgatattgcttgcctctttgtgtagggaagaatacaacaaagtgaatgggttgcaaatagccaaggagattttggacacacttaatacaacacactaaggtgacaagatcaccaagatcacaaggatggagctcatcgaaagagagctcgggaggttctccatcaacaagtgagaaggatcacaagaaatgtacaaccgactcaagacgttcgtgaaccaaattcacaaccttgaagtcattaaaatcaagctaagttacttatttcgcaaaatactactcttgtaaccttgatttgtgaaggacctaggtacgaggtgaagacccccgaggaggtacatggcaggttccttagccatgagatgatggttaagaactccaagtatgttgaggacttgcatcaaggcaatgacccctcaaccgagctgcaagccattgcctttaaggaaataagctaaacg

SEQ ID NO: 85765 - DNA, 432 bp, Zea Mays
tgtcaccttttaactcactgatagattttgaagtgatctgaattgaccttttccccctacaaaaatggacagatttatttatgttccaatccatatatattgtatgctaaatgcacctctaaatgagacaatcgtggaatgatatttgctgtaagctaactcttaactgtcagcgatgttttcaaaccgtctagtcgtatggtcctgatcagcaaaataatcatgtttttagtcgtcagtctggtctgactggtcagtgactactccattagtctagcagtataattttcctgcctactttccctgctgactgctactaaggatgtatactagtaaacagaataactgtacaactatagggtagttaaaggcctgtttggtgcaactctagaagtactgccactaggagactacagcacaagtaaacaaaga

SEQ ID NO: 85766 - DNA, 544 bp, Zea Mays
gatatttggactacacttattaattttccacagttacaaacagtgaaatgagttaattatgaatactcggtttttggctctaattatcgtggtctgatttaagtttgcattgataccgttgtcgccgagttctaataatatttcttcaggacaacaatcacgagagtgggtcgaattgcaaattcgtgtttgcttcatctcttaactttagcccaacattctaggtgactatttaacttcgaacttcatgaaatattttagatggttcagacaaatggagaaagatatgatgtcgaaactatgataggcgaagatgattagaatttagtgactgttatacacaccgatatcctgtgctcaaatcacagtcactatttaacaggaggtaattaccacgggtcttacaaaaagccgcaaccccttttcccctcatcctggcctcccacgcccggcccacgttccccctcgacctgtctggcctcggcaacaccctagtccaacgcggttgcgccagccaagccccctccacgcgtcacgctccctg

SEQ ID NO: 85767 - DNA, 659 bp, Zea Mays
gcatcctgcgcctcattgtgatcctcaagccgacgctcctcctcctctacagccgcatcaaggtccatgaccccgacttcgaccacgagcccgaggagctaaaccagctagacctgtgaactgtcgcctccggttcctcaatgactgcaatgtaccaaaactgaaattaaactaaattctacaaataggctacattaaccagagaggagtaaacattaaagacatacctttaaaagtcggagaactagagacgacaagtcgacaacaaagaggctaaattctaggtgctactgtgctagcttgtgaggagtctgggactgggagacagccaaatgggaataggaattaggagggggagtgaggaggttaggactcaggaggatgatgagttatcagtatagatgtccaaacaagcgacggtgaggaggccacaacagtgaaccatcacccatcagtgaatcacactgacaccgacgtacagcaagagaacaggcatagcacaaccacagccactgagccaccagcaagcgaacagcaacagcaagcgaacagcgaccagcaagcgaacaacgaccaaggaggcagttacacaggtactgcaccaaatctagatgagttctgcatagctacaagatgtgttctgcacagctacaactaca

SEQ ID NO: 85768 - DNA, 583 bp, Zea Mays
attaaatgcttatgataactttcacatacgtttatgacagtatgtaaacatatttatgacgctgtctatgcattgacaatttaacatacgaatcacatttacatccagaatataattttctcataaatcttatggtattctactctctaccagatgaatcatcatctccgacatacaccgttcgttttttcgacgttgatgtctcattccaccgtggtgctgcacctatgcttttgttccttgaaccaggaggccatcctcgcttacgtccagataggttagccaatcgaaccctattaccctccacagttaaacacgtacgactgttgtgaccatcagctatgccacatttctggcacttcctgctcatcttcttagctcctttcgcacccaatttaagaacttgttgctcactacttttgatcgtttttcccttaggcttggccttatatggtcttgctaagtttacaccttccatatgaaactccagtttctacaaatcaaagatattaagtcagttttcatattcacatattcatcatatactatagcaatgttattacctttctagcttccacatccg

SEQ ID NO: 85769 - DNA, 1183 bp, Zea Mays
gcatgatctagtaagaatttgtgagtgattgctatagcaagattgtagctggtttactaggctataacttcggtactgagagttgattcagtcattacataaaatctggagcaaatcgatgccaaacatgctttgacaagccgactgaatgtgttgcgcgatggtacagtgtactgatcaggacaccaactcagagatctcgccgtcggtgatccgccgttgcaattcgtgctcgcctaaaagattcgtgccacgagaagtatggataacgtcaggtgtggtgagaatatccagcgcggggtgaatccgatcactggccggactagtcgctatgtcccaccgtggttagtcgcgctgacatcaccggagtcacagttatccggccaggctacgtgcctcaacgttttaccacgtcgcagtgagtcaccataagccactctctgctactggttcgtcaccggtgaggccgccacggtgaaggccacgaatcaccgcactagtgactcattccttctccgaccgccaccgcgcccaacccaaattccctggccaccgctcaagcctgctataaattgagtgcacccgcggctccgtaggataattacgcatccattgccccagtccttgccccggattatccaccagagcctcccaatttctctcttcccccaatttggttctccgcgccgccgtgtgtcggctcaccgtggtcagtgaactccaggtccgttcgtgctccctgccctcttgtttcagcacccatacctgccccggatactcctcgaccaactcaattgatctaagctgccttagatcgccaggaacacgttggtttggccgttgatcattcggtcaccgtgggcagagcaggttagagcgccgttagtgaaattagttgaggggaaactcttgttagggtttgaatttggtctcagccaaagcaccggtcgttgagtgaatcgcccggtataagctcaccggagctcggccccgcgttgttcgccgtcgtggactttgagctgagaaggattagaagggcaggggtgttcttgcaaatgtcagtgagacgtatgaatagtgccaaggactgccgctctgatttttgaacggtaagggtgtctctgcaaaaccgacagcgcgggcgcgctttcgctagtaaatgggccgacccaggccagtttca

SEQ ID NO: 85770 - DNA, 808 bp, Zea Mays
aatacttaaccaaaaattgtcaaaccaattttggtggattctaaatattatggactaccaactaaaaatactgaaccccatgctttctgttctaaattttagagtttataattaaatacagaaactgaccaaaccttgtttaattaaagaaaattagttatgcttctgtgctgaacttaagaaaatttgtagatgttcaaaccccatttaggcactgtttaaaaatagtgagaaccccagtattgaaaaatttagtaaggatagctattaaaagccatttttgcccaaaacttaggaaaatcagaaaggcattagaaattaatgaccagtgaaggaaattatttttcctagcctacttaagtaacaaaaaacctaggaaaaataaaaagaccactagtccagaatatagttaaagtggaatgttttatttagcattattccaactagaaaacaattattggaattataaaaccagacccaaatttgttaataaaaatccagtggacttataaccaccaaaaccccactgcaaaaataataaacaccccagcccatcattttaagtagggtaaataaatagaacatgataatgagtcatatctcagataaatcatgagtaacccaaaaaaatgcaataatgggcaaataaaattttgtagatcaataatgagataggccacgagagaaaaatgcaaacccatttgaaagatgcacaataatgcctattaccaatacttcattaaaaaggccatttaatccaaataattcctaccaccccttcccttaatcaaaaagatgccaaacttca

SEQ ID NO: 85771 - DNA, 476 bp, Zea Mays
catttttcttggcttgcaggacaacaccagggatctacggtttcttgcactgtactgcatcacattccatcgcaagaacaaaaccatcccgctccttgcaaacatccaaagatacaagttttcacggatgtagtctagtttagatatgttagatattatgtctacaatatttcataaactttatcaggagttatgtgcgtatattatggtaatgacgatagaacaatcatgtgtcgatgttgatgtttcttatgttatgttaacgacaacctgggaaccgtaatggataaactgtaatgttttctatgtttttaacgtcatgtgtgttattttttatttgatcagtatgttgcatatcattgtgaactctatgtggacctagaaccacatgtatagtatattatgacccgtttttattggttacgttacttttgtcacaagtttatgctacaaacagcatcgtgttatgcttattt

SEQ ID NO: 85772 - DNA, 370 bp, Zea Mays
cacagacactaggccgcttcttaggccacatcactacccttatcttggttgcctatcttttatgcaataccgacacttgggtctgtgtgtgctaggacggtctagccttgttgtaatcctgtaaaactcatagggcgctcgctagaagcgtgttgtttgtatggttaaactcttctaccttaattacaatgatgcacaaatcttttgcatattcgagaaaaatgtttcgttgtagattgtctctcttaggggtcgggggttgtcttgtaacctgttgatgcgtgtttgccgtcgaggcaaactctatgctctgttttttttcctttacttcagtgcaagccacattgtaatgataagaggtttattttga

SEQ ID NO: 85773 - DNA, 586 bp, Zea Mays
atattgggttcaaacccataatttaataggggacccaacctgtaagactaaccttcgcttcgttctacacaattaccctgtccactctcagtctcgtagagcggttcaccctaggcgaggggaaccaaccgtaactgctacataaggatcataacccctccatccgcacgtccccctgtcagttactccatccttcacatttccccctcctcgttcacacacgttcactcacacctgcgacaattcccttcactccatctttgcacatggagatgttgtgtaggtgacgacaaggagccccaacaacaaatgaggagcaccattgtgttcctcgccatcctcattgtagcgtcgacgtcctcgccaccgatggtttccactcagtgagaaatctctaccccttctctgtttcgtaaccgatgttgcaatgctctttcttcatagccggtgaccaaattttgccccttctctcgttgaatcataagaacgacgctcaatcatctttacaggggtaggatttcactgtaccccaaatttcccccaaattcacacttctttatcctttatctctctccctagacatttc

SEQ ID NO: 85774 - DNA, 617 bp, Zea Mays
cgacgatagcattgacagtgtgaggggggattaacactaacgcgagtgagggaggcgaggacgcaggggagggagaggggagactagggcggcagggtcgtagaggagagggatgagagattatccaaataatattgttcattatatttcagtaggtaagggagagaagttatccactgatctgaatcattcgttttgatggtgtgtgtagtctgggtgtattttgtttggtggatttagtggaggttatgggtgtggaggtgatttgattgtgtgggttttgcaaagtttaaacttgtggattatatagtggtcggtgtttcaaacatagctccgacaagtaaatttgttcatgcatattctaggttccggatggtgtgctcagaggatgcgagatttatattgcttcgagcagaacatccctacatccagttttctgaggttcacgctacaggcactgttgttgctcaatactcatggtaggggttacaagcgggagagagggaaaaggagatcttaagtatctaatgcatggctagacctaagaactacgggactagagctcttcgctaagccttgggcgtcgtggtggttcgctccagcctccatggtcttcc

SEQ ID NO: 85775 - DNA, 490 bp, Zea Mays
gtagttgagcccagaagtggagccaatgcgtagcccgaaaaaccacctgcaaagaagattttattggagcattatcaaacactgcatcattcatgctcaaccagattgcccaacatatagccgaagctgctagaataaagtgacttctctttctattgtctagaccagttaaccaagaaccaaagatatgtctaatattgtttggtggacgaacaccgcatctgatccgaactaaacgccaaataaatttagcaagttgacagtggaaaaaagatgatcaattgtctcattctgtggacaaaaagaacattttgcatttcccttccaattaattatctttggtaagtacaacaccactatgtaaataccacatgaagattttaatcttcaaaggcatcttagccttccaaatgtctttgcgccacgccacattgacattagttattagcccctttacatcaaatgaacactaaaggatccgtccgccgac

SEQ ID NO: 85776 - DNA, 739 bp, Zea Mays
attggatttcactccacaggcagatggagaccgattgtagcccttcactaggagcattgcaggtatcgtattttccacaaggaagtggcaggctagagtttaattaaccaaactcaataatgaattaaaacataaaatcttagtaagtatacacactagcaattatacgggggtaaaagcaataaagataggtgtatgggggaatgagtagaattaaaccctatgatctgtagtaaggtaaagttgcctcaaaggataatgaggagtaaagaaccaaactaatacgtttactattctataaagaactatttgcacttaatcaattatttataaacttcctagataactactcattggtgcatcaaagctatagtgcatcaaagttgtagtgcatcaaagctctagtataccaccaccaccaccatcggtatgcaacatgcagctaggtatgaccagacagtaagaatatgatctcggatcgtccggacacattgcggaccatccgacaccttacgctagatcgtccagatatgcatacgcagaacagagtactgtgcatgaagcgcaattttcatactccaccccacatacaacacactatattcacagcatgacaccacccgcatgtgaggttgaatattttttgtcccctacagagccaaaaacggtcaccccataccacacaacagtgagatgtggtaccggtgtgcctcaggggcctataccggaagccaccttt

SEQ ID NO: 85777 - DNA, 778 bp, Zea Mays
tttttgaccggtgtgtaagaaccttcactttcttctactttggcgcagtagaagaagcttttaatgcaccttttctttttaaccccctcttccgagcagggaagcagtaatcatggtaaataaatccaatagcgtcaaaaaccttgttcaatctcttctttctttgggcaccaaaggcagaattcatagcttcgtcttcaactttggtatacgcccctaatagttcatcacttgttgcttcgatggtgtcaagccagtcatcgtcaaactcgccaaattgatttttgtaccaataacagtacttcaaatgaaccaaactgctctttccagcattctgacttgtatcagccccaacatccttcggcatttcccactcggcagttaggatccataccttgaaagctatgtgctcttgcactaagtctctagtgccgatgtagttgcacatagcgttgaacgctgctaggcaggcttgagatttttctgtattcacaatagtcggtctcttcaacccgaagctggatcgaatgggccactggatcatgtccttcacatcattcctctgactcaggtcatttttcacgtaaaaccattgcttcatccacgaacccggccattttttctgaaagttggcacagggtatcggatatatgatcggtacatgaaggtgtagcaaattcaaaattgttgtgatattgctcttttccattggccttcgtctgataggataattcatgaatattacagaaataatcggcatctggttccagtctttgac

SEQ ID NO: 85778 - DNA, 555 bp, Zea Mays
tctcttgcttgtaggactgcaaatcaatcttcattttctccaggaaggtgaccgggtagaacctcctttcaaactgcctgatgaagacatcccaagacaggactcctagtgaggaggagtgcgctgcctgcacgcctctccaccaaatttgagcctctcccttcatcagttgtgtgccaaagtgaacacgatcaccatacacaatctcaaagacattcatcttatcctccacgtaagttagccaatctgccgcctcgaccggagtaccactgccatcaaaagtatccagcttcatgcccatccactgcatcagagaaagaccattgactggaagaggcacctcggcctcgccacttggagcagcacccgcaaggacagcgcccccgggcacccctccaccaccaggaccctaagcagcacccacaggggcaacaagaatagcttgcctcagaatggccaactcctgctgcatggtctgcatcgcggctaacattgccgccggactcatcgagtccccactaggaacttgcggactaccccgagccctacgaggcg

SEQ ID NO: 85779 - DNA, 798 bp, Zea Mays
caaagcctgtggtcaaagacaaatgagtataggaaagataatttaccaagaagaacaataaaaggcaagtagttgactcacctaaaattggagaggaatgatggtaaacccaagtcaggaggagcaatgtcatggcttgatggaggaatatcagcaggaacaatttgaagaacgttgccaggggtgagctcagccccgccagcatgtactagacttctcgcatctagctcgccgacctccaaggcgacttgtttgctcaaagccgtgaaagcatgcatcgtcgtcgccccatcggatcgaggtggagacgacccaacatggacgtccatggaggtgtgggagggagagctcacctgaacaccctcgggggctgggtggtagcttgcgctacccaccagagccggatcactaccggcaacaccctcgggggctaggttgcagcttgcgctacccaccagagccggatcactaccggcaacaccctcgggggctaggttttctgcagcagccgcctctaaggctgaaggctcccctgtcatctccatgggagtcgggtaactcggaccaacgtcttggcattgaagactgccttccaaagtcgacgatgcacgagacactgctcgggatacctccaatcccacgtctggaatttctgaacaaacagccatcacatcatcagcagttggctccgatagcatatccttagggatgacctcctcaagggcctgatcaaaatccgatattgacagtccttgaaggctgacaagagctgacaaagctggagaaggaatatcactc

SEQ ID NO: 85780 - DNA, 525 bp, Zea Mays
aaatttgaggataggagcaaagaaattttatacccccaaattccgggtgttacaccgaagcgtacccaagttgtttagcaaatacaatagcttcgattagttgttttgcacccataacctttccggctgaatgatggaccctgtatcaccggcctccaagctcctggtcaaatgtgccttctccaagtggtctgtcatcctcaatagccttctaggcctgttcgaagatgtcactatgatcgtcgaaggtgtcacagttggagtcatcactgctggaggcactagttgagccttcgggctctttggcattgccacatctgcaacaggtggcatagaatcattcgacaccaaggtcgtaccagcaatatccttatccttggcgtcgtcgtcttcgtcgtcatcagaaaaaaatgagctcattactaaagccatatgttcctcttcttcttcattgtctaggagcggttcgagagcagtaactccttgagccttcaaagcaatggcctcctcgatcttcgtatcttg

SEQ ID NO: 85781 - DNA, 469 bp, Zea Mays
cggcgatcacagccgcagtagcaccagcggcgccggtggccggaggaacaggagggcgtgaccatccgcagttccacaccgcacggcactatcgaaaatccacaagtttccccctttttttccccattatcattaccactagttctatcaatcagtaccagcagtagcttcggtttcgctcagcagtccgtccgtttcccaacaggaatgaaacatgagctctagatccctccctgcttcttcttcccggccggagctctacataaaaactggaagcgttcgccggttttccgatgttcacgttggatggggaagtcgtcgtgatcgatacgtcgaacgacaatcatatatttgagctgcagcctgcagctgatctgcgacatttttttctttctttgttggagatggtggcgtatccttgtcaagctaggagaagtagaaaagagacgagcatagcatttttttctca

SEQ ID NO: 85782 - DNA, 461 bp, Zea Mays
tatgaatctgtgaaccttctgttagttatgatacatgaatatgtgtgtaatatattgtgcttattcaagatatgtggttattgtttatgtgtttgcagatgtgtgaacctgatacacacacatctgatgatgagagggctggagaattgcttgttgccctttgtgctgtagacatttgggggagctcgtcaagtggggtttcaagaagagcaatggttgaaacaggtattcaatgggttgagcgaaccttggagaatagtgacgactgtttcgacatgtttcgcatgaggcgaactgttttccgacgtttgcatgatacattggtcgaaagttatggtctgcttccaagccgaggtgtcagtaccacggaagctttaggtattttcttgtgggcatgtgggggcccacagtcatttaggcagataaggaataagtttggtcactctttggaaactattcgt

SEQ ID NO: 85783 - DNA, 1361 bp, Zea Mays
ctagagagctactactacttagttggtacacaagctaagctatgctacctagctacacaagtcgagcaagcaactagtaagctacacaagcaaactagctacacaagagcaacaacattagcacaagtgtaaacaaataatacaaactagtgtagggaacctgcaaaccaataggaagaggttgacacgttgacttttattctgaagttcaatggtttgccaaccacttaatcctcgttgatgcaagcccaaggttgtcatcgaccctcatgctagtggtgatccacaagtcacactctcacatgtggagtgctcatacaagagctttgtcacttgatctggtcagactacttggcactcttcacacctcagcacctcgctctaatagtcttgctctttgtgtctcctaagggtgggcatgctaccccccgcaatgccttctcccaagccacacataacttcgtgcgggattcaacaatgatcacaacctccaagcaatctaggatgtggcaagcttcaagagtgacaagcaccaccagtttgcaactggattgcctagtgccacaccttgcaatctctcaatgcaacggactaacagtcactcactagcaatcggatgcaatcactacacgcacaagtgagttagaaggctctcaagcactcccaagcatggacacgaagtccctagggaacagccagccaaggccggccaccacttctgcttgtagcctaaagggctaactagccattgccccttcactaagcaaaacacgagagcaccggatcgtccgatgcacccccatcggaccaaaggccatggtccaatgccccgagcgcactgacgtgtcattctaacattcaaactagtcattgggtgcgccaacaactaccctggcacaaggttcaacgctcctaagttcaatggccatcggaccaacaaccacaccaatctgatgtgttctaaagagctcctagagtcgctcctaggccatcgggccaatgcccacaacgtgatgtctcttcaaccgttatccaacactaacaagtggggccaaccgaggaacagtggaaccgaatgatctgacgctagtcaaatgtcatcagaccatacctctcagtctgatgcatcctagttcgccttcatcgctagggttagccatcagactggtcagccctgctggtttggtgctctctacagggtctggtgcctatctaaaggcacttctagattgagttaacaaccccttttcaaatgtgctaactccatagtaatgcataaagttctgttttatgtaagtgagttagccttttctctgacattttcaaagggttttcacttcttaccacaccactcgattctg

SEQ ID NO: 85784 - DNA, 426 bp, Zea Mays
cgggggtgccagcttggagatgcgccgagggaggaaaactgaatatctcgagatccccctcaaggacagcattaaaggatggcgcctagagtggttcatagttgagaattatgggaattctctcccctcccggtcgggaagacagctggatgttcgcaccccaagctggaccgagtctcccacagatcaggaggtagctgaggcaagtgtgttgctagctgaagttggactgttgaaagaaaggggtctgactcctgaagctgtggttactgactttgttttcaagaatattcatccactgaaagacagggcctatccagcttatctgtatcgagggctagccgactcaactcgggttaccaataggagaattccttctgcagatttggtgagccgacttgaaatgatcctcaggggcaaggtgtc

SEQ ID NO: 85785 - DNA, 287 bp, Zea Mays
atctttcgcagtcatattcaccttaaatctctaccctataccaactaccacatattctattatttattttcacctctctcctaaccggcctctcacaacgtctctcttgggccccacctccggtcccacctctgtcatccagtcgcatggcagcgaacgctgcagatagagttcttctcagccgactgtattttacagctatctttccagtcactcgctgcagcaccattcgaactctatagcctacgatattctttacagttccttttcaagtacgtgactgcggg

SEQ ID NO: 85786 - DNA, 816 bp, Zea Mays
ctgagctgagctagccgcagcgaggtgtgtttcacggcggcggagaccgaaactagggaaagttggaaattggtgagctctggaagacggttgagggtgggagtgggggctctggtttcacgatgaggtagcgcagctgcccgcgccatcaatttatagactccagccgtagctggatgaggatcgcggatccctggatcgcgctggcgaacacaccacgcggcggattccggtgacagcgcggtggtcgccgtttaaccggagccagccacctcagtgactctttgacacgtcaccgggagcttttaccgtgaccgccgacgaccaatccgggccacagcggcatccttatcgccggcgacgagcgagccagctggcggtctgatccccaatggtctactgtaccatcgcgaacagcctatcagtgcgcctgacagtccatgtttgggctcgcattttctctaaaatttgcatgtgaacttcatcaaacctctgtaccaaagttgtagcctgacaatccagctacaattctgtcatagcaatcttgatcaaattctcaataattcaagcttgaattcatgcttaaagtttcagtgatcacactgtctgtctgaaaattcagacattggcaccctgacagcccaacttcaaccttaattatctccagatttttctcaataacatggcttgcactcttaagcaaacttgttatccattaattgggctacaattttgatgtggtgacctagggcaaaaaccccataatttgaaagttacaagggcttcaagttgagtcaatcacactgaaatgcagac

SEQ ID NO: 85787 - DNA, 337 bp, Zea Mays
aaaggaatggccagtcccatgagcctcatagggcatgcattaacgcgtcacaaaacccaaaccaatggggaggaaaacaatataccaacatccaaacaaactcacccatattggatcaaccatcggctgccatcgatatagtaagggaggaaatagctggggtgttccgagataagctcggagttagtatagtccctggggggcagtcatatcggagaccttatgatagccagtttgaccggctcccatacccacaggggaccagaatacccgaattcgtaaagttttcgggtgaccaagaaaagagcacgcgtgagcacatagaccagttcttagc

SEQ ID NO: 85788 - DNA, 277 bp, Zea Mays
aaatattacattagcattccgaatatttttacaacaatagctattcttcttttaaaactacttccgcagcttcgtttagtagttgagttacaactttgtccatgatagcttcggccagcttagtaatttcatcttcattttttgcttcggggtcggcttgtgactcgaagggctccgggggaggagataattcggctgcgatataaaacatgaataagttcgaaatcacaagaataaaacataaagtcaaaagcaattagacaatacctatccgcct

SEQ ID NO: 85789 - DNA, 404 bp, Zea Mays
ctttcctcagatgctcctcatgctcttgctcattctgggaatatataaggatatcatcaatgaacaccaccatgaatttttcgaggtagtccatgaacacactgttcatcaagtacatgaagtaagctggcgcattcgtcaaaccgaatgacatgaccatgaactcatacagtccatacttcatgatgaatgttgtcttcggtatatctgaaggtcggattctgagctggtggtagcctgacctcagatctatcttcgagaacacactggctcctctcaactgatcgaataaatcttcaattctaggcagggggtacttgttcttgatagtaacttcattcaaagctcgataatcgatgcacatcctcttcgtgccatccttcttctccacaaacagcactggg

SEQ ID NO: 85790 - DNA, 474 bp, Zea Mays
ggaatttaaagttgacaagttttgcaagtgatcggctttgcatgtgaatggaaacgatacttaaatggaaacgatacttaataacaatataatactacgtcggccaaaaatatagagaggaattgttaagccatgctgtttgattgactttaattcgtatcggtttatactggttatacagtgttttttatctctataataggagcgacacctattactccaagtaggtttactatgaaaaaacatatttggtggcaaatttaatggtatacgtatagcataattgacagctattactccaaggaggagtacccctcaatgccagtggctttccgtatccgaaacgtggaactgtgagagtagtggtacgtgcaatttgcgcaacgtgggtggggtgaccgaaattgagtacccgggaccgtccacgtcattttattcttatctgatttctcaagccgagttgacacacccaca

SEQ ID NO: 85791 - DNA, 516 bp, Zea Mays
atcgttgatcgtgactcgatggtacgtgtggaagcacgtcggaacataagagaattatacaggttcaggccactagaatgcgtaataccctctgtcctattggtgctgagtattgagtttgtcgatggtgattgggtgtcaaatgagtagtggatggcggtgggtgaattctctcttatcaatctaatgatggcgaggttactactagagggatggtgagacgagatcgttttgtaggggtaccccatcagccttatatagatgtccggagggatatccctttacaagccgtgaagtatatctaattctatctgagtctatctttgacgttgcaggtgctcccgctcatccagagttcggtcgcctttcctctgagttatcctccgagtatctagctcttcaggtacatgcgaactgtgcgcgtgaagcatcgacgctccttccgtgtcagccgcgcacaaatagcgctcttgtgccgcactttttgggatcatttcctattttagttgtcaccct

SEQ ID NO: 85792 - DNA, 603 bp, Zea Mays
cgacgctctcggcccatgacagccgcgacaagacacaacgtcaccaaaccacgaccaggtcgtacctacaagtaccaaaaggtgtccgacagacacgatagaacacctccgcgtgcgcccacggataagccctcgctgactcgcggggccggtcaactccagtcacaggggcctcagcaccggagtctctacagtggcccatatatacaccggaaaggacaagagaatacaccataccaggcgtatacctacgcgtgcttgatagtgacacaagtggtatgacgaaagacgaagttgtaccggacacgaccttgaaccttaccataagcgcactttgcgggacccaccaggtatcacaacgctgacaccaagcaagctacagggactcgtataccgaaaggacaaaatagaatgccatactaggggtacggtagcacacgaccctacgaacgacgttaggagactacgccacccgtaggcggcaagccgagctccccctatagaatacaagttcccactataaagtccacccttgagctataaaagggactaggaaactttcaatttacacacaagcacactagctgtaacacgtctcaaagc

SEQ ID NO: 85793 - DNA, 583 bp, Zea Mays
cggcaatggaagggcacctcagaatgttggcttcatagcattgggggattctagtcgagctgctgaataataggggcgtttgaactccgatcttcgagctgcttcagtttccatttcctcttcctgcagagaagcaagcacgcaggcagtatcgaaatcgggagggcgctgaagaagaacagcagagcggatcagacccttaagtccgtcaatgaaacgagtggtgtaatataggggatctggggccgactcataagcgtggaggttatcaaccagtttagaaaattcagctatgtactctgctactaattgggtttgacgaatgtggaatagtttgtggatcataatggcgtgctcatcgcggccaaaacgatcgtcaaggagggcacaaaatccggaccaggagagatggatgagtttccgctcaatggattggaaccagcgagcagcgggaccttgtaagtacattttggcgaccttaacccaaatggtagagtctacggagtacatctcaaagtacgactcacaacgggatcgtcatagtttagggttctcgccattgaaatgagggaacgacattttg

SEQ ID NO: 85794 - DNA, 950 bp, Zea Mays
ttatatgtatcagtagtgtggatgtcttcatcatcatccatccgatcctcctcctcatcaattctttctgactctgtgatattctgctctacttctccatgtgagcgccacacaagatagttagacataaacccattcttgcaaaggtgatgctccagttcttcgatctttctcacatacttaaaattcctacacttggtacatggacacttcaccacacgaggtccactggaaaatgcgagatccacgaattgttttgcaaccctaatccattcctttgagtgacctagagtcacgctattgaatccatcatacatcgcccttcttctattgtcatccatttccaaaactaaataacccaatgtataaaaaatgtgtaaataaacatcattaagcatataaacgtaaatccagactgtgtataataaccctattaaaaagaatcactagacataaaaaattgtttaagcaaatattgaacctatcattttaactaacaaactaacatccttaaccatattgtacgaatgctttgcgaacataagaaaatggaaaagctggccaaagctacaaaatctagggcttgtcctatcccactaccaaccacttacctgggtctgacgtgtcatggcctggatatgcacgccttttgtgttctctatgactattctaataaaccaataatccacctcaaacccaaacctccaaatttggcctccccggatttgctatatcatcccccccaagctaggtgatcttagcaagtgggacccagttgtacaaatttgtgagttgagtcatgtagttctgctaggtgagtggtcatggtttgttgtttccatgagtaacgttgtgctcttctaagttcagctaaacaaaataaattttacaggtggtctgtagtttgctgaattcactgcaactaattttattcaggaaacatttatgtg

SEQ ID NO: 85795 - DNA, 1656 bp, Zea Mays
ctggagctgccttttctttttcttctccttgacaggtgtagttgggcgtctcgctcggcgcgaacgctttggacgagcaccttcgggtttccaattttccacctcttcaccaaactcctccccagttgtgatagccattggctcggtacgggtagagtcggatgattccctcgccaataggctaagcacagcatctatctcagcgtcatcagtgctggctagcatctcgaagtgagtctgcctctcatcttcgggaatgttctgaattgaagtaatcaatgcttcaatatctgctggagagggtcacactctaagacccaggctaccatcacgagcaggagggttggacacaaactcagaaaatgaccagattggtggcaagttccaagcagaataggccacaagagcaccagcatttgaaattctacccttcaagatcatgtgcagtcggctcatcaaatcttcagtgggaatcttcttgtttgtgacccgggtagaattgttgacaccactgtacaaataagcaggatacgccctatccttcaagggttggatgttcttgaaaatgaaatcagcaaccacggccttagcagttagacctctgtcctttagcaagcagacctcgcaagtagtaccttagcctctattatctccgaaggagtcggagattctatccagctcgatgtgcggacatctggctacctccctgaccgagggggggagagacttgcaatggttttccacaatgaaccactcaaggtgccaccctttgatgctatccttgaggggaatgtggaggtactctgcttttcttccgcgacgaagctctaggcttgcgctgccaacgagctggtgctgtcccccagccatcccgggccgatagtgatataggtatttccagagaccgaaatggaggagaatcccgagaaaggcctcacacagatgtacaaagatggaaacttgcaagatggaattagggttcagatgagtcaagttcaattcatagaaatcaaggaggccgcgaaaaagggagagacgagaagagcaaggctgtggataaggaaaggaatgtaaacgacagattcatgggtatcctctgtcggaacggtgaccccacggcaaatttgccaagagtagagctctttcagaagcaaaaccccaacactgacaagatgaaggaggtcagattctaagataacgaacatgtggttacccgcgaatggcaactatctgttggggtcaatgggcaggatgattgttgcgacagagctttgcctcttccgcttcggcgccatcgcaatctggctggcggaacgaacagaagcaagatctcagggaagcagaggagtggttcgaggcggaaatgtgaagttagggctcagaaatcataaacgcatgtcgacgcaagtataaatggggtttcccgggttgagcactacttctaaaaaagtgtcaagtcattactcaggaaagcagaacttcaggcataactcggcgccagtatcatcagctatcgcttggcggttacctctaaaacgccagcacatcaagcatgacttggtgttacctctaaaatgccggtactatagctatcgctcgacggttaactctaaaacgccggcagcatcgagcacgactcgacgttacctctaaaat

SEQ ID NO: 85796 - DNA, 416 bp, Zea Mays
gtgcctccagatgttgctgcaatgggagccggaccatcgggaacagcaaatgaaggacctgatggggagctagacctttttaggcccctccttccatgaaccttgctgacgaacggtctcctgccgcaggaaatggagcaacaaaggatgaagaagactagaatggtatatttaggtattatacttatgtaaaataagtaatgaagtcaagttgtacactagagtatgtataattattacatttcggtaatgtaatatgatggtgtatgttggcatgttatattttttccaaatgtttctttgcctcagatgccatcacggactcgcgcacatgatggtgcggggacttcccgcggtggggaggatactcccaacccgccaccagtaccaccgactttggccgaggctatcgctgc

SEQ ID NO: 85797 - DNA, 815 bp, Zea Mays
ggatcgcaatgcctgttcctactttcttcgtgtgattattgttaataccatatcttataaccagtgtgcacgtcactggccttgttatgtcatcaactggataacggaccttatttcctgttgacgcgatagagcttgggatggttgtacagtcggtgcaagccggcggttgagctgctggaattatttgcagctgtggagtggtcatctgttgaacagacatcgcacttgccaactgcagcatcaattctagtggaggattcgatagcatttgagacatcaagtctttaaactctttctttgcctcctgcttaaaataatccgacaactcttctttgtatcgatcacgtttcttgtacaaaccttctcactgtggtctgaatccttccttacatccttccttagacgagattcctcatacacggcctggatgctcatggttaccgagaccagccgttaggatatctctctccatttgtggcttaaatgatccttggctctgcttatctgccattgcatatatgtttttcgcaacttctttgacatttggatcatcaaaagatgcaccagactcagtttgcctgggttttctagcacagatccaatttgccgtcctttcaccaagttgctcggaaagcatcggcaaccctgcggccttcttctcagtgtcttcttgtctccatttagaaacttgacgcttgtaaccacctgtgcctaagtggtggtggtacttgttcttcttagatagttctgaatttgcctcgcttagagatatgaatttaggattgctcctctgctctagaaatactgtccac

SEQ ID NO: 85798 - DNA, 545 bp, Zea Mays
caataaaaaggcattgaagaaaagagggttctgttgactcgacagaaggagcaattatcattgggtcttagacaagcagtcaaggtattgcttcggggcctcgagccagttgttctaaaaaataacttgagtattcataacccggattgggtccatgggccattaaaaggtctgagtgacccagacaggtgattttgttggctatctgatgaactcagacctagagacaacgcaggcgagcctggaactctgtctcgtgggttcaccgatggactcagacatagagacggtaccgtcttggaccctagggaatcaatgttctggcgatctttctccgatacggtcgacatggagccctgcatcgcaagatagtcggaacggttgcacggacatgcaggaagggtgctagtggacagtcctgatctcgtctctaggataggcttgtggggaaacccctatagaggcatcgagaagacaatagtcgagacattcattcattgttctattcctcatacactctgtaatctcaaaccaagagaaaaatc

SEQ ID NO: 85799 - DNA, 1428 bp, Zea Mays
tgttgatctgaagtcaactaatggctccaaacgaatggtatgcatgagcccctgaaggacccttatggataaaatagtgttgcgcatatcagtctaaatcttaatgactgactgtgcatttggtaataataacaataagttggcagaattgtaaccacgaagcaacttgttgttgcgcgtctcgctagaagttgagactaaaccttcaacattgaaggaaaaagatgcagtattcatgctactgcattaatctaagtccaaagctcactgcataaaacccctatctataatgtgcgtaagatttcccaaataaatcaccacaatagcatacaatggccacaactggatgattgtggttggggatattatctgtatgcttttagaacatctcggcattagggggagataaatgtccatctagtgtaatgcctcaatattctattaaacgcacaaaagctaaattgaacctgtcgttcggtgtgtactcctatgtatatggagtctgccagaaatcgttgaggagtaaccatattggtttgaatgcgtctacctgatgtagatgtggatatacccgggattaatatcgtatccacatttgacttattggtatttgatctattcttggggacgcctgcgaatatgatccattggccttagtcaaagcatatgttctgattgcagaatcacgtggtctgtaataactctcctccgatgaactcgccctgctggtgatttgcctcacgaagaggttcatcttgatgatgaaattcctagcaatgcgtgcaatatcattgtgctgggaattcggaacaatgaatctttcgttttgggaaatgacggggatcattattaaatgtgggagacaaatatgtcgacacttatcttgcctctatagattgcaaagggatccaaaacaaagtcctaggcataagtgtttgaatctctcttatcggtcattgataaatgcaatcgaggttgaaccaataatcgcaaaatgaaagtcacgagcttgaagttcggacatttatgggcactattgaaataatgtgtggtgaatgcgatggttcaagtggtcttgtaagagacccatcccacatatgtgttgaataaacacttttccgctatataatatatctggcaaatggcatgaattaaaatatgcagttaataggattctgaagatccgtcacgagatcctaggaggactcatatctttgaattataaatatgcaacatataaatctcgtactgaataatacattcctgacgaatgaacactatcttatgtagagagaatatctcctatgagattatagttccttaatggaacctttccagaagaaataaagtctgtgttaaacaccaaagtttgataatccctataaagggataaaagacccatacaaacccgaaaaggaaaaagatgag

SEQ ID NO: 85800 - DNA, 591 bp, Zea Mays
gaatttccgtagcgcaacctgcacacgattgcaaggatatcattatatttagtgttggggcctgctatacacaaggtcagtttatatgcctgcattgctaaatgctggaatgttggacatgaggttacttcactttctttctttatttgagggtaaaggagacaatggtgatggaagggataagacacaaacacatttatatatatcattaacctattctttgtccatccagtgatttatgcctgcatgattgttcgtttcacggttttagtaattcagtagcaatttactaccggtggatatattatttgtgctttgaaatttgttaatgcaaacatttttataagacaaacattttatttctctacttcctctcattgcacctacgagcaatctaatatactttgcgaacctgaatatggttttgtgaacctctatttgtgaacctgacaaatgatgaagatagcaaataatgaacccgagcctgaaatttgtggatataagcctgtgaatctgaaatctggattgagcctgaacctatgagtttgaaatatgaaatctgaacctcgcaaaacgctaaagatgacaaat

SEQ ID NO: 85801 - DNA, 324 bp, Zea Mays
tcttctcagccatcctcgcccaactccgacgacgaattaggagtgccccgaggatccttccttcgctccggcacccgtggtatcttccctgatccacaatgaatcccctctgactacccaccgaggtcgggaatggcttggatgaaaccccgacgtggcagctctcctttctcggcgtcacccacaactaacggtggctcgactcactcgacggctttcggacaggagcatggaggcgcggggcaggggatatttatacaccgctacaacgctcgagacttagggtcggatccctacatcccgcaacggcctaacaaccatgcc

SEQ ID NO: 85802 - DNA, 728 bp, Zea Mays
ttatattcagagttcagtggctacccgtgccaatcataagctctcctacaaatattctggcccttacaaggtgctccaacgagtcggcagtgtggcatatcggctataattaccgtcttcggcgtcgatacatcatgtcttccatgtatcccagctgaagcccagtgtcaaatctgccattccggtcagtacttccttaccttctactgatatggatattcaggtgcctatacaggtgcttgaccggtgctcaatttctcggggcggacacaccgtcgaccaagtctgggtgcgctggtcaggctatgatgctgctctcgatacttgggaggatgaggctgctctgcgccagcgttttcccgcagcagccgcttggaacaactagcttctcatggaggggggattgtcagcatccccaagcagtcgtgcatcgagaagcagaagtcaacggcagatgctactgatctggtgctgggtcgccgcaacaggaagcccaatactaaattcataggagaagattgggtggcgtaatgggtcgtgggccttttaatagcttgtacttaaacattgtgaacagtgaacggtggaaattatactgagaaatatatcgacaactatcttctcttcttattccataggagaagattggatggcgtaatgggccgtgggtcttttaatagcttgtacttaaacattgtgaacagtgaacggtggaaaattatactgag

SEQ ID NO: 85803 - DNA, 443 bp, Zea Mays
cttagacacattgcctagggactcgtcctacatgttagcaaggagattgacttgctaagagtagatttgggaagataaggagatgcatgattctgttggattagaagataatattgatatccctataaataatgcagaaccctaatcataagagtaatcttcatgtaaagatagagataagtatccttgtatttaggcatagacttggctattccgatccacatccttatctggcaattgaccggataaccttcctataacctccccctctttggactataaaaggagggataaggtgccccaagatggtagatcgtctgatcttattgcaaaggtaatagacactgcaacaaatagtacatagcgtattatctcgcatttgaagcccaacatatctaaaacttcgagtctcctgcacattcacctacaattctcgatcacgc

SEQ ID NO: 85804 - DNA, 341 bp, Zea Mays
ctgaagtttacttcagggaagattgtgtgactatagaacatgtagcatgcaacaagaaaacctcactttgctatgtccaagctaagcaaccaagaaaacctcgctttgttgtggaggacaggagttcaacacttttaatacattttggcctttgtgaaatgaatcgtgtgttgactacataagaaaataagtacatgatgactttattgacgatgcgactagatattgccatgtgtccttactaaaaacaaaagttgaagcattaaattactttagaatctataagactgaggtcgagaatcagttagacaagagaattaaaaggtaaatgtcagattgaa

SEQ ID NO: 85805 - DNA, 535 bp, Zea Mays
ttggcgcaagtctatttgctaaaatcttggtcaatattttcatgaagctattgatgagactgatcggtctaaacatgtcaattctgtcagcaccctccttttttcgtaaaagtgtgatatttacctcattaacgaggtttaggttttgcatctatggtgatagaaatcatgaattgcactggatagatcatctttaatcagctcaaaacaactcttatagaaaatccctatgaaaccatctggagctggcaccttttcagagtgcatccccataaccacatttttaatctcataatcattgaacataagatccagatatgataattcaaatggactatagcctaagttaccccactgaacaaccctttgtctagcaccccttctgccaataacttcagagaaatgatggtgggcctcatgcagtttctcttcctgactggtgagcaacctgtcgtcacgaaccagtgatctaatgaaatttttccttcttctattatttgccatgaggtgaaagaattttgtgtttgcatctccc

SEQ ID NO: 85806 - DNA, 336 bp, Zea Mays
agcattgcctgccggctacgttgctgctgcattcccacatgcttgagcaagctgtagctgtagggaggcggaatcgcatcataggagagctgaggtggagtgcagagatgagaggatacgcgacatctccatttcacttgtgctgatttaattagtatgcgcgcggttgtaataataattaattaattcataaattgaggggtggacttgctggatgctacctcgcgctttggacgatggactgcaaaactaggagcagtagacacaccatccgaggaagcctgcaatggccacacatgctacgactaccatggcggctatggcacctgatccaag

SEQ ID NO: 85807 - DNA, 482 bp, Zea Mays
gtgattcgtgcacggcgcgcgtggatattaccggactagtgaaaagatcttgaccgcgaatgagattgtgagctggccaccgtacccacttgccccgcgatcggtcgagatgccatcgctggagtttgccgcttgccgcaaggatgccacgtatttggaggcgttaccacgtcgcagtagatagcacatctgccgcctgagcctttgccccggtgagcgccacggtagttatgcttcggtgactcacctcctctccgacctccagctcatcccatcccaaattcgtgaaacactcgagcgatcgctataaattgagtgtgtagcctgctctgttagctcgttatgaacccagtacaccgctcctcatcgtcgattagccaccacaaaccccaaatttggaatttcccccaaattggtcatctacgctgccgtgagacaccgcgtcgtggccagccacccacaggtccgtccttgtatttctt

SEQ ID NO: 85808 - DNA, 664 bp, Zea Mays
agggcagatcatactaattaactgtcctcctggagcagtactcaaccatagagaatcttctctttggataagtccatcctgtgatgtcgattggataatctggatgagcatgtggaacatcctctatgtccatggagatgctgcccccagctgaggattgagcctcagagtctgtagctagattataatctgcatcatctacacgagggcgcttcgacttgaaacgaccggcaagctttttcctaagaccactgcaatatatatgagaaatagccactggtgaatagttgataacaccacaatatagagaaagaaagtgtaactttctgttagggaccagactgtccgcgctagggggtcggactgtccgcgcaatggagccggactgtccgcgccatcctggcggactgtccgcaaccgtccagtggtgatttttagaaccctagccgccccatccattcaatcaacgattcgacagaaaataaccatccaaatcggttcaaatttttgcacaatattcacaatgagtaacacttgcaattccaccaatcaaatttttaattccactgcccattctagatcagagagaaaaccctaagaattcccaaagttgaataaatcacacaaattccatgagattttgaaatactgagatgaagacata

SEQ ID NO: 85809 - DNA, 481 bp, Zea Mays
ctggaagccaccccggtcagccgcggtactcctcccctggctcaccgcccgcgggtaaagctgctcaccgtcgtcgtgccatcgccgttgtccacctcgtgtcctaaacgcgccaccgcatcgccgtgactccctctaaactccccgtcgaccaccggagttactgccacgacgatgaacacgtgttcactgcaccagcgttcttcctcacttccgaccgccgcacatcaacgcccaaattcacggtcaccgccaaagagtcctataaattgaagcccccactagctccgcaaggtcatcctccacccgaccaccgctaatcgctagcagtccttcgctagagctcgcgaattttgaattcgccccaaatccctctccgccaccgagaaccacaccctaccgtggccagccttccccaggtctgctcattcccttcttgttcctgttctagcatccttacatgatggtgatgctccccgac

SEQ ID NO: 85810 - DNA, 516 bp, Zea Mays
aagaggggctgcaccttggagggaaggacttgaggagggggcagctagggtttgatggggaggtggggtggtggctgcaaatgggtggaggagaggggggtcggctgcaagagagggataagatgagagagaggcggctgcaagaatggaaaagagagggagagaggggggcggcgcccacaagggtgggaagcgtgggagggggagaaagagggggcgactagggttagagaggagagggcctcccgtccatcggatgcgaatcaacagcccaaaactcactctctcaatcgagctcccgaccccggtgaaagaatgccaaaaaaggtccaatgtttctctgagataagtgcctctcaaactccaaaccccaatggctcagaacacgaaagaaaagagaaaaagaattttaacttcttttcagaaaattgggtatcacactctaccccccttaaaaagaattcgacctcaaattccgacacttctatcggaacgacaaaagaaagatcaacgaag

SEQ ID NO: 85811 - DNA, 944 bp, Zea Mays
aaaagggtggctagggttagggaaggttagtgggccgaaacacgaatcgcggcccaactcgcccacgcgacagctcccgaccccgtcgcaagcgcccaaccaaacaaattctactgccctactggtgaatgtttttcctcaaattccaaattcccaaaacgcaacaaccgaatgagaaaaaacaaaaagaataacctcccacttctcttctttgcaaaccgggtatcacactctaccccccttaaaaataattcaacctcgaattctgacgcttctatcagaacggcaaaaggaaagactaatgaatcaacaacacttacccacaacaaaaagttccggatacttctgccgcatcagctcctcaagttcccacgtagcctcgcgctcagactgattagtccataagaccttgacatacttaattgatctcttcctcaatacacgctccgagaattccaatatacgcaccggacgacactctaaagtcagatcctgctgcaccgcaattggttccatctcaatctgatggtccggatctcgcaagaacttcttcaacatagagacatgaaaaactgggtgtacccctgccatggaatccggcagtagcaagcgataagccaggctgcccactcgggccaagatagtgaacggtccaatgtatctcgggctgagctttccagagacaccgaaccgaacaactcctttagtaggtgataccctaagaaggacttggtcacccacaacaaattccagatcccgcctcctcacatcagcataactcttctgatggctctgagttgccaaaatattctgatgaatttcgcgaaccttttcagaagtctgctgaacccaatcaggaccaaccagggatctctctcccaaagtctcccagcacagaggggagatacaccgcctaccatacaaagcctcaaatggtgccatct

SEQ ID NO: 85812 - DNA, 692 bp, Zea Mays
ggcgatatcatcatatatgcaaatttcaacttcgaattagaatctaaaaatattataaacttacaagttatacatgttctgtgctgttataggcacgctctcaggaccaccgtgcatttctgaaacataatccataatacaatgctgcgggattctactctcctgcattgaacttatgaactccatgtattcaggatcatgcgtcttgttgcattgtaattgattcttttctgtatccttcttaaaaaaattcatgattatgatccaagtacaacatatcaatacacattgatataactatctctttggcatcatcataactttttttaagtttcataccggccttgcattgcgttctctttgagctggtattacgtacctttgggttcgatattccccttaccgcactctttccttccatcgagcaattcaaccacttacaatttttccgttccctatattttttcaatgggaagccaacttcatatgcatactgactataaaattgatatgcttcatccacaccactgaatgtcataccaactttaggtaccaacctcgaatcaattgtcactttctgtgcaaattaataaaatatatatgtatgtacaaataacaataacatgtacgatgcatggtgtccgacctaattttccatcgtatgcacaatataacatgtcataccatctagc

SEQ ID NO: 85813 - DNA, 509 bp, Zea Mays
tatccggtgaaatctagtgattgagtgttttattggtcctctaggaccttaatatctttcttcgtaatataatgacacacagttctcctgtgtttctgagaaaaagagtgatctattgcattttattcttatagataacttgttaacttcaatagacaacacatattcaccacttcagtaatttttttgcaaattccattggacgtcgctgtggagggatgtttgatttctttaaagttaggatcccttaattatcaaaatatggtattgttttctggagtgacacagggtgactcattagatatgcagagagggcatggcggcatgccatgcattactttgattttcacattgtatactgcactacagttagtatattgtgtcatatccgaaccatttattgtttcagtaaggacttcggtattttgtaagactcaatgccaaccagccttatgttaaccataggtcatctggatcatcctctttaaggacctgacaataccattttt

SEQ ID NO: 85814 - DNA, 853 bp, Zea Mays
gtgagggctggtggggagaataatgttcccctccatgaagcgaacgaagtggtggtttttaaaagtttcatgaaggctgggcttcattttccattgcacaagatgctggttgaagtattgaagacatttgagatataccttcatcagcttactcccgaagctttaattaaggtgggagtttttatttgggctatgaggagccaaaggctagagccagatgccaagtgcttctgcaacattcatgaactatcctactagataaaagcaactcggaaggaacagtaccataacaacttcgagtgctacagcttcgtgccccggtctgatgcaagatatctcgtgccaacatttcgaaagaaatggccaggctcttggatgaaacaatgattctatgtgaagaatgatctgagtgagagggaagatgtgaggggcattattcagcgtcccatatggtcacgcttcggcattagaaggtcatcaattgcaattgggaacaaagtgcaagcgtgcttaatggctttcaatatcgtgtgcacttacatcggtaccagggatttggtacaagagtatattacttataaagtgtggccactgatgaatgactgggaaatgccgaaggaaactgctgttggctccagtgaaggtggtctggtttacttaatgtatacctaccattttagaagtgagtttgatgagccgaatgatgattggcttgaggttgtggaggctaccagtgatgagctgctgggagcctacacgaatgtagaggatgaagctatgaccattgcatttggtgctcgcgacaagagaaggatgaatagagtttttgatgtgatcagatttttttatcctg

SEQ ID NO: 85815 - DNA, 748 bp, Zea Mays
gttgagagcttgtgcccttcagcatggtagtagttgggacaagagtctaccttatgctgagttctcacataataatagttactaggccagtctgaagatgtcaccgttcgaggctatatatggcaggaagtgcagtactcctctattttggaccagattagaggaagacagatctttggacctgaacttattcaagaggcagaagaacaagttcgtataattcgagagaatttgagggtagctcagaccaggtaaaagagctacgcagataatagaagaccactggagtttgaggaaggtgatcaagtgtacctcaaggtttcaccacttcgtggaatgaggagatttaaagtcaagggcaaattgtcccctcgctataatggaccactctgagtttttaggcaagttggagagatggcctatcaactcgagctacctgataatctatctgatgtgcatgatgtattccatgtgtctcaatttaagaagtgtctccgtgtccctgaggaacagttaccaatggaagaactcagtgttcaggatgatttgacttacgcgaagtatcctatcaagattcctgatacattgactcgagtcacaagaaataaggttataaagatatgcaaagtacaatggagtcaccagggagaggatgaagcagcatgggaaagagaagaagagcttcacatagattttcccccatcttttccctcgttcttcttaaatctcgaggacgagattcttttta

SEQ ID NO: 85816 - DNA, 358 bp, Zea Mays
aaaaaactgatatctcgggtaatgcggttgcaagcacccgaggagctatgcattcggcgataactcggatgacaaggcaatcaagactccgtacatataggactgcaatcggcgacaaagaaggggataagcgaagtagatagttaccacaacttgtaaagggataactcctacaaaatgatggtatctcacaccatctcaccccatcctctccaacaataggtgagccatcacaaagctcaattgtaatgcttgtacttcaaaaatcaatacttagccacaacaggaaacatggtgttacgtaattcaaagcggcccaaacctgtataactctgcaagcaataccgacgtgcctctg

SEQ ID NO: 85817 - DNA, 394 bp, Zea Mays
cgaaggatcacttgccaaagctcaagcccagaatgagaaattaagcaaagagttaaacgagactcgaatacttttggaagggaactccaccctgttcaaccgtgaaaccgaagctttaaatatgacaatcaaggttgaggctgaaaagaacctgaagctgagtgaagcactcaaaactcttaagaataaatgttttaactttgcaacccaatgcactgctcggttaacaagtatattcaattcagtcggagctgcattcgaagaagcgagtctctctgccaaagatatccgcggagcacttgaatgtgttgaaaaagaagttgacgtcctcgatgaaatcataacttgccacagtgacttctgtgcgctagtagcttctcgtggtacgactgct

SEQ ID NO: 85818 - DNA, 872 bp, Zea Mays
ggagagtcttcctaccatggatgaggctgtgtcaatcatgattgatgaagagagcagacttcgagtgatgggtagtggtaatcttgtgaagttgacctatgtcgtaactgaggatagggagtgatataattgtggaaaaagggggcacttgatttacaattatcccaatcctagaggaattgacgatcgaggtggatctcatggaggtcgaggaggtactcgaggtagctattgaggtcatggtggctatgttggaggtagaggtcattgtggtccttgagccaatatggtggtcactgaagaaactcctatcactctgacgggagaagaagctaaatagtgggaagattggcaaaagggcaaggattcagagtgttcaaccaccacttcatttgcttatgtggctgctacatccacccagcacttcagtcgctccgccaactatgcccatttgggcataggtactcagacgcaagcacttgcatcttcatgtaggaatcatagagattgggtcatagatttaggagcatccaaacatgttacatgattagttgactctttcaaaacatacacatattctatctattccgaaactatccaaattgttgatggtacctctcaactcgttcagggtgtagggtctgtagagtgtacttcatctattagtttaccatctattttgcatgccccatcattctcagtcaacctcctttctatcagcttaatcattgaccagttcaagtgtcttgttatatttgatgagcgatcatgtgtttttcacgagaagagaactaggaggaggattgggactagagtcgggcgtaaagggctatggttcatcaatcaaggagagcaatcattctcagcaaaag

SEQ ID NO: 85819 - DNA, 381 bp, Zea Mays
ctatgctattaccgctcgagccaactttgatgcagggattaatgacgctgacaggttggcaatgtcatctttctatcatcgcaaccgcaatgccataagccagactgcctttaggtactacccacaatgtaggtctggacatgatcttacctatatcaactcgggcactacggagggcaacattcatctagagactctgttagagtacactacaactttgaacacagagcatgatacagccttgatagagctcgactacataatgaggaagtatgttaggctgcagattcagctagagaacggaggacaagcccaaccagaggtggatccaccagactcaccagagcacctagctcttccataccatcacttcgacgctcg

SEQ ID NO: 85820 - DNA, 971 bp, Zea Mays
aaagttgtcatcacacgcttgtgttactttttcaatgcggtttcacaaaaagtaatagtgggtccaagacttgtcgaggttgggttgggtctaatttttcacccgtggatttactggttcgaagataaaaaacaacgggtccaagacaggtcttgaactccacccgcaggtttacgggtttggagtgggttccccacggggcccgaaaagcagactagcccagactagcccagctcaacagcccaataacaatagaagtcctttagggcctatagccgttgctctgcggcctgcaccatgttttcattgccagcttgcttgccctagtcgctcacccaaagccccatcccaaacaagaaggcagacgcggaggcgacgacacccactccttaatggtcgagtcctccccctcccctagagtctctcgctgcgagcctgttagcttgcgtttgcgatggtgcaacgctgcctcgcttgactcccaccaccactaccgactatgatgcagttcatcacagttagtctaggagctacctttcactctcttcgcggacacgatccttcccagttggctcatactgtgcttcatctacctcttcgggtctgcaaagacatcacccaaccatggctcgacgacaattacaggatggacgacgatatgcattgagtccttattgtcagcatcgacgctctcctcctgcctatgctcctagtcggcgtagcacatacctcacctttgtctttcttgggcaccacatgtcgcttgggtgtgatggaaggcatggaggcctccgtgaggatgttcacgagcgattgtggcttgtagtcggactttaccgagctcgtccagtgaatctatggtccaatctactgttgtgttcgggttttgcgaaatccgtcaggaggacaggggcggaatttagcccaaaacggggctcgggtcaggttgaggttttaatcttgggtttcgg

SEQ ID NO: 85821 - DNA, 477 bp, Zea Mays
caagaattcaataagcgattcaagccgcctaaaaatgagtcatgcaactagcatcatttcgcataacacgacaccggttggactcaagtcaactgctcaggcaaatgattacacccctccgtcacatcaaattactacttcaggacaacgcgataaacacctttcgctgagcagacaccctttgggcacacccattgggtgtatcacccaaaatcttcaagattttctaaagaggtgatacccgcaaaatatacgcaatgaaatgtaccatgacaaaaagataagatcgactgaaatgggaggaagtccaaatgtggttactgaagcgcaagtccaatcaatagaagcattaaagtacaaggctgagtggtgtccagccgagggtcctctgtttcaaccggcagatgttcaacttgtcaccaatcaaattgattccagacctaacaaggcatggacagatggcatcacctggttatt

SEQ ID NO: 85822 - DNA, 783 bp, Zea Mays
cgccacggtagatgccaccaagctctagcgacagtgctctcctcactctccggccgccaccgcgccaattcaaattcatgagccaccgcccctaagtcctataaattgagcacaccgtcgggtccgtaaggtagtcaagtactcaagacaccaagtcgtgcctccaattactcaccagagctcaccaattccggatttcccccaaacctgctttccgccaccgtgaaagaagcctcgccgtggctagctcatcttaggttcgctcataccctctgctcttttgattcaatgtccttgtgtgcccctgatgctccccgaccccgccaattaatctaggaccccttagatcgccaggaacaagttggattggccattgatcacacggtcagcgtggatagagcgcgctagagctccgttagtgaaattggtgtcagccgaagtagagcaccggtcaacgagtgattcggccggtatgcgctcgccggagctcgattccacgctgttcgccgtcgtggactgcgagctgtgaagagatagaagtgcaagggcttattcgcaaatgtcagtaacctagttaaatagtgccgaggtctgctgctctgatttttgaactggtaggggcgtttctgcaaaactgacagtgagggcacgcacgggcgcgtttccgcctatagatgggccgacttgggccagttccggtccagaactattcttgctttttcctttttctttttctgtcacggtttaagaatttctagaaaattgtagaaaaatgctaaaaat

SEQ ID NO: 85823 - DNA, 720 bp, Zea Mays
cacaatcctaggctatgcttagtatagttcctttgtagatgttacaacgggtgaggctgaagggcgtgaagaaaatgatgcttcgacaatacaagaacaataacacaagggttgctagatcgcaagttgggtttctacaaaagggggctttgacagtacaagagctaggtgagtaccagcaactttgggaactaatcgacatgatgggggtatagttttatactcctaactagcatatatcgtgcttaactaagcatgggatttaaattagcaagtcggcttatgaggccttgggacaaacaaatttccccttggaggtgtagctagaagtcttgggcaccattaaaatgcaaattctctatatggctatcactaaaaaattgatgctggataacgaataggctagcaaggagggggttaccttctcctgttgtctgccctactgtatgatcaatccgagtagactatgtaacacccaaaatcttattttggaagcttagtaaaattctccaaagattttgagttaaagtatattttcataagaattgtcttacctttgaaactacttttcctaaaaacaatgttttctagtaaaaaagggtaaataaagaaaggatatcaatggtaatttatttgttcctttgacaaatcatatatttccaaatgtttctcttaaggattttatgaactagaactatctttcttaaaaatacatatttt

SEQ ID NO: 85824 - DNA, 872 bp, Zea Mays
tgactgatgacaactagggaatatccatataccgtcaatctcttgatcccgagtgagacaacaatgttgagtccatgtatcaaggcttcatactctgctgcattgttggaagctgaaaatagaagctacaacgcgtacttgagctgatctccttcagtggccatgaagaggattccagtccctgctccatgtagctttagtgacccatcaaagtacatcttccaaacctccattgattcgaggttttagggatctactgttcagtccattctgatataaagtccaccagagcccgagttttgatcaccgtgcagggttggaactctatgtcatgagctccaattcacacgcccacttggttgtcctccccactacttctctgttgcggagtgtgtctcctatcgggaagcctgtaaccactatgactttgtggtcatcaaaatagtggcgcagctttcgtgcagtgaacagtacagcatacggtaacttctaaaccttggcatatctgatcttggagggcccgaggacctcgctaatgaagtagatggagtgttgaactcgatatgcatgtccttcttctacccactctactaccaacgaggtgcttaccacgtgagtcgtgcaggagatgtatagcaataaatcttcagccggtcgattgacattagcttggtaaggtggcttgagaactggttgggtggtcaagaactttttgagtgcctctagtgcttcttgagcctctagagttcattagattttgttcaccttcttgagcagcttatagaatagaattcctatttcgccaagtcatgagatgaaacgacttagcgccgccatgcacctagtgggcttttgtatcttcttttgtgatc

SEQ ID NO: 85825 - DNA, 1048 bp, Zea Mays
cggtagaagcccctcgccgacggtgagctggaggtcactccggtaacatcaccgtggctttcttatcctctttgcggccgaagcagattaacacgccggcgaccgccgcctcccggccatgcgccacgtggctctcgctttccaccgcaccgccgcgacttaccctcgctctccgtggctcaccggagtaaccgccacgcctctagacacgtattcaccgcgcccagtgttcttctccacctccggccgccgcgcgtcttgctcaaattcgcggccaccgcccgctagctctataaattgacctcgtccgtagctgcgccatgtagttgtgaagctgtagcacccgctcccaccctcgatcgtccaccagcacgcacgaatttctaattccccccaaatccattctccgccgccgtgaaacgtgcttcaccgtcgccagccttttttctggtcagtccagccctccctctccctcgtttaagtaccctgatgactctacgatgcttgccgaaccactgaattgagctaggagcccgccaatcgctaggaacacaacggtattgccgcgatgctcacgaccactgtggccagagctacatagttggtcttagcggcaattaggttgggggaaatggtcagggtagccccgatttcatgtctgccgctcggagaaccttgccgttgccccaatcggccgatacagaggctcgccggacttcggccatgggtgagcgccgtcgtggacctggccatgtgaagaaatagaaccttaggggtctgtctgcaatggtcagcgactcattcaaatagtgccatgaccccgctttcagttatctagttagatgagggcttttccgcaaagttcccctcgcgggcgcgcgcgggcgctttctccctctgagttgggccactgggctgaaatcagcccagtactattcataagcttttctttttctttttactccagagctaaaacaattgtagaaaattacagaaaaatcctaaaattatgaaaccaattttcctaggcttgttattttccctagaa

SEQ ID NO: 85826 - DNA, 604 bp, Zea Mays
atttgttttagaaaaacgaaaattttggaacggggagggagtatagtatctaaaactatcttttcaccgtcaccctttcggaggtccttgccacattcctcgtgatggtagtaggttgatagttttccttggagtggtggctacagagtgagctgagagaggggggggcaaaaatgtcactaccgtctgctactacatattcacactactgtcacgctcagtacagagcactcctacaacattggatgctgaggtcaccggacagtggtagatgagggcgggggaccccttatcctattccttcctccctggcatggcatgcccgtccaccgccgcgcccagtgtacctgtcatatagttgctctcactgcatcatgacatcctcatggagccgtggcaggcctgcagctgtagggaatgcgcgggacccacttgcaggccgaggcgctctgtgtgtgtggtgaactggtgtctggtgatggatgctgtgctgtggtctgtgatcgaagaaccggaggccttttgacgtggttgcctttattgaccaacgacccccggcccatgtgtgctactgtactgtaccatgtgtgtgtctctactctgc

SEQ ID NO: 85827 - DNA, 456 bp, Zea Mays
gagagatggtggccgttcatcagaaaattgacggctacgattagatggggaggtatcctttcggtgatctgatccgaaccgttgggtagatcggatggcccatattggatcacgttccgttaaatactgaccgtagatccaggatctggcggccagtagtgcgtacggttcacttaaatgggctatgtaatctgggcggtcggtagtttatccaacggtcccggtgcagcgatacctcttcgttgtggcaggttagcatatgagtccctgagcttcgtagaaataaacctgcggtccaccgcgtgggtagtctgtgtcttggtttcatttacaccgtagcccctgcgcttttctgtaaatgaggcgcggtccacagattaggaaaaccagggaaataaaattagaaaacagatttttgttattaaattaattgcagaaacttatttaatttgtaga

SEQ ID NO: 85828 - DNA, 771 bp, Zea Mays
cagatttctcagattcctaacaagctatagctagcgaaaggactaacgaatagtgtatcaatcaagaccaattactaaatattcatagcacatatcatatcttatacttatatttagggggcccataccttctgggggccctgggcggccgcacaccctgcccacccccaagaccggccctaccaatggcgctatggacatggagatcgcctcaccctctcactccttatagtagatccaatgcagagatgagtagagctccattgtagttggatctagctaggtggtgtccacagcggtgagtaggctcactgttcaacaactctcctatcatatcctctatctccttccaaatgtcaaattttactctccaaacgatatcatctatacacccaagacagctaacgaccatacatatgaagtgggctcgatgctggcagtgcgtctagagtaggccaagcgatggggcgcactttgaatgggctcaattgtgggctcctggaagagcttggcggtgggctctagaacaggcttgtctttgggctcatatttttgttttttaaatcgattcccagatgtggccattatggctgcctttcaaaatcttgatttaaattgtctccggtaacggacgcttacgataaaactaagggatgaagttctacccaacgcgtccaacaatgtcctgtaaaggagacgctaaattttggtggacacgtttcattcggtaaatgtggcgcacaggcgaccgctcgctatccactgttccct

SEQ ID NO: 85829 - DNA, 425 bp, Zea Mays
gtgggttcgagtgctcgctctgcactatttttttgcacggtgtggtagctgcgcgggcggggtcaggtggtgagcaggctgcgcgagcgctaagggtccacaaggcactagcttagagagcgactcgagtcgattgagggttcaaaagggagggtcatcgaggcctagctcatgttgctccactcaggatacaacagaagctaagcgactgtgagcagaattaagccagcaacaggagcggtaaagggccttggaggaatacctgaggcaagttgcacagcaataggagtactatgcaactcagcttgcgcagcaacaagcatttctttgagtaagttgctaatataatagtttagactttaagttatgtattgatttgaaacactgacatcataactgactcttttgtagcaactatcacaaag

SEQ ID NO: 85830 - DNA, 293 bp, Zea Mays
agaagtttgattgccatgtatgccgagaaagagaacatgcttaagtccatgaatagtaataatggcaatctagttaaacagtcacatcataagaaagtatattctaacaagtcttttaagtctcagttcaagaactagggtaagaaacttatgtgtcattagggaggatcaggctcaaatggggggaacgacattttaaaatccacacaacaagaaagcaagttcaagtggagaaagactgttttccatagcttagccagaagaggtggctgatgacaactatagatgttgtc

SEQ ID NO: 85831 - DNA, 478 bp, Zea Mays
gtcagacgccaggtgcttctgtaatattcacgaattatcatatcagacgaaggcaactaggaaagaacaataccacgacaacttcggctgctacaacttcgtgccccattcagaggccagttatcctgtgcctacatttcggaaaaagtggccaggctcttggatgcaggaatggttttatgtgaagattgacctgagtcagagggagtatataaaagggattattcagcgccatatatggactcgcttcggcattaggaggccactcattgcacatggaaatgacgtgcaagcatgccagacagctttcaacacattgtgcacttatatcggcacaagagacttggtccaagaatatattgcttacatagtgtggccacttgcaaatggatgggaaatgccgaaggaggctgccgttggctctagtcaaaatggtttggtctatctgaagtatatctttcgatacagaagccaattt

SEQ ID NO: 85832 - DNA, 303 bp, Zea Mays
ttagagtagagttccaagagttagaaccttgattccaaaggttagacattgtatgaggaagagagatgctagaaggaataagaggtgatcatggatgtgctcttaatcacaacattagggtgaaggctaaatactagaatcactttgatgaatttaactgtgttgtttgcatggatatgatgcttaacattcatgagagaggcccaaaaggtcggacgaaaattgactaaatgaccattctaatggatttattcgggaattatttagatttaagaatatctacgagaaattgatcatttgatg

SEQ ID NO: 85833 - DNA, 615 bp, Zea Mays
taaaatgaccggaccaacaagagcagtaggaggacttgtcaacactggttcctcagactgaaccggtggcaatccagcatgaacgtccatggaagcaaccaaggaggagccgagcttggcacccttgggggttgggttatcctcagcagcaccctcgggggctgggttatcctcagtgacacctttaggggctgaagcaccctcaatcgtacccacaggagctgagaaactctggcatgcaacattaggaaccgaggtgttctcatgaattaggccgccctcaaaggtcgaagaagcatgggaaatcgtccgggttatttcttgctcgactggattactagctgagggggtgtcatctgggacctctgtacggatgacagcaccctcattttcgggaagcttcgataaaagatcttcagggacaatctcctccagtgcatggtcaatggcagacatcgtcaacctctggagactaaccagtcctgagagagcttgaattaggacgtcatcgctgtttttgctacgacaattctcatgaatcaaagggggacttcctcttcatcctcttcgtcctcgtcagtcacacgtccaccgactctggtgccaccacaattc

SEQ ID NO: 85834 - DNA, 798 bp, Zea Mays
aatagaaatttttaccgttgttgtgtgccgctgataataactaatgtttctcagtgtgttcctgataaatagtaccatttctagtgtccaagagctaaagtcactttgttactgtgccaaaaataatttctcctaaagttaaatacaattttcccacacacgtggacttcatgaagaaaagaatgttagagatttagagtatatttagtaatttagatattgtgtatcgtagattgccatatgtgcaattggattaccttgtttcccaagtcttgtactctatataaaccacctaagggctcaatacaatacaatacaaccatccaattacactaattatattctcattcatgatatcatgagtctagatttagatcataaccctagctgccaccagcttccgcaactatgcgcccctagggagagattgaactctgtcgggggcaacaccacggtttcagcacccaatcccactatcatactaccattgtcatcgtcaagcaacaccagatcgtgatggatatcgcgtaggtggtgttgtccgttagttggacatcctccgtgtcgaccttctcgtcgtcaggtcgtgatggtgtcgcacctcacccactggcactgtcgcacgcttggccattccatgacccctccatgtctagcctcgcctcatccaccgacgttgtcttgtgacgggctgccctgaggaacccacccacgcgtgtttgctggagggccgagtagtgacctaatgtggctaggagtggttaggctctcatgcccatgtggctcacagcagctaac

SEQ ID NO: 85835 - DNA, 516 bp, Zea Mays
agacagccagatgtacgcactccgagttgggttgagtctcctactgccttggaggtgacggaagctaggattctgcttgctgagatctgtctgctaaaggaaagaggtctgactaccgaagctgtggttgctgacttcgttttcaagaatattcagcctttgaaagacagggcgtatccagcttacttgtacagtggtattactgattcaactcgggttaccgacaggaaaattcctactgaggatctagtgagccaactagacatgatcctgaggggcaaggtatcaaatgttggtgctcctgttgcttattctgcttggaatctgccacctcctaggtcatttttcaatttcgtgtccaaccctcctgccagtgatagtggtctaggtcttagagtgcgaccctctcctgaagacattgaggctctggttgctcctcttcgtgatcttcccaatgatgagaggcaagttcactttgagatgctgccaagtccggatgatgtagaaatagatgat

SEQ ID NO: 85836 - DNA, 798 bp, Zea Mays
gttatttcttccgccagctttgtgcaaaaaaattatctcggaccgtggttgcagacttggaaagattggcacctgtgttactgtgtaagcttgagaagatatttccacccggcttcttcaatccaatgcagcatttgattcttcatctcccctatgaggcacgaatggggggcccgtgcagggacgttggtgctatccaattgagagatgtctaaagactattagaaagaaatgtagaaataaatgcaaaatcgagccttccattgcagaggcatacattctagaggaggtgtcaaacttcacaacaacttagtatggtgacaaactgtcgagcgtgcataatccaccccctcgctacaatgatggcggcaatgaatcgaacctcagcatattttgaggccaactcggaagcgcaagtggctcgaccaccaagaccctaacacatgaagagtggcgacatatcatgctatatgtattgaccaaccttgaagaggtgatgccatacatggaacaatttcttcatgaattctggcatcgatcaagggacccaactccacaggaatatgatactcttcttagaaagggtgtgagaaatggattgcccgatttcatttcctggttcaaacgtaacgtatgtacttagtttgttaaagagatccgtctatgaactcaatttagcgtcttttaacttgtgaatacttgcagggccaaagagaactgtttgtgagtgccgagttgagacaagtaccaacgacattgcttatagggtcaagaaatattctgggtatgatgtcaatg

SEQ ID NO: 85837 - DNA, 1956 bp, Zea Mays
gcgttctggacgtgtctcgtaacaacctcaccggcgcattgcccacgccagggcttgcgctgccagccaatgcgcaggtggtggacctgtcggggaacttcttctatggcggcgtcccagagacctttcgtcggctgttcgcccaggtgctgcttgccaatatttctgggaactactttgacggcgagctaggagtgtccgacggtggtggcggcaatgtttcgtttcagttgaattgcttccttgatgttctgggacagcgtacacaggttgattgccagcagttctatgccagtcgtggcttgccttatgatggtccagttatcccacccgcaccacagcctgcaccttcaccggtaaggaagaagcacaagaatctgaagtacatactgatcggggccattggtggaggcctcctgctgatagccgttgttgcagccattgtgttctgctttgtgtgttctgggagtacagggaggaggaatcatcagagagaaagtggggcatcaccaagtgcaccatcgggagtgtcagctaccggcacagctgcagctactggtggcacgcagccttctgcattgtctgcaaacacggtgaaagtcggcgattcgtttgcttacgaccaacttgtcaatgccacctcgggatttggggaaaataggctcatcaagcacggtcactcaggtgatctataccatggtgtgctccaagacgggactgccgtggtggtgaagaggatcacttcgcgtgtgcctcggaaggatgcttatctggcagagttagatttgtttgcaaaaggagtgcatgaaacgctggttcctttgttggggcactgccttgataaagaagaagaaaaggttcttgtgtataggtttgtccgaaatggtgacttgtcaaatgcactgcacagaaagtcaagggaggaaaatgaaggcttgcaatctttggactggattaagaggttgaagattgcaacaggggtagctgaggctctttgctatctgcatcatgagtgttctccaccaatggttcacaggtactaactcatatagttttgtggatgttatatttgtttgctgtgtatctgttagcaaaaaaaaaaatgtaagacaatagagttttagatttcttgtagaaattcaatctttatcattacatggggtttagtagttgacagtcactgtgggtgctctgataattgaattttttcgttgtggtaatgtaggtttcagcagctactgcaataagctttccccatagactaggaaatacgttgaacattcgataatgtgtgccagcaattgctgactcagaaatttagtatcccgtgcttgatgcgacatgttccatgcattatctgcgtactggaaattcaatgtgaacgctgctgttatttcatttaatatttttgctggcctatatcatttaaatattcacctattttgccatacaaaataacaggaagttctttgtcaccctgatttcactggggagtttttttccttgttttgttatcaattgaggcacgtagtagaatagtagatcacaatcaattctgattgttttgtcgttttgtcatttttttatgtcaacacgaagggttttggctgcatagatgtttccttccatgggcagtaaattagatgcaatgtgaaggtttgctgttgactaaatttgttggttctctactacagggatgtgcaagccagcagcatccttcttgatgataaatttgatgtgcgtcttggtagcttgagcaaggtgtgtcctcaagaaggggaagggcaccaaaatgttatcacaaagctgttaagattttcttcgtaagtttcagataccacctctgcatggtttgcttctcttttccactctgaattcttcctttgtggagtatgcaaatccatacatatattatattcactattggatcatcttgtttcaacggtagttttgttc

SEQ ID NO: 85838 - DNA, 429 bp, Zea Mays
catctgtctgcggatggtatgctgagcttcttattgcatgggtcccaagtgattcttgtagctgctcccaaaagcgtgccacaaatagtgctcctctgtcagagacaatggtcttcggaatgccatccaatatcttctttctgagctcagggttcttgggaacaaccagtcggtctccaaaccatagaattcctttgctgccctgacggaagcatttgtatttttctgctttctattcgatcatttccttgataacctgaacacccttgtcgccaatctgtgccatgactatttgttcttgtaaggtgggctccactgagatgtaattcaaagcaccggaggaaacgacctctattttcaacttgcacaactcatcacatagggtggtgattcttgcatccatattcatacaattgcactgggccttcc

SEQ ID NO: 85839 - DNA, 631 bp, Zea Mays
ctgtgcgctatgagggagagagagctgacgtccgggccccactggcagagggagagcgagcgcgagaggggaagcggctgacgggcggggccaagcggtcagcgagggagggggagtgtggcacaggcgagcgtgctagtgggccagagtgggccgagagtggagggggaagcgcgggcgtgggagagagagaggggaagggcaagggccagaatcgggccagccgagagggggaaggtttttcctttttctctttttttctttttctactttttcttaattccttttctcctttatagaaatattcctttatatttcctaggtgccaaaatgaaatgctatgtgcgaagtgctactagcaatcatggtgtatgcatatgatgaatgaaatgcttatgagatgaggtcttaagagaaataattgggggttaggagtttagggtttctaacctcggaaccagaaactgggatgttacagacctaccccacttaaaagaatctcgccctcgagattcaggctgggcttgagaaaaggtaagggtactcccttctcaatgagtcctcactttccttggtagcctcctcttctccttctctgctccactggactttacagagttttacctccaag

SEQ ID NO: 85840 - DNA, 536 bp, Zea Mays
tacaacattaagctctgccgacagtgttagtttcacagcctgtgtaaaagtcttcagatctttccaagtcaaaattcgaacggccaccgagtgctcaccgacatggctatgaccacccacatctacccttttacattagcatccaaagtctcctcgctggaataagcagcgggtgtccttttttttttgaaacacgacaacgtgatccccagctgagcactttagactcagatggaggatccaggatcaactctaccaggatagacctgggcaagtaacaattttcccgtagcatgtgctctgggatcatagtcagaatattccactgccacatgttaagtagctgacgttcaaaggtataaagccaatgcttattacttccagctacagaccttctagatttccaggtgtttccaagagcatatatcaaaaaggaaaccaccaagtgtttgtttaacggaaacgggacaaattttgtgagttgtgacaactgtttctcctgtgcatttgtgcctaatagcacatttccacagaaa

SEQ ID NO: 85841 - DNA, 589 bp, Zea Mays
gaagggtcaagccaacatgatgactgagcaatggatgccctacgaattagcaaaggagtttaacaagttaagtcttcgtttctcatattacatgaaaggagcgaccatagagttggaacccacactgaaataagaaatcagaaaagggtagagaaacaatgtcaatatcagtaagatcaaacaacaaatattaggaggaaaagggaaagaattctaggaagacgttgaaggtacaatattgtacaaggattgactgtgtgcctcaaatatcaagtcaatttaggaattgattcagaaagaagctcatgaggctacctactatatacaccccggaggtgaaaagatgtaccaagatttgaagaagagaatctagtggtatggtatgaaaagagacattgtagtcggtctaccttgaacacggattggatatgattccatttgggttatcgttaactatttaatgaaagtgactcagtttatacctgtcaagactacctatagtggagcagtgttatctttagttgtacatggctcagattgtttgtttgcatggagtacccaagaaaatagtgtcagatcgaggaacttg

SEQ ID NO: 85842 - DNA, 782 bp, Zea Mays
cacgagcaagcgaggtcactgaaatgacagaagaggtgagcatgtattagtcacatagtcataagtatatgaaatgtgaataaatatatacacatagaattatgacacagaaaacgagtgatttgacgatatagaggtcaaacgacgcgaaaacgacgtttgaacgaggaatagtaccataggaggtttgaaattgaaattgaagcatgaaatgacttggaattgagccgatacttcacgaataggtttatatggttaaatatgagtgaattgtgcgcttggtttgattttaggcgaaggaactggaatttggacacacggctcggaatcgatcgctagatatggggatttgtggaaatttggagcctatgatatcggattggcgtgaaatttggtgaatatgttactggaggtatcatgaaggtgcctgaaaaaattgggattgattggaacaaatttggctggtttgggcatttcaccgagcacgtggcgtgcagggttctagggttttggtgaaatagccattttagagattgaaaccctcccaaagggagctaggaacctgcaggggtgttcaaatgatacacatggacactcacaagtgcttggatcaacagatttcacaagatttgaagtgagttcaaaagagggtttgaaaactgccttcattgacatagatgagaggagaagaggggagggaaagcagtgggtaagctcaccaggggagaagaggtaaggagatcgagcaggagcaccaccaagggagcgtggccgccggcgag

SEQ ID NO: 85843 - DNA, 882 bp, Zea Mays
cagcagaaatcaaaactctgtcatcaggagcgccggcctctaaggcgacttcctgacccgaagcttgagctgctgccatgcaaccagaatgcggaggataagatcctacgtgatcatccatggaagtgtgagagggagaaccaactcggacaccctcgagggctgggtcatagctcgcgctgcccatccgagccggatcatccccggcgacaccctcgggggctgggtaagcgctagcgccatccttgagggccgagctctctgtaacggtcacctctaaggctgaaggaccttcacgcacttccatgggagcagaacaatccagaccagcctcctgacccttaagaccgcgctctaaggtcgatgaggcacgagacgctgcttgagataactccaatccggcatcaggcacatcagcgcaaacgtccatcattccaccatctgccggctctgacaatagatcttctgggaccatgtcttcaagagtctgatcaatgtttgccagagacaattcttgtagaccaatgagggcagacaaagctggagaaggaacaccactactttccctgctagctatgtagcgccggctgttcttccgaattagagggacttcattctcctcttcctcatcttcatcaataatgcggacggtacacccattgggatcagctgtggctagattacacccattgggatcagcatcatcaaggtcacacccattgggatcagcatcagtcgggtcacacccattgggatcagcttcagcaaaaactggcatcggcacttccccagcagcaggagcagaaggaccggcatcctgatccaagcatgacactcagcgaagacgtctctttttctttttcttcccctcagcaggagaag

SEQ ID NO: 85844 - DNA, 323 bp, Zea Mays
gacaaggagtccaatccgattgaggcaattaggattgtgtcagaattcctcgatgtattccctgaggaattaccaggcatgccacctgaaaggaaagttgaatttgccatagagcttatcccaggcaccacccttatttccaagatagcttatcgagtgtctggaccagagttggtggaactcaagaagcaaattgatgagttgttagagaaaggttatatcagaccaagtacctcaccttgggcagcttcagtactatttgtggagaagaaggatggtacgaagaggatgtgcatcgattacagagctttaaatgaagtcac

SEQ ID NO: 85845 - DNA, 587 bp, Zea Mays
atgcaatttcctatatttgatggcactgatccctgaatctggttggataagtaacataattacttcgctatcatcagcatccctgaaaatctgtgggttcaagcagccactatgcatttgcagggcaatgctaccaaatggtctcaagcttataaataaccttcaaatcatggaagcaactctttgaagctgttgaggccaaaattggcaaggatgattacagaactgctgtcacagacttattggctctaaggcagactggcattgtgaaggactacacaactcagtttcagtccttacagtttgatatcactatgcactgctgtcaccttgatgatttgttctttgcttccaagtacgtaactacgtatgtggctttaaagatgagatcagagctgtagttgaacctcaagtgaacacaacagttgacatagcagctgttattgccaatattcaacaaagggtcctggagagaattaaatttaaataccagaggacacctaatcaacccaggcaccaacaccaccacaaagatgataagttgataacaggcctcaacagacaacctggccacaatgagattttct

SEQ ID NO: 85846 - DNA, 633 bp, Zea Mays
ggagttaaaatggattaattatgaattaaacaagtttctaaaattatttctatacaaaaaatcattttctgatttaattctgtgtttctctaatggctctggactgcagacacgattattataaaccccagggtctagcatgcaaataacaggacctaatctgaattacttttacacttatatggacggcgggttcgttttaagaaaccacagggtctcttttacaaaatttaaatgccgaaggggtatggttcacctaaagccataggatagccaatcaatggtgtaattagatgggtccatcaagaaaccacgaccatcggatcccagatgtatgcctcgaattttgaaatgcttggatccaatcacgcacgtcggatccagatcaaacgccccagatcgacccagtcgagctggtatctagaatataatcccagccactcttctcgagtcaacggtttagggtgcgtcttccccactctaccctaggcaacggtgacgtcgcccctgtaccccgtggatccttgccggagtaccgtgatctacgcccgggagccctagtttctccccctatagctctatgcgaagtacaaaacgattgtgtagtggttggagggaagtttaccagtgttg

SEQ ID NO: 85847 - DNA, 295 bp, Zea Mays
gaaaagcacagacaaattgaagcatgtagtttttcctggaaaacaacaagctataggagttgatggtgtatctgatatggaggattttaaccaattcaacgacatgtctcttttcatagaccatccaaccaagataaggaacgttgagcgaagtatcccacgtaaaatgttgccctgggtctgccacgatggacaaggcagaataatagctccctagattataaacttgtcttgtaattaattattgttaggaccatgtctactacaagtttgagatcaatatatatatttcttc

SEQ ID NO: 85848 - DNA, 631 bp, Zea Mays
ggcactggcgcaaacgattagtggctttcaccgtggcggactcaccactgatcaccggatatgcttaacgtgacctactacgatgtggtaagatgctcgggcatgtggcgcatggtcggtaagcggccagcgccggcgaggaccaattcggccgaccacaacccaagtgggtgcggcgaaatccccgtcgatcgggtccaagtttatctggcgccaagatcttttcatggccgtgattatctccataccagagggcacgaatcatagtgacgacgcgaatcatggtgcgacggtcatcggcggcgaggggtgatgtatctgaagatcttcttcaattcactgtaccatgagaactctaattcagagcctttgtccgaccaacttgtaggacccataactccaatttctgcatgagaacttgctaatctctttgtaacaaagttctagccctttaatccagctacaatcttgctatggtaattatcctcaatcgagaaacagagcttactcaaaatcaagcccaaagttcatccaacttcactgtcactaaaagttcaaacttaaagttgcctgacagcccgactttgaatctaattatctccaaatttctcatgacacgaaggcttaatcc

SEQ ID NO: 85849 - DNA, 645 bp, Zea Mays
gccggctcttcagtcttctacaaaggaggaacagtttcttttgttttgacagccgaagaggccccttcgccgaatttaggtatcatggccagtttgatgtaacgcggccggtgagtcagaaccgtcaacttttttccttcggcacaggctcaactggggtggtcaaagtagcagctttcctctttttcccctgtccccgcagtggatagcggtaatcggggtaaacaaagccaatggcgtcaaaaactctgttcagtcttttctttccccgacctccgaaggatgtgaacagtgcattatcttctgccttggaatatgctccaagcatttcatcacttgtagcttcgatacacttcagctagtcgtcgtttggttcatcaaacttatccccaaacctgaatgtatacttcagccgaaccaaatcaccttcgctagagttagtgacggtctccttcggtatttcccagctttctacaagcggccatcctctgaaggctatatgttcttgaattaaatctcttgtgccaatgaaggagcaaatagtactgaaggccttctaacacgattcggtggcgtcatcaatttcgaccttcggccttcggaggccgaagcgggaccagatggggcgcataatgacttccttaa

SEQ ID NO: 85850 - DNA, 649 bp, Zea Mays
ttcgctcctactcctatttcatctcctccccgcacacacttgcacagacctctgtttttcctgctctgacttgcgccacgtctgctcgccgtcgaacgttgtgcttccttcgccggagtccttagccgccttgctggtgcctcctattggccagttgcccgtcctcatggtgctgaagtcgcaccggagcttccctacatccctgtcgcatcgtcgaggtcgccttgctcctgctcgtccgctcgtcgacgtcgttgcgatcatttgacgtcatcgaggcctcgccggtgcgctgctaccccgcatcggagtcgtcgtcgtcacgcccagtgacctgtgctcgctccagatgtctccgaccgccgctacaacactgtctcattcccggtgccccgttgtccatgccacgacatcgtcgagggctgtttcctcaccttgctgaggccctattgtctgcgaggctctgttgtcgccgttcgacgatgttggagctcgtgccctcgctgtcgccgttcttcatcgtcgcatcgccgttcttcatcgtcacatcgccgccttgccaagttctatgtaccggatcccagtgccgtgacgtgatgtccaactcctgctatttctcgacgtgaggtagaagaaaggtccatttttt

SEQ ID NO: 85851 - DNA, 833 bp, Zea Mays
agacgcatgcgatggaggaggcagtgtaggggtggccaagaacaatgaagtgggtgtacttcaaaatgcggtcaaccaccgttagaatttttgacttgtcgtgtatgcgtgcggtgtatgggtggccaaaaacaatgaagtgggtgtacttcaaaaggcggtccaccaccgttagaatttccgacttgtcgtgtatgcgtggaaggctctcgatgaagtcaagggcaatgtctgacatatctttgggagggaacatcgagcgactaaaggagaccggccaagtgtagcgactcgatcttctgtgctgacatgtagcacaaacacacgtaatcgcgcaccaagatgcagtcaccctcgacatggaaatcggtatgcagccattgtagagttttctagaagccctcatgccccatatgtgcgagttgtaatacatagggaaggatgtcgagggcgagggcaagaacacctctgagccatggaggaggttgtcatggatgcgccataggttgcccaacgcatcgcgagcgagtttatcgtgcatgtctgtcggtgtttggactcatggtcctaaccaaccagtgaaatagcgtcgcgtgccccggacccatatggtgatatgagttgacacaagcaatttatcctggtttgggcgacgaaggaccctacttccagcagaggggggatgaggcttatattactcgcaccatagtgctcgcagtcggggttacaagcacagcgggagaggggaggaccccaagtccctgagagtgattgaggcaagtgcccataccgaatgaaggagaaaactgctaagtgttcgccctctcaccttg

SEQ ID NO: 85852 - DNA, 446 bp, Zea Mays
cacttcatcaaggactgtccctatccaaaacaaaataaatccaatttccaacagacttctgggagcatctctcaaggcaagggaaatgtggccaacactccagcgggcaaaaaaacaaggaaaactgggctagtctactacactcaagtggctaccaccctagaaggagagctggtgatgacgagtacgtttttcgttgccaaccatcccgccgtcatccatttttattctggtacatcacatacttttatgagcaagacttttgttgagaagcattgcatacatagtattgaatcaaaggagggttttgttattcaataacctaggggtcaaatctttactaaggaaatagtcttccacgtacccgtcagattggtcggacatgagttccctaccaacatgatagttataaaggggcaagatgtagatgtgattctaggcatgaa

SEQ ID NO: 85853 - DNA, 551 bp, Zea Mays
ctttaccttcatttgaggtatgcgtttgctttttcatatcaaagaatgcagcccattgcaaaccttcattcatgctattctgaacatgaagatcacgattcaatagagcctgatccctcaaatacagagtgcctgctcttagctagaggaatcagatcctgctgtcatagtgtcatgtgacgaagcgacgccgtgttgttgtcgacacttttgctttctgtatggactcgtgtatttacagtcggagtcaaagtctcaactctcaatttacatacatggacaacattcaactctactcatttaaatttaaatttcgtgtgtcatgcatcgtgtgtatatctgatctctctgccgctgcaaggcaaatgcctcgatgaccgcatgccgccactccaccattggccctcggagattgcttcctcctcaagactgtcccctctacctcgtgcaccacccagatgagcgacctcatgccacgaggccagcgcgctcgaccgcggctcgagtttcgctccgatgtcatcccggacggctcgcggatgtcgttctcc

SEQ ID NO: 85854 - DNA, 1072 bp, Zea Mays
tggacggcgagttgatttaaataaagaacagggactcttttgcgaaatagacaggccgaagggtatctttcaatctgagtcgtccgatttgagatggacgcacgagattagatcccgccacccacgaagcggtacgcaacgccatccaccgggtctagatcctacggcgccgcttttattacatcccgagttcccagatccgcccgatcggatcttgacggttacggtttactcaagcgaaggggtattctaggttctaatcctagtcgtccagctcccatccgacggtgcatgagtgtcttccctaccacatctgagcgacggcgacaaatcccctaaacgcggcggcgccattaccgtacttcacccgagctcgatcccgagctcaaatcgccatcgctaccctctgaaaaccgaattgaaggatcatcgaaacgaaagagaaggtttgtaccgaggattacgaagcgatgcctcctagcgtcgacgcgtggcggatccggtgaaaatttcgttggtgtagaacgctcccgatccgatgctgacccacgaacgtcttcctcgagtcccggcgacgcttcctgaccgcaaaccaaagacggggcgcaagtgcagcagcgtttccaccgtcggcggaaaactgaggcgacgaggacggctctcgctctctcactgtcgtggcggtggtcgagagtatagggaaaaggggagaatgaggcggacccgagggtcgtggctcctataagaacgcggatgtggccgggacaccacaacggactacgcgaagtccgcacgcccgctatgctcggaggtgcattgacggggatggagctgacacgggggtcccaccagccagcgattgcggtgcgtcgcgagagagacagccgcggtgcgggtcccactctctagtgcaaacacggtcacgacgtgggcgcggggagtggctggccgacctggcccacatgtcggcgcacacacgggcgctgggccgcgcgatggaaaaccaagatgggccgaattggtgattgcggcccagccgagttccgttgttcttttcttttttttcttttat

SEQ ID NO: 85855 - DNA, 418 bp, Zea Mays
ggcatgatgattacctttgcaaggttatgactacctttgcaactgtccagtttttcaggtagttggacttgtccttttagtttctgaaagcacactacagcataatgcgcgtaaaatacggtggaacggagaaggcatgacttgcatttcccaacttcctatggcatgaataacagcaaagatgccaagttcaaagagtgtgagttttccatctttctcgtggccgttcttaatgatgatgatctgaaatctgatagcccttcacttcgaccacttataagaatgttgaagagaaactttaggaaatgattggtgtagatataaacatattctgttatctgatcatcaaatttacgtggcaaccaaattttcgtactattgcggtactgcccacatgccaattacattttgccttttt

SEQ ID NO: 85856 - DNA, 1106 bp, Zea Mays
ggactatctgttcttattctgttggattcaggcagctccatttccttcatcagttcgtccatcgtacctcatgtcccactgctaccggtcagctgtcagccgttactggtccaagtggctaatggctctaagctgtcttgtggtgctgaactcaacaatgcagactggtccattcaaggccatcggtttacttccaccctcaagattctcgaccttcaaccatttgacatgatcattggcatggattggttatccgaacatagcccgatgtgggtccattgggcagacaaatggttgtctttaacagtggggtcttcgctggtcaagttatatggagtacaagcttcagatggacagggtgctttggttcaattgtgcagcctttcacaacttccagacaccgaccaacatattattcattcacttccaccagaattacagtcattgttggatcgttattcatcagtgtttgcggtgccgcaaggtcttcctccaatcagggattgtgatcaccggattccgttgattcctggagctcggccggtgcaaatgagaccgtaccgttatgcccctgctcttaaaacagaaattgagaagcagatcgacgacatgctcggctcaggccttattcaacacagcaaaagccccttttcctcttctgtcattttggtcaagaagaaggacaactcctatcgcttctgtgtggactatcgccatctgaacgcactcacagctaaggctaaatttccagtacccattatggatgaactctttggagcagcttggttttcaaccttggatcttcgagctggatttcaccaaatccggatggacccacgagatcagcacaaaaccgcattccagacacatcatggccacttcgagttttgtgtgatggcatttggtcttactggggcgcctgctacctttcagggtgcaatgaacagcactctgaaaccccttctcaggaaatgtgcgttggtgttcttcgacgatattttggtctacagtgatacatgggacaatcatcttctgcacctcgattgggtactgcagctattacgccaggaccagtggcaagttaaattgtctaagtgctccttcgc

SEQ ID NO: 85857 - DNA, 1036 bp, Zea Mays
ctcaattactggcgttctactttggccaaagccaaattcaagacctaccaatggtttcccccaacttaatttcacaaatggctacccgatttgctctggccacggtgaccgcatgggcaacggaagaacacgggcgttcacggcaacccagggcggtcaagttcaatcaaaggagtcgtgaagcttgaggaggacctaaggacactagaacaatcgaccagagtgcttgaacgaacctggaataagctggccgcggtgagggtgtctctgcggtggcggaaaccggattgggggaagtaagaaattcgcggtctctggtgaacgatttgaggcaatacttggtggcttggtgcgtgatcatcctacggacctgaccgcgcgctcaatttatagaagacaagagcggtggccggtgaatttgggagggacgcgcggcggccggaggaacaaggagttactggcgagcgcgattagtgtccgactaccatcgcaggctccccggtgatagacggagggttacagcgagtcacggcgacgccggggatgtgccaaggcacgtggcgttcggtcgacgggcagccaactccgatgacttatccgaaccgaccacaaagcaaaaaggagcacgtcggctagccggataagtgcccatagtccaacagtggtgacgatctttttaccccgcggcgttatctgggctaaagtgggcacgaatcacctcatcggcgcgaatctatgcgcaaggtcaccggcagcgagctaaccgagctggcagtctgatccaggcactgtaccatggaattcatcttcagtgcgcctgacagccgaggtttagggcaggttttctccaaattttccatggcaacatcatcatccttctgtaccaaagttgtagacctatagatcatcttcatttttgttatagcagtcctagtagaattcctactagatttagctcaaatccgatctcatgttcgaccaataacactgacgaccatttctgctatcagattcagattcagttattcaatacaag

SEQ ID NO: 85858 - DNA, 572 bp, Zea Mays
ggattatcaggtcaggtctctatcaacacctgcggaggaccgtggctcgtagcctccgcactgctcagacaatatgtaatggacttgtgctctaaaaactcataggcgattgttcgcgtctgtttgtggtcccaaagcagctatggcctctggccgcttgccccctgcactcgctgtagctagcccccaccccaccgcgctctcccgcgccggtctggccgcgcgcgtctttgctgctcttgtcaaacacgtcttcaatccgctgccccctgccctggtaaaaaaagaggaagaaggagacgctgatgctaaccgccgcactactctactggtgcgtctgctgcgcatgcgcgggtaaatacgatcggtatcgaggggggatactttggtcgctctctgcacatatacatataccatgaacttgtacaagacgatcccacacccacatacatgaactgtcatatgcatgatggtttacagagcaacagatgctacccggcgtacaaacacgcaagcagttccagatcgacgaggcatggcactactggcgggtcacagcgactctgaaccga

SEQ ID NO: 85859 - DNA, 535 bp, Zea Mays
ccggattacgataataagaggcaagccgacgtgtaggatgtatagcgatttatgttgttgcgctagtgatttacttgttgtagtctaaatgtgcatggttatgatcgcgggtaaaaaatctgtagtgctcatgtggtgtctaaactaaaatgcgaactagtgggtgaaaagcgctttgatatacatgtatgccgaaattgatgattgtggtgaatgcgttgattaaatgtgtatgttagttctagcgcgcgaaataacttggatgaaaattagtgagtctacttgttagtcctcatttgattaatttaactctaacaaatggtaaaatgttagaataattcaagtctctaaaaacatggcgattcttgaattatatgtgagctgaaatttattgattgctgttttgggctgcacgcactgttttagttgtgctgtttgtttgatgaaccaaatcatgttttctgtagaaatgtcatatagaagagttgtagataacattattatcttgcttgtactaaaatttgataggctaaag

SEQ ID NO: 85860 - DNA, 963 bp, Zea Mays
tttatgtaacctcattcaaggatcggtaatcaatacacatcctcatacttccatccttttttgtgacgaatacgactggtgctccccgaggagatgagatgggatgaatgcaccctttttgttgaagttctgtgatctggagttttagttctgctaattcggtgggagccatgcagtatggtctttttgcgattggtgcggtgccgggaattagatcaatgtagaactctatttctctttttggcggcattcatggcaattcttatgggaatacatccatgaattcttctaccacatatatgttttcagctgctaggttaaacaccattggatcttgggcgggtggctgagcctgacatgaaactgactttccttggtggtcagtgagaagaacggttttatctgtgcaacttatgatgccattgtgcttggttaaccaatccatttctaagatcacatcaattccttgggatggcaagatgactaagtccgccaataacactaccccatttaaaagaatcctgacttgggagcatttgagatgacatagaaggtctgaccctggggttcgggtgaccaagggaatttctaggtgaccaacaggcatttgctggaggttggttgcttgcaacggagggggcctggagggaactttgcccctgctgactgaaacgtgacggagtggatccagctggcttgttgaagctttgtcccttgggtggaaacccaaaagatcgaactctctagtgcctatcctgctgttgagcttggagcacttggaatttcctcttgaggtgacccttttcttcttcccttgccctttccacttgtatggccttgtttgagaggtgcgagaagctgaggaaatcttggctggcaaggatagtcttgagttatggtctaagccccttcaagaaacgagctatcgtcttggcttctatgctaacatcgtcaggtgcataa

SEQ ID NO: 85861 - DNA, 379 bp, Zea Mays
ctgaaggattgatgatagtgaggaaggaagaatttctggcactgaagcaaggccccctatctgttggtaagtacagggacaaatttcttccactatctcgctacgcacccgaggatgtcaacactgatgccaagatgcagtacaggtctatgagaggtttggttgacccccgacactatcagctcatgaaccataccttccctatctttcatcatctaatcgatagagctatcatgactcagaggaagagccagcagatggaagaccggaggcacaagattggtggatcgcaagccaagaggagcagccgtcctcgtttctcaggcaatccacctagcacttcaagcagactcaccctcaaggacaccaacatcaacac

SEQ ID NO: 85862 - DNA, 989 bp, Zea Mays
gccgcgctaagccgtattgtagtgccctgtctgcttttttatcctgtctatcatcagctcacattgcggctttattcagtagctactactactactagctagtgaggcatgcgcaggcactacgcatctgcctcgcgctagttgccccaccaccaggccaccaccacgtatgagtacgcgtagcattagcaacgaatgattgggatcgattagtgctaccattagcagtaagataatggtagctccatgtgcatgcccaccacctgcccggccgggcccaatcaaccgaagtggacttgcattgtcctccccgtacacacatctcaccagctagccagagagcttcacccgaacgcagatggtttttctcgtcggtcccatcggcatcactcacggacacacatacagctgagctgcaccgcttaccgccggatcgaatgcgcgtgcacgtttggaagggtctcactctcaccgcctgggggatgattccattccattccgtcgccagcaggccaggcacccgccattatccggacaggtaggcggatacgtctcgacgcgaccgccaactaactgccgcaccgacctcacttgtatgtactgtttggcgtctggacacgagtcatgactcatgaggtggagctgtgggtactcggagattgttgagctggtttctgcctatgaataagcggtggcctgcaggctgcagtggtgcgcggacagtgcgtacgtcggccaggacaggcaaatatctctccggatacacccgctgtaatgtgcccgcgcccgaaaacgatggatctcgtccccaatatgtgtactcctcctacacgggcagatcaatcatgccggctccggactagaggcactgcgaactgcgatagatgccggcaaccacgtacgtgtgcgtaacgttgcctccctggccagtgaccacccaggcacccaccacttgtatgctgccacctgccatgaatgaaagactagac

SEQ ID NO: 85863 - DNA, 1135 bp, Zea Mays
ggaaaaactgttgaatttgaacagctgaaaatggttacatgttcgacacatcaaggcgtgtgacaaatgtgaggataatacacctttccctccatttagtcactataagtgttgatttttacaatttgagttttcaacataagttacttatcataggttaagtttcctaacgtgtccagtgttggatgccttggaaaaaacctgtcatttaattgttgttggactaaatggtcgagtttgtgtatgatgtatctactgaccattcataattattgttatcccaccttattttcatttgttgcaccttttatatcaagccagacacctgtagctttggtgttcatcacttggagattataaatggcttctagattatctcttcccaaaccttataacttatgtaagtagtgtggcatgctcaagttttcaataaacataaacaaaaaatacaattttctggacatggaaataatgggaagactacttctaccatctacatgttcaagtatttcattaaacatgtagacctatagggtaggtgaatttcagcatagctggtcgtaatatgtgagcttacattcttcaaaactgtactgaacacactgaattgaagtttacaacttgggaaaaaatgcaagtaatatacagaggattaagaattatatggtcaagtgttataactaataacgcaatcaaatttcacatggctttgtgttaatcttcacttgctccaatgctaaaaggcggcagcttcctaatctttttcagtgcagtacctcatggatttattcggaggttttattcaaaacatgttatttgcataagacttcttcatgcaaactatttatgtccggtgttgaaagtatttgtaatatatgtggcagcaatacttaacgccggacaaaagccgtttcgaaccagctttaaaaaatagggatatataagagataagacttcttcagtttccactacatcatcacctgacatttattcagaaggcatagtcaatttctaacttattcatgtacatatttattgttctgtaacaattattgtccataaggtatacttactttcatcactgtctttcaggtcataagaagtgatattctgaatttctgtgcagtggctgtag

SEQ ID NO: 85864 - DNA, 340 bp, Zea Mays
ctccagatttttctcaataacatggcttgcactcttaagcaaacttgttatctattagtaggtctacaagtttgatgtggtaccccagggcaaaaaccctatattttgaaatatacaaggctccaaagttgagcaaactacactgaaattcagacttagagtgaattcacaactaggggcctttttgcaaatgaatccaaatcttagggtttggcttccaaactcacaccttaatgaaccaagtgacttaacatacttatttaacttggtttttgcactttagtccaaatgtgcaccaattttgcacataagcccctaggtttttgttttagggttttcc

SEQ ID NO: 85865 - DNA, 406 bp, Zea Mays
aatcttattctggtccgcactcttttcctcccggggggtgaggtttttaacgaggtggagccatgtaatatatgcctgaaaaatcccccgcaaaaacatgcgtcgaaaaaagaccgcgacgacggtcttcgacattcgaccaatacgaggtcaccgcgaggctaagcgctagccaccctcgcgtgcgacagatccgcgcagaagtcgcctaagggcgcagccggactagcacaacaaaagcaaaaacgacaacaccaaactgtccacgccaggaccaactatacgcgcaccagcacagcataacaaaacacaccagaccaagtacacaacgccttcgcaggcatagacaagcgagggcatacaacctcatcatacaagcctttatacatatacaagcgagggcacc

SEQ ID NO: 85866 - DNA, 617 bp, Zea Mays
attacacagtttacaacatctgttaaagatttgtgtaatctggttaaatctgtgtaaaagatctgttctagagatatacacagatttgtgtaattacagctagatcctattgtttattgtttattacagcgtctgtttaatttacttgtttaaagatctgttcttttgacgtctgttaaacagaaaagatcttttctggttaaagatctttttcttgttttatgcttgtatatacttgtatatactgtttaatacaatttacttgtttttagcctcagatctttaatcagacgtttacaagtgattattagacgtttaattttctgttcttttctgttttgagcataatacaagtatatgcacctgaaaaccaaactgcgtagggtagctctgtagatttaatcagtcaatacaggaaaaccaaacacgagctcattaaatcctagatgagtcggtacaggaaaccaaacacgagctcattaaatcctggctgagtcggtacaggaaaccaaacacgtaacaaattaactagttgcgtccatgtatacatgctaggctcagcctgcatctggatctaaaccaggctctacccagccgaacaaccaatcagccggtat

SEQ ID NO: 85867 - DNA, 569 bp, Zea Mays
gttaaataaaaaaatgaatgtgcatcatgttggtattattagttgatacatttgatgtgccaaacgcatgaaagaaatttgaagtttaaactaaattcgaaaacataaaataaaagaagagaaaaaggaaaactccatacctgctaacggaccacgtttccttagcctaagtcactctaataacgtcatcctctcacatctgggtgattctgcatgctcggcatccaatagaaattcactctcgctcgatttcgcgtctgcatccatgtgtgtcgctgctcagtttcccctccgcgctggatcttcgccatgaatgtcgcggctgcagctgtctagctcttgcatacaccggcgtgttggacccgcaggccaaaaaaatcaccttgcgttcttggggaatctgtggctagtgtgtacggctggtcatcgtttagctgcgcgccatggcaatctgaaacagaagctccatttttctctcaccagacgcacgccgtaacaactccaccgcggtcgtcgtaacaaaggccaaatcctcggccgggatcttcgctcgcgaatctcgctgctcg

SEQ ID NO: 85868 - DNA, 1199 bp, Zea Mays
gccttccacattcttcacctcctcctcttcataagtcatcgcgtatcatccgaagcaacctcctttggcttcatttgacttaatacttccatagactcgaagcctcttgacttcgtcccttctattagctatggttcagacgaagatgagtgtgtttacccgaatcttgctctattgacgatgttgacgcttcggagacctttggcgatgaaggcctttcctcaatagtagccccttgcgagataaggtcgttttcataacaagctcaagtcgcgaaacatatttgggaggccttgcgccaaaggtccgaaaagcacctttccagggctcgttattgaaaatgacaaaaaataagtagcttcagaatgggcaaatgtatatttacggtccactaggtagtgaaaaagtaacactacaacttctcgtcttctacgcccgctttatgtataaaagcagaggagcactgtgaaatgaatcaacatttattgccctcacattcacctgttgctgcttttttctccacctacaaagcctgtcgttagctgttagttttaaagcgagctttgggggcgctttcctttttatggtcaggattcgcacaaccgctaggctagccactcccacatcatcagaggcccttcagagggacgagatcacttcggataccacaacgatttccatagtcatgaaggcttctgtagcaccaaagtcctagaatgatttgaaggaggaagagtatgaatgtcgaccaacaaagccatgtttgaaatgggtcagtctgttttgaaggatgaagattttaaagctatgaagggggttggctattttggtgacaaggtcaaggttcgtcttgctggcaatgagactattagaaccaactgacacatggtcgagtaggcccaaacgatgggaagtaggaatggtcaggtgctcaacaaaacaatgggtagggaacaacaatgtcttgttaagcgtgtcctatcaatgtaaagtgtggaggtatttataggtaaccaggtgggtgtgcatgcccttctaagtacgattatgcccctggttacctgcttctcccctagaatattccccctttaggggtcattacgtgtcattatagcgagtttaagtatagcttgattaaatataccacaaacccaaccccaggatggggcttacaaatgggcctgaatggccagcgaggc

SEQ ID NO: 85869 - DNA, 348 bp, Zea Mays
attccttgaagcacctcgtggaacttgagctcagaggtctgccggtgcatgcgtgggagacttcggtggtgcaacaattgatcaacccccatgcgtgcatttcccaggttctgcccgacacgctggaagtccggagtttggaggcctttcgatgccttgcctggtgcagcgaccctgaacgtatcccagctacgaaggacctctggatcactgaaccagaccaggcttcggctgctgatgggaagaaggccctggtgtacccggtgcaaattcgttgggttcctgctgatttgagcctcttgactggtgatccaccgctgctgattggaggtgacgaccaggacaaat

SEQ ID NO: 85870 - DNA, 675 bp, Zea Mays
gttctttcttgttctaacttgtgtcttcgattctcaggcaggaattaacccttgtggcgaggtcaattgggcagtgcacggttgataactagaggagaagtggtgctgcgattgcggggttctagtcgtgttgattggaagctagatcgtctgtgtgacatctccaccaaatcgatagttaccttcacctaacggaagatcgggcaccctcgttcctatcaagtgatattcaaagactcaggtattaccgtcaggcttaccctagtttagtttatgttttttcatcctataactccagataattgccatacaaaagaaaatccgatgtcctacaaccctgtttagccttgcaatttcgtttcagattgctttgttgaatttgtgtccgtgttcaagtcttgttgctggtttaggtcgtgtcgtaatcgtagttcaactgctttgtcgctattatttgtttccgccgctatcccatccacctttcccagattacaagtcaagacaccacattactcgatttgccctcgctagccgccttgtgtgaactctcgccatgctagctctagattaggttgcaagccgccttgcattgcagcccctccttgtttcatcatctggcgcttacctattgcttataccagggaggtttgtgcccctatgctctatagccgccgc

SEQ ID NO: 85871 - DNA, 567 bp, Zea Mays
acctactcatgcagttcatggtcataatccttgagatcattataggctatcaccaagtcttgaaaatggcccatcaagtggttctcgtgggcaaaagatgcctctcttgaccgcagttttgctgccaagcaccccttctgctcagctacttccttctgaagttgtttattctctgttagcagctcagaaatatgggctatgttgagacatcgctcattgaaggacacatctaggcactgctgcagctgctccacctacgacggtggcacatgactgctgctgcctgactcaaccatacgggaaaccatctaatgcttgggcacaccttgtggtccagtatgcatacagggcgtctgcttgggaggaaccattctaggttttaaggaataatgataaaagaagagatcaaaggattagtaagattaataagaataattttgaacccacatatatcctagtaaccatctaatttaaggggggaaatttgttaaagaagtgaatgtcatgatgcatgtttcgtttcctattcgcctctcaactattgccaacatatagggctatcacgtg

SEQ ID NO: 85872 - DNA, 556 bp, Zea Mays
ggcaagctctagtcgaacggttccagggagcgcccgaacgacgacgaacacagaaatccgtggcggcggcgatttctcccccagcggcggtccttttcactcggtgatgagcttcgaccctctctgcgctcagcgatacggctagcccagcgaggatcaccagacggatgagggggttcccgatggcccgcgatttatacccaggcggtaagtccgagggaatggaggtagggacgagatccccggccagaatcgcgcaacagaacagagtctgttggggtgtttcgtgatggcaggtagatggagcacctggcgcctgggcccatgatgccagcgacaggacacagtgcaggcgcgcggcactgcagtctgggtaatgggacccatgcgtcagtgacacgcaaccagggacctgttcacggtgaacaaaaggaatagaagcgcaggagactgggccagaacgtggattcgtcccaggtagaacaaggtgaggtcttctctttcttattttcttgttttatttcctgttttatatttctattcaaatccaggtttg

SEQ ID NO: 85873 - DNA, 596 bp, Zea Mays
gttgtaaaccatagttaatccaaagctaaaacacgtagaacaaaatagagtacctttgagtttctccaatcgtagagattccttagcctttttagtagcttcgacagcttggtgagcctgtaaaacaaaatacaatgtgttaaaatactactacataaaaaagggcaagattcaacattcaaaagaaaccttttccaagatgtctctaatagcttcatctaccatttgccttccaccaactagctagatatcataatagaatttcctcctagttcaacagcttcagtcaaagggtctttaatatcactagcgaaaaccttaaactccggtcagatcacagacttcacatgctcgcaactagccttttcaagcaatgaggcaactccctgtgcacccatacaagcacaaaagtctcctcgacttgtaaggacttcgtcgaaggcctgaacttcaccttctatccattttattgctccttcggcatcaccacaaacgaacttttcatcactggaaaaaccattgatgctagcgaacatactttttaatttctcacaacattgtgcagcaatggagaaacattgttccttcgactcccg

SEQ ID NO: 85874 - DNA, 283 bp, Zea Mays
gtgcgaggcattgagcacaagattgatttaattctaggggcgagcttgcccaaccgtgctgcctacaggaccaaccccgaggagactaaggagattcagcgccaggtccaggaccttctggaccgcgggtacattcgtgagagccttagtccttgttctgttccagttcttttggttcctaagaaagatggcacttggcgcatgtgtgttgattgtagagccattaataacatcaccattcggtacagatatcctagtcctagattggatgccatgcttgatg

SEQ ID NO: 85875 - DNA, 1207 bp, Zea Mays
ctggattagatttgttttggttcactttgattgtatccatccacttccatcctacaaaaccgaccctatctacaaaacagatcctatctctacaactgaccctatccacaaaacagatcctatctctacaaccgatcctattcacaaaatagatcctatctctacagccgacaatatccacaaaacatatcctatctctaaaaccaacgatatccacaaaacagatcctatatctaaaccgaccatatccagaaaacaaatcctatctctaaaattgaccctgtgctccatagccgtcgtttcggttcctgccgatttgtgcctttgaaaaccataacttgaggtaccttccataaaacgggcataacttttcgctcggtgctccgtttgagcacaaatttttacagcagattcctgactccattcctaactccattctacggtctgtttggttcggtcaaaaaattcaaaaaaatcgggaagataattaaaaaaattgtttaagtattttcaggaatttcagagatcctttgtgaatttctctaggccacaatacaactctgtttcaagtgaaattttgtgtgcttccatcctttgtgtttttggatcagtggtaaaaaaattcagaatatttcgagctcttttgatggtactccttttgaaacgcgcctttgatttctactagtgctgaaaaatctgccctatttacagaactgccattcccactagatacatgtacctcctttcttgtgcttggtccaactgttctattacattttctaggccagcaactaggacaagtacttggaacacttattcagcattgctatctgttactgacttgtgtgccacatatatatatttagtcagccttcccatagctccaattttctctcgagcagaacaggtactcttttgcaatcacacccacgctcgttggacagtcacaccggtcaccgtttgccacctgcagtgctggtaagaacgttgtaagagcggggtaagacgcttcataatttgtattccaccacctccaccaccaccctgagagatagttgtagggttcacattgtttgttgcctttttgtctctattttgtgctaacaatgacaagaccaaagaatgaaatggacaaggacaaggggcctaaacttaacgacgatgagtgtgtctctcaaatggaattgaaggagatgatgcgcgcgat

SEQ ID NO: 85876 - DNA, 823 bp, Zea Mays
cttgtttcaagatcatcaagataccttgaagatgcatgcaaacatttgttagcaacatatgcttctgcaattgaaccctcaggtcgtgccatatttctcacagaatgtttcaaagtgtataacctcctttctacggggtacatccaaccatattggactggtcctctaagtattgcctcatcaggtaaatgtatcgacaaatggagcataacatcaaacaatgagggggggaatattttctcaagcttgcataggacaattggtatattctctttcatctggtgcagaacatctaatttaagggtcctagcgcatagttgctggaagaagttacctagttcagcaattgctacatatatttcattgttcattattcctcggagagcagctggtaaaatccgttgaagtatgatttggcagtcatgagttttcaagccttggaggttacatccatcagcagtgatgcatgatgctaggttagaagcataaccatctggaaactttacacttctcaaaaaataaaaatgctaccttttgatttttatccattgtatagggggcatgaggaaccacataggaacctccatcatgcttcaagtgtaaatcttttcttatgcacatgtcttcaaaatcaagccttgcattaatattgtcctttgaatttcctagaagagcaagaaatgtaccaagcaaagactcacatatatttttttcaatgtgcattacatcaaggttatgacgcagcttcaaatctgtccaatatggcaaatcccacaggcacgatcttttcttccaacattgaccatcatttgcatctcgcttc

SEQ ID NO: 85877 - DNA, 514 bp, Zea Mays
ccaggtttcacataaatggggatgcgctggtgatggttggatctcgatccaacagtcacggtccaggacaccagaggttgcgccacagccgcaggattacgatcccaggatccagaacgttcccaccgacatgagtacgcgcatcttaatccagaacgtccatttacagatcaacggtgtacaggctatcgtcttcctcaatataccagcggcgcaatacggaccgcggcggcgacgacgaccattgccggcccagccaaacctcgattacaagctcgaaacgccactcccaaaccagctacacgaggcggaggtaaatgcgaagtcgttggagggatactcacaaagaatttgcccgcgaaggtgccctgcctacggcgttaggtgatcccgcagcgactggtaacgacggcgagaaattggagcaaaaccttcgatcgatcacgagtagcgcggcctcacacgcccctcccagaacttgaggaaggtccctgtgcacttcaacagggcggac

SEQ ID NO: 85878 - DNA, 483 bp, Zea Mays
cgaactgtttgaacagacgctacccacgatgggtcactcgttgggtcactaatcgggggaggggggacagactcgtgatctcattggcgtgggtggaaattgcctctgctcctgctgactttgacactagctgtggcatggtgattactcttcgtggaggcattatgagttggtagtttgaggtcccatgatgggcatcaatgttgggacttaatatagcaagggcccaaacaatggagatgacgacaacacagaacaacaatttactaatgtcttctcaactgttttgtcaccctggccgagtagaggtatttatgggtaagtaaggagtcagccctaaagtttgtacttggccttagttacctaatacatctccaaaatattatgtacaacattgtatttggggtgtttagaattttgtgttatagatactcagttgtgcacccgcaccgacacaactggtgtgtgcatgtattggcccta

SEQ ID NO: 85879 - DNA, 442 bp, Zea Mays
caaacgtgaggtagacagaacgaccaagatggtcgagaaattgaatgtgggtggttgacacttgattacttccacaagcaaatgtatatgtggagaagaatatcgtgttgaacaagtcaagacgatggttgaaatggatgtgctagaggacttagtgatcggatggtgactcatgtcgagatcgtggagtaagcataggagatatgattcttcaatggatttggtgatttgggcctcaaactcactagtaaatggtttctctggtttggacctcaaaccccacttggagtttaggatggacattgaggtggcatgaggcaacctcgtgaaactcgcgtcgaggcaaaggagagccgtgaagagctcattgccatcatatgcaataattaatactccctctgtctcaaattaaaatccgctttagttaattaacaggttcata

SEQ ID NO: 85880 - DNA, 388 bp, Zea Mays
gacaccctcatccatatcatgtccaatggttgaatgaatcaagagatatcaagattggttataaggtgaaagttccattcaagattggagagtatgttgacacagtggagtgcgatgttgcacccatgtctgtgtgtgcaatatgaccgatattctcatcattgtggaataacaaatcaatacacgctagatctgaaagggagaaagtttgtactcaagcctatgacccctcaacaaatcatggctgaacatttacaaaagaaaactgaaattagtgcagcaagtaaaggaggagaagagcaaaagaaattaagtgacatccataattcagtgagtgagtgctacaagccaaattcaaaagaaaaaaagaaagaagagggagaacatc

SEQ ID NO: 85881 - DNA, 1346 bp, Zea Mays
cttcatcatcaacgatggagggacaatgatcagggccatagaggccccagttccccaatgagtaactcgctcaacattatcggaagcctcagcagcctccggctcatacaactgcttgaggccccatgcccaaaccatcgctactcggtccgacacgcctacaaggactgcgggttgcttaggaagttcctaagcaaagaggcgtcgcccgaaaaatggcctaaatcctagagggacgaagagcaggagagaagggcccccattctctgacaaaaccgggtgcctactggtctttggcgggtacgactactacgcttcgaaaagacaccagaagctcgaatgacatgaggtattcaatgtttgacaagcggtcctggccttccttgactggtccgaccacaccatcaccttcgatcgctccaaccatcccaagcacgttccctggcccgggaggtacccacttatcatcaatcccatggacgggtcagtacaactatcaaaagtactcatggatgggtgtagcgggctcaacattctctactctgccgtgttcggatgaatcaatcttcctgtaaccttcaagacaccgaaaaacttcaggactgagacttcgaccttcgagatagttgggttccaaggaacctatcacaccatccttggaaggccatgctatgcaaagttcattatcgtccccaactatacatacatgaagctcaaaatatcgagcctagcaggaaccatcatcgtgggcactatgatgcaacacacatacgagtgcgaagtcgaatgatgtgacttggccgagggagccgccactgcctagagactatcagaggtgctctgaaccatcaacgagcaggcgcccaatgcaaagaggatgagcacgaccttcaaactgtcagatgatgtgaaggaagtgcccttggaccccgagcaagcaaccgggcggacggtacgcatcggatccaagctccctcccaaataggaaagcatgctcgttaacttcctccgcgaggagaaggacatatttgcgtggaaaccctctgacatgaggggcatcatgagggaagtcgctgagcactctctatggatcaatcccatctccaaacctgtaaagcagcgactgtgccattttgacaaagagaaacgaagagccatcagggaggagatcggtaaacttctcgcagccacatccgagagatacaccatccagagcggttagccaacttggtgccagttcaaaagaagagcaggaaatggaggatgtgtgtcgattacatcaacctcaacaaggcatgcccgaagaatccgtttcccctcccatgctttgaccaggtggttgactc

SEQ ID NO: 85882 - DNA, 1089 bp, Zea Mays
ctagagcatcccacagaagacgatgagctaacctgtagacatctggccacggcgagctcactcacgacggagttttgactgatttgggggaacttcaaaattggagcgctctggtggacaatctgaggcacgggttggtgcgttgggtgtgtgattacttagcggagctcactagggcagcaatttataggttccatcggtggtatcggctaattttgagaagtcgcgcggcggccgaaaaagagagtgagtcatcgtagcggtctgccgtggtggtcactgggcaatgagctatggcggttactaagcagtcactacggctcacgacgacgtggtaaatagcctaaggcgtggcgcaaccacggtgaatggtgcatattccggtgacggtcactcagccacgtcgccgccgcaagtgggcacggcaacagggcggaacaatggcccgagttcatccttaacgcgatatttcttaccccgagcagttatctgcacttcactgagcacgaatcgcaacggcggcgacgatcacgacatgggatcacctgcggcgatacactgaatctggcaatcttcttcaggtcactatactatgggaacttgattcaggcgcctgatagagcaggtttcagggtcttgatctcaaatttttaagtgataacttgttaaccttcctgtaacaaagttgttgatctatactccagctttaatcttgctatagtaatcatagacaaacaatcactggatcatggtcaaatccgatctcaaagtttacctaacttcactgctagccaatattcagttcaaagattgactgtcagcccgactttaagtccttttatttccaatttctgtacaataccaatgcctagtcacttaacaaaacttgtactcctaacatagctctacatgtttgctatgttgaccaagagcaaaatcctcaagaattatgagatatggagttccaaagttgaccccattcaactgaattcagacttaggcatatgaagtgcatggggtgctttttgcaaataagtccaaatcccactatttgacttgcaaatcctaaaatatagaaaacacatgatt

SEQ ID NO: 85883 - DNA, 1131 bp, Zea Mays
agattgcctatcgagttcgtcgcctcgcttctcggcctcgctccatagctcaccccactcctaccgacccaatctccactccacctcccccttcaccagctcttgtcgctcacgagccatccaccacacccgttgtgtccaccacctccaccactccagcttccactgctcccgctcccgcttccgctccacctattcctccacctcgcttcagggagcgtgacgagaccgaggtgagacctcttgctgctgatccgtgtctgcttcatcttcagcgagccactgctgcccgggtacgtcggttcagacacgtacccatggattctttctgatctgtgagattgaggatacgattttggatggtctccatgctcgccatcagctgcagtacgctcactacctctatcacatctttgcgcagttgatctgtcctcttcagttccaggccaccctcaaggctctcgacttcagttcgacttctatcgcccagctcttgaggacacagttcagtgctagctccagtattatatatcacggttgaggatgaggccatcatatagttcgaggctcagggtgccgctgcagatacttcttccgatgatgatgaggaccgagggattccgccactgcctcctgtgccacctcattcccatgatcacgagactggtagctctagtgttgctcatgttgcccctccatctattgaccatgctttggctgctattcttcagtcgcttactcagcagcaggctcatatggccgtagagcaggcccatcaggcagcagagcaggctaggcagtccgctatccagcagcagttgtccgagtggatgcttttggtgtttcaaatcattcaggatcgccaggacaccctacagtagcagctcctagcagatagggacgagcaccgggtgttcaaggcacatattctctatcataccggtgtttagcttcctccagtgtagtctgctcctcctccggctctttaggctgctgttgttccagctcttcagtcaggacccacgctccaatcttttggtccttctatctctccgctcagcccggtcaccctggatttctcgacctaggtcgtcggacccatcaacgctcagctaccagtgccaccagcgt

SEQ ID NO: 85884 - DNA, 589 bp, Zea Mays
cgaggtctcctgccgctccatttccaaaccaagggagagaataggctgccgccattgatctaccccaaggatgattctccagcctcagtgagtggtctgagagcgtcgcaagatcaactaggacatgttcgtgtgcatgggcaggctcgggatccttcagagtaaggggcatcgtgcacaggagccaagcgtcatggtggagccaccacctatcggcgtcaggtctttgcacaccataatccaagataagggagccactgtcaaatccaccttgctctcctctacgaacaagacttgtccaagattgaatccgctcgatagttcatccagtgcacctgctcgccgttgtgacaccatcgcagcaccgcgaaacgctgcggtcagccatgtctaggtgcctatcaccggtaaatgatcccccatgggattcgctcggacatattcatcatgcagaactttggggatctatagtcggtgcggggatgcgcatggctacgatttctacggtgggctcgccgccgcactactcagtcaagcgagggaagacactcataaaccattagatcaaaatgtagtggccaagattaga

SEQ ID NO: 85885 - DNA, 487 bp, Zea Mays
cgcagagatcagagatggatggatgccggatcaagggaactagctagggaagggaccgaccgatcggggacaaaggcgccgagcttttgctcgtgacaacaagctaagggggctagcctatagaggctaggggcgctaagctgctgcctagctagctcggacatgcatgattgttccctttgctgccgttttagccaacagtatctttcttgatttcgcctagcggaaaggcgcactatctctcgatctatcttattgctcgatcgccttccctttgctctctctctctgtctgtcttctggctaccagtagtttgcttcccatatcttttttttatgcactgtgaaagaacagctgcagtatctatcccatccatttatataagcaacgttgtcgcccctcatcctaaatgaccaccagaagagagagagagggatgcatactccgtactaatgttccagagttaaagatgcgtggagccaatgta

SEQ ID NO: 85886 - DNA, 378 bp, Zea Mays
tcgcagcggtgcatacacatcgtcgtcatcgtcgtcgtcgtccacaggagggtgagctggggctggagacctggagttggtggtgggggacgagcctccagtacgtccatgcgtgtaacaagttcatcaactcgtcgatcaagctactcataggatgtcgccgcggagtcctggtattttttaaaagcttcagtcatcgcgcacatcatctacttcaattccatctgagagacacactcatcgtcgttaagcttaggccccttgtccttgtccatttgattctttggtcctgtcattgttagcacaaaacagatacaaaaaggcaacaaacaatgtgaaccttacaactatctctcaggtggtggtagaggcggtgga

SEQ ID NO: 85887 - DNA, 668 bp, Zea Mays
atagggaagtggtccctcccattgacaacaacaacaatgcacgtagacgagttcttgctttctcactctgtcttagatattgacacttgcctcaccatctctagggacttggggacttcccatctcccgttgtgcttgtaaacccctactacaggcaccatagtgcgagtaatataagcctcataccctctgatagaagtagggcctcgagaagcccgaaccaggataaacgcttgtgtcatctcacacaccatctagagccagccacacgacattctactggttggttaaggacccatggtccaaacaccgacatatggtgagcttggaccgaacgaagagagagggaagaggagaaaccaaggcgggttcccagtgcatcgtgctcaggcggaactcactgtggcaaaggcgacaacaggggctcagcaacgacgacagaatgaccttcacgacggcggaggcgttgctgcgtgctgggtggggaaagtgtaggaaaagtgcaaatgagaagggggctgaggatttggggtctttgctttgaatcctgggcgaggcgtgtggacgagtgtcttggggtgcggggtggtggttatccgtgcagaacgcgtgacgtggaagcggccacggtggagcggacggtagcgaggaagaggacagggtttact

SEQ ID NO: 85888 - DNA, 693 bp, Zea Mays
gaagagaggtaagacttgggaaggaataaagttttgcgtatcttcttacatgcctcacccgacatccattacctcatacataagcctcccagtgcccactagttaacccattccggcacgtagacgacgacattgtccttcctaggccttgacgagcgacgcagtccaattgctcctattccttgtctggtacacagttgttcctttactgcactgctgacactcttctgcctgggagactggactgggaagatgggagaagagaggaacaagaaagaaatgcgacagggtatttatagcggcaacgtagttggaagggcagagctgagcacgcggcttggaagctgcttcgcaattactttttgtttactctctgctctttcatgtattttgtattatatacggagtatatcatttatatggcatggttttgggttttggaattttatgggggattgagtatagtgcttgctgggattgttaggatttttggtgtatgaaaccctgccacgtagttctcctggtctactcgtgtagaattacaaggtatcttttatggaaggaggaattaaataatttacgtagtaatatttacgtgtaatttagtttgtgtataattaaaaggtatctttacgggtgaataattaaatattatacaaaggaaaatttacttgtcgttctcaaattattaca

SEQ ID NO: 85889 - DNA, 525 bp, Zea Mays
gggagagggtcgcattctaaggcccaaaccgctatcaccagcaggaggatttgacacgaaactggtaaaggcctaggaaggaggcagattccaggccgagtatgcaataggagcaccgatgttagacaccttgcctttgagcatcatctcgagccggctcaccaagtccatagcaggaattcttctgttggtcacccgggttgaatcagcctggcctcgatacagataggccggatacgctctgtctttcagcggctgaatgttcttgaaaacaaagtcagcgaccacaacttctgcagtcagacccctttctttcaacaatccaacttcagctagcagagcccctgcctcagccacctcctggtctgtgggggattcggtccagctcggagtgcggacatccggctgtctccctgaccgtggggggagggaattcccatgattctccacgatgaaccattccaggcgccatcccttgatgctatccttgagtgggatgtcgaggtagtcagtcttcctcccacg

SEQ ID NO: 85890 - DNA, 514 bp, Zea Mays
ccatacagactcactgtacacacacaaaggcgcaatcagactaagtgtcgaacttgcagtggagatggtgttggaccaatcatttacatgatttatgcttagaggaacattagaccatcctgcacatgagtgttagaccatcatcgatggagtctggtagtaacgggaaaggtttctgagaggagaaaggggtgtccgactggtctagtagtaggcattggactatatgccacagtggcatgccttaacagtttgtaatggctaggaattacacaaaggtgcatcagaccctaacacatggtcgaacagatactcactggaccatctaacgatatgcaaatatggctattgaagttgcaacgactatctctttatatggctataaatgggacccaacccgccattcgagatgggtgggagctaaggagcatctagagagttgaggctcatctttagtagatctatacactcaagagaatatagaactactctgtgattagtgtacatacttttg

SEQ ID NO: 85891 - DNA, 810 bp, Zea Mays
cacaaggtgagatccccgaccacagacggcggagcagttgctccggtgagcttgtactggccataatacccaataattcgtgctcggctccgggtttacacctaattctacccacaacgactttaaaccctcaatcaattgcaaagttcgagctcaaaatctctctgtccacggtgatggcgcaaactgaggacaacccgaggtgttcccagcgatctaacgtggtctagttcaattggctgggccgataagaatccatagcacacaagggtgctgaaacgagggcaaggagggtatgaactaacctgtagacatctggccacgacgagctctctcatggcggcgttctgaccgatttgggggaaatgagaaattgaggggctctagtggatgatccgaggcaagggctggtgcgttggatgcgtaaatacctagcggaactcacgagggtggcaatttatagagttctacggcggtggcgtccaatttgaagaaatcgcgctggcggccgagagagaggggtgagtcatcgtggcgatctaccgtggcggtcactgggtactgagctacggcggtcactgggcagtctctacgactcgcgacgacgtggtaagatgtcctaaggcgtggtacaatcgcggtgaatggtgtacatcctggtgacgaccgctcggccacgtcgccagcgcaagtggatgagcgatagagcgcaacagtgccccccaagttcatctacggcgagatcttttcaccccgcgaagttatccatgcgctactgggcgcaaatcgcagcgtcggcacgaatccaag

SEQ ID NO: 85892 - DNA, 513 bp, Zea Mays
ctagatatcatgtatgctcttttataaataggggtgttgccaggaataagctctatggcaaactcaactttccgcttaggtggcatacttggtagatctttagggaacacatccggaaattctgacacaaccttgatagcctcgagtggatcgatctctttgttatctatagccatctggtgacaacctcctttcgttggctcaggagagactagctcagtcaccacttcctctccaagtggggataccaacttcactgtcctcttatcacagctgataacagcttggtacttatctagccaatttatccctaggataacatctattccctgagtacccatcactatgaggttagcgggaaactctatcccccttatttccacacttacattcaagcatacactatcggctcgaacttttccactggctgaatcaatttgaattggtgttgtcatgttggttattcggagattatgcgcttctacccatgatgcagtaataaataaatgtgtt

SEQ ID NO: 85893 - DNA, 271 bp, Zea Mays
ccgcggcggaggaaagggcggtgggtcttaccggtggcgagattgctccggtgaagtggccgagggtgtaggggaggtcgtgacggtcacgttgatgtgcggatcgtctccggggatggtcgaagtaggccggtccacgtgcgcatgtgggggagctcgtcggcggcgagggctccggcctatccagggcggtagatgtaacacctcttgtgttacttttactaaaacttgagcataacatcatgagcattggcataacatgtgtttgtta

SEQ ID NO: 85894 - DNA, 442 bp, Zea Mays
aaagcgatccccaaacggtccagatcagcgatcgaaggcaaggccacttttggaaccccggacctgctaagggcattagccaccacatttgccttcgctggatgataatgaatggtcaaatcataatccttaatcaatttgagccatcgtcgctgcctcaaattcagctccttctgagtgaaaatatatttgagacttttatgatcggtgtaaatgtcacaagactctccataaagataatgcctccacgattttagagcaaagaccaccgcgaccatttcaagatcatgagttggataattcccctcatgcttcctcaactgccttgagccataagcgatcactctgccttcctgcatcaacacacaaccaagaccaattcgagaagcatccgtataaactgtgaaacgcttaccactctcaggcaaagctaggatagggg

SEQ ID NO: 85895 - DNA, 351 bp, Zea Mays
tcaaaggatgatcttgcagatagcattgcttataatagcctgaaggtgcatatattttttcttgtaaaataaattatatttgtagcttttcttgctatcgttatgctctcattctttgttatttttagggcttgattctaagcaagttaaaggcccaaaaggaagcagaagatgagagctgtcaaatagctcttaggaatcttcgatcaaaagtcattacactaaggaacgaagctctcgaaaaagataagatagtgctttccttagtggacaggctgagatctagcaaagccaaacttactgcacaaaccgaagctcacaaagtcaaagttgaagatttaaagaggaatg

SEQ ID NO: 85896 - DNA, 1013 bp, Zea Mays
ccccctttggtcgactaggccgaccaaagggctgagacatgattgaataaggaatgactaaatgagatgcccccaccaggccgagcctcctagtgggcccacttgtcgaaaccaaaccctaccaaagggtgatcagatatcacttggataacttgtttgaagtttgatggccaccttccacgtgtcgactaggtcagagaaatgcaacgcttctctcgaaaaggacctcataagggcttccgaggggggaagtgtgccgatcaaggatcaagtgctcagaggatgatcgacacagaagatcaccactcgaggattatgcccgactccggcgcaccatggactcacactccgtgtgtgacgaccatcgcaggcaggtctgtccctaaactacgcaaataccacgtaaacccccaagtgattcacatgatcgctcgaggctacatctagcagatgcgcttgcgtgcacctgagattttgaccgtcagcagtagccgaacaaaagtggacccacgctcaatgtgtgatgaccatcgcaaacggggttagtccctaaactgcgcaaacatcaagtaaacccccaagagatgcacatgaatcgctcaggggctacatctaacagatgcgcttgtgcgcactcgagattttgatcgtcggctatagccgaacaaaagtggacccacgctcaatgcatgacaaccattgtagaccgggtcaatccctaaattgcgcaaacatcaagtaaacccccaagcgattcaaaagaattgcttcagggcttggggactacatctagcagatgcgcttgctcgcacccgagattttgaccatcggcagtagccgaacaaaaatggacccaccctcagtgtgtgatgaccaatcgcaggcagggtccgaccctaaaccgcgcaataaacccccaagcaattaaaattgctcgggggatgttgtcgggtacctaggaataggatacccaaaataaggccaataaaccttcttgcggactaaagtcttcc

SEQ ID NO: 85897 - DNA, 543 bp, Zea Mays
gggaaagtaggtaagttacaactctcagattgagatggagaggagattttaaagggtaggtataagataaacatcaagtaagatatagaggtgtctaaggtgaaggtgataagaacaaaaggcatgacaaaggatagagttaaggcaagactcgcgaagtggcgaagtggagaaaataatcaagggtaagataggtgagggtgcaatagaatggttgaagtaataattcattatcgagagaagttataacagaacaatgagatcaccaaggatgggcaacataaaatgatcgctcatggaccattaagaaataggggtggtcaaggacatgttaactgaaatgtcttgaatagttattggggtatgaaaataaggatacataagaatataagagtatgcaagattccaaggatacgagcatactaagaccaagggcatagaaactatcgaaagatagcgacttaacaacagaataagaaaggatctcagaagataagaaggtcatggacacataaactgaactgtttaaatatgcaacagaag

SEQ ID NO: 85898 - DNA, 373 bp, Zea Mays
gccaaatcctaattttcccaagacacagagcacaataaggctggacagtgggttggttacttgataaccgaggggccaatgtgcaaatctgcgcccacgaaggggtatggcgaaatcctgggctgccagatctaaatcctacggtcgcgattagatcaatcctaacacgaagcggtatccatgcgcactggtccttggatagcaaacaggtggtcaggattaaccggcaccagtgaccactatttgacccttggatttgaaatcgacgttctggattcaaaagacccgaaaggattcctatgcctcggatctaaatcggatggtgcattatttgcacccgaagggatacgttggcttctaatcacgaccgccc

SEQ ID NO: 85899 - DNA, 827 bp, Zea Mays
atcggcgaacgcctctgaagccaccagatcagaggtggtcttcgtcgaaggacgcccgagactcgccggatcggaggagatcgtcgtcttcagatgctgccgcgtgcggtatccgctagcagattgtcatggcatgagctgattagcggtctattgtaagctctctcggatttacaaagtggaggtcatagttccattccaccaacgcatgtaggttttggttcatacttccatcagcgaatgaaaaaggaaaaacatgagagaatagcaagtacttctaccagtataaaactataccagtgggcactgagcctgtaacgctatgtacatatacatggggaaaatacatggcttgtggcttgtgtgaaaggacaatttaggtgtgtattctatatttgagaaccattcataactttcatattttgttataattatcatctcattgttctgctcggtacaacttcctctccagttttttggaactggtcattgcgggcatgttgagggtatttagttgagcagttttgaattattttagattgagtacatcagtttaagccacatattttgttctacaaattccaatgctgcatgaatcttaggtctaaacctgcgccgagcatgatgtttggtcgtctttaactatccattagtgttgttaataaatgacaccagtcatgtaggtgtttggatgaaaaagtagtttgtaggtgctatttgttgtacaataacatattcttactcactttgtgttatgattaattatggcaccattcttatctcttatgcagggagcttcagaattagtaccaattgttacatccgaa

SEQ ID NO: 85900 - DNA, 331 bp, Zea Mays
ctggctcgggttttgatgcccaaattaaccaccaaatcctactagagaaatgtatctgctattcgtcttccacaatctcgacgtgtgtcaccgtctgtcctcgcgtccaattgccatgttcttacgtcactatttatcttgaccaattgtagtctcgacttggtgaatgatatcttcacggctccatatatattcttgcttgtcggtgtcctcagatattagtactaagtcccttggtctaagccgattcacccatgcatctttcatcgttcacagacattcgacatgaattcgattgacctttgctccattgcagtcaactatatatgtt

SEQ ID NO: 85901 - DNA, 1178 bp, Zea Mays
gtcatgacatagccctacagatttgactgaacatcattcacaataattaatgaagtaaaggaccatctgaaatgttattgacactttgagctactcaaataaacaatgaccattactttggcgcgggtaaggttagactttttgggttaccctaggatgaatcatgctgaaactttagtaaatggtcaattgtagtggaaagtgggcaccaaaaaatgtggcacaacacttgacagtttaaggcagattcgaagtgtagccgtagtgtagggtttcaaaaatatgggaatctgcagagcaatagggcgtaatcgtttggagtaccattcgtttcctaaatatctaagtgtagccgtagtgtagccaagctgcatgttacacaatggcctcgtcatgccgaagcttagtttcaagggactcattaccatgctcataagtttttcccttcccttctcatcagcttttacataaaaccattcatttgtccaaccggtaggccacttggtccgatagccaatcactggagcttttgtgtctttccagtatgcaaaattgtagcatccggagttcttatgcaaaccatctgcccttgctttggcttgatagtgaagctcatggactctgcaaaacccttcgacattagtagtttttccttgacttcgtaaagcccatatgtatacgctaagtctgactatagcatttggggttagctgatgaaggtagatttcaaacttctttaaaacttcaccgatcatttcataaagagggaaccgaagtccggctctaaagaagcttttaaaaacaataacttcatcatttcttggctctagaattccttcgtccctagcaaaccttatcaattcatcatcattttttacaaaatatccaagcttattcatcaaaaccaaatcttctgcctttacattggattttccaaactcaatgtggctaggcttgctcgaactcaaaatgccttcatcctcttcatcatcactagcatcttcagcaacaacctcttcagcttcgacaacgacaacatctttcgttggagcagactcatcttcttctcggacaactagcccagaatgtttcaatgtttctgaaatgggggttgtctcagtagcttcggtttcttccccttcgtttgttagtcagcaaagggcataactagattccag

SEQ ID NO: 85902 - DNA, 528 bp, Zea Mays
attttccatctctctttacagctgagcagtccactgaatccaagaaacagaccccatgtgcactatggacaaccaagttcatcactcccctacccttcctgtctgtccatgcatctgtcatcaccgagcaacctgtgagctgccatgattcctggtgattcttgaatctatccaacaccttttgctttgctctcttcaagaatggtccactcatctcataagcactaggacctctcagacctctaccaaaagctccaattgcctcaagcatatggccaaagcttgggagggttactgtattatgtgcaatgccagcttcatacaaaaattggcatatatactcacatgctctatctcttctgtcttctcttttctgggttgacaactttgtttgaattttgttcttgtgggcagactcttcaactgattgtggcttgtagaagttgtcaatagtgccactgccaccatttgttgagggtctagagctgctgctattattacttacccttgttgatttcagcacaataa

SEQ ID NO: 85903 - DNA, 289 bp, Zea Mays
cagaatatgtcaagtccggttcaaggacaacatctgttacttcaacggttcgatcaggaatctgaagacacttcttcaattgggacacgtggaacacattatgcacagcagacaatgtttcggggagctgtagttgatacgccactggtccacattgctcaagtaccaggaatggaccaatgtacctgggtgcaagcttccctttaaccccgaaacgcgatactcccttcattggtgaaaccttcaggtagacatagtccccttcatgaaaatacaagggcattcgccg

SEQ ID NO: 85904 - DNA, 816 bp, Zea Mays
tgaaacatagataaggagggcgagagcggaccaggagatggttgtccacggcgcggcgtcacacggtggcgcggacgaccgatttgggggaagaactaaattagggcgctacggtggctaatcggaggcgagggttggtgctctggcttcgtaacaacctagtggagctagctgtgcactcaatttatagcatccgagagcggtggctctgaatttggaagaggaaagctggcggccggagagagggggtgagtcaccagcgcgaactaccgtggctttcaccggggtaatgtctcaagcgatggataggctacctacggcgatctactatgatgtggtaactcttctaagtacatggcacggctacgaagggccgcgaactccggcgaggacacttcggtcaatcgcgtggcaagtggcacagtgaacagtccagtgataaggctccaactcttccctgtgatgagatctttcaccgccagccgttatccgcacactagggcgcatgaatcgtgacgccgacaaggatcgcggcgtggagttcaccggcggcacgttcattgtatctgaagatcttttcgttcactgtaccgtggctatcttcgtcactgtgtctgaccgagcaacttgtagggctttgttctcaaatttttgtgtggaaactcactaatccatctgtaggaaagttgatctcctacaaaccagctttgattttgttatagcaaccataatcaaacactcactggatcctactcgaaattgctcccaaagtttgtcccagttcactgtcagtcaaaccctgacacctgatccgac

SEQ ID NO: 85905 - DNA, 421 bp, Zea Mays
actgtggcctggttctcttcggcggttgcagtatcttcttccgcggccatattcaaaagcattttatcaatatcagaaaatgtgccctccagatttgtatcttcggcagttgcagcttcggcgggggcagcttcggtagctgtagcgtcttcggcagctggtgtttttgacgctgaggccggcggtggtgtttcttcaatggcttcaatcacagtaataatcctccatttttttggctgctgaaggctcctccttcttctgtaaaagcttcggcagatgtggccccagtggacttagcttgataggcaaggattcaatcattacctttaaaatatcttccacgtcggtagttgaaggtgttgaaggagtctcttcttctattttagttgtttttggcttcggagccgcaactttcctcttc

SEQ ID NO: 85906 - DNA, 341 bp, Zea Mays
gaagaaaagaaataacaagtggctcagaacttcttagagggtttgtgcaaccaacaccggcgtccgagggatgcctccggcacacggatttctttcctcatcgccatcaaactgctcaaaacgatatagtaatcgacaaacagaaacaaagaaaaaatggagaaaacatgaaggcgaaagaaccatcggacacagagagctagcaacggcggcgatgggaaatctttcgctgtgctctgttttatagacgcacaaccctaacacctggacataaaaccctagatgtcatgggcttgattgctgggtccagcaggagcgccgcggtggaactagcccatggg

SEQ ID NO: 85907 - DNA, 557 bp, Zea Mays
tgctaacggagcaatcggcttaagtcggcaacgacttaaggcggtgcaacatgcttgcactcttacttaactcggggtgaccactatgccctgctaacggagcaatcggcttaagtcggcaacgacttaaggcggtgcaacatgctcgcgcttacttaactcggggtgaccactatgccctgctaacggagcaatcggcttaagtcagcaacgacttaaggcggtgcaacatgctcgcgcttacttaactcggggtgaccactattacctgctaacggagcaatcggcttaagtcggcaacgacttaaggcggtgcaacatgctcgcgcttacttaactcagggtgaccactatgccctgccaacggagcaatcggcttaagtcggcaatgactcaagccggtgcaacatgctcgagcttacttaactcggggtgaccactataccccgctaacagagcaatcggctaaagtcagcagcgacttaagccggtgcaacatgctcgcgcctacgcaattcagggtgaccactacaccctattaacagaagcaatcgact

SEQ ID NO: 85908 - DNA, 734 bp, Zea Mays
gaagcgaacccttggaggcattttgcttttccagatgaaggtggacaagagggtggggctcccaatagtttttaagcattttgtagaggagccctgtgtggagggagctgtcaggtttggcgagcacacttagtctattattcggtacatcagaaagagtgatgttctggaggagggtgtttaggatgtcaagttcacttgtagcctgaatagataggcgagagacaaagttcatggcgagtgggtgggagaggacctcagagacaggagggtctgacaggttagcatgagatttgagggtagggaatgttgaggcaaggtcatccccagagcaacagatgtgccagaaggaggtgtttttaccatcacagatgacacaggtggtgatagagcggtataggggagcaatgaacgtaaggatgaaaatgggcacccgggaggtcactagcgagattgtccaagcagacacgacgtcgaacctaggcggcccaagagaagctggatgaggtgtggaggcggtggaataacttaaggtggacgcagttgttgaagagctcaaggtctcggtcgtcgagcccacccaaatttttactttcaaggaccgagtcccaggggaccagacatctggagttgtgggcaatgtctttaccgaattagaggaagctacgacgacattggtccatttttctgataatcccttttgggaggtggatcacgctcatgatgtaatttag

SEQ ID NO: 85909 - DNA, 495 bp, Zea Mays
gcctgatccaacatcaacgtcatggattttattaagcgcaatctgatctactccctccgatccgattacaacggtccagatcccatcaagctaagaggtatcgcgatttaatcgtgaccacccattcacgatccgatggccagaggccatctcctacctcagccgacagagcatggcggcggcgcctggcttcccggcggcggagcataccgaagttgcgtggatcaaccacaacgtcactaaccctcaatcgtaaggtgctacctacggaggagacgatggcgaacacgacataaggatttttaccgatggtgggggattgagagaaggttagccacgacgattggtggctcccaggctaagagtgattcaccgcgaaaccgccatgccccgagccccgatgcccacggtatggtctccacgacgcttgatgatgatcccaaacccgagagcgagatcccgacgagggtgtatgcgcgactcgaccacggcgaa

SEQ ID NO: 85910 - DNA, 286 bp, Zea Mays
gtaaaactgaagagccaaaaatcgaagaaacaaaaaagctagaaattttaagcccttcggcggaagtaacagtgccaaaggcacaagaaagtcttgcggtaaccccgaaaagaaaaaggatggtaaatgtactagatgtgttagaaacagtgacgactttaaggtctactccttcaaggaaaatcgccgaggcttcgaaattgcaaagcaaagctgaaacaaaaccggccgaagttgaagctgcagcgagccaggctagtgccgaagctgggccttcagagcctgc

SEQ ID NO: 85911 - DNA, 370 bp, Zea Mays
aaattggtctgaccaaatttggttgaataatactcaagttataaattttctaagttctctactcatttaaaaagaataaacagaaatggttaaaggaaaatgactttgcattggggtccctgggcttatttctatctaagtcgtttaaaccgtgcccctcaagcactattcacctgagtctctgacttagcacttaacccccctaggtttctatcccctctaacccgagctcctccctcgcctgaacagtgaccaaaggagaaaaagcggtggcgcggcttaccggcgacggtagaggtccggcgaagggtcggatgaggtccggcgaagtttgatttgcaaaactaaagtgttttgacttagaagtaag

SEQ ID NO: 85912 - DNA, 441 bp, Zea Mays
aaatattgagttcttcattgagcaatcacaagaacactttctaatcttcagtgagcaatcataaaaacgcttcctaaaaccttgatcattcacaacaccgagaaggtgtctcccatggtcaatggttctagaggcctactctgctctcccaacctctctatgcatgcataattgggacaggaatgctctctgtcaacacaactgagaagtgagggagtttgtcacttcactatgatttgtgttcgttcatgttctaatgcaaacaaacctcaaggccggagattatgccgagtgtgtgaagtccccctcatacgacacaaaggatctgtaggccccagacagggtctataggcaataagggcctagtccatagtgggggctttgggcaggaggccaaagatctcgaggactttgctcctaacatacccatcctcgtcgaat

SEQ ID NO: 85913 - DNA, 358 bp, Zea Mays
cgatctggaacccgaagacacttcttcaattgggatacatggaacacattgtgcactgcagacaatgtttcgggtagttggagtcggtatgccactggtccacatctttcaagaataggaaacggacaaatgtatcggggtgaaagctttcctttttacaccaaaacgggatacacccttcattggtgatactttcaggtacacataatctttgacttgaaagtacaaggggtggcatcgtttgtctgcataactcttttgtcgagcttgtgcctctttaaagttatgtatgattcgttgaaccttttcttccatttctttaaccatatcaggcctaaaaaaccagctttcccctggt

SEQ ID NO: 85914 - DNA, 821 bp, Zea Mays
ttcgaatagatgagtaaattgattaaccaattctgtaaccacaacaggcatctccatttgctgatcagacaaagtcacctgtaactccagcaactgctcaatggcttcttgtttgataagagaatcaaactgaatacaactaagtgttggatatgactgggtgttaggcaagacaccctgtaaatgtactggttttcccttatacatgaacttcaaccacttgtgtccccaatgtatcgacatgggactatatttctccaaccaatccattcccagtattaaatcataaccacttaacgacagtattttaaaatcatggacaaaagtattgcccccacacagccattggcaatccggcattacatgtgtactccataactttcttccatcagctacctttacctgcaacggcactgataaaggctgcactcctgtcattactcctgtcaaatgagtgttcataaagcttgctgaacttccagaatccactagtactagaacttgctgacagtagatagatgcccacaacctgatagttttgtttccttcgctgcctgacactgctgctatggatattgccagcacactttcctgctcatgccccatgacggtctcctcagattccaccaccaagtcagggtcagtaatgcttaacgcccacatctcctccactagatgtaaaggcactgtgttggagcatttgtgaagttggccccatttttctccacatttaaaacacagtcccttggccttcctatattccttgagggctgccattttacttccctcacctttagcaccccaatttgtccctgatctgc

SEQ ID NO: 85915 - DNA, 921 bp, Zea Mays
gttttcaggaatttcagagatcctttgtgattttctctaggccacaatacaactctgtttcaagtgaaattttgtgtgcttccatcctttgtgtttatggaccagtggtaaaaaattcagaatatttcgagctcttttgctggtactcctttgaaaacgcgcctttgatttctactagtgctgaaaaatctgctatatttaccgaactgccatttctactagatacttgtacctcctttcttgtgccttggtccaactgttctattacattttctaggccaacaactaggacgagtacttggaacatttattcagcattgctatctgttactgacttgtgtgccacatatatatatttagtcagcctttccatagctccagctttctctcgagcagaacaggtactcctttgcaatcacacccacgctcgttggacagtcacagcggtcaactttaccatgtgcagtgcttgcaagaaccttgtaagagcggggtaagacgcttcataatttgtattccacccctccaccaccaccctgagagatagttgtagggttcacattgtttgttgtctttttgtctctgttttgtgctaacaatgacaggaccaaagaatcaaatggacaaggacaaggggcctaagcttaacgacgatgagtgtgtctctaagctggaattgaaggagatgatgtgcgcgatgactgaagcttttaaaaaataccaggactctgcggcgatatcctatgagcagcttgatcgatgagttgatgaacttgttacacgcatggacgtactggaggctcgtcccccaccaccaactccagccccatctcactctcctgtggacgacgacgacgatgacgatgatgtttatgcaccgctgccacaacgcctcgcacgtaatcgacaaggtatgggagg

SEQ ID NO: 85916 - DNA, 1085 bp, Zea Mays
cttgctatgctgcgatggccctgatggtcgcacacgcgttgacgccaaatacgctagagcttgtactcgcgtggattgtggtgagttattcatgcctctgaagtcacaacatagcgcaaccttcgtaaataattttgtttggctctatattttgtttgacatgtgttgtgtggcttaatatatttatatatatcgccaagtggccatagcaactttgacaagctctatagtgcttggaagatctgggaagttaatgaaatacctatgaaacacaaataaataattctctgctctcttctcatgcatgaagttttacccgaagtaacccgaagatatataatataatgcatgaaagcctttttggcatagaatacatcataaattgggattatattagtaagcaaaaagtccttcccagatgatttaagaccataaatctcaatcatacatttctcaaccagatgttagcacattgctctctttgtcgctgaatgacatgaagcaaactatgagataaaaggacatgtaaccgctagcaacacgaagttgcaagtataccgagaggttattctgagaaaatttgcactatgttggtgtgaaaaccattgtgtgttcccgtagaaccactttgctcgtcctatctaggacctttatgcttgttttgcatacatctctcaaaatggtaaatactcctagttgttgaattaaaccgagatagtcctttgacgagtatggtatatattgtaaccaaaacggtaaagggcaaacctggaggggcatataaatggagtttatgtagtagaactacattggatttcaccccttggcatgcttaccataatctatatccgatctatcagaagtaagaagagtagaaaaaatagccatgaaatcccacatcatcacagagcttgaagctaaattggacattaatatgtccttggtccttggcaccagaagagccataagtcttgaccatgagattgtaagtgatgataatttgtgataaaatataaagatcttactgagacctgttgtattctccctagtcctgatgactcctttgcatgagagtagtactatct

SEQ ID NO: 85917 - DNA, 618 bp, Zea Mays
cacaagtcttacctgtaacaccccaggtgttacttagatatttcacttaagactacactagtaaacccatcatcacatgtgatttaaattgagtaaaagacatcaaccttgggaatcaagatcctaagtaggtgtaacccaacttagaagtcatgccttggccttatcaagcactaaaaagaagaaaatgactcaaaccctaatccaaatcccttatggacaaatggagccctagagaggattatggcaaaaagtctatgtaaatcacattgtcttgacttgggctaaccataaaagttgtagtacactaaataccctacaaaaactagaaagagggtgaccccaaaaagatttcagaaaaaccccaaaaaggtcaccaaagagtagagcataaaaggaaaatcaggatttgctcaagttcaagatcgaccctctttcaatgatcaaacatgttcaccttgatccaaaactcaaaaccttttggcccaattgacaaaatggcgcccaaagatccctagaacaccctggaaaagtttgaacccaaccctaagccatttgacacgacttggcatggcttttgtctcggtgtggacagctctgacagagccaacttctcac

SEQ ID NO: 85918 - DNA, 463 bp, Zea Mays
gtgactaggatgactagagagttgaaacccttccgaagatccttaggcaggcgattgacagcttcagatcatcaagaacgaaaacggcttgtagaattaggtggtaagatcgacatttaagttcagcccctgcagaattcgagtccacgcttcctgcaccagcacacaggaggagagaatgtggttgatcgtttcctcatcctggtcagaaaaaggacaggtcggctgatggggcagcccttgcttggctaggcgatcagaagtccaacatcggttattaattgccaaccatataaagaattcacaattggccggggcccagctcttccaaatcttcttccagtgagaaaacttgatggtcccaatgaacattgagttataggttgatttgcagctgtacataccggaggccgagaatttccaaagatgctgatccgagtcgtcaggctgcagcaccacatca

SEQ ID NO: 85919 - DNA, 1048 bp, Zea Mays
tccatttttgctataaagtttactttgtacagaacctaacaaaattggttcgaccaaatttggatatttatttcacaagttatgaattttcgaagttatctgcagagttagtaaatgatttaatttaaaggaaaagggtcaactggtttgcatcggggtcctaactcttcccttttctctcacacataagctcttctgtcacgattctcatgagttagtgatttcacgtgtagccccctgggtttttaaggtatcgaacccacgattcttctctcagccagaacagtggctagagtggaaaacacggcggcaccactcaatgctggtggtagtgctctggggaaagcattgggaagaagcatgaggttacgataaacatgctgatacctttggtttgaccggagatggtcggagttggccggtctacgtctctaggcagtcggggccgatggtggcacatgctcgggctagtcgatggtggtagagctcgattccaccgatcagcgagcttcatggaaggtcgatgaggcagtttaccagaagaattggatagaagcaggctgtggaggcgggtccatgttcaccggtggaacctccgactccagcgagggtgatttcaccgctccggtgaagtagatctccggctcgagccttgggaagcttcacaggactcagggggaactggtggtgggttcagtttaggtggatagtagctaggcaaggtggaccacaacgactgactttggtcgatgatgggggcggcggtgcttccttctccagtgaaatttcggtgaaggtgctcgactatgggcccaaggaagtgcagagagtgcaaccaagggtcggggtcagctttataggtgaaggtgagggcatggcactgtgttgtctatctgttgcacgcggcaggggcatgggcatggattgggtgcgctcccgactgccagccgaggtcaagcacgtggcgacactcggtgtagtccctttcaagcatccatcggctccaaatcctcatgaatttgggcaaacctcccaggtaagatctctt

SEQ ID NO: 85920 - DNA, 369 bp, Zea Mays
gagaaaacaaacatggagaaaattacaaacgaaatgctagctgatttgtctgaagattctgacgatagcggaagctttaatatgaaaagtgaagacgaagatgctgaaaatcggccctggcgaccaagtcacaccatctttgaaaaatcatccattaagcagattcaaattgatgctatgaaagggagatattttcgagatatttccatagtgagagctggaagggatagtgccgcccctgctcctgaagaagatgaagtggttatttacaagagcttcatgaaggcagggcttcggttcccattaagcaaattcctggttgaagtgttgaagaccttcgaaattttccttcatcaaattacccctgaa

SEQ ID NO: 85921 - DNA, 513 bp, Zea Mays
aaggttcttctgctttgatgaagagcgggggtcgagtctcagagaattccaaatatgtagtatcacacggtccttgaggaggagctcttcctctgtgcggttggaactaattgcccgccatttcgcgcaagaagcgcgtattatcagcggtggcattgaccagggcagcgatagcctcggccaaagtcggtggtactggtggtgggttgggagtatcctccctaccacaggatgtccccgcaacatcatgtgcgcgagtccgtgatggcatctgaggcaaagaaacatttggaaaaaatataacatgccaacatacaccatcatattacattgccaaaatgtaataattatacggactctggtgtacaagtcgactttattacttattttacataagcataacacttagactatactattctagtctttttcatcctttgttgctccatttcctgcagcaggagaccgttcgtcagcaaggttcttggaaggaggggcctaaaaaggttcagc

SEQ ID NO: 85922 - DNA, 841 bp, Zea Mays
gttggtcattcttatgggtacatacttatgggatgcaaatgtgtgtgtaataaaaagcttaggcctgattggcttatgtcgaagaattatacccagaaagatggagattatttcgatatttattcatcggttgcccatttgacggccatacgagtgttacttttcttagccgcttcacatggccctctcattcattaggtgagtaagacaactttcttgaacgaagagcttgaggaagaaatctatattgaacaacctgatggtttttagcaaacaatcaagaggcaaaggtgtataagttattgaaatctttacatagcctacaacaatcacctaaggggtggcacatgacgtttgatagatcagatcggagcggataacgccttttccatatcctaatcctatttttatcgttggattcggatcggagcgatgtatatggatattttaggatgttagaaatggtgtggagtcgaagcagaagcatggcgggtatggatatggatattttaggatgtcggaaatggtgtggagtcggagcggaagcgtggcagaggcggatttcaaaggtcagataatacatgtatacgtctattttttgtagtgatcaatagttcataaattaaagtttaataattgacaacataacctgaatatagctataataaataactaagtaggtaaataataactagcattacatcacatattatacgatatgtgattgggtgatctttgattgatttatgttggcttgttgcctattggattggggtggcaattgatttctgttgtgtatagtgtttcatttactgttctaccatatagaaatttcagtttt

SEQ ID NO: 85923 - DNA, 407 bp, Zea Mays
aaaattttcggggcgaaataattgggatcgcgcgtcgtctgagtgaagtcgtgcgcgcgaatatgattcaatttatccgtccgcacgctgttttgacgacgaaatcgcgtccaaggatttataattgagatttgattctctaataaattatctagggcacatcgatcaagtgttcgagcagtagatgaaagtgtctaattttaaactatgacagatccagtttatattagtataaccaatattgtttgggtttattctatttgcatcttgttttgattcaaatctgggaacatagatgcatacaagtttttgtagcagaggaaatatcttctcggatatttttacagccaactctatctccagtcgttatcctgcgccgctcaactctgaaaaacaaaaatcccacc

SEQ ID NO: 85924 - DNA, 472 bp, Zea Mays
atcaagcatatcatctaaacgtggaatagggtgtcgatacagtatggtgatattattaatagctctacaatcaacacacatacgccatgttccatcttttttaggcactaaaataatcggaacagcacactgactaagagactcacgcacgtaacctttgtcgagtagttcttgcacttgtcactgaatttcttttgtttcctccggatttgtcctatatggcgcacgatttggcaaagatgcaccaggactaagatcaatttggtgctcaatccctcgtttaggtggcagcccctctcgtatctcacttggaaatacatcaaaatactcctacaaaatgttagcaacaacaggaggcaaagaatgctgcatatcttgaattgaaatcacagcatccttgcataccaaggcgtaagcaatagaagtggaagcaaataattcattaacatcagattttgtcgcaagcaagcaa

SEQ ID NO: 85925 - DNA, 376 bp, Zea Mays
attatattatttcttttttcattctctatcctttcccacccaactaccagtacagacgaactgccgcacctgctgccttgcatgccgccaacggagaggagccacgtcgagaggatagcgcagccgctggtagaacgctacatttgaagttttgccatgcctcagcgacggtgcagtcacggatacagttgaccgctgcagttgaagagtaaacgctatctcgatacagttttgcgtggagcgcgcgactgcggacagcctaacatcccttctttcttcctatcgctgcggggagctagagctactggcgactccgccagcgccgctgctgttggtctgttgccgccagcaatctagagacacaagtatgcgctcg

SEQ ID NO: 85926 - DNA, 363 bp, Zea Mays
caatctctcaagtgatctaaagatcaaacttgagtgtcatagtttttccttatatcaagattgttcccattcaaaaggaatctccacaagttggagtctcttgcagccttacacaagatcagagtcacaaatcagagtaagggagggagagagtacaagcacaagagatcaaaaccagcaactcaacacaaaagaggtaaacacaagcgcacaatacaccaaagtgaagaacagcactaagacggtgctcgaatcttgctagaatcacacgaatgagttgtggcaaagtgtcggagtgttgagagtcccttgagatgcttgtgtactgaatgaaggtgcctagtgccagcttttatatcccca

SEQ ID NO: 85927 - DNA, 355 bp, Zea Mays
gacaggggtctctgcgcaagataacctagactcagtgaatagggtccatggactgcgagttagttttcgtaaaacagagggttttatttgcaagatcgaccggccaaaagggtgtcctgggtcctcggccgcacgatcgcaagggaacggtgcagattagatccggattcaacccgaaccggtacgcaaagctagccttacgatctgcgatcaacggattgcgttctacataacagagatcgacgcgcacccctcggatcttggatctacggccgctgcgcgctcggccgaagcggtacaccggacttaatcttagccgtgcatctaacttttgactgccaacgctagtcgcccc

SEQ ID NO: 85928 - DNA, 920 bp, Zea Mays
cttttgtctatgattctatttccttcatgtatccttcttttgctgtgatttcaacttgggacctggatcatgataccgatgggacaaatctgagttcgatttgatgtcatataagattcttgactcgggtagatttgatgcatatattcttcatgtttttggttgggatgcccaagcttaactggatgagttgctcattttgttctaaagaatgattttatttcttctccacactcttatttactacttttattcttccaccaatacttataactggttccctaatgcgtctttacttctgtgtcctgaggcactagcttggaaatccctttgggtaactggcattggtgttagtggtcctaattttgtgccatggctttgatcaatctggattgatcaatccaaatgatagacatgctaaattattgtcatgagcttggttgtgctttttttggtcatgtttgtgaaaagcttctctacgtttgtgctgtttctatgctgttcacgcatgtatcgatctattttcccaagtgcagagacattgggagttatgatgcagagttgttggagagctttctttccatcctgccataaaaccaagattgggagtgtgtttctgggaactactggagatgctctgatagggagtagcgttcacaagcatgttttcactactactacttgatggatggaacatgtatactttcctcctaatgtgttgcagtggtgatcttcttttcttcccttttagtttcctgtgggacatttaaatttttttccatcttctctccttcaccccccttctttccttctcccttcctcttctccctgcgtgctctctctctctcccccctctcgtggcgatgactgggtggccgccaccaccctacgccaggtgcccaggtctcgttgggcccttc

SEQ ID NO: 85929 - DNA, 488 bp, Zea Mays
gcctatttaaacatttcagtttatatgtccatgatcttactgtcttttgagacccttacctattccattgataagtcgctatctttttggcaatttgtactttgttggtcttggtatgctcgtaccattagaaccttgcatactcttatttttatatatgcttacctttatgtcccaatatctgtttgaaatatttcagttaacacgcccttgaccacccttgtttcctaatgatccatgagtgatcattttattttgcacacctgtagtatctcgcgagtttgtaacctcatccttgttgtgcttttgtttcttattgcctttacccttctcatctcttaatcttaccttagcgattacgttatcttcgttatctaaaacctccaatctcccaccttagttcaagcgcggtctcttacttatctcacccttgactatatcctcttctttaccgcgtgtaggcccagacttaactccattcgttattg

SEQ ID NO: 85930 - DNA, 772 bp, Zea Mays
ataacttttattattttaatacaaataataatgtaaaatctatttttacatgcacaagtatttatgtgcataattggacgcatgtatttgtgctctgtttcaaaaactactttaaaaaacaaaaaatactttaaaaaatcgcctggacaaggttcaaacttgagacgtttcaaatatagaaaatgatccaaaccaccgcagtagagttgaacttatgatatgctattgaagttagtcatctaagtgctattaggcaactgattgttcgcaggcccaattccctcaccctctcgctggctcaattcctggttgtctgctccaagcatcccagactatataaaatacaacagactatataaaatacattaaatcggtaaaaaaagaaaaagcctgttgaagccgcatcaagcatcccacgccgctaggaaccaacagcgccgccaggaacaatcccacgccaccactcccatccgctccgctgttttggttgtcttcccacgctgtctctgtctttcgtcacccacatctcgccatgtatagacctctgcgtcccaattaatcggtagaaattggcttgttgaatgcatctgtagagattggtcgtgcttctccatttgcgccaggaagccaggatctgccccatgctaatgcaatcgacaggaaggaagaccgtacatgtgagacgatggttgcaatttatcatatattttccttgttgttttcaatttgcagagtgattgtatccacgctatgaacaaacaaacgaactgaa

SEQ ID NO: 85931 - DNA, 517 bp, Zea Mays
cctctgtcagatacaatagtcttcggaattccatgcaaacgcactatttgatcaatatagacctctgcatatttctctatcttgtgggtggtatgcactagcaagaaatgagctgtcttggttaatctatccacaaggacctaaatagaatcgtggtgccgggatgtgttgggtaaacccactatgaaatccatgcaaatatcctcccatttccaagatggtatgggaaggggctataaggtgcctgctgacttcaaatgactggccttgactctttggcaagtgtcgcattcagatacatactcagcaatttcccttttcattctggtccaccaatacagagatctgagatcatgatacatcttgttactgccggggtgcatggagaatttggagaggtgagcttcgtccaatattttcttcctgagttctgaatttttaggaacaaccaatcggtcttcaaaccatagaactcccttgctgtcctgacaaaagcatttgtacttatccacctttt

SEQ ID NO: 85932 - DNA, 674 bp, Zea Mays
cgagatccgtcgcgccattggaagcaggcttctgtgtggtcgaaccactggtatgatgcccgtccctattcttggaatcactcggcgttgcgtggcacctactcgatttggggattgccggcctgggcgccttgacatttttgccgacgagctccacggaggttggtggcgccgctgtctagctaggaagggataggggagaattgtgtgggccattgatcggctagtggacggccagattagaccctgagtgcagcgccctctcgtgtaatatatgccctccgatcaggatctagtggttagggttagagcgctcttcaacaagatccagaccgttggatggggatcgggcgcattcgaagccaccttgggtattttaaatccgatccatagatctcggatcgggcggccaccagcgcttaccggttcgcttaaagttcagaatctaatccgagcccttgatccttcatcgggcggccccagttggcccgtaccctttcggccgtgcgatgttgcaaaaaggcccctcgacttttcctaaactaacccgccgtccaagtcagtgttaagaccattaccgtttagtcctagaatttatgcagagccccctgggcttctggaaaatagtgtccgcagtccagaagcctgaggaaattcataatttattttagaaa

SEQ ID NO: 85933 - DNA, 790 bp, Zea Mays
cgattcgtgcccgtaggcgcgtggataacgactcagggtgaaaagatcttcatcgtggatgagaccgggagctggccatcatacccacttgcctagcagccggtctaggtaacctcaccggagtttgccgcctgcagcgggaatgccacgtgcctcgaagctttaccacgtcatagtaaatcggctgaagaagcctgtccattgcctgagacactaccccggtgaaagccacgatagctcgcaccagtgaacttcctctctctccggccgccaccgcgccttcttcaaattagacgccacccccgatagattctataaattgctgccccagtgagctccgctaggttattacgcatccaaagcaccagctctcgcctctaatcgttcactagagcctcccaatttcatattttccccaaatcggtcggaacgccgctgtgagacatctcgctatggccagtcgtctacgggttagttcatgcccttctgtgtgctattctagcctccctcaagtctcctgttgctcgcagacccgtttgattgaactagaccgcattgaatcgcctagaacaccacgatttgtctccggtattcgtcgtcgccgtggacagacaaactctgggccgaaatcatgcaattgatggagggattaggatcgccaggggtaggatttggtattagccaagttagggccccgaccattgtgtattccggctggtacacgttcactggagggcgcgctcaccggcgttcgccatcggggacctgtcattgcgaagaaacagaagta

SEQ ID NO: 85934 - DNA, 596 bp, Zea Mays
aagatcttcttgcacgatttggtattattgatacccggacagctaccacccctatggatcttcacttacagctccgctcatctgagggcacacctcttgctgatccttctcggtatcgccatattgtgggaagtctggtctatcttactgtgaaaagacctgacatagctcatgcagtacatatcttgagtcagtttatgagtactccaacttcggtgcattatggacatttgcttcgtgtcctacgctacttacgaggaacatccactaggtgtctttttatgctcaaagcagtccgcttcagctttatgcttattctgatgcaacatggaccagtgatgtgaatgatcgttgctgtcatgggctattgcatttttcttggttcctctcttattgcatggaaatctaagaaacaagttgttgtttctcgctctagtaatgaagcataacttcgtgcacttgccaccactactgcagaaattgtctggcttcgttggttactggctgattttggtactgtgtgtgatggtcctacacctcttctatgtgataatactagtgctatacatattgctaatgatctagtgaaacatgac

SEQ ID NO: 85935 - DNA, 596 bp, Zea Mays
cggccgctgagcataaaagattagaagatgacatgaagaaaatagacaaggaggtccagtgacaacaagatcaggtgctcaaggtggcagagaagtaattcctctcgcacttcaggatagattgccaccagaagaccgtccaagagagggagataaacaccgagtacatgtcagccgtgctgcaacagctccccacgataggtgatgtcaggtcagccgatgatattccatctattaatatttcttttgataatcagattaaaagtatcacagaggatatagagaggatagtgcatgcattagggaaaactcacatgcctaatattttatcacataaattaggcgctgaaacaattgtgccaaacacatcggtaaaaaatgggtttccccatccatattttggtatatcgatggactcatatccaggacgaccgtcaccgccatctccgctaaatggtgggtgaaccctgagcacggctggaccatccgcacacgatctcggaccgtcccgccctccgtcagaccgtccggcaccctacgccggactgtccggagttatacaaagcccaccacaagggtcgcaggtgttgcccgac

SEQ ID NO: 85936 - DNA, 539 bp, Zea Mays
agatatgttgtcctgaggtccccttcccatcaagggtgccccagggaagcacaagcggtgcgttgttgcgtttttcttaggactcttcgacagaaagtcacaaagattcaaagtgcgttgtcatagaaaaaggaaaacgacaaagctggttttgtgattggagcttccgctcgttactccgttgagtccgttgtttgttcgtcccgccttgttcggttcctagtacgctttctgtcctgaactttaccaatgataaatgagtggaagggaaaggaaaacaggaaaaatctggagaggggagaccaaggtaaggtcgaggctctctccctcgcttactgtatttgtggcaaagagcattgttgacaacacactttaattataactgttaggggttttacatagaaggcgaggatccgcttcagctggtcatctgctataggctcttttgccataggcattacatccggtgtttcctctagtcctaccatgtgtggtgtcccatcctgcttggactattgacgaagctatggtggccagac

SEQ ID NO: 85937 - DNA, 377 bp, Zea Mays
cacaaaacagatcctatctctacaaccgatcctattcacaaaatagatcctatctctacaaccgacaatatccacaaaacatatcctatctctaaaaccgaccatatccacaaaacagatcctatatctaaaccgaccatatccagaaaacaaatcctatctctaaaactgaccctgtgctccatagccgtcgtttcggttcctgccgatttgtgcctttgaaaaccataacttgaggtaccttccataaaacgggcataacttttcgctcggtgctccgtttgagctcaaatttttacagcagattccagactccattctggggtgacccaaactcgcctacggcctgtctggttcggtcaaaaaaattttaaaaa

SEQ ID NO: 85938 - DNA, 340 bp, Zea Mays
ttcggctttgctatatgctgcaagtagctcatcgctgatagcctcaatacttcttagccaatcatcatttggctcatcaaatcggtctctaaatctgatggtatacttcaatcggaccaacccaccttcagttgactcggcaatagtatccttcggcatatcccagttttctacaagtggccatattctgtacgctatgtgctcttgaattatatcccttgtgccaataaaggcacagacgttgctaaaagctttttgacatgctttgtcattctgattgattgtcaccttcggcctccaaagaccgaatcgagaccagatggggcgttggatgatttcc

SEQ ID NO: 85939 - DNA, 1214 bp, Zea Mays
ggaatatattaatttggacttcgcatgaattttctatggattatacaagttttacaagtatttctatactcaaaatcaatttctaaatctctatttcctattttctttaattcctgaactgggcctcaaatttagagaaacccagggggctcggggtaaatgtttttaagacacaagctaacccaggactggaccgcgggttgatatatcagaaatggagggattcttttataaatgtgtacaacgaaggggtacgggaggatcgtggccgcttgatctaacacgtgcgcctcagattagaactaggttttccccaaaccggtaccgaatcccagccgtcagatcaagatgggcggctacgatctaacacacccaatcgttatccccccttctaatctcggacgttggctatccaatcgacggcgctgaagccatctgcgacctcaggcgaaaaatacacggcggcgtgctcacccgcggtgaacaccatcgccggtcacagtcgattccaccatccacgcccccattcacaaatcgaacccgagctacagcattactagcccatggcggagctataggagaagttctcaccggctgttgaggaggttgcgagctcgcccacgctgcgcggcggctcggccgcgagagtcggagtgcggcgacaaattcgtgggatccccgtcgaattggtggccgaagtagttcccacgctagggagggaaaagggaaagccgagtgtggccatggggaggcggcggagaagcccgggcgcaggagggagctcgccaaggaggactggccgagcggacctggcagggagccacccgccacgccatttatattcgggtgcagggagaggaagaggattacggaacccagctggcgcgaggatcggtaggtagttcgggcaggtcgttaccgctgcgaggaatcggggaagaagatccacagggcgcgcttggatggaacgacgaggaggtgaggccgagttcatattgccgcgaggtgacggctgattcgcgcaagctccgggcagggtcgttgaacccgcgcggtttttttgcggagggtttgttagcgaggaggattgcgacggagatcttgagcggcttgcaacgaaccgagcaaagtgacggatccgacgagatagccccaccactcagggtcagcgagtacgcaggtgtctgcggaacagggatcccaggcgcgcgccc

SEQ ID NO: 85940 - DNA, 527 bp, Zea Mays
ggggagcaccactataccctaaggaagctagaacaaatggtaattgggttggaactacctcaggcgacgctggccacagaagagctctccacgacggcgatggcgaccgaattcaggcgctatggtggctaatcagagacgagggttggtgctctggcttcgtaacaacctagcggagctagctgtgcactatccacgagtggtggctccgaatttggaagaggaaagctagcgaccgaagagagggggtgagtcaccggcgcgagctaccgtggcgttcaccggggcaacgttacaggcgatggacaggatacctacggcggcttactgtgacgtggtaatgcttctaagtacgtggcatccgggtggcaatcgccagactccggcgaggccatcttgaccggccgtagggcaagtgggtacgacggccagctcacgacctcatccgcggtcaagatcttttcacccccggccgttatctgcacccagagcgcacgaatcgcaacgccggcaaggatcacggtgca

SEQ ID NO: 85941 - DNA, 429 bp, Zea Mays
atactcaacatggcattcaccaaatctgttagagtgcggtttttcctttcaacaatcccattggattgtggtgagaatgacggtgtcctctcatgaataataccatgttccacgcagaactcattgaaaatattagagaaatattctccacctcgatcggaccttaaccgttttattttcctctcaagttggttctcaacttcagctttataggtcttaaaataattaaacgcttcatcttttgtttttaagagatacacatagcaaaatttggtggagtcatctataagagtgagaaagtatcttttaccacctttggtcaaagttccattcatctcgcacaaatcagaatgaacaagttctagaggtgccaaattcctcgcctcagcaaccttgtgaggcttgcggggttgttttgattcaacacac

SEQ ID NO: 85942 - DNA, 775 bp, Zea Mays
gcaggagtcgcggcgtgggaggcgcgacacgatgcgtgaggcagcctaggtgctgaatcataacagcgactggctccagcagtgtgcgtgtaattgaaggaataaaaacgtcattataggtattaatctctctttattcttccccctccaacactctcgatctatatattggagcatatactgcaacgtcaagtgttggtgtgcattgtggcagatactgctggtaatgaactaaggatgccttgtcttgtgttgaagggacctaccccacctgcttcgactttgtcctgttcattcctggcatgctacactagagattcttaaccattttctaccatgagttagccccatttttttcaaatatatcatctatcggtgagacctctgctgctgtagtgtcaatgcttgttcacggtccagagctcatttgggtgttacctataatctactatccttggtgttcacagtccagactcatttgggtactgcaaacaaaggcagagactgataagcagcgataacagtgtggggtttgtgggcagtgaaatctaattaaaatgtaaacagttgtttgtttttgctctgctctccaggtgctaacttctgccataatgcagagccatgacataattacagtatagagtcatgacataattacagtataatgcctttctagcagttgttgctggtttcttcaatgttttctatttacaccatgctgcaacaaatatttacaccatgtttcattcaatcaggtaattattctgttgtttca

SEQ ID NO: 85943 - DNA, 399 bp, Zea Mays
ttatcggggtttggttccaaagaacctacgtctccgttgaggtgtcactaaggacggggtctcttacaactctctgaagcgattccaatgatcatgcttgagcactctaggacttctgagatgaaaaatagagtctctacaagtcactccacaaactcggtgcctcttgctagcctttacaacgatgagagatctcaactcaacaaccagagcacaaaatcacaacaacacatccttttctaatgcactcacaaggcactatcaagtacaactctaaaatggttatctcttgcacaattatcactaatgattccttgggaggcttttgacctctaagagggttgctctagcttgtaggagttgaatcaaaactcttgtaccttgaaatgggcgattagg

SEQ ID NO: 85944 - DNA, 1318 bp, Zea Mays
aagccttgctgggagtgctttttgataatttttctattggccaaccgtgatgacaaataagcagcagataataagcacctgcgaagggttacaatactacgtgcgtctagcccatttgtcggcccaagcactttagatgattccgatcacttggtcgttcgtagtcttgggactcgacttggtaggacctttcagaaaggcgccaagggattacgtgcacatgttagtcttagtcgacaagttcactaaatagattgaggcttggtcgattacgaagattacctccgaacaagtagttaaatttgttaccaacattgtccattgctttgggattcctagctctattatcatggataatggtacacaatttactaggaagaaattcctagacttatgtgatgagcaccatgttcgtgttgactgggccgctgtagcccacccccatacaaatggacaagtagagagagctaatggcatgatcctgcaagagctcaaaccctgagttctcgctcgcctcaaccgactcgatcgacaatggccctaggagctattagccatactttggagcttaaggataacccctagtcgggcgatcggatacacaccatacttcctagtttatgggaccgaagctgtcctccccactgaccttgaatatggcaccctaagggtaaaggcgtacgagaaccaatgcaacgagtcaagcctctaagatatcatggatcagctcgatgaagcttgtgcggtagcactactatggtcgatgaaatatcaacaaacgctacgacagtatcacgaccgccacgtacgagggagaactttggaagtagggtacctcatgcttaggttggtacagagcaacaaggatcgacacaattgtcaccatgcaccatgggaagagttgttcgtaatttgagaagttcttcgaccggacacctacaagctgaaagacgaatgaggcaagacgctcgccaatgcgtggaacatctagcaattacgatgattatatccttaacaaaaccctaacattaacattcgtacccgatatatattgtggtccgaccctactgtagcgaaaccaggggtgagccccagtggggactgagggaagaaggatgatgtagtaggccgaccccagtgacaagtagcgcatgtcctattaaatctaattatgttgccctcggtaaaccccaccatgctgacaattttccttttttctcgatcaacgcaagacacaaccctccctcatagggttgtttctcctcgactagactttaggaggaacaagcgccacccacgaccgatgcatcagcctggc

SEQ ID NO: 85945 - DNA, 427 bp, Zea Mays
ggaaaatagagtatcttgatatccacctgaaggacagcattaaaggatggcgcctagtggttaccatggagaaccacaacaatgtccctccctcctcgatcggggaggtagcccgacgtccatacacccagctggacagagtcccccacaagttcagagctaaccgagtctagggtgctgcttgccgagatatgctcactgaaagagaagggcctgactactgaggctgtggttgctgactttgttttcaagaacatccagcccctgaaggatagggtttatccagcttatctacacaccagggtcaacgaccctacctgaattaccaatagacagattcctaatgaggacctgttgagctaaattgacttgatgctaaggggcagggtttcaaatgctggtgcccccttgtcttattcttcctgga

SEQ ID NO: 85946 - DNA, 498 bp, Zea Mays
ctctgaccgtctgattggcgggaccacctgtgggctgtggctttgcttacagattctgcgagaacaaaacaaataatagccagaggagaggagaggaccctaagcaatccggtattgtgttgtattgtattgacggtaaacttacccctcgtgcaacaactgctagcctggttttgtttaattagtccaagggcgcgttggctgcgaggatctcgagacgtactactacctctgcctctgcctctgcctctgccgaccgatccacaacgccacatgctgctggaatgaatgattagccccgggagctggagctgcgtgctctttggtggtggggtgggttttttttttaagcgatggtacagtacatgtgaggataacgggattgggacaagacaggcggagagggggtgttatctggcggagaggaggaatgtgatcctgatccggatggatctgagcgccggccgtgtgttgagttgcttcgatggtagaaaaaat

SEQ ID NO: 85947 - DNA, 500 bp, Zea Mays
ggaaggtgcatgtacggcagggggaccacaaagctctccgagcagcattgttgaccgaagcagcatgggtggatagcggtgtcagagactaatgagatgatagagtcctgaaacctctatctcctgcatccaacactctgatatgcacgcaagtgatgtagtaacaagcatgtggaggctcagacactcgtcttgtggcatatagaggtcgaacataggttcccaatgcatgcaacacatcctgcaacaagtttggaaagtgtcccatctcgaacattgaagtgtaatgttctgcaacaggccgcaatccaacaaagttaacttcttgttcattgttgatatcctcaatgttgtcattgttttcttcttcttcatcttcatcatcgctggaatcatctaggtcatcacctctaggagctggggcttgagttactgggacaggtggtgctaaagttaaagctcccgcagcaaaggcatcatactctgacaatgaagtgggt

SEQ ID NO: 85948 - DNA, 309 bp, Zea Mays
aaaccgaaaccagagggggcctggctggacggcactcggccctggacttcaatgcctctattgattggacttgtgctcggtagagtctggacttcctctagtttgaccgatcttcccccttgtcattatgtattcattgcgtatatgttgcaggtctcgctgcttcagaaaatctcaaaaaatctggatggtacacccattgggtgtctgtccagtgaaagacgtccatcgtgttgtcctaaaatagtaacctgatgtgacggggaggttgtcacacccagttttagggcaccaagacccgggcgcgaa

SEQ ID NO: 85949 - DNA, 286 bp, Zea Mays
tcctgggtgacgtggtagatgtgtctagtccgttcccttacagtgatactgaaactgtcttgcgggtagtttttggtttagatctaggttcatcagatggatcttcttgatgcactgtttaattagatcaggtggctgtaaggggttgaattagattgcatcgtatatgactgaagagatcattttgtccttactctattatgtgtgcaacttgctcctaccagctagaatcaccatcaggggtaatcacgtacacaatcagtagattgagataacatatcaaagt

SEQ ID NO: 85950 - DNA, 909 bp, Zea Mays
gatgatagcgataactttgatatggaaagcgggaatgaagatgccaaagatcggccctggcggccaagtcataccatctttggaaagtcgtccatcaaatagagtcagattgatgccatgaagagaagatattttcgtgacatgtctattgtgagagttggggggggggacagcgccgctcctgcacccgaggaagatgaagttgttgtttatagaagctttatgaaggcaggtcttcggttcccattgaacaaatttttggttgaagtattgaagacatttgagatctttcttcatcaaattactcccgaagctataatcaggatgggtatttttgtttgggccataagaatcaaagggctagaaccaagcgcaaagtgcttctgtaacatgcacgaactatagtacgagacgaaggccactggcaaggagcaatatcacaacaattttggttgttatggcttcgttcctcattctgatgtaagttacccagttccaacatttcgaaaaaggtggcccggggcttggatgtaggaatggttttatgttaagaataatctgattgaaagggaagacataaatgggattatccagtgccccatctgttctcgctttggccttagaaggctggctactgcgcttgggaatgataccgaagcatgccagaaggctttcaacaatgtttgtgccttcattggcacaagagacctagttcaggagcacatagcctacagggtgtggccacttgtgaattactgcgagatgccgaaggagactgctgccaggtccagtcaaggtggtttggtttacttgaaatacaccttcagatatatagaccagtttgatgagccaaatgatgactggctgacatgtgttgaggcaactagcgatgagtcacttggagcgtac

SEQ ID NO: 85951 - DNA, 285 bp, Zea Mays
aacaaacttccaaatcctccttggaacagtcaacagccaaacccccaagaacacaccgtctcatcccagagtcccggcttccgatctcttcccttccccccgccgccggaaagatcccggctttttgggttccgcggcgagggataggccccaagaaggaggagggggcctcacggcggcggccttgcggtcgatgcgatcggttgacgcggcgggggcggagagctcggatcaccacaacctcaagaagccgcgcctggaacccaggaccaagatgccgctcgc

SEQ ID NO: 85952 - DNA, 1798 bp, Zea Mays
gtatacgtgaggttgtcgaaacctttaatagaacgacaacaaacaaacatcattagtttaatgatccttattcactttgaaggtttcagagagaagaatatatatatagagttttgaccatcatgacaagtgtacacaatagggttgatgctcaagaattcaaagacattccacgtaagataagatcgaaggtttcagattcctacttcatatataaatgtgaaaaccagagcgcaaaatataaatatatacaacacatgagcttcgacccatagaagcctacagaggctctccgcacttgaagacggtggcacttccggacttccatagctattcaaactatttctcatacatatctaagggttcttcaccttaggatatagcttgggctgatgttaaacctaatatgaagaaggttgattatttgctaatcgtttatttttgcattactcttctggtattaataccttatgctttctttcatttgaggtggaagagttggccaaaaatgcaagaaggcacacaaagccaagctagccgaaacaaataaaaacggtgaaggtccttctgtaccacttgctgaccaggtataaattaaccttgtatacttgaccacgccgaagagctattatagtgaagtttctcaactttcgcttaacaatccactaaggatccagccgtcgttgagggcatagagatgaaattcgtagtgaaaatgaccaaggctcaaatattctaatggtccaaaattggtcgaattatagatttagtactgaaagaactctacgatgaagcaccgtttaatgtaatgaaccaagcgccacggtgcaaaggcctccaaccgtatcagcggagaaacacaactcattcatcttgtccttggcacaccttttgaactgtcatcacacaaggaagaaacagtgtagtcggagtcgttgttgaggtcgctgagggaagcgagaaagactgctccttgatctttgccttgtgaaggtacttttgcttgagtgcctccttatcaaacctttccttggacttgtgcttaccggatgtgtactcatgtctagcattgcgcctaccagagtagtagttgcgcttgtcggcctctagtttgcccttcatcttaaggcaattggcgataaagtggtcaagattttcgtagttgaagcagttgtccttgcctccgccaagctaccagttcatacagttgttgtggaaccgtgtaaaccgaatagtcacaagtgctagctcctcagccccaaggcacttaatttattcccctaaaatatgcaacaaagaggataaaacaaacaaagcagatgttgggtttactaaggaaggaccacctcctaagataagagtcacggtggcatcatcagggttcttaatttggcctgagtctagtagttgattttggtggacttaatcttgttgaaaagctcatccatagtgagggtctcatagttgggtgattctatgatcatcgagatctccatccctaaaccctatgatctagataatatagtaactttagttctctatcatgatcatcatagggtaattgtgccttctttgggtgcatcttgttttcaattgattggaagtgagaaatatagaatcaatggtcactcaaaccaactaaacgaagttctcatactctcgctagtaggtctcaaagagtctagttttgacatgacggttaccctcatagaatttctctagggtagtctatatttcatgagccataccaagatgtcccatctatcaaaattagagagcaagagacatgagaacaaag

SEQ ID NO: 85953 - DNA, 676 bp, Zea Mays
gacgaatcccgtacccattgcataacatcatgacaaaattacgacttatatcctccagttacatcagttcaacagcaagcaactcccactcactaccacccacaacttactgcatcgcagaacaatacccagcttactgcatcgcataactactagccagcttatattacatgacagagggatatgcagcacctgtagtccatgaggtttctattaccagttatgtttctttctaattcatttccatagttcttaaattatgttctaacacaatacagctacactttaaccagtattatactcttatgtaaacattttagatcgtaccaacgatgctggaaccatacacggtttctgcaaaaccattgttgacgcacagaaaaaatcagagatcatcatgaagattgtgtgttacatctattcttttatgaggatgatcttcagggagaacaccttaggttcttggtttaccattgaagactgagttgaccgcatacagtttcacatataaagatcaatattttcgccagtttccgtatgagcagtcttctactgttggtaatgatacattgttgatagacagctattgttcatgtcttgtatattagccccttgtttatgccgtacatattcagatattatggtgcaagtggaaagattcatatcagtatttgcc

SEQ ID NO: 85954 - DNA, 355 bp, Zea Mays
tccatctcagaatcagaatttatttgaggattagtttcagaatgattaacaacagccctacaaaccaaattatttctagacaattccaaggatttaattaattcaagatttgatatagattcatcaacagaattaccaagttccatgtctaaatcagaagcaatagacaaaagcacatgattatccaaattaagtacagaaaaaggattagcaaacataccttttgtcaggaaggcatccttagccatagctcttgctgtcgctttatctacaatcttcatgtcatcagtagtttcaagtctgctgctccttcttatgccatcaccatattcaacatccatgccaactgaatgtt

SEQ ID NO: 85955 - DNA, 583 bp, Zea Mays
caaagggtctataaaagcctacacttatgatccaccacaattttgcatcaaatgtatgaaaataatgacacatgcaagttttccactgtgcaaaacgtgtgccgtcaaaaatgtgtggttcacaagtaacctttagccctttagtcgccatccagcttactctcgggtcggttaagaccaccaaatgagagaactaggctccgataccacttctagggtcgagatggtggacttggggtgaatagtcttttctaaaactaattatgttggctaacataaataaatgtggaattaatactatgttggtctagccaagactacacccctctaactataataaacacttgacaaaagatcctaattgaagcaactaaggtgccaagttagagaaagagctctcccacaaaaatctagttagcaaggtcatacaaacttatgcaactataattctaagcacactgagagctcctaagcatactagtaagcaagtcgcacaaagcaaagcactactagcaaaattcactagttgcactacacaagcacaatgcgagagaaacaactacttagctacacaagataatca

SEQ ID NO: 85956 - DNA, 355 bp, Zea Mays
cgttgatctggaaattcacggtcgcgattagaagattgcaaaccgcttcgccatgggtgctcgaccaccgttggattctgtttggacggacgaaattagaagcagagatccccttacggtcgttgattttataccgtccatcagaagatcagcggtatatgttcgatcagagcatattaaatcccgacccttggatcgggatcgggcgggtcatagcgtacaccagtttggacttatgccagatctaatccgggccgtggcttttagatccagcggctaatgctgtcccaaacccctttggccttggcaaagtgcaaacgagcccctgggtttcaccgaaatgaacccgccatcc

SEQ ID NO: 85957 - DNA, 385 bp, Zea Mays
gatagaatggtaagaggagtggaatggtgctctcagggtttttcattttgtactaatatgagagtcttacccttgactgcttttgatgtcattttgggttatgaatgacttaggcagtttagcccaatgcaatgtgactgggaccacaagatattggaattcatgcacaagggagtcatggtgaaaatcaagggggataattctcagcctcaaacttctatacaagatgtgtccgtattgcaagtgcataaatggatgaaggggcatgaggtatgggcatttgtcctgctggaagtagtggaagacaaagaggattgtgatcagaaggaggagattcaaatcttactgttggagtttgcttatctgtttgcagtaccgcaacaat

SEQ ID NO: 85958 - DNA, 941 bp, Zea Mays
atttttaacataaacaacatgtatattttgagttctaaaattcggatctaaaagatgtataaataggtcaaaccaaacgagatcagtgacagtatttggaaaggattcgatttgatgaatactccggagtcaaatgaatgcttagccgttatttatatttggaaatttagatcgggcgagaaacacaggaaacgaaccaaacgagatcggcttggatattccatactatgtcgaatctagttgaaaacacataaaccccatctgtttcgaatatggggatctagacaagacgcaaacgaatatatatatatatacacaattctagcagtatgttttggcgaaatataaacagtttggactaaggcgacttttgggatgtacattttagttttttcgcaattgcaatcaaagaaacggattaattatgaatagtgggtctcggctctaattatctcatcccgttttaattttttgcagcacttctatcgtcgagtccaaataatatttacttgggccaaaatcgcaagagtgggtcggaattccaaattcatgttctctaagcccataagttttaaacggacacaagactcgatatttcgtgaaataaatacgcgagattgatacatcatcgaaattgtgatcctttcggaatcgacgtcacacaatgttcacgtcggaatagatgttttgggcggcgacggctcgggaaaggaagatagggttttggccggctggtatttgggtcatcatttttgcgcgccaacaggcccgataaattgcacacgtttttatggcgactgacagcgcgatgctataggtatgaattaccgactaacaaagcgacactattcgcatataaatataacgactaacactcagttggaatatagacatatgccgactcaccatctgtggccatgtataccgactaacaatttgat

SEQ ID NO: 85959 - DNA, 405 bp, Zea Mays
cgccggcgtcgcctattgtatgcggcaagcgctgaagggaatgacattatagatctactacctgtgtcgacataagcatcactaacaccatattgtttttgctgaaggaacgaatgggcaaacatggctgtaccaggtgattcttgtagcgcaggtattggctggttagaggtccccggaaggttagacgagtctatttcggcttcagcatggaaaatgcgatggccatcagctgtctcaaagaccgggcaatctaaagaggttgcattttttggcccgcaagagaggcatcgcaaattaggatgggtatcggccatcgcatgcataaacaaagcagcgaatttttgaggactaaccctgtgcaaatgcactgtgcctcgggcgcttcgcttcgtggcgactcgc

SEQ ID NO: 85960 - DNA, 367 bp, Zea Mays
atattaatcaccagttcggtactggtaggaactgaattcggagctttggactgctacaggagaaaatctgaaactttatgccttcccagctgaacaccaagaccttgtctacacgggagacgtacatacaaagtttcgtttcagagccatactacccgtatcgtatcgcttcatcatttggcgcaaggtactcagatctctttccctgtttgggtaccatctgattcctgtggacgccaagatacttgaacaatggccggcttttgggctttcaaaagtgctgtgcgaggggtagggtcggggggtggcctatcctttcggctacaccgttgccgttccttttgtttcgattcctcttctcccgtaa

SEQ ID NO: 85961 - DNA, 519 bp, Zea Mays
tggtagttgatgcaaaaccttttggagctctctactttcttgactagcagcatcggtgccgagaacaaagtgcttggctgaatgatgccttgctccagcatggctgcgcactgtatctcaagcttgtccttctatagttgtgggtagcaataagggcagacgcccaccaacgatgtacctggcagcaagtggatcaagtgatcatagggacgcgcaggcgcctgtgaggctcgtcgaaaactgcacagtactattagaggaggcgagtctaacaacggttggtggtggtcaccggtgatggagcagagcaccggttgtggtgtgtcgtcgcgaggggagcctatgcccttctagaggacgcgttgatcacccctccagaataccatgtagaggacctcgaaatcccataggatgggccccaagctctagaggtagtcgatgtccaagacgaggttgaacccatctaggtggatgtcgaagcagctggtgatgaactcctaaccacacatggctacgttg

SEQ ID NO: 85962 - DNA, 534 bp, Zea Mays
tttagcagtacccgtgtatcgcgttgtttataagtttattatgtttaaatgtattaagtctcatgcgttgtaactcgttcggtcacgtcaactctagcagcgtcaatttcatattaggaacattgtttggtcgcgacacatgtttatttaattaatgaattaattatttacctgttagttattaaagtaactaatttatcattttaacttacgctttaaaaatatatgatagtgtaattaatgactacacaaatgttttaaagttaatttttgtctagtatagaggcgacaactatgtagtagtgctcgtttacgcgtcagcatgctattcgcgcgcgtagtggtgttgactcgcgcatgtcgcgcgctgttgtgcgcattgtttcgcgtacgtgcagtgcatcgtcagggtcccgacgacgtccgtttacccccctagacgacgttcgtctacctgtagacgactcccgtctaccccctgcgcgtgcgcgcgttcgcgtcgttcgcacgtatctcgcgtgtcgatgacgcggg

SEQ ID NO: 85963 - DNA, 907 bp, Zea Mays
aagatattgatgaagaggaagattacagtattttgatcccaagtaaacccagtcatctagattttgagaaatctacagtgtctaaagctgatgtacccatgatgatgaagctgggttactctggagaagctaaaaggaaacttatccgatttgccggagaggaaaccaccctagtgccgaaggatgatgaagtagttgttttcaggagttttttcagagcgagactgcggttccctctgaacgagatgataggagaggtcttgaaaaattttgaaatttatcttcatcagctgacccctaacgccaatgttaggcttagcgtcttcatctgggccctctgaagccaaggggtgagcccagatgccaaagcattctgccgagtgcatgagttgcactaccagacgaaggccagggcagatggtctgcatgaaaattttggctgctacaatttcgcgtatcgcaaggatacgaaggctctagttcttagctaccacaccaaatggccaactggctggaaaagtgaatggttttttatcaaggccgatgagaagaagagcgggaaactgatgacgatggtcatgtgcccgctggctttaagcttcggaatgaccagacctctatgcaacatgcagctaggctcagcatgccagctggccgcagtagaattcagggtggtggctgaacaaatcaacaccagggacttggtgcaagaatacctggccaacaggacatctccaacgtcaagtgattggggcatgccgaagctaaagggaacaaagaagaaatatgaacttgttcgattaccttatcgtttaagtttgagaaacaatttaaggagccttgccaagaatggctagaaatgattgaaactatgtgcaatgagattttggggaactataccaaaaag

SEQ ID NO: 85964 - DNA, 585 bp, Zea Mays
cccatcatggttcaggattcgaagaaaaggaagaagaaagtgaccacaaggcgaatcaagattccgaaggtccacgctagatcaattcctcaagcttcagaggaaatctcggtatataagtttttttatttttaggtgtatctgttatgaatttattattaattatgtgcttctgaatttctcaggctgcacccgaagccaaggtagaagttgagattgaagagcttactcccatgggagcttaagaagcaaaatttgaagaagctatatcgacttgatagcgcagaaggttaagcctttggagacacttccagagagtgatgaagaataggatgacagggagcggatagcttcagtgatgagttcattcttcaatattttcgaagaagaaactgagaaggacactattggcacgagacttttgccgaaggacccacgccacccgctgaagaaaagactagtctgaatggggcaaaacttggacagactgctacagcggtgactccttcggtagccatagcagccaaagacaagggttcctccaagcctgccctggcaaaggagaaagggaaagggcctgctgaa

SEQ ID NO: 85965 - DNA, 288 bp, Zea Mays
tgccacctctcccactcgctttaagattaagaagggtccaataaagcgagggacaactttcctttgactttaaaatcttctcatacccctgagtggtgacactttcaaatagacataatcaccctccttaaactctagcagtcttctccgggtatcagcatagcttttctgccttgactgcagttctcaaattctaatttatttgctggacttgttcttcagcctcttgtataatctcaggcccaaacaactgcctttcaccagtttgatcccaatacagtggagtcc

SEQ ID NO: 85966 - DNA, 654 bp, Zea Mays
tctcatgttgctaggttggtcatgcattgtcttcaaatttcttttgatgatggcttcttgttgaggactacaggatgtatcattgatgttctaggtccgttatttgttgctggagggcctcgatctttctttttcctcctggattaggtgttgcaactccacttggatttgagtgcagtgtcttttggttgctaggacctctttctgcttttgcaattacacatttctcatgcaatggctcctgagcagtagttgatctttattgttcaccttgagatcctcctcctatgggtaacttacgaggtcctccgcgatgatggggtgggggcattggcctctgtgtcattcatggactgaagtcataagtctcgggaacaaagacgtgaattagtcttcgatcgaatggggttggatgaatggccactgaataagttaggccaaaccttggctttgtaggggtggctctagggttgaacgaagcgtggcaaggggtctctaaattgtttgtgtggatactcccttcgggaattggattggttgatgactcttcgtggagggggaggacctcgctcttgttggttgatgatgggggctgcctccgcgtgggcttggagtttgataggcgaaagtgacttttccttttcatgcattatc

SEQ ID NO: 85967 - DNA, 344 bp, Zea Mays
ctagagtttaaggagggtgatcatgtctatttgaaggtgtcaccactccggggtatgcgaagatttaaagtcaaaggaaaattgtcccctcgctttattggacccttcttgatcttaaagcgagtgggagaagttacatatcaattggagctacctgatcatgttgcggatgtgcatgatgtcttccatgtgtcacagttgaagaagtgtctcagggtgcctgaagagcagctaccaatggaggaccttagtgttcaagatgatctgacttatgctgagtatcccatcaagattcttgatacactgactcgtgtcacaagaaataaggttataaagatgtgtaa

SEQ ID NO: 85968 - DNA, 467 bp, Zea Mays
ggaaagcacttttaatgtccattcaaaaatcttaaatacctttaagcaacaaaagctaaaatgattctaatggcttctaaatgagaaataggaacaaaggtttcctcataatatataccctttgtttggcaaaaaccttggactaccaacctatctttgttatgaactaccaacccatcttcaccgtgtttggtttttaaaacccatttggtacatatggggtcacagtgtttgtggaggtggtactaaatccaaacatggtttgtttcaaatatttcaggatcctcacgcatgttattaacccaattaggatcaataaggcatgcccaacatcttggggctcaaaagaagaaacaaatgcagaatgagcaaaatgggagatatgttgtgactcgatcaagtcactcactgatgtaggtcaccaatcatctattgtggtgggtggcacatctgaatgtgttatggtg

SEQ ID NO: 85969 - DNA, 470 bp, Zea Mays
gcaaacttgttagacctttaaatgtgttcttatccaaatcaccaaaacccacaaaagggataaatgcactttcaatctcccctttttggtgattgataaataagattttgaattctatgatatagtttcctccccctaaatatgtgcatttcagaaaataccatttttggcctcaaatgccaaaagcacatatttgggtcaaagtatggagacaacttatatcatactattcatggggtgcactgtgtcataaaataaatgctatgctcatgacatactatgcactcatcaatttcccacatcttatgttttacttatgattctcccccttttatcaattatttctcccccttttcaaaagtcttattacactagttacataagacaaaatgtaagctttaatgcacaatttctccccctttgtcataaacctccaaaagggtagaaattatgattaagcaagatctgaa

SEQ ID NO: 85970 - DNA, 549 bp, Zea Mays
cgtagttgtctgatggcgcagaggtcgacttcgaaaacttggtcacaccctagttggacttgtaatcgattttttttatattctcgatgagatctaacatgtcatggaaagttgttggggaagcttgaattgtcatagtctggacgaggtatctatgaagcacgctagagttgtcccctatacacatccatgaatcgaacatgaagatttatcctgccaggaacatgataagatccattgtgcttttaatcattcttttgccgaaatcccctatctagcgtgctagctatcggtgtttgatgactgacaagtctactgtggagttatccaaagtgagcgttgatgagcttcaatatataccaaactcgatggttaacattgagatagcggtttatgctacttggaactattgaattgtgtaataccatatgtctagttaagtgtgttgccttgtgttggattgtacggtgttgtataacagaggagacatgggtctgatgtgttcacaagcacaactatcactatccccacccaactggcgtccctgca

SEQ ID NO: 85971 - DNA, 320 bp, Zea Mays
aaaaaagacaaataacatctcacgactcacgtgttcctttgcgtgacctcatgtgaactgggcatgttaatttcttacatatgctcattctccagttcaactctggacgctggatgatagatgcttgttaatgaataatgcaatatttatttggtgctgtttaattaaaatcctgatgtattaattatgctgctgtccttctagtcattgcaaaataaagctgcgaaacaaaacgttgatttattgaacaaagttgaaagtcttataattgagtttaaacatgtaagagacgactatgacagtttactgtcttatattgc

SEQ ID NO: 85972 - DNA, 899 bp, Zea Mays
gaggaagcagaaaaggaagacaaaaagaaggtaacgcctgaatttggtgaagattggagaagaaattttataccctcgaattcagggcgttacaagtccttgacagcagcaatccataagctcacgcgatctgtggcgaccatgaagccgacattggcaatcacacgttttcctccgcaacaacaaccactgccaccgatatcttatggcatgccatgtaccagtgccctggcggcaccatgcttgccaattcatgtgttgcccatgccaccgtcgccttcccctatcccatcatacgcatagccatgggggaccccagtacaccatgtcttcaccgccaacactgattgtggcatcaggcgtagtcatccctcatggagatccactgcagccataccctcccaatcaaggagccctctctaggggtcgatgggcccctaatgtatgacaacatcgcctacatcctcctatgccaccgactgacagcaccccagcaccactagggcctggagcgaacaccagtctactaaccccgtgcttttacaagcttgagttccccatctttgacggtgtcggggatcctctcaactggctcaaccaatgcaaacaattcttttgtgggcagcgcaccctagtttcgaattgcacgtggctcgcctcataccatctcatcgtcgccgcacaaacttggtactacacgcttgagcaggatgaagggatgtcctcgtgggagcgcttttgagaattgtgctccctgtgttttgggccagcacttcgtggcaccaggatggctgagctcgcacgccttccattcacgtctacactccaaaactacgccaaccgctttaacgccatgctgtgccatgctcgtaacctctccgcgattcctgtaaaatttc

SEQ ID NO: 85973 - DNA, 629 bp, Zea Mays
tttgtaccccaatgtctgtttaaaacatttcagtttacatactcttgaccacctttgtttcttcatgatccatgagctatcgttccattcctcatatccttaatgatctcatcgtttgcatataacttccctcggtaataatttcttttacttcaaccattctgttggaaccttacctaccttacccatgattgttttctccatttcgccatttcgtgagtcttgccttaactccatcctttcctatgctctttgttattatcacctttaccctcgacacttctatatattgcattgatgttcatcttatacctaccctttaaaatcttctctcttccatctcaatctgagagttgtaacttaccgacttttcccttggtcgtatcctcttcttttcacctgtgagtttttaactctatcttttgttgtgttttgtttgttatttcctttacccttctcatcactttatcctaccttgtgattacattatgtctgttatctaaaatctccaatctcctatctcaatgtgagagcggtgttttacttacctcacccttagctatatcctcttctttaacgcatgtaagcttgggtgcaactccattctttgttgtacttatatcactggc

SEQ ID NO: 85974 - DNA, 287 bp, Zea Mays
gccctagcaaccaactagaataaccaagaagctccagcgcaagtaggaggccgcgcatgtttctattgtggggaacacaaccactgggcgaagctgtgtccgaagaaggcaactcagcagccaccagtagtcaataccccagcaagacaaggagcaccacatcaagcaccaggaggccgaggtcaggcttacaactatggaaaggtgaaccacctggaggtcgaagcaatctaggatgctcaggacgtggcagtaggtatgtttccagtcgaatcccatctagcaaa

SEQ ID NO: 85975 - DNA, 542 bp, Zea Mays
cgttcattcgatttcgtcggcattaggttcctcgttgactccaccttcgtacaaaagtttcctctcggtcggcttcctcctcggctccagttgtttgctcagatacgattttttatctttcgtcgtccgtttcgattcggtggacatctatctgtttctagatccatgctttcaatcatgctcagcatgtttttactgagattttcttgtacctgagaacctcatgcttttttggatacattgagtttcgaaaaggccactgttttacttagctcattaactaagtgtccttgttcttcagtcgattctcccaaagtttagggttttctagtttgtgagctccattacggtttaaaaggacaatttttttactttgtgcagtgatcgaacgtctcttctcctcaatttcccctaaaattttagggtttaggcttctctctaattttggcttctcgatctaatccatgatttttctcctccattttagggtgtgtctattgcttgcgtttaatttcaccgataaaacatttttcgtgctcata

SEQ ID NO: 85976 - DNA, 382 bp, Zea Mays
ggatttttgcacattatttttgagaccagaggcactgccaaatagctgcaagatatcaagagtgatggagatttcatccaccgtagggtgtaagaagagggctacatcatctgcgtaaatggagactctgtgtagctgtcttcttgctgctagctgctgcaataaacctgcctcttctgcctttataaataggtgtccaaggacatccatgaccaatatgaatagcatcggtgaaaggggatccccttgtctaagccctcttctatgctgaatttgttgtccaggaaacccattgagcatgacttgtgtggtggatgaagcaaggagaccacaaaccatgtccctccagatctgtccaaacccaaactgctgcatgacttca

SEQ ID NO: 85977 - DNA, 554 bp, Zea Mays
cttggttctgcggtgttcttgaccgatttggtggtaatcccaaattgaagttctctggtggacaattcgaggcacgagttggtgtatgggttgcttgactaccttgcggagccaatgacacactcaatttataggccctgggggcggtggcatgtgaattggagatggcgcggtggcggccgaaggagggagagttcactggcgcgtgcgattggtggcaaccatcgtggcaaggccttaggtaatagaaagacggtgtgtggcgatcaactgcgacgtggtaagatggctgacagcgtggcataaccgcgaagaacggcggcacgccggtgatggacatgcggccacgtcgccggtaagtggaggagcgacagagtggttactgtgccccaagatcatccatggtgagatcttttctctagaggattatctatgtttagctgggcgggaatcacgacgccggcatgaatccgagcgcacgatcacagacggcgagaggctgagctggcgacctgatcccttcactgtaccctcgaactcttcttcagtgcgca

SEQ ID NO: 85978 - DNA, 847 bp, Zea Mays
gccggaggggaccaagacccgcgctaatcttcggtttacctcggattctaccccagagaagtatttcccctcacttaatttctgaattgaagctctacaatcctctgcccacggtgacagcggagaaacttaaaggaacagcatgttccaagcgattcatggcgatataatgcaattggataggtcaaggagcatcacgggtacctgagaatactcaattgagggagcagaaggtgtgagctgactcgagttgcgctggccgcggtgaggcactcttcgcggtggcggaaaacagttttggggaaagtttgaaattagtgctctctggtgaacaactgtgaacgattcttggaggttggattcgcgataatctagcgcagttgccccggccttcaatttatagcgctcgcaagcggtggccggtgaattgagcgagatgagcggcggccagaggaagaaggagttcactggtgcagcggctgagtgtccagtgtcgtggcaattgctccggcgatcaacggagagcgggggtaagtcgcggcgatgcggtggaaaggggtaaacacgcggcacaaggccggaaggcggcggtcaccggcgggcttatcgggttccaccgcggtgagctttgtacggtggccggaatactttaatggccgggcttatccacggcggcgtgctccgagcgtttatctagtcatcctgagcatgacttgagacggcggcggcgcgaatcttagcgcagggaggtcgccgtcgacgagcaagccgcgctggcaacctgatccacatcggctactgtaccataagagtccctattcagtcgacctgacagagcatcttggag

SEQ ID NO: 85979 - DNA, 694 bp, Zea Mays
tttagattaactttattttttcttttttaacagaacatttgctcgtgcagtgcaggtgctgaattcagcaggcctgtgcttgttgacagatcccaaattggtacggtttccatataaacgacaaattaagcagaagataaaaccccaccaaaaattaaataatataatataattgtcgtcccaataatacaccacttgctgaggtgggtcgtgctgcatgtgcggcaactattaagtctggcaattggactagactacccttgcttaaggacgctaattactgaatgctcggttcacagcattcattttcatttcttgtgcgtgtctgccctcttcggttgtaaaatctcgatgtaaaagtggaacagttttgatgtgcctgagcgaggcttaggtgtaaataacacaactttacgggtcacggacaataaaaacaattaataagtttgtttgttttttttattcaccatagccgtgggtccgactgtcggagcttgctttcaacaatcaagctttatttggttgtatagggatcgaagaaaattaggagaaggggagttaattactttatgcccaattttaatgggcaagagatttggtttttttttcaatctcttttaatccatttctagttgaataagtcctcattgggatgggaggtccaaagctaacagggtacgcaactctagtgcac

SEQ ID NO: 85980 - DNA, 369 bp, Zea Mays
gtttatttcacttgtgttaactagttaagtgactcacattagagtgaataagctctagattagtataagttgtgtgtgttatgtcaaattttagttgggtgactttgttttaggtagggcttggaaaaacaatgacgtatatcattgaaaatatgtaggtcaagctggtagattagattttttatatagatagattaggaaatttatcaagaatgtgcaggtcgatggtatatggccgagtttgccgagttgatctaagtcaccaatttaggcttgagtgaattagaagtatggccttatcctttgtaccagcattaagtaactcacactagatgagatcatactaggttagataggtctactttcttc

SEQ ID NO: 85981 - DNA, 609 bp, Zea Mays
ctggctctgtgcagcttcggctttggttagttttgtctcagtctgcgtttttaaagcttcaacagtttttcctggagtagagcttgaagtttttatcgtctctagcacatctagtacgttgaccatccttttcctcttggggtcgctgtaagacctttttgtgcctccgacactatcacttctgccgaagggcttgtaatttctgatatctttgtttctttgacccctatattatcagcctttggctcagctaatttggctgaggatgtcttcggcattgcagccggatcttcaatcttctgtgtaggcgcaggttcctcggcttcagtagccaaagaggtctcatcgccaaattcgggcactacgaccggttcaatatatcgcggccggtgagtaagaaccttcacctttttcctcttcggcgcgggctcgcttggagcagctgaagcagcatccttcccggaagttgcactctttctcttctgcccccgtggcgggtagcggtaatcagggtacatgaaccccaatagcatcaaaaactctatttagtcttttcttctttcggcttccgaaggccgcagataacgcattatcttctgctttggagta

SEQ ID NO: 85982 - DNA, 415 bp, Zea Mays
ggaactcaaaacactctcaagctcgactgtagttacctcagagggctccggccacagcgagatgtctcgtggcagcgcggatgaccgatttgggggaaattccaaggggaggagtgatgcgctgggcgcgtaacaaaaaggcggagtagggagggccttcaatttatactgatcactcgtgtgcttcgtgaatttgggatgagaatgtttatgtggcattcagatctctttcaccatagcaggcgtcgtggcaaactacgatgcgatggcatgactaactatctacggtcacgagagtacgacacaagcgcatggacaccacgtagtagagaggcacagtgagggacagctcggccgctagtgacaccatggcctgaaacacttaaggaagtgcagcacgccggtccgatctttt

SEQ ID NO: 85983 - DNA, 666 bp, Zea Mays
aggcaagaagccgtaacaaccaaaattattaagatattgttctttaccagtagccttcgtctcataggacagctcatgcatgttacagaagcattttgcagtcggctctaaaccctggcttctcatggcccaaatgaaaatccccattctaatgatagcttcgagggtaatctgatgaaggtaaatttcaaaggtcttcaacacttcaactaaaaatttgtccaaggggaatcgaagccctgctttcataaaactgctgtagacaacaacttcgtctgcttcgggcacaggggcattgctatctcctccagccctcatgatagaaatatcgtggaagtatcttcctttcattgcatcgatttgactttgtttgatggttcatttcccgaagatggtatgactctgccgccagggccgatcttcagcaccttcatttccactttataagtcaaaactttcactatcgtcagaatcttcatataacccagccagcatctcattggtaatcttctctgtatttgtgttctccatagcttcataaaacccggccaatgcagggtcagcaatctccttctcttcagccatttagataatggttgcacgattgccgaagcttaaaatttaatcaaaactccgcagagcaagaaaattcagaatgccaaaaat

SEQ ID NO: 85984 - DNA, 378 bp, Zea Mays
aagtcaccggcttttcaatatggagatcattcaataaagcaccaatgtataaagactgttttggattgtatctttctcggccatgaccatttgatcaatggatcaaaatgaacagaatggaggtgcccccagcctggatagacaaagggactataaatgtaccatggattcatcgtcgtgccattccacatttgagtagggcaatataccgacgatgaataaatggttggaaagtaccctggtctcataggatgaacaagcgatgcctgtcgcgtctccttttgggctgttttgttcggccgtttcgttttagcaggtgaccggggtttcttcattgaccgatcacgtggaacagtctttttgctagcatttttggag

SEQ ID NO: 85985 - DNA, 1805 bp, Zea Mays
aagttttggactgtggtttctatagaataagtgaagaccatatattggtgaacaaatctccttaagtaggtttggcttggtgctacacaaatttgggagaaatgttggtccaaagaggggttgtcaggcaagagagcgctacatattgttcagtaatccagactaaatttcagtcatgttggactaactttgaagtttatttgggactgttcggtgtagctaggagctataccttgtatggcaaagttgaagaccattgttaggttcctatgtcctctatagggagataatattggtgctatgtagagttgagctaaatacacctaaactttcttagtcaggtccatttggtgctgaactatgttcagtttagcgaggcagtgattttgggttaactttggaataggatagctcttgatttgtgaactcttggcttggggttactgtgtcaaggttgaagaggtgagcaggtttggtgaattatggtcaacctgttagcattggaagttaggtgtttgagaggagtcattagggagggttcagtcgagttatttgtttcagggattgatcagactctgaaaaagatcttcacccatgccgtgctccacttgtgctgctctagctcgaattgaggataagaacgggggcacgaggggtactaggggtgaggagtttgacgtggctgacgcctgagtcgtgagcagcatgtgagttatccacgccggtgactcacctggttgtttatttctggtttgctcgtcactgatcctgcctacatggcttcggcctaatatcgagcgtgcgtggtacatatgcatggacgccatgtaaacatgtcctagcagctgctaacaacgtaccaccccaatcctcccagatctagcctcaccttgagctgtgtctggcactgtctttagctcagtgtcgctgctgccttcgggtttagcaaaattcaccgtgcccgcgagttcatcacccaaattgataacacactatgcttcgccaccctcttgcgcttgtgtaaccacaacccagccgcatgtcttcacccgagccccctgagaggcgtcttgccctactgttcatcgccgcgctatccaatttccgcctcatcgtggctaggtttgtttgacattgttcgatgcctctaatcccgtgttccagtctcccgtgggtgtaatgtagctcatgcatctgcctgtttaaactctactactctaggtcatccagaacgtggccacgacgtcgtcactcatcttcatgggtcgcctcatcgtcagccggtctatccccgctttctccagtctgatctgcgtaagcgtcatggtgtgggtgagttgctggtgcttatatgccttaaatttgagctctggtgtgccctcgcattagattcgagctcgccggacatcgagtttcgctgtggccatggccatccggggttctatggtgtttttgtgcgttgttgggtaccgacgtgttcgccgagcgttggggagcacaatggtgctcttacccaggatggagaaggctccggcagggacagttgttgactcgccggcgttcggttcgtccggagtcgtggatgaagcattgtaaataggaggagaagaaagggtttaagtgagaacgtcagccactcagtgaaacagtggatcaggcttagattcattttggcgttgtggcaggggactttgcgcaaaaaaagtaggtgctagcgcgcgtgtagccagccatgggccggctttgtcctcttgcgtggccgagtggcgagattgggcctgatattgttcccagttttggttttt

SEQ ID NO: 85986 - DNA, 575 bp, Zea Mays
aattgctcgtcggagctctgctcccccgtagatccgtgtcggtgcatgggcgcacattatcttcacttcgactccggtaagaatcctacttacgcgttcgtaatgatctctgccttgttttcgggtcgaaggggggtctcattagtgtgccagggtacgaaattggctcatcccgtcaatagcgccgccgggggagcttcattccaccgccggagtctgacgggctggggcaaacagatcgcgggcgtcgatttgtagatggacggttgtcatcattaaggcgtgtaccgattcatggtaaggttttgtgtccgatggatgtcaatcggatggtctagattggatcaggcatattttaaatcataacccttggtcattgatccgatagaccggatcgcgtaccgcttcgtgatatgatagatctaatcgtgtccgttggatttagatctgacggccagaatggcgctataccccttcgcgggacagattttcacatgagaccttctgtttttaggaaatgaacctgcagtccgtagttactgtggattgagtctaggaaatattgcgcagaggcc

SEQ ID NO: 85987 - DNA, 450 bp, Zea Mays
gaatgaattcttctggtgatggttcgaggctatgtccctgagaatgtttggctagcgcttgcagagttgagctatttcttccaccagctttgtgcaaaagagttatctcagagcgtgattgcagacttggaaagaatgacactcatgttactgtgtaagttagagaagatctttccacccagcttcttcaatccgatgcagcatttgattcttcatcacccgtatgaggcacgaatggggtgcccgtgcagggacattggtgctatccaccaagaccctaacacataaagagtggaaccatatcatgctatatgtattgaccaaccttgaagaggtgacatcatacatagagcaatttcttcatgaattctagcatcgatcaagggacctaactccacaggaatatgatactgtacatagatggattgcccaatttcatttcctggttca

SEQ ID NO: 85988 - DNA, 531 bp, Zea Mays
actcgatggataattatctccaattatttgtccatactcgtacactaccatccctaatctgatggacagtctcgaggcgtgttcgtggtttctccagtgtatatcgtggggagctcctttaggactctgaagccaggttgttactccatctcccacgaatggtccaagccccagtggcagctagccacacaaatacaatatcatgcccttactccttgtcctggatctacggccgggggcccacaaccccagtttagggcaccattgctaggggcgggaccatcaaaccccgagttaccctttggcaccatcttctgttaggtcgaatggccctaaaactttcgtcttcaccttcttgagaaatacaaccggaccatcaaccctatcaaatttctccaaatctatgctactgttatccttgccgccaacagtgatgaggaggtaatgacaaattactttcaggtagccttgatcggctcgacttggtcatggctcatgaatctcctagaagtcttgttcggctctttgaag

SEQ ID NO: 85989 - DNA, 415 bp, Zea Mays
cttgagaaagataaaataatgttttccttagtggacatgctaaaggctagcgaagtcaatcttagtgctcaaaccgaaacccacgaagctgaagtcgaaggtttaaagaaaaagcttgtagaaatgaatgaaaatttcgaggttgtaaaggcgaagcaggaaataagtgaaatggaaagatcaagggtgcaaaagaatgttgaagagcttcgggattccaaggagagatgctacgaaacatccttggaatgcgcgaaaaagttgaaaatagctttgcaaaggtgggagcatactcttcagaacaaaaaattattcgtggtgatcccaaaggagttattcagtggatcagcaaagaggctgaagcttttgatgaaatactcagcgatcgtggggatttctgcgctttcgccggtgc

SEQ ID NO: 85990 - DNA, 1043 bp, Zea Mays
ataataggagctattttacctctcaaacattcatggaattctgctcaaaaaatgggattatagtgaactttgctttagttgttcatccctaaagtaatgtctaggtgaagagggtaatggcctcattcttaaagttttgaagcccgagatttttgattgtctacatccttacacagggagatgggttgaagaactgctagcagcactctaggggctccagacgtcgtcgagttctactatggggcagacctcattttttctagtgtatatatatgaggccatgcttccatccaagatagaacatcagcccttcatagttccaaacttcacagaagatcgatcccaagaaagtcgggttactgatatgataagcttgaagaagcaagagactcaacgattgtgcaaccaactaggtaccaacaggacatgagaaaatatcattctaggaatattcgggatcgaagctttgttgtggggaacttggtgttatgaaagactcaaagaataaaagaaaaacacaagttgtcgaccctttgggaaggcccctatatcatctcagaagtgctccagttaggtgcttattggctctagaaggaagatggtactattattactaaccccctggaatatcaagcatttacgccgtttttatgtgtaacctccttttttggtaacaaaattctctagacgtctcggtgttcgcatcgcgttcaaagatgtttttaccatttcattttattacattttacatatttttcattgactttttgttaatcactaatcacttcttgaaaattttattgaaggacaaaatatggctaagtccctcaactctatcggatctggtcatcactcaaatgtactaagcattggtcttgttagaaacaactgtatgacttggcttaagaagagatggaacctccacctagtgttgcagagtaaggctcggctctgctatcgcctagtgccaagcctcgaaggatcctccatcgtactctcatcacactttgatagtcatcctaatggtattgaggggactcgag

SEQ ID NO: 85991 - DNA, 554 bp, Zea Mays
attttaagtctgaattttcccaaactatcttactccgggaccaaataattatgaaattgactctactttgaaacaaatagaagatataatgcaatactttgagacatatagaactgaggggttttcgtctagcttgatcattgccaaaggtattggagataaaatgggtgtggaggcttcatttcctgtaaagcgtcgtgcaataagaaagaaagaatttgatgaaagtaattgtcaagaggaaattcttgaagctgagagggcttttgaagtgaaatattttttggttatggttgacatggcgatcacttctttgaagaccagatttgaagaactcatgatatttaaagatatatttggatttttactgagctcaaacaccctgaagttgttaaatgataatgaacttgaagagtgttgcattaaatttgctaagactttctcccatgatggttcatctaatgttgaggtacatgatcttatttctgaattgaagattatgaaattcactttgccagatggagtattgtctgctaaagagatttttgagcatg

SEQ ID NO: 85992 - DNA, 579 bp, Zea Mays
tggcatgacattttgccttctccttagacaaatacattgttgttagcttatggattaccaatatcaagtagagtagcttcgatttgggtttagggtcgcatgacttggtggttgtgtacttcaatctgttattaatagatcatgaagtcaagatttgttgcaagaaccaaaaaatgctctctgtcacctagccattcccagaaaagaaagggcaaactccctggttggcattgtatatatttgcagtagggtgaactttcagggtcatgcatatacacataggaatgacctatgttaacttggaattgttcaagaaatatgtcatcgaaagcaatgtcttagcatgtatgatgtactttttatcacagaatggttgtggtatggaccaatgaaatgcatttatgcctttggctaattttttaagctcacatttttcatttattccatttgtttgtatactcatgtgaggcgatgtaaaaggcatgggcacaatttcaccgaccacgacaacgagtaggagatcgccgacatggggttgttgcagaatggcgaccacctcgacatgcaactcaaaggtat

SEQ ID NO: 85993 - DNA, 642 bp, Zea Mays
ggtgcattaccatccgggcaaggccaatgttgtggcagatgccttgagcaggaaggcccaatgcaattgtatgaacatggatgcgagagttaccaccctgtgtgatgagttgtgcaaattgagcctggaagttgtttcttctggtgacctaaactatatctcggtggagcccacattgcaagagcaaatagtcagggcacagattgaagacaagggtgttcaggtgatcaaagaaatgatcaagcaaaaagcagaaaaatacaagtgcttccgtcaggacagcaagggaattttatggtttggagatcgattggttgttcccaaggaccttgagctcagaaagaagatattggatgaagctcacctttccaaattctccatgcaccctggtagcaacaaaatgtaccatgatctcagatccttatactggtggaccagaatgaagagggaaattgccaagtacatatccgagtgtgacacctgccagaggatcaaagctagtcatttgaaggcagcaggccctttgcaaccccttcccataccatcttggaaatgggaggacatttgcatggactttatcgtgggattgcccaatacctccaggcaccatgattccatttgggttattgtggacagattgac

SEQ ID NO: 85994 - DNA, 1945 bp, Zea Mays
taaagggaaaaatgttagatgtgtcctcagacccaaccaagtgatcgagtcaagatcaacgcaccctaggcgtaaaccctctccatagttgtgccccgagtcacagtcatacaaacgaggcatagaccctaagcatcataatcatcctatcagtcttgagttcgatctctttacatgtaaacaagaggcatcctcacaagcgtgtcaaaactgtttgtcaggtatgagttccacttttctccagactagttgatcaatctgatgcccctcctgaaaagctatcaccatgcctaggctaatgaaatatgttaggctgtacacaatggtttgaagaaacaacagctcctactttcagttatcatccagtataatcagtgaaggtaactaaaacaaggagtttgcatcatcatcaccaataatccctgcacgagcaaactccattcctgaagtggtgaaatctgttcacgtccctcacaacaatctcccgatctgtgaatttggagatgaacttggtgactgaatgacagtcctcacaaagcctgagattctttgtgatcctgatagcctctccactgccagtcttgataagcccgaaagcaacagccaacttctcactgtggccaagcaaaatcctctccttctcctcttcttcaatatcatacagaactgatctcgtgtcaggaacatagccctcatttttcatctgtgtcacaaattcaccaatcaatgcttgcagctcctccacctgtgggttcttgttgtcaactgaaacaaatgagtacagcttcttcttcacctctatccagctacagccaggcaccttctccagtgcatgctcctcaagtaactcctttagtacatcaacttggttctgcaatttagctcgggcataaatatctgccaagaggacatagtttccagcatttcggggctcaagatcaaagagatgagagcatgccatctcagcatactcaacatggccatgaattctgcaagcgccaagaagcgagccccaaacttgagggcttggttgaatacgcatgctctgtatcagctccacagcttcatccaggcgcccagcacgaccaagaaggtcaaccatgcaagcatagtgctcagcacgaggtgtgacattgtactccaccattgattcaaatagcttctttccctgctccacaagtccaacatgactacaagccccaaggacgctgacaaatgtgatgatatttggtgaaatgccttcctcaatcatctcctcaaacacctggagtgactcacgaccaaagccatgcattccatatccagatataagtgaattccacgacacgacattccttctgcgtcctatccagttgaagatgtagcgcccggtctcaaggcacccacatttcatgtacattgccatcaacgcattcagcactgaaacaagtaagtcaaaacccctccgaaggatatatgcatgcagtactttgccctgaccaagtgcatttaccccagcacaggcatgcaagacgctgacaattgtgatcgagtttggtaccaggtctgcatcagaggccatcatctcctgaaagatctgaattgcatcaccaggacgctcgttcttggcatagcacccaatcatagcactccatgacacaagattcctatcaggcattgaagtgaacacacgctcagcatagctgacaatcccaagcttcgcgtagcagtcaataagagttgtggcaacatgcgtgtgtaatccatagccgcggcggatggcatgagcatgcatctcccgtacacgggcagaggccggcaggtgcgacgctgacgctgcaatgcaggccttaagaccgtgcgcgtagctgtagctgtcgacggggacaccgagccggcccatgtcagcaaggcacgtgagagcctcctctccatggtcggcgagcgcgagcgccttgagcatcgc

SEQ ID NO: 85995 - DNA, 504 bp, Zea Mays
tgggattcgaaggatggagaggttgaggcggcagtagaagggaggttgcggcggcaggtgctaaaaccctaggtggagccaacaatacggtttgccctgcccctgctttaggaaaaataggaacgggtggtatgatgtgagacttaaccctttggtttagatcccgtttcgttggagctgaatatagtgattaaatgtctaaagcatagtctcgagcctgccatgttatgaatcatgaaatgacaataaaacataagcaaaagcatagcctcggagtttgggggcgccgctgggggcactgaagacgacagatcttgcctctcagcctcggcgatgggcgtcggacgcaggagatggcattaaccaccgctatattaataaaacgtattgtatagatgtgcaatacgaatataaagagaaatatccgtggcattaaccaccgcttatcaggttgcttataccgtacaaagagacgatattataactataaatatactgttaatg

SEQ ID NO: 85996 - DNA, 461 bp, Zea Mays
attggctgcatacagtaaagaggaagctggaggcaaccgggtgccctgaagatcaacgtgttcagctggctgtccaccaactctctgggatggccctatcctggtgggacaccttcagcgctgccgtagggaatgcctcatgggcaggattcaaagctgcattccgtgagcatcatgtgcccgtagggatcgtctagctcaagaaagaggaattccacgaactgacccaaggagggcgaactgtcagtgagtacatccacaagttcactgagttagcctgttatgcaccggaggatgtgaacacggaggtcaagaagatggcccatttcctaaaagggctaaggccagaactcaagactatccttgccagccaagactttcgcagtttctcccacctgtcaaacaaagccattcaagtggtaagagactgggaagaagaaagaagtcacctcaagaggaag

SEQ ID NO: 85997 - DNA, 920 bp, Zea Mays
agttgaaaatagaagtcgtttcctccggtgccttgagttatatctcagtggagcccactttacaagaacaaatagtcatggcacagattggtgacaagggtgttcaggttatcaaggaaatgatcgagcagaaagtagaaaaatacaaatgcttccgtcaggacagcaaaggaattctatggtttggagaccgactggttgtccccaagaaccctaagctcagaaagaagatattggatgaagctcacctttcaaaattctccatgcaccctggcagtaataagatgtatcatgacctcagatccttatactggtggaccagaatgaagagggaaattgctaagtatatatccgaatgcgacacctgccggagagtcaaggcaagtcatttgaaggtagcaggtaccttgcagcccctccccataccatcttggaaatgggagggtatttgcatggattttatcatgggattgcccaatacctcccgacaccatgattctatttgggtcattgtgtataggttgaccaagaccgctcatttcttgccagtgcataccacccacaagttagagaaatatgcagaaatctatgttgatcaaatagtgcatttgcatggcattccgaagaccattgtatctgacagaggagcactatttgtggcacgcttttgggagcagctacaagaatcacttgggacccatgcaataagaagctcaacataccatccacagacagatggtcagacagaaagagtgaatcaaatcctcgaagacatgttgcgagcttgtgtgctacactatggtaaaaattgggacaagtgtctttctttggcagtgttctcctataataacagctaccagtccagtctaaagatggctccttttgaggccttatatgggagaaggtgtaggacaccgctc

SEQ ID NO: 85998 - DNA, 388 bp, Zea Mays
ctagcacaatgatattacacacattgctaggaatttcatcatcaagataaacctctttgtgaggcaaatcaccatcagggtgagttcatcggaggataattattacaaaccacgtgaatatgcaatcagaacatatgctttgactaaggccaatggatcatattcacaggcgtccccgagaatagatcaaatgccaataagtcaaatgtggatatgatattaatcccggttatatacacatctacatcaggtagaagcattcaaaccaatatggttactcctcaacgatttctagcaaactccatatacacaggagcacacaccgaacgacaggttcagtttggcttttgtgcgtttaatagaatattaaggcattacattatatggg

SEQ ID NO: 85999 - DNA, 433 bp, Zea Mays
aggagaaaacaattaggaaatttgaaatgaaaaaaaaactcaaaacactcaagcacacacgtattcgtttgaaaaggaaaagaaataaaaaaaggtggaatcgctcgtccactggtcgttcggcctaagactaaccggtagtcgttcttcatatcactagcatgcaggcccacctgtcactccctcatatccctctctctcatttgcatgccggaccctcatatgttatctaaaatctctcccagcggacgcatgccgctcggcttctagtgcaccgctgcggcaaccattctttgaacgtcgcttgcgctgcttgcacaacaccgccaacgcctcctcgactgccgacgactctccctctccccgcccgcaatcacatggccaacagcttcttccccggccattgatggtgccgaacttaatgctttttttc

SEQ ID NO: 86000 - DNA, 731 bp, Zea Mays
caaaaatcgcctacccgccctgtgttgtatatggtgcactcgtatgcgatatgcgtgtaagcgtgttgcatagctgggcttggacaggcccactagggggccaacagactggatcactggacatcgtatttgtgtgtgagtgtgttagtgttataggctcacaagcaagtcacaacgttgtactcctatacgccaaggcgccaagccaaacgaacattgtgtcctgacctaaacctaacctagcgcaaccgctgacatagtgacacgtcgccgtaaaatggaggctgagcatccgacgagcaatgaagtctgagtaggttgtcggcagtctccatctcttggaggggagcactaacgagcaatggagatcgagcagccacacatccaagtctaggtctgcactctgcctacgccctatgcttcgactttcgcagtgttgtcagctctagcctgcgaggttgctatgcatgcagaaccggatacagggattcccagggggagaaaatccctgctcgagaatatatggggacggggagaatcctccctcgtaactcttcatggagacggggacgaggatttttctcctccgcgtgaacgagtatgggggctcgacccccgacggggaatttcccattgccatctctagttgtacatggttgtgaacgattcatcgtgacaaagaggagaagaatgagctcgtagtgagcactcaattcttgcgatggttaagg

SEQ ID NO: 86001 - DNA, 583 bp, Zea Mays
ggccctttcatcgtcaagacgaaggcgtcccccagcgcgtacaggctcgcaacgccatccggcgaggacttggagcattcctggaacattgataatctccgcaatttttttgtttgactcctcagggccagctcacccttgtaattcgcaaaacaattttattctggcccgcactcttttcctcccggggggtgaggtttttaatgaggcggagccatgtaatatacaagcgaaaaatcccccgcaaaaatctacgtcgaaaaaagaccgcatcgacggtcttcgacattcgaccaatacaaagtcaccgcgaggggcagcgctagctaccctcgcgtgcgacaatccgcgcaaaagtcgcctaagggtgcagccggactagcacaacaactgcgcaaaatcgaagtcttcctcaaaagactatccgtgcaaaagtcgcctaagggtgaagccagactagcacagcctcattatacaaactttagttacatatgtacagcgagggcatcacaccttacattggttcaaccttcggaatgattcccatctccctatagttaaatagcattatcctaagctcctc

SEQ ID NO: 86002 - DNA, 777 bp, Zea Mays
agcagcaaacaagggcttctcggtctctctgcaccaattcagtccaaatatctattccataacctgaatccatccgtctgcctccaaaggtttttccaccttaacgaagataggtcgacgagtttctaaaaattccatgtacgtagtgtctttgggggcttggtgttgacctctgccaccccactgatgaatttgattcctagccatttctcgaagaaaacgagtgtgatcagcagtggcattaattaaggcagtgatagcctctaccgacgtgggaggtataggcggcgggttcggagtttcctccccaccacgggaagttctagctccatcttgagcacgagttctggatgacatctaaagaagaaaacatacttgattattacatgccacgattacacaacctctgttacattattccaaacttgttctaattatacatactcaacttatacaactattttttccttatttagattacataaggaaacaacctactactgtactaatctagacatccatgtccttgactgctcccgctccactgctagcttcaggagaacgatcatccacgatgttcatgcaaggaggagctccaaagagatccaactccccataaggtcctccaccagctgctcctgatgcaccagctcccattgccgcaacctccggtggcacgttaggatgcaactggtcatacaacacgtgcacttcttcgtccagagtatttttatactcttgcagattttctagggctacacttagctcttccacccg

SEQ ID NO: 86003 - DNA, 412 bp, Zea Mays
ctattgtatatttgtttgatgacataattaaaatatttgcaatgtctttatagttttggtcagatttgagatgcttctgactctccaataataattggaccgagttattatacttggtaaaaggaaggagtacaacgattggctgtaaaccttttccccacagctagcactcaacccacactccatcccactgatgaatcctgcccaccttgctgcagcaagagagagatgccagtatgccacgagcctgtggctggcaaaacaggagccagcagagggtgtaaaaacgacacatcaaaagcagtctggttctgcttgtctttcgccggctgcaccttcaagagtggcttgccatcagtgcaacttgccacccggctcaggaggtttctgtgttgggtatccttcgtcatcg

SEQ ID NO: 86004 - DNA, 323 bp, Zea Mays
tgacgatgtgggagtgttggaaagagcgttatgaaatgaccatatattgagattagcctaatgatgcaaatgttaacttattagcgctctatatatattgtcatcacttttggtagccgacaccgttagattgtgtggttaaattagcgtcatgattcatgctttgtgttagcacgtataggtatcctaactggacgatgcaaatgataatgcacgtcatgatatatatgaatgttattaagcatgcagcatggtgcgtgatgacatgagaccaccacccgacctcttaatataaaagccttaattaaagagctagcaaccgg

SEQ ID NO: 86005 - DNA, 879 bp, Zea Mays
ggaaaatagagccttccaaaaacagctagtgaaaactttgtctctgtcagaaaccagtgatctgggtgtgccatgcagtttaaccacattatccaaaaacacttgggccacctttgctgcagaggaaggatgtttgaggggaggggggggggaatgagcatatttagaaaatctgtccaccaccactagaatagtgtcaaacccttctgatttgggcagtccttcaataaaacccattgtgagatcttgccaggcaccttgaggtataggtaaaggctgaataatacctggtggatgaaccctctccactttagcttgctgacatactgcacactgtttaataaagcacaccacatcagccttcaaacccttccaccagaatagccttctcactctgtggtatgtggcctggcctcctgaatgacccccacaacactgttatgtagggcatctataatttttgttctcagattagagttgcttgccacccaaacctgatcacccttcctgatcactctctgctgcaaggagaaacccttttcatctggactatgcactgctaactgagccaatagcacttgtgcttcttcatctgtaacataagaattaatcatctcttgattccacataggcttcacttcaacaactgactgcaaagccattaggtgtcccactctggataaagcatctgcagcctggttttgtttacccttcttatactcaattctgaactgcaaatccatcatctttgccatggccttcctttgcagtcaggggcggagctacctagaaactagggggtgcacatgcacccgcgaaaatttggaaatatagtggtttggaccaaattttcaccatatatgcaccacctataaattg

SEQ ID NO: 86006 - DNA, 705 bp, Zea Mays
gctacaaaaaagaaaccggactccttttcaacttatgattttctcggtcttttagctaagataaactgtaatctcggtttttatctaatatgtggataataagttcactttaatattaaatttatttttatgggtatcaaatataattatgtgtcgtcgtatcgtatggatattgtattagtacatacaaattgatgcatgaatttagtctccaactaaaaaaacagctcgtccagagcgactttgaaaaactgaccaaagccgtcatcaaaccggcctcagccggttgttacagatttcaactgaactccctaagaaataaattcaaacaagctccaaaaaatttgatattttgcagagaggttataaatcattggattctctaaatacattggattctatcatctacattcagaaacattgccggctacaaagacaaaacggatcaatttcctggggacgactcctatctaaaatatttttttttgtccaaaactgcaaatcaaaatgcatccgagggctcaattctcttgtttctaacaataaaaacaacaaaaggaaaaagaaggaagaatggcagaacgtctccacggagatcacacggcgttggggccggtggggatgggctggtacccatcgtggcgatcggcagacgacgagtcgtcgctgccggaacccacggggatgagcttcaggacggcaccg

SEQ ID NO: 86007 - DNA, 347 bp, Zea Mays
atccgaagcgttttcatttatgtttggttagtgtagacacgatatcgattagcgctgcggcaataccgtgttcgttctaaattaattgttcagtcgcatcgattttgtattagtaatgtatttcatcatgtcccaagtctatattatttaattagctattcattcgatacttattaaaatgaccttctaattaaaactgttttatagttttaactcacactattataaataaacgttaattaacttgatcaatatcagcttaaatacttttaactaattatttgtttgttgttgttcgcgcgcggcatcgtttgcgcgtcattgtgctattcgcgcgcgtagtcgcg

SEQ ID NO: 86008 - DNA, 632 bp, Zea Mays
ctgactttagggctctgtagatccaaaaatattgagaatttgcctagggtcaacacatcaaacctgttgagctatcataggagaacaaatttacttaagtgactaagcactagtgctgaacaaaaattggagaaaaatgtgtctaaagtttaactgtcagactgtcttaagtctgaattcagactgacagtgtgtttgagccatctttgagcttggatttgaccataatccagtcagtaattggctatggttgctatagtaagatcgtagctggatcgttaggctacaactttgctacagaacgatggccttgttgccatgtaaaatcaggagaaaatccagctcaaacttgatctgtcaggctgactgaatagagattccaatggtacagtgccctgaacaagatcgctggtgcagcgcaccttaccgccggcgaccgtgcgcctagatccatgccgtcgttgcgattcatgctcaccggtgaccggagaactctcctaggtaaaaagatcttcgcttggggataactccggtggctggccgtcgtacccccttgccttgcggccggtacagataagctcaccggcgttggctgcctgccaatcatatgccacatgcccgggcatcttacc

SEQ ID NO: 86009 - DNA, 589 bp, Zea Mays
ccagcaatcgcggaagtgggcgaactggccatgcgattccgccgcgcttgccgtgatcgttgcgccaacaggcgaaggccatagataaaacccttcagcacctccacgaccgcgagtcttgaagccccacaccctccttggaccagtcgtccctctccttcactgtgagaaccacaccgcacgtgacaccgttgtccgctgtcattgacctgtgcctacaccgacgattgaaggctagtgtggtgtcgggatcgttcattggcgtgcgtgggtcgctggtgtgaagtattgaattcggtgccccgtccaatcgtccgcgatttctcgctgtcgacggtgatctgccgtgcgtcgcgaacacctctgctcggtacttaaccctcggtaataagtctatctccgttcatattatctctttcacactatgtagctaggccgaatttgggaaacgggtgcgaccgtgcagggattgactccgctggacatggccaccgtcgtgcgggggtaatactgtcggtctttgtcggggtgggggagtgtcgatcgctcggccattggatggcaagcgaatgtctgtgattggtttgtg

SEQ ID NO: 86010 - DNA, 830 bp, Zea Mays
gtggcctggtccgccgtcttcctggggccccctttgagcggccgcgctgcaaggcatcaccatccgagtgggccatgtcagtcagtcagtcccactgtctccgtcagcagcagcgaagcagagcaggcacacaagaacatcgcagtcaacgcaaggcggcaagtgctatctactgccagtacaaacgtgaatgcttcacaaatgatttctacctaacaataatcaaacaaaataatgccacggccgtggtataaagaagctaattatgcaaaaagtagttatatcttttaaacacaatgactagtgtcaagtgtggtggctcacacttgagacatgtgggagtggcaacatggctagatcgtgctgttcaagtgatgaagtcgtactgtactggacggcaacatgcagaaggaccgaatcgaccggtgtgtcgtagtgatggcggcgaggacatgcatcaaaggccaactttaatttagccgtaattgcctgggaaatgttaatttacttcttgtgtgaaggaggaagcttagcagatgcgcttggcgacgctaatctctgtagacgtggcagcagagatgcgtgctgctggtgttggatgcggatggctcgctgcctgcgccgttgctttcacctctctaccagcacgaaacacgtctcttctatccatgaatcggatgccatgacaacttcttctgcttctttgtctattcatatataacattttttatataaaaatagaattgaaactgcagcaactcctaatattcttttcttttggcaaaacaactcctaatatttgggttggttggatggtcctaatagggcag

SEQ ID NO: 86011 - DNA, 2298 bp, Zea Mays
gcggcagagccagccatattttcttcccagaggcagagcactcctatagatggagctggcttctgggaggcagagcactcctacagatgaagccttgtgatcccgggaggcagagcactccttcagatggatcacaacttatgcactaagcaaatagaaattttacagcataacagtatacttacaacaaggacacgtatgattatgcaagggttcctatacttcaacactactttacttctaccttgcccttgaatgtgtgtggatgggagtgggatggtatgtcatggcaagaggggggcacatccttatataggcacctaggagctatggatgagtgacacctcaccatgcatatgtcatctaccactttaatggggggacacttcaccatgcatgtgtcacctccacctttcatggggggacacttcaccatgcatgtgtcatttaccactttaatgggggaacacttcaccatgcatgtgtcacatccaccttacatgggggacacttcaccatgacacatcaccataattctagagaggtccaaaaatatataggcttcgtgacttaccatgattagtgtagggaattctagaaggctatgtacatcatggttatccatggttgttcctagaaagttgtcttgcttatgattaaggtttatcatgaatattgtataatcttctagaaacttggttattcttattatatgataattgtttaagcgaggttttccttgcatattttcaatgggcaaatgatggccatgggaaaagctgtcttaattgatgctaaggtcataacttctatagtttaagaatgacttcggggggaggaagaggtcaaagatcatggcatgctcacctatggctcaaatcgacggtgagggcttgtcctctggtttgaagagtaaggcacgcgttgttcggatgtgagggtgacaatgagatggtggctggactgtgaggttctgcggcaagggcatcgatatttataggcagaggaacgacagtttataatggagggagtctcgaccggcgtactgtgattggcgacgttgccacagtgcagtcgcaacatcccgaggttggtagggtaacttggctcatggtggggcattcatttagttgtgattatgacaagtgactggcgtgtgctcagacgggtgcacgaggtcttgtcgtagtgactttctgcactgaggtatcacttcaaggtctgcaacccggccctttaatatagcagtttggcgtgcatgacaaggctgtctcagggcagagggtgtaggtggggcttgccaggacgcacaaatgccaaggcagctagaggcaggcttatgatttatttacgcatgtgttttgccataggtggttgtgggctccctctgtctattgtgggcgagcattatacattttcaagaatttacctcggtgaaagacaagcttagcctataatttagaaggatatcgaggaataacccatagaggcattggtttgcatagctatcaataattctgaacaagttttattccatagttgaaaattgggatgttacatgatgtccccatcatcctaccttccttgataaaagtcatctttgacttaggtacatcttcttgtctaatggatggcatcaattgtagctctggaagtaaatcattggcttagcacccaatcccttgtaaaggtggcagccatgatggtatcccaccaaggaatacattctagttctcttgcaaaaggttggtaccgtcaatagacatagatataggagtgggttcgattgagtatttagtagatttagtatcaatttcaacatgaacattaattttagcaaggatatatttagtagaaagtaaaacacatcccttcaatttaatgctagttgattgtttattaggtaccttgctataatccaaagcatgtccattatttttgtcaacaagttccttttcatactacacaatttcagcgcgagttaaaggaagcaaagcaattttcttttccttatgtatgaacaagtatttaatttgtgtaccatggattatagcatcagtatgatattgccatgggcggcctaacaaaatcaggagtatcatatatattaatgtgcttactttgatattaagttatgacatcccacaccatagaaactatttcatcaattccatttgcattgttgtctgtactagattgtttccataatcttctagcataacaattcataaacaacttggtcttcgcttgaacacaatgtgggaataacatcaagtttgatttcatgttgaacttttg

SEQ ID NO: 86012 - DNA, 446 bp, Zea Mays
aagccattatgaggatggagccaccgcgataacagaagaaagtacaaaggctcactggatgcatggcagcactgagtagattcatatcaaggctgggtgagacagggatgtcattctataagttgctcaaaaggtggataaattccagtggaccagcgaagctcaagaagccttggaggcattgaaaaagtttatgaccacgctgccagtgctcaagccaccacaccgagctacatctaatcaggtggctgaagacctgctactatatatctccagcacgactcacatagtaagcagtgcgttggtagtcgagcgggcagaagaacggcatgcgtatccagtacaccacccaatttacttcatcagcgaagtcctcggcccctcaaagataaggtaccctcaagtttaaaatctattgtacgtagtacatctaactactcgaaagc

SEQ ID NO: 86013 - DNA, 874 bp, Zea Mays
cccggtcaccttcctggagaaaatgaagattgacttgcagtcctacaagcaggagaagaagtctgtcacagagtatgaggtgggcttcaacaagatggtccgctttgtccctcatgtggcttataatgagatggagaaggcgagccagttccgtcagggtctgaaaccttctatcaggcatgcactaggagcctttctgttggtggacttccgtactacggtggagcaggcactgggtgtggagatgcaacaccagtataccatggagtcgtagaagtcttcgggtgttgatcagcctcgtggccaggacgcgaggaggggcaacacgggaggtccagcccacaagaggggcaagtctcagcatcagcgccaccatcctttccgtggcaaatcctctgactcgggtacttcgggaggaagtactcagaggtttcgagctgttcctaagcccgggctggggctggtgtgtttctgctgtggtgatgcgcatcgccatgcagagtgctagtggagtggcaggtgttctatctgcagtcaggaccacaaggatgtggtgtgtaggaggaatcctaaagggaagctcagatgggagccgatgacttcctcctcttctcagggcactatcaacatgatgtcaagtgttgagcagcagttttcagttcctcttcctctacagcagctttatgtgcctaggacttctcagttcgtgccaatgcagggttttcctcagtatctggccgcgcctactcctgcaccgtctactcctatgccgtctcagtttggagctccgcgtctgcctcacccggcggctcagtggggttcttctgttaatttcactctgggagcttcctcttctgcgggtatttctggagct

SEQ ID NO: 86014 - DNA, 366 bp, Zea Mays
cgggccgtgtcggccgttttggaaataacggccgagcgatgacatgacatgccagcgtttttagaaataaccgctgggtgatgactggacgcttttcggaaacggtatctggccgggaaaaaccccatatgtactgcatcgttgcgcgcttccgcttttcgtgccctaattcttgcttttctgcatccaagctttccttgcgctagtgcgatactgcctccgccatgctctccagcgagattgagatggcgcccaagcggaaagcatcaagttcatccgctactgtcattcctcccatcgatcccaacagccagttgcctttcgcaggtaaccatatgtcagttgtttctgagtctgatcttctcc

SEQ ID NO: 86015 - DNA, 648 bp, Zea Mays
gttttgtcgaactttggggcaccagtggtgggaggatcctgcacaacaggattttgtccttcctgaaacacaataaagtatgtgaatataatacaacgatatagggtaatgctaatataaccaaaatattatgaagaatatatactgacagaatttcggggtggagttacttctgtgacagcaatattatcggtaatgggagccttatgaaaaaataaataaaaacattcagatatatgagggttactataacatattgtaattataaggataatcgttgggaataaaataaaacaaacatttgatattggagttttgtcaaagattggagcatccatgaccgattctttgataccaacgtttacaccggatacctgtatgggaaacatatgaagttggtgtatatcatcatgtgaactagtatgctctatttgatatagatatgtgtatatgcctacacctaagtttttatatgacaaaactactgacctagtcggatcctttaatatcagcagttggaatctgagtggggcgatcatgatgctgattatcagaggttccaacaggaggcgtggatacagggtcatttattggtggcgatgtgcttgttggtagtttatctcgatctgcacaataacatgataaaat

SEQ ID NO: 86016 - DNA, 738 bp, Zea Mays
cttaaataaatcactatagtctacatcaccatccaaatcctcatcactagaagaagtatacttagaagtttcacgtgtaaataccttcctctccttaggcatgaggcaggtgtagcactcgttggggaagagagttgatttgttgaaggcggaggtggtgagtccttcgtcgtcagagttagatgaagagcaatatgagtcccactcgttgtcgatgtgcgcctcacccttctttttcttgtaaaacttattctccttccccttggcgctcttgtcttgtgcctagacatcattattaggacattgtgcgactagacttaccgcatttgaagcatgcacgctttccccttgatttgttcttgttgccttgttggggtaacccttgcgcccttgagtgtggttttaaagcgcttgatcagaagcgtcatctcatcttcgttgaggttggtcgtctcaatttgcaccactttgtcggaagcgcctccttgctgtttgtcgctttgagagcaacaagttgtggttcgttgtagtgggggaggctcccgttggcgacatcgtcgatgtacctagcctccttggtcatcatgtatccacttataaacttaccaaggatctccccgtgtgtcatctttgtgtacctgggactttcatggatcaagtttacatgattaggatcaagaatggcaaatgaccttaacattagtcgcacgacgccatgatctgtccatcttgtactcc

SEQ ID NO: 86017 - DNA, 483 bp, Zea Mays
agcaactcgtcgctagttgcctcaatgcaatctagccagccatcgttcgggctcatcgaattgatttctatacctgaaggtgtacttcaggtaaactaaaccatcctggctggacccagaagcagcttcgtttggcatctcccaatcgcttgcgagaggccacactctataagcaatgtgctcctggactaagtccctggtgccaaagtaagtgcaaactgtgttataagcagcttggcacgcttgtatgtcattcccaagggcaagagacggcctcctgatgccgaagcgagaccatatagggcattgaatgatacctttaatatcttctcttttgaccaggtcgtttttcacataaaaccactcttgcatctaggcccatggccacctcttccgaaatgttgaaactggatagctcacattagagcgaggcacgaagctgtagcaaccaaaattattgtgatattgttctttgccaatgtc

SEQ ID NO: 86018 - DNA, 518 bp, Zea Mays
cggaagtggggaattgatggaacatagagcatcttagaaagttttacccttagcaaggcctcaaaagctatcggagcaacattgtactctataattggagaatatgtcatcaatgaagtttccattttcaagggcattcaaactgttgactatcaattgacttcgattcgattggacttggaatcaacacgcttactcgacttagggtgaccactataccctactaacagagcaatcggcttaagtcggggacgatttaagacggtgcaacatgctcgcgcttactcgacttagggtgaccactataccctactaacagagcaatcggcttaagtcggcgacgacttaaaacggtgcaacatgctcgcacttactcgagttagggtgaccactataccctactaacggagcaatcgaattaagtcggcgacgatttaagacggtgcaacatgctcgcgcttactcgacttagggtgaccactataccctactaacggagcaatcggcttaagtcggtg

SEQ ID NO: 86019 - DNA, 542 bp, Zea Mays
gtgcttagtgcatattaccccttcataaaagagtgtcgttttaagacattgatgttgatgtatggttgcattcaaattcgatgttgtgaaatcgtagtgttggttgcatctatgacttgctttgagcttcattgcaggttgtttcatgtttgttgtctggttgtgtagcttccttagaccattagttcgagctagaagttcttgtgtttattaataacaataatggacccatgttttgaatggtggtgctatttggggtatcttggatgttttgcttggagtggtcgaattcgaggatgaattctttttaagggggtagaatgtaacgccctaaaaattaaaccatatttataatccaaatatggagtgtcctacggatgatcggaggtcgtatatgtatagatctcatcaagatgattccgatcaatcactagtttgccttgtttggagtccggatgagtcttttcgagtgtcggttgatctgagccattggatattaggattgtagaagttttcttctatttatacctccctaaccctag

SEQ ID NO: 86020 - DNA, 512 bp, Zea Mays
atgagccaagaacaaaactgaagaaaacaatatatcaacgacacctcaagcagcacaaaccaactaacactgatggtataaataaaataatgtaatagaggcatagaaaagcaaacctatagaatccctagatctacagagagagccactaaaaaactgggatcaaaacaacattgaatgcgatgattaaccaaatcgagcaagttggcttacagatccatgctatacccaaggcaaactcgtgtaaaccaacagatctactcatggcacagaataaactcaacaaatcgagaaaataccatgtaatctgtgatgatggaggggttgttgatggcgacgaggttggcatcctcgctctgtggtgcgacattggccaggagattgccgatcctaccaaatccgagcagacgcatagagaatgcacaactcagatcagacgaaaccgggccgaggaggagaaatatcatatcatgggaatacaaactaaccgcttattctggcggtaccacgca

SEQ ID NO: 86021 - DNA, 665 bp, Zea Mays
tggacgtctataagaagggcgtagccgagattcttatcctccccttttcttcgtcaacgcacaaatagtcccaaccaaaccaacctccactatcgctgtgataaccgtgtgggccgagcaccgccgcacggggcaagccttccccttcgccgatttgggcgcgttgtcgggccatggagcatcgcgggttcgtggtgaatccgtccgtggtcttggcggggcgaatcaagagtcggtgcatgaggaattgctcatcggcgtgtcaccgacgacggaaatcgcaccgtcccgtgggcagcctcttcctcgcctctatacctggtgagtacctccctaggggctttgtgtttatacgcgcatcgtgtagatggcaataggagggagttttgggctcagatttggcagtttagcgatccgcggccatggcgccgccgtagattgggcgcgccaccaaagcgtgggagaacggggttgaagacgcccaagtgcccttagatttgtgatggatgactgggatcagttgatgtattacccccttcgtccaatcaatctgcgaacgtagtgctgtgatccaacggttacgaacatgtagggttattttaaatccgggccgcatctggcggatccaacggacgcgcttccttaccggttcgcgtaggcatcga

SEQ ID NO: 86022 - DNA, 742 bp, Zea Mays
ggtcgtcaggagcatgattgttattaccttgctggcagtgtggcataccttctgtgttttgatgaagacgacgacgtaggcgcaaatctctggtggccgcttcatcataattaccttcttcatcaaacaccgcatcatcgggaagacgtggacgaggaggtggtggtggcggtgcttgttgttgcgtctccaacacagcaagtctgtcgacgatctgggacaatcgtcgatccagcctctcgtaagtcttgccaaggttcatgtcaatgaaggcatcatgcactgacttgtggaccatctcctccatttgctccttcgggagcttgttgtttgcctcaagatcttggcggctaacacattcatcgaagtatgtagggatccttgcttctttgttgtcgcctgccatcgaaacacaaaaataggaaacaaacgatgacggttatccctgataatttcactacacgctcctctcaggtggaacacaggaacacgctctaatgtatcttaccaagctcttacaagtgtctgacgaaatacaagcaaatgatggtacaatcggaggctagttcgtgatacttaccaagaggtagtgaaaccgcgattacaaggtcaaatctgtattgatcagaagatatagtatgtggagctgtaggacaggcacaatatgtatgtgaatgtggaacaaaatcgagtgcagatgagcgaagttcaataaatatccaaagcacaaatcacaattgtt

SEQ ID NO: 86023 - DNA, 324 bp, Zea Mays
gcttcaaccctcatcataacctgcaccattcgcgaggaagacgaatggtcctaagctgggactttcctactcagtggtaggccacatggaagacaaagatggagggtgtgctcacttggtgttagggccatgctcgtatgaagggcatgcttctacgccatggaggccattggatcccatgtcgaagtttatctgatcggtgatcgactgtgaggaagacaaagatggagggtgctcgcctatcgctagggcctcacctacattggggcgctgctaggtcctacgctagagctcattcgcttggtggccagatgtggggaagac

SEQ ID NO: 86024 - DNA, 352 bp, Zea Mays
ctctcctcgaactcgttctatgttttgtgtcattttcgtgaggtcatcaaaccgctttttctcctcgcgaacgttgtgctgctcgcacacctgctacccctctatttcatctaccatcgtctaccctgcctaccgatgtctactcgtgtctaccttccatacaccaccctgctccatatcgtcgcacaacgccccacacattatgcgtacaactgtcttccctttctcgtgtccccctcactgacatttcgggctcacatgtcagctctatctacccctgttccccttagttatcgtcccttacaaaacccccctttcctctacgcacatattcccttcccccagatccaga

SEQ ID NO: 86025 - DNA, 371 bp, Zea Mays
gagatctctgggtgggtagctagggtgggcggtaggcctaggtggtttgtgccccctggtccatagtgtctgggccccatatatccactgtatgcatgctattgctgtagcaggcaggcatggtactacaaccacgtactaggaaggagtacgttcacactgcctagcacggtggctactgggctggctacagtggcgagcgtattcatcctctatggtccagagcacaaataaataaaacgggtgtctcgcaagtggcaaatacggctttcccaagtgggctctgtccttgcggccggctcccagcagctctgctcttgcagccccgtcgctcccggtcccggtcctggtcccgttccattgtgtgtgcg

SEQ ID NO: 86026 - DNA, 576 bp, Zea Mays
cgataatgtcgagatacaagggcgccgagccgttgtcgaggtgctatgtgtcaggtagttgtggtcgatgtagcttttgaagacgccgaagaagacaagctgcacaagtcacggtgcaagcacaacacgtgggaaggctcgtggcccgccaagaggcgctagggtgacggtggcgcaaaaggagggcgccatggctgaagatgatgatgcagtcaaggagtcgtagaggaattagccaatgctaaggacgatgctgtcaaaccgtcatggacgaggcgtgctctaggtttgccacgcctggaaatgcgtcatagacgaatgcacatgtcggtgttgctagtatcgcacatactaggtagaaggctccaaccaagtgtcagcttctgaagggaccaacagagaagacctccacgatggttgtggtgcagtatggcaggagtgatctcgctgctcatggttgttagagcggagtagatgaagtagtcaaggatgagattacgatgctggcaacaaggttgtgctggaagaaggcgaagaggcaggcatggcgacacatcgaggatcctaaagttgccg

SEQ ID NO: 86027 - DNA, 593 bp, Zea Mays
atatctatacttgctccttcctcagaatgcttatgagtaaccataaatgttgatgttgtggtttcggaaaccgaggggacaatagatttgagttcggtggcgatgcaagcgtggactcactctgaatactggatcatgaggatctgagctgggaactgagacaccaaggttatacaggttcaggacgaggccctagtctagtgtagtgttgatccttgtattgctcaggagcgtgttacagcaagtgtgcttgtgtgtagaaggaagaatgttccgcccttttattgctcaagggaggaatttacagttgggactcgtattctaatcaggggtcctttagcttgttgcccctgggccgctctagtccccctggcattgtctatggggcgtgcgctgtcgtactcccaatctggcgttttgtcatgtccgctctccatacgggccattgtagcttgttcggtgtcaatgttgcggtacctagcgggtcccgcaatgtgggcttacgacgaggttctaggttgtgtctagaacaacttgatcttccatcataccccttgcgttaccttccagcatgtgtaggtttacacatggtc

SEQ ID NO: 86028 - DNA, 701 bp, Zea Mays
gatctcaagtgtggataagcactcgttattccagtggggaggtgcctctagaccttttgccatgcacttcatccatatcaccatccatacaactaagtgacacaacagaatgggagtgatcttcttcagaaactccgactcaacactaatcactgaatcagccaccactgctccattccagttgcaggcctccctgttggagccctattatctaacaattccatatagcagtagaccactctattttaaacacaattactctttattcatagctctaccacttataggtagcaacccataactgaaaacatatagaacaaaagttatggtaccccaaagtatagccaaagtcactgaaaattcagttttagaaatctgaaacagcaccacactgagtatgataaagggtttttccaccccttttttctataaatcctacacagtagcaagccaactctctggatgaaactttctctccttcagattatctttaactttgctacatatagtagggatcatactccatagattaattaatagagagctccaaatgtgggtaaaaactcgcaaaaattaccagcaagagccaattgaatccatctcaaactgggtttgacaaagaaagtttggagacattttacacccaagttcctatagaaccaagtctatcccactttagtaaacttattcaccttattatg

SEQ ID NO: 86029 - DNA, 444 bp, Zea Mays
tatgatttgagaataaatttgcacaaggtttgaaactaaattcgaattcaaattgattttagaaattaagaaaagaaaatgggagatgaaaagaaaaggaaaagcaaaatcccactgttgggcccaaaaccctcaattcggcctactatctcttttgatccgcacaacccaaactgcacaacggcgccgaccggtgggtccctttcgtcagtcacgcccgcttgttctcgcgctccaccgctcctgagcgacttacacctgggacccgcggccagtgttaccccgcgtgcaaactggtgtcacggacgggtcagcttccatctgcgtggccaacttacaggcggggcccgctgtcaggttcatcctcaacaccggaagcttcggaacaaactcgcgcgcggaaatcctggtgtcgaccgagtctaccgcgtcggggtgataaaa

SEQ ID NO: 86030 - DNA, 594 bp, Zea Mays
gggcatagagttggacctatggcacctgggcggccaagaattctttgaagaagatatttctgggttaaaagaattagtcattgctggtggttacaagtccgaatccatgctctttggtagcgtcaacgaagagattctagggtgcatccctgaccgtgctggagcaaaaattatcaataccttatcaaaaagtatcagatttccgaagctcgaacgggatttcagcaactatagaaggcaacatatcactagaagcttattctatttgaatttcaaggtataaacttttatgtcggcctcttcgacttattaatttttaaatttctagattttcgggctaactttggctttttgacagagctttttgctgagtaaggctttgaagcttcaacaggatgatgaaggtaggaagaacgacttgttattaataacttggaaaagtgagtgaaagaacttgaaaattttctagcagagtaagatttgaaggttaagaatgtcgaagtagacctggccaaagctcatcttcggattaaggatcaaactgttcgcatttctgatcaagataaacagcttgaagaagaacattcaaaatta

SEQ ID NO: 86031 - DNA, 399 bp, Zea Mays
gaaaaaggaagatgcgctcaaaagaaaagtaacccagctcattcttggagtctcgaaccaattaccctcataaataggctcgagcctcaggggtttgtgggagatagaggtaccaagggtcattgtcgcatggacacaacccctaggccacttaagcaaaccccctataagttaaggctaagctgtgcaattgggctgactcataggggaagcaagtgttgtcggaaggatagcataactcagccagaaggatttcgaagagcacaacatcaaggtgttatctatgtgcatgtatcgtagaagatctaacaagattctgaataacatgccctacatgtggccagatagcggattgtttgatgccaagcttagaaggagataaccactagaagagtcaac

SEQ ID NO: 86032 - DNA, 523 bp, Zea Mays
atcaccctaagtcgtgtaagcgtgagcatgtcgcactgacttaaggcgtttccgacttaagtcgattgctccgttagtagggtatagtgatcaccctgagtcgtgtaagcatgggcatgtcgatttcaagttgagtttgtcctaggtcagttgtttgatcaagaacttgtatgccttggaacatggaagcttcattgataataaaaccttctgcttacaaagtacaactcgtcctcaagagctttgaggcattgctatggatagaatttcctaaggtgctcaatattccatgaattccccacttcggtgccatccatttgagtgagccggtaggatcctagtcgtttaacttctgcaatgatgaatggtccttcccatggtggtgacaatttatgacgtccctcccccgccagtactcggcggaggaccaaatttcccactacgaaggatcaatgtcgtactgctttgtcgtgataaagcctcaggctctgctggtatcgggctgactgaatgaccacattta

SEQ ID NO: 86033 - DNA, 533 bp, Zea Mays
cgggagtaaccgtggtgtcggtgggaatccgtgaccagtgatgctcgtagaatttctcaacggagctcggttctgtggcagattttccccttcccatgggcagagcacggtgcgccatcaacatcggtatgaacttcccaacaaactcgtcttaacccctactgcattttagattcattaatcatgccggcgatggtcggggtaccgaattagcctatcaccggcattttgctgttgcggccgtgttgtgcggggtgaggcactcggccatcggggggagagaagacgaccccacgacagttcatcctagaattgacggtgaggattagatctcgcacgacagaacggttgccactgatctactcatggacgagtccgattagattatgcgtaccttttcgcgcgatcagatctggaccgtaggattgaaattgaaagggcaaggttagatcgtagctacttgaatcagtatcgttgatccctaatccagcacacgatattgcgtaccggttcaagtggaacctagatctaat

SEQ ID NO: 86034 - DNA, 835 bp, Zea Mays
gcgggatggattgcgattgctagctggtccggccatcctgtccacttgccgcgcggccggccgagtttatcctcaccggagctcgccgtttcactcaaccatgccacgccgcaaagccttctccacgtcgtagggatcgtggaggatagccagttacccctccagcaccgttttctccacgcgcgccacaatacacatagcacggtgaaatatccaagtcgccgtgagctgatctccaacccaaattcactagccgccgctcacgatcactataaattgagtgcacccgcgactccatagggtaatcacacatctattgcaccaatccttgccccggattatccacctgggaccgagaattgctcacttcccccaatcacggtttccgccaccgtaaaacgcacctcaccgtggccagccacttccaggtttgttcatgctctctgctgccttgttttagcattagtgtgcttccctgatgctcctcaaccaacccaattacactgagttccccttaatcaccgggaacgcgatacccattcgagtgtccgcgccgtttccatggactgatcgattcaatgtcccattgatgaaattgtttgaggggaaaccctcgataggtcttggatttgatctctgctaaagtagaacgctagttatcacttggatcagccgatacatgctcgccggagttcgtccctgcgcggttcgccgccgtggacttcgaactgagaaaggatagaagcgcgggggtgtttttgtagatgtcagtgagacatgtgaatagcgccaaggaccgccactctgatttttgaatcggtaagggcgtttctgc

SEQ ID NO: 86035 - DNA, 371 bp, Zea Mays
ctcgggggagtaggagagtgagtcctaatgctacagagtatgcctaccaggtcatgacatcacgagtataatgacatagaaactgttatagaggtttggagcatcaagtgtgtaacatcctatgttctctttcttgtggtggatttctgtacacaaggagtgtacaagattacaagtcataaactataggcacaaaaaacatccacaaaaaactgtgggctaagggaagctaaacctggtcttctttttgttgtgggttgctttcaaggttcgtgtcgtgtgtttggtcgtgtgaacctgaaattgaatgttattccaccaccccttttattgttcaatagcgtgatagtattataagtatactctttttc

SEQ ID NO: 86036 - DNA, 581 bp, Zea Mays
ctttttaaaagaatagaatagaatcacagttttgggctttcactagcatgctccactggatcggattggtgaactctggttcccatgatcccatcgaccttcaccttctgctagataatcacgctgactaggctcgagtttgcctcgacgctctcttggaccgtgtgggaagagctctcaaggacatctgcattctgcaagaatcagtgtatctgttttgtctgtccatgattcaattgggttgcatgacggagaagtggcccttgacgtggtcatggcgcgcagagtgcaatctcctgcatgcccatgattctacgcactattacaaatatgattaagccataaacaagctgcctccttagctctgcaaaacggatccttccgagtggttttgtcagtatatgccagctgttcttcagaactcacatgactgatttccagtctcccatcgctaacacactccttactcctctcatgataaactggatttttactcagctattgagcagatctgttgtcaattcggaggttgaatttcttcacttcagtgcccaacagatcccctataagtctgcacagcc

SEQ ID NO: 86037 - DNA, 630 bp, Zea Mays
tgcttgccgatccgcagtcgctgtgtgccatggaagaggaattcgatgccctttaggccaaccacacctgggacctagtgccgcgttcccatggcgccaacgtggtcaccgggaaatggatcttcaagctgaagctgcatgccaacgggtccctggagcggtacaaggcctgctatgtgctctggggctttacccagcgccccaatgttgactatgacgagaccttcagtccggtggtcaagcctgccaccgtccggactgtcctaactctcgctctgtcccgggactggctggtccaccagctctacgtgaagaatgcttttctccatggcaccctgatggagacagtctactgcactcatcctgttgggttcgttgaccctgctcaccctgacatggtacagtcgctctacggcctcaagcagacccccctcgggcttggtacagtcgcttcaccactttcttgtgttcgcggggcttcgtcgaagccaagtcggacacgtccttgttcctcctccgtcgcggcccggacactatgtacctcctcctctacgtcgacgatattatgctcaccgcctcctccactgggctcctgcgttgcatcatctcctgccttcagcaggagcttgt

SEQ ID NO: 86038 - DNA, 476 bp, Zea Mays
ctatatagcatccaaccaatcatcatttggctcgtcaaactgacttctgtaccggaaggtgtacttaagataaaccaagccaccctgactggagccagccgcagcttccatcggcatttcccattcattcgcaagaggccatactttgaaagcgatgtgttcttgaactaaatctctggtaccgatgtaggtacatacggtgttgaaagccattaggcacgcttgcacttcattcccaattgcgattgatggcctcctaatgccaaagcacgaccatatgggacgttaaatgatgcccctcacatcctccctctgattcagatcattctttatgtaaaaccattgcttcatctatgagcccgaccacttcttctgaaatgtagccacaggataatttgcctcagagcgggacacgaagctgtaacagccaaagttgttatgatattgcccttttccggttgccttcgtctagtaag

SEQ ID NO: 86039 - DNA, 602 bp, Zea Mays
ttgcacgcattgctaggaatttcatcatcaagatgaacctcttcgtgaggcaaatcaccatcagggtgaattaatcagaggagagttatcatagaccacgtgaatctgcaatcagaacatatgctttcactattgctgatggatcatattcgcaggcgtccccgagaatagatcaaataccaataagtcaaatgtggatatgatattaatcccgggtatatccacatctacatcaggtagaagcattcagaccaatatggttactcctcaacgatttctggcaaactccatatacacaggagtacacaccgaacgacaggttcagtttggcttttgtgcgtttaatagaatattgaggcattacattatatgggcattcctccccccctaatgccgagatgttctaaaagcatacagataaaatccccaaccacaatcatctagttgtggccaatgtatgctattgtggtgatttatttgggaaatcttacgtacattacagataggggttttatgcagtgagcattggacttagattaatatagtggcatgaatactacatctttttgcttcaacatgaagggttagtctcaacatccagc

SEQ ID NO: 86040 - DNA, 561 bp, Zea Mays
ctacaagacatcattgtgagtcgcttcataaaacattaaaataaagtcaatatagtcatgtaattctcttactcatacaacctatactttgaaatgtctagggataaaaaatcgaagcaatttcataccatgataatgtccaacgatttgacgccttactccaacaaagatgtacgtgtacattgcatggagtggtgttctgtgtaaactgggggcgtggcaattttagaactttggacatagtctagatttgacattggcaacacatactaatgtggagccattcaacatgccaattcaattccctccacgtcctaaacatcttatgtcatttcatgagatgctccaccaacctcacaaaatgtttgtaggtaacgaccaacccttctatatagtttatacttgtaccaactaaaaccctttatattattcaaatttaactaacctcatgtgaattgctcagacgttattggcatagttattcatttggggccattagagcatgttggtggaaggtcgtacagataggccatactaatcgattccaggccacttattcat

SEQ ID NO: 86041 - DNA, 601 bp, Zea Mays
gttggtgctcctgtcgcttattctgtttggaatctgcccccttccaagtccttttgcaattttgtgtccaatcctcctgccggtgatagtggtctgggtcttagagagtgaccctctcccgaagatattgaggtcctggttgcttcactcggtgatattcccaatgatgagaggcaagttcattatgagatgcctacgagtccaagtgatgcagagataagtgctatgctggatatgttggctggggattcttctgactcggcccctgctgaactaatgactgttgcaactatatcagagcttgaccaagtggtagacacctaaaaacctgaaggtactcgcccgaagcgtctttgccaggtcagctgtccgactgcacctgccgagggaaagaagaagaaaaagagacggcttcgacgattgtcatgcttggaccaggacgctggcccttctgctcttactgctgaagaagtaccggtagaaatctttactggagttgatcccaatgagtgcaatcctgctgatgctgatcccaatgggtgtgaccctgccaaagctaatcccaatgggtgtgaccctgccaaagctgatcccaatgggt

SEQ ID NO: 86042 - DNA, 444 bp, Zea Mays
aagcaatcggcttaagtcagtgtcacatgctcacgcttgcaaacaaagagtgcatactataccctactaacggagcaataggcttaagtcggtgtcacatgctcacgcctacaaacaaagggtgcatattataccctactaacggagcaatcgacttaagtcgagaacggcttaagtcggtgtcacatgttcgcgcttacaaacaaagggtgcactccatgccctactaactaagttaccgactcgaatcgagaagtgcttaagtgggcacctcatacctacaaacacttacccgcaaaaggaatgcatgcaaaatcccatcaagaaaaaaatacaaggacgaacactaagtcccattttcccacaactcattataatacaataaagcagttccacagctcagattcaaactaaattgtcatgtacacttatgaaagaaggaag

SEQ ID NO: 86043 - DNA, 445 bp, Zea Mays
tcccaggcacgtacaattcattgatcaaaggctccatgtacacgcccattttattccccgggtgtccgggaattatcaacgacacgaatatattcttcctttgaaagcacacatcggggggagattgattggaataacaaacacggtccaacatgtgtacggggcaacactcattccatagggattgaacccatctgtggccagcgcaacacgtacattacgagcctcttcgactttctcacggtgaatggcatcaaagtgtttccatgcttcaccatcggatgcgtgcaccatcttgtcaggattgtatcgttttccatttttgtgccatgtcatctgtttcgcggattccttggtcatgtatagacgctggatccttggtatgaatggaaggtgtcgtaggattgtcaaggggatgtcgagctgcctcttctatccatcacca

SEQ ID NO: 86044 - DNA, 628 bp, Zea Mays
atcagaggaggcagggcctccagaccctgagggagcctgcttcgtatgagcagctgggttggaggaatcaacccagtagggtacgtagcggtagtgtttgacgggtttttcgaagtgagtctgggtgaccacttcgatcatcttcatgataaatggtgcatgaagacaccctttgagaggagaccaggaagcacggatgatctcttcctagatcatgtcaaacacattaatgcgggcgagactgttgggagcaaggaggagaaggaagacccgactctccccaaggacgttcatttgattcccgcccttcgggagaacggtcatcctggataaagagttaaggtacgtgtagtacctatgcatgttggcggtggtccagaactcccgatccatagagacatgaataaattcagtctcctcccgcatgggcagcctaatgtcatggactctcatgttgttgccctgaatatcagtattagagaagcccagaatatgggcaaaatgacggtagctaactttgtgctagttcccctggatgaagaaatacatgatagggtaatcatacccatcggcttcttcatctactttcttaacccagagggtggcataaaactgagcaaccacctcg

SEQ ID NO: 86045 - DNA, 566 bp, Zea Mays
gccggttagcaagcagtttggagaagatttttgcgatgttgtgtatcaaactgatgaggcggtagtcacccactgtcaaagcatccgacttcttaggtataagcacgatgttggcagagttgagtaaatgaaaatccgccccattcatgctatgaagttggtgaaaagcctcaagaacgtcctccttgatgatatcctagcatactttgaagaataaacctataaagccatccgagcctggtgctttgtcgctcgccattgagaagattgtttcctttatttcttcgagggagaacgatgcttctagcgatgagaggtcatgctgcagtaaagctagagccggccagttgagggtggtccctctctccggggttgtccctaggtgagatttgaagtgttcctgaatgattttttctttttcctcatgggctaccgctaagtttccaattgggggctgcaggcaatggatgaagttcttacgtgctctggagctagcagataggtggaagaacttagtgttcacgtcgtccaacctaatgcgagtgaggcgagcccgttgacggatc

SEQ ID NO: 86046 - DNA, 838 bp, Zea Mays
gctagcttgctcgtacagagcctggtctagctgctaacaatccatcaaaacgaagctaaggacgaaatggccatccgattctgtccgagagatggaatcggagtgaacttcgggtgatgatgcggacatcgggccaaattaaaaaagacgcgtggaaggggatgcataatgggggcggatccagtgggtggtacatataggtcacggcacaccctaaggattatataaggttagttagtatagtgatataaatactgatttttgaacttggcatttaagaatttagtgccggattaagctgaaccaagccaaaccctatacggatgcagatctgccgaggcttgttgcatcacgagctagctagtattcagttggtcatccaccttggcgtcagcacaccaggaagtgggttgtacgtgttttggtcccagagatggctagagatggactagactgatcccgtccatgatagctagcattcggatggaggacgagctaggaaggaatccatctatacccgtgtccactccagcagtgtgtgcgtacggacctcagaagcccagggaagataagcaggttggaccgtacatgacggttaaacttgatcctgccatgcactgcgcccatctcatctttacttcgtcctccttcccaccaacacaaaattgttccatgcatcccccgaaaatatatatatatatatatatagctaaaattgttccatgcctaaaagctaggatcataggatatgggtacctagacgataggacgggaacagtcgtagcaactgcggccggcaagcaaagtgccgtcgtgaccgtgtatgaagccacctccc

SEQ ID NO: 86047 - DNA, 812 bp, Zea Mays
tttggaagttatatatatgtgtgtgactatgtaataagggaaactcaagcaatagataaatctttcctccccttgcctctagccatcgctcatacctcgcacaactacgatctacgccatccccacggtacgacagcatccgtctctgacagcgggaggagttggttgacaggagcggggcgtgtgatgccacaacagtgaacaacgctactgttcgctacagtggacagtaaacggtacgggccaataccaactacttgagactatccgcaggggttttctctaaattttttcttctatatcacttttttatgtcacatcatcaatattttatcccctacttttttgtcttctgcagcggtttccccctaaatacttcccctatacccattacaatcactatcaatttttgatctactaataattcatcgtgggcccacaacacagtgccaaacagtgtaagggcacatgaacagtgtaccgcaaggagtggagggagagagaagcgcttcgcttgctagggggctccgtagaggcaactgttgcgcgagtgaggggtcttctctagccggcatgcaaggggagagggagctagagcgtcgacccatgcagacagtctgacactccgagcaaacagacgacttcctcgcccatgctgggcccgccgcccaaccaccagtaggcggtgatgcgtggaagcgtcctcttggcgctcgaccctgagactatccgcaacggttctccctaaatttcttcctctatatcacttttttgtgtcacatcattaacatttcatcccctaaattttcatc

SEQ ID NO: 86048 - DNA, 415 bp, Zea Mays
ggcatagtggtcaccccgagttaagtaagcgtgagcatgttacaccggtaagtcgttgccgacttaagccgattgctccgttagcagggcatagtggtcaccccgagttaagtaagcgcgagcatgttgcaccggtttaagtcgttgccgacttaagtcgattgctccgttagcagggcatagtggtcaccccgagttaagtaagcgcgagcatgttgcaccggtttaagtcgttgccgacttaagccgattgctccgttcagcagggcatagtggtcaccccgagttaagtaagcgtgagcatgttgcaccgccttaagtcgttgccgacttaagccgattgctccgttcagcagggcatagtggtcaccccgagctaagtaagaatgcaagttaatcatgaacaaactgagta

SEQ ID NO: 86049 - DNA, 970 bp, Zea Mays
ccacaggttatgttgctcatcaaacaccaaaatcaattagttaaatgagccgaggtccattttccttacaagggggataagagaaaaccctgagacaagggcggggcggtcaaaccatttcctcgaacaatcccccgtgggaggtctacttcagttcatgggcaaaaggaggcaccgaataatgagacccgcggacaaggtcactcgtgccccctctcttgtctttaaatgagggaagatactcggaaaggctcacgcagaaaaaggggagggggagggggaggaggagagactctagggccctgcgacacgaaaagtcacgcaacgaagttcactttattactttaggaaagcagcaccgaggcacgatacatcgcgatcaacgtgcgtcacgcacgatgtaatgagctgacaccctaatcacaacatgactggccacctcgttgtgaccttccagcgggtcttctcgcccttcatccaaaagcaaatctccctcatcagcagcgccaccacagctcccatgtgaacgccgaaatcgatgatatcctagatgcggcacgaagcagcttgatctcgacctcggtggccgcttgcgctgcgcgggaaacatcgcaactccccgaagacgcctgaaggaaagggagaggagacaaagagctcgatcgaagcagcctaacaggtggcaatgtgatcgcctcatcggcgacgactaccctacagcaaaaggagaaagggggaaaatatcaaagcttgagaaggggctggataaactcataggaggaaacttaccttgaccatggcccatggaacgcgacagcccaagcaacccgagatctgtcaaacaacccggtcagaggtacgctcaagaagaggccaaaggacaaggaaagcaaagtcgccaacaagcaaactacgaccgcccagaacttataaagggaggcaaagtcgcccaactccaccccaaaaggca

SEQ ID NO: 86050 - DNA, 469 bp, Zea Mays
acgccggtatgtgacttctacgagttcgtgaaacactgctagaggcccgggtcgattcggttgggggaggacgcgccgggtcgccggacctctacgtgccggtgaactatgccgccctggagctccacttttgaccgctcggatgtagggagaaagaagaaagggctctggccgttgattctctaaccagcggccaggattggtcgggttaatggttcggctgggtagatcagggccatagatcatagatcgtggggctgtaagagaatcacgtttcattaaatttggtccatcggatataatccaacggctccggtgtgctgatacccctttggatggagaagtatgcaaaagagtcctcggtttcttagataatcaacccgcagtcctgcctgtgggaatcctgagtctcatgaatttttgcgtaataacccctgtgtctctctgttatttgcgcccagtccggaag

SEQ ID NO: 86051 - DNA, 314 bp, Zea Mays
aaatatttccagctgggtaaattgaccacaagtttgtttcagaaattagaattgctgaaagtgtatcattcaatgctcatactgccacttaataaattttgcaatatactactgttggtcatgtcgttctgaaccatttttaaagcaatcaagttgcagttttactgatttgcactgtggctcccagttggtgactccccttcagtatgcacattgccctacaagaagatatagaattctttgttgtgctgagtccatttcttttctgctgtggtgcattttttgtatcattatatttgacccatgtaatcctg

SEQ ID NO: 86052 - DNA, 1072 bp, Zea Mays
tttttccttacggattggtcccaagtatactattcatcttagtctaggtctttatgcataaccctctgagtttttctaacctctaatacgtggtcctgagctaggttaaacagtatttgcggcgaaggagacggcggagcggcttactggcattagtagggttccggcgaagggtcgggtgaggatggggagcctctggcggtcacgtcaaggtacgggtcagtgccgatggtgcccgaagctcgtctttccacagactcaggcggtggagctcgtcggcgatgtatgtaccggccataccacggcggtagagttcaatcagaccacataggaagcttcactgagtgacagggagtttgtgtgtgcaaggaatcgatgaatggctaggtagattacctggaccgagggaaccgacagaagggacaagttcggcaaggtgttttggcttctccggcgaggtagtgttcgatatgagtggctgggaagcttcgctagtctctggggaagctggccggggagctagactggacagggataggctggagtggccgagctatggtcggtgttctagcgattaccggcatggtcggtgttctagcgattaccggcgtccagtcgccagcaaaaagtatggggcatgtgggagggcaaggctgaggggttggggcttcttataggtgagggctcaggctcgggcgcagggctaggtgagttgtcaagccggccggagctcgtggcatgtgcgggcgcggtcagagcgcactccctagtgccagccgtggtcggacatgtggaggatcgcttctgcccttgtccaagcgcatgtttagctaccctagcatgcatatcttggcaaggatcccatgtagggtctcttccctgctccaaatacttggttttccatgtgagtcctgagctgagatatgcttagggtgaggagaaatgccagtgtcaagtcgagtatgtcactgatccgggtcgcgacaatatccatgctaaggcgtgtcaaaacggtcttggttcggtgttaaacttcaccagggcatgtctgagataatttggcgccacttta

SEQ ID NO: 86053 - DNA, 491 bp, Zea Mays
ttttttcttggctgattgactaatttgttttttgactatgtatctttcttcggttgctttttgttagatatgacctagagatactctgagctcgaggagaaacatcttcagtatcgaatcgactcaactcggtggtattttgagcttgaggagagatattcccaaggtcagatcgacctggcccgggtttctgcttctttagacgacgcgaattccttgaattcctctcttaatgctcagcttgactctgaaagggcggttaatgaggtaagcttacttaattggatctgttgtgctttttctgatttctggatatttgagggttgattcttgtctgcaggaggagaaatgagcacttgcagcttctcgcgacaatctggataggttatatcgtgacgccagtaattctctaaccatcttggagaggagccaccgattcaccatggcagatctggatcatcatcgccatgaactgctagtatcctaggatg

SEQ ID NO: 86054 - DNA, 1130 bp, Zea Mays
gaagaaggagccgtccgggtccgcccaccaccgcctcgccgccgtcatggacgccgtcaacgagcgcaagctcccacccgagctcagtgggcgcggcaacgcagtaaggtcggtgtctcagccccaggtccctcctccataccgttcccaggaaaaaaaaccgtagcttggttgtgctgtgccggggcaattgaatctagattcaacatgatgtaggctgaaagaatagttgttcatacggtttgctagttcagtgcaatttgtttcacaaaatgctacacggaagaatatccaccatgccggcgcattcagtcattcacaatttcgcaggctaaccttcacaaaaagtcaagtctttactgatagacaaagacatgatagggtctctgaagcactactctaggagtgaaaaagtacagtgttttccgttgtgctaccattcctcatcagcgctactaaggcctcacatcttgtttttccccaactcaaatgtccatttctagatttaccctatcagcttcttcttgcatgtcaatacctacaaggctacaacctctttttaatcacgcatgtgcattttgtacaattaccaaatattgtttgttttaaggtatctccggggtgatgatttatggtggacccagccggaaaaatataggatggacaattgcaatttaaatgaaccacttttacctctagattttatcttcttcatgccaagataagagggacaccacgaccttgggccgtcattgttgctccatccatggccgccgacacaaggcgaccttggttcgtctctccaaatgtttcaatacgtggcactacaacctctttttaatcatgttgtatctgcattttgtacaattatcataccaaatgttgtttattttaaggtacctctggggtaatgatcaatggtggacccaaccgaaaaagtatagtctgaagtctgaagtctagaactagaaccctagaactctgaagtctgaacttaagtactgattactgaacacagaatcacagaatcacagaagactgagagacacgtaccttctgaagaggtgttcgtctctggtccctggtgttggtcacttgttttcaattgttgtgaattaaaaacaaggcaa

SEQ ID NO: 86055 - DNA, 547 bp, Zea Mays
tatgaaacattgacatttaggtggtcaacttatattaatgatataatgtttgcaaaaaccatctcagttgtacaacttgtacccttagctactccaagccctagcgctcatagccgataaagttgttattttgtcacccctagtttgggctctctgctattatgtcgctctgtttctatggcttgtgggactatttgtgtctataatttgtgggcccaatggtaaactagagaatcagccctagccgcaacgcctgccactaggatgtgtcgatgtcgtgcctagccctacacatgagcgcctagctgtcacacactctcacgtggtcaggtaagatcatttctttggcagcatgaatgattgtgcattcggttaagcccagcgcgaatgataacctagttgtatcctgtccttttcccctcaacacggctgggaaaaataatcaccgacccaagcgtgtgtggaatttttacatgcgggatgtgaggtgacgctgcagcgatgtcttagagatgatgacgaccatacactctcccctcgatggccc

SEQ ID NO: 86056 - DNA, 476 bp, Zea Mays
cttatatctagattagatagagttctagtgcgcgccccccgcggcgagggcctgggctgtgtcggagaggcccctttgaccccttcgtgttgttgaggtaaactgcagcatgaccgcgtgatgcatctgccgcagcgtggaggagccatgtgaagctcaatttttcagctccctcgacgcaaaatatagttttagtcagcgagatctttggtcgggtatacctgttaaaaacctcttgctaccgagtgtagtccaagggctccttaactgaataatagtataacacaaggagacaagagtatagagaaggactgactctttattactgcatagtgctgctgtccaaggttacatgatatgtggatctcctctctatttattgacataaactagggtttcaggcatatgggccacatgggtcttcctagcccaagaagggtttcttaacactcccccttggtctaatgccacgagat

SEQ ID NO: 86057 - DNA, 525 bp, Zea Mays
gctgaatctgggatcttattcagtcactgtaccatcagaacaccattcagaacacctgatagagcttatttgggggcgatttgctccaaattccgtgtagcaacttgaccattcatctgtatcaaagttgtagctctataaaccagctacaaatcgactatagagacctgtctcatttacttactccttcgagcttgaattgagtccaaagtttagtagaacttactgtcagaccagtatcagactatatgggtgaccgacagcaatactttgagtccatttaacgccaacttttgtacaacacttatgtctgatgatttaaacaaagttatactcctttagtagctctacaaatttgatgtactgaccctgggcaaattccttgtagatttagaaatatagagctccaaattcagccctattcgactaaatttggacttaggctcatagagttcatggggtactttttgcaaataagtccaaacttcatcatttgacttggaaatcctcaaaagtgaaaagtac

SEQ ID NO: 86058 - DNA, 888 bp, Zea Mays
cgcctaggctttgggcatcgcttgggatcttcgccgggaaatcacgaatgcggtggtggcggttgtcgtagcggggaactgagaagtgctcgtcggagctcgggtgcatcctcgctcccgcaccccttcgtggtcaggcgtcgccacatcccgggctaccatggttgtgtctgtactgagttcatctccctctccgctgtgtattgccctgccggatcgaatgatagatgagactattgcgcggtcggggaagtacggcgatggcgccgccgtgggcggattccggtcaccgtggggcactcgcgccaccgtacctagtctgccaagggtgggtgatggttgccggtgatcgttgacgaagcgaggaatagatcagattagatcgtgggtatttaaaaccctgacagtagatctaggacccaacgacgtagattagatgagggatacctctacgcttaattgaaccctggccatccgatcggctatgggcagctgggatctgggtggcgcataccttctcgcgtggttagatccgggtcgtccagtcctgatgtggcgcgtgagattagaccacaaaactttaaatcgcgaccgtcggatcatgatcgtactgccctcggtgcgtaccagttcgttttaagttacgcttaatctgggcccttggtgcgcgaactagcggtcgatcctcacccgtactctcttcggccaggtagtaatgcaaaagaactcgtgggtttcgagggattaaacccgccgtccacagacaatcttaaataattacatcgacacccagaattttgcttagagaaccctagactccttggtatgtgtgcctacagtccagaattattgggaatattcagaattaaatcagaaaatgatcattag

SEQ ID NO: 86059 - DNA, 762 bp, Zea Mays
cggcggccgagctttacacgaaactaattttccatggtggtcggtgagaacaatagtcttatctgcatagtctataatgccattgtgccgggtcaaccaatccattcctaggattagatcaattccatgggatggtggtacggctaagtctgccaagaatactaacccacttaaaagaattatgacttgggagcatttgaggtggcagagaaggtctgatcttggggtttgggtgaccagagggacttctaatggtgtagtggggatgccatgcttttccacaaaactagtagcgatgaaagaatgagatgctctagaatcaaaacatacagcaacaggggtaaattcaactaggaactcaccgattactactccaggggcttgctgagtttctttggcgtcgacatggttcactcgagccctgtcgttgaactgagtcttgcttaattggctgctggtggagggtgccttggaggcgggtgacgtaacattcttggggccattcaccgagttggagtagacaggtacggatgtcttcaaatgcggacaattattcttgaaatgactggggtctccacagtgccaacaagcattggttggaggttggctgcttgcaacagactgggtgtggaaggaactttgaccaggctggttgaaacgtgccggagcggatcctgctagcttgctgaggttcgaccccttggaagggaactcaaaagatcgaaccctctagtgtatgtcctgttgttgagctcggagaac

SEQ ID NO: 86060 - DNA, 444 bp, Zea Mays
agaacgcaagtgcggcggcctcgactcgcgtccgatggtgcctcggtggtgaagcgttggcccgattatggtctgccctgtcctctctcgtgtgcaaggtctccggaggcaacgcacttgatcttatagccctgagtcccgggcgctctagctagcaggatcgacggttacacgcccgcgatttccattcgaggatacgacgtttgtcacgcgatatggaggacgaggctaatgacgcggggcccaccagccaatgtaggcaaaggcgtgcacgcgacttcagcgaagccgaccggcgagacatggcgtatgtacctggtgagagacagacctgtgggtccacatggtcagtgactcccgaaaaagaaaagaagaggggagatgatgagtggtcctaccaagttggaccaagggcgggagtgtggccgttgtgggggagctggg

SEQ ID NO: 86061 - DNA, 305 bp, Zea Mays
ctgggtcaccggtaatgggcctcgccgtggggatttcgcgtgccgcagcggtttgggtggactgactacccttggccattggatgccggcgtgcgctttagattaggcccgctgtggtgctgtcaacatttgaatcgcagccgttggctattgaacggacgatccggattagaatcaggttcaccattcatctcggatcacggtagccgtccgatcggtgatgcgagggcccatgtagcgtaccgattcattttaagtgagatctaatcctagtgttcggttcctaatcggacggccgatctcat

SEQ ID NO: 86062 - DNA, 390 bp, Zea Mays
gttcttgctcgacgggtgggcctgcgccggtgatggtccaccgtgggggcagagcgccgccgcgccctggtgtgttgtggagaagacaggtctgtggccgtcgatttcaagatgggtggctagcattagatcttagtttaccctttcgttccatcgtggctatgtccttggatttggatcgggcgtatgagtttccatcgctagtgttttaaatcgtgaccgtagccttttgatccaacggtctgtgtcgcgcaccgattcacttatatggggatccaatctaggccacccacacttgatcggatggcatagattagcgcgtacccctttggcctggtcatatttcaaaagagcccctgtccttttatcaaatcaacccgtcgtcctggc

SEQ ID NO: 86063 - DNA, 743 bp, Zea Mays
tgagaagtcgtctagaatgagcatgcatcatgattgtcgcattataattgtctcttgtgcatcaacatgcttatcttacctttactccattaacaagaaattgggaataatgtgatgtgtatgaactataagaaatgtcttatcttgtgttgttaagatagtcttgattaggttgtgctgtgtgtttctcttgcctttctatatagaaggtacagtaatcgttcagtccattttgcctttaaccaataaaaacttgttgtctgttctattcataaaaagaccccactccaaacaatctagtggttccctagtgaaaccttaaaaaatcatatgcttatgttggtaatttctaacccttgtgtgtcttacccttgaagttacacctgcaccgcttatagacacccatagcttgacccctaaatcgactaaaacttccttgtgcactcatgtatgtcaaaaacaaaggtttattgtctgttcatgcaaaccatgtctagcctcaaattctttttggaaaccttgtccaaaatcctcattaaattctcttctgctcaacctagaagccatctgggttgatgacctctcttttcacctggagctagtaatctttttccttgtgaatcatgttgtggctttatcatccgaatctctggatccttcattggttctatcccgttatctggttatctgctataacctgttttcaagtatcggaagttgatttacctaaatctctcattctg

SEQ ID NO: 86064 - DNA, 570 bp, Zea Mays
ggctgatgtgcgggttacctctgcaagggaccctatgccttctccccaccagataattgttggcctacacacatatggaaaagaggatgacttctgatgaagaacgatgagaagggatgtgcctttccaaccgctatcgttgtaggctttgagttcgccgcttgcgaaggggcagcatgtctaagatcttcgatgagcggacatgattgagttcttctgtgcaacttggaggtgttgtgacggggtgcgagggtgaatcaactactgatcatgtatctcatgcatttgccaacatgttaggaggccacatatagtagcctacaattgcaccaccgctaacaccagtcgggtaagcatcttaccgttggctccatcaagatgtgtgtcagctgctaaaagacgtctggaggggtgaataggcgaaacctgaaaaatatagactttgaacacgaacttcacctggggttagcgttagaacgagtaattattaaattggagtgcggaatataattcttcttgccataagttgctcaatcaatgcagataacttaggagctaactcaaaacgat

SEQ ID NO: 86065 - DNA, 353 bp, Zea Mays
ctggtggcattcctggcaatttatcaggaaagacatctgcatatttgcagactactgggatcttcttcagaggtaactccatcatagagaaagcacatgactgagtagaaccttgactgggcagaattaaggtgaagttcccacagaatggagaattaacttccacggtatggctggctacatcaggcacaacttggtgcaaggtcatccaattacctcccagaataatgtccacattttccaaacccaacacaagaagagtggttttgacaatgtggctccctagttgaataggcacactttggtttaattgattagttgaaattttacccccagttgtgactatcataaat

SEQ ID NO: 86066 - DNA, 604 bp, Zea Mays
gagatggttttattgatgagcctttgatccaaaaccaaagtagctccattaaaccatacccgctatgtgctttttgaacacgctggatgaaagtcctttaatgagctgatctgcaagtattagctctatgtttgcatgctcaacttcaatcatttgatcatgaactctccctcctttataatataatacttaatatcaatgtgtttaacatcaacacttgaacctatatgttgcataacctatatgttgcataactcttttgcttcttacctacgacgccacctgcatctgtgtgcattatacgaagctatatattcttgttgtgccttcatgtccatactagtaccctatggatagcaatgaagacaaaatccctgtggtagagtgcctagaaccaaagttatgtggagcaatgaagttcattgttggcacacatgaattccctgtgcttcccaaccctatgttataagacttgttcttatctcccttctttgacttgttcatagccatggcagtgttatttggagccctctttttgccctataagccacatccttgttttccctctaatccctgcctttgttgcgatctcaattttgattgt

SEQ ID NO: 86067 - DNA, 326 bp, Zea Mays
ggctactgaagccaaagaacctacacttgcgcagaaaactgaagagctgactgcaacgccgaaggctgaaaaaattgaagagccgagagcaaaagggacaaaaacatcagaaaggtccagcaatgacccccaaaagaaaaaagatggttaatgttctagatgtactggaaacaataaagtcttcaagctctactccgaggaaaactgccgaagctccaaaagcacaaattgagacaacagcctctgaagccgaagctacaaagcaccaggctgagaccgaagctgggccttcagagcccgtgaaggagaaatccttggaaaccaga

SEQ ID NO: 86068 - DNA, 1042 bp, Zea Mays
tcaaccgctagctggttgcttagcctgccgtagcaagtgaatggattcggttcgttgagcctgtaatgggaacgatgcctaacaaattcaagcattgtaacatacttgcggcatgagacatcgcctcctcccacgtcagaatattttattccaaggtggtatccacgatcactgtaagggaaaagaagcgggtactgcaaggccatgtaggacgggtgcaagcacgaaacatgtttgagaccaccctctctagcgtgcacaaggacatcgtacttgaactgtgaaggtgagcaatcgcccactattatagcagcaacctcaccattggctggtaagttgtactgtgcgtcatgtcgtgtgttgcagcctaacaatcgcaacatcaccttttggttgccttcttcgtctaaacgttctttagcaaagcgaaatgctacaaccaacttgttatgctcatctagcatgttaagcaataaacgggccacctctgggtccggacgatcatggacgtcaacctcattctcaaacatgcccaacctattttatacctcgtgttcagtgtcgtatatgtaaagctgcgcaaactgtggtcgcaatccatggctgggtagcagcgagccaatgcgatggtgtacgacaccattgattttgaaaacataaggtgttgtaccgttatttatcgatctatcaatgacggcacccagtgaggtaaacgcgaaaagggaattgtatgagcgaatttgcctaaggaaccttctggcacgattatcaccatcgaatcgcaataggtcacataagggaggcggtggacatttgtaaggctccagaacaatcttacctcctccacaacaaagattgtacacaagcctgcgctgcgcaacagcagacacgcttttgacccgttcctgaaactagaaaacggcgccacaatgtgggcactcgtctgatgggccaccatagtatgagctatctttgtaggtctctacatgcaaagatgggtccaggctgcatggattactttaggaatacgtacataaaataa

SEQ ID NO: 86069 - DNA, 727 bp, Zea Mays
tccggtatcaacgtctgccaccgcatcccgatgaagcacgagggcctattgcatcggttcaccgcagcggccgcccgactcgcactcctctacacacggcggcgcagacacagctcagtccgagcttccctatggcaatggcgaggggcgattatggaatctgagcgatccgcggccagtttgattgcggtgcgacggtagaatcgcagctatggcttcagggcgttttgtggctagataagggcatgggcgacctggcggcttgagtttcccctgatgagagatcccgacggtggttaaggatggctcgaccatggattcagagaggcgaagtccgcatgggtatatatgtggacgaggggcgatcccgaggtgtggggacggggtcctcaaccaatgcccgcgcggattctagggagggcgttgagctcgggcgttagttaagcgcacgatccgattcctactccgaggtgggagaacaaactgcgcaaggggccccacacgcagcggctaacaaagggagcacgcgagcaaggaggctgaccagtgggccccgcgacgcagtgaaaggggaaatgttgtgtgcgctggcgcgactgccctgtgggcccaccatgtcggcgccgagagtgagtggtgggctgcgcggatcaaaagagatggtgggccgaattgagggttttgggcccaacagtgggattttgcttttccttttcttttcatctcc

SEQ ID NO: 86070 - DNA, 376 bp, Zea Mays
ccagaagccacatcagttgggccacatgtgatcaaaatggttggttacacttagaggttggagaagttgggcttcccactcggccaagagttagccattgattccattttgtcgtctcttccacctagcaatgagaacttcatatcgaactaccatatgtatgggcacggagaagggcctgaatgagttgtgtggtatgctaaaaacagtagtgggtggtataaagaaaaccattggcaacagtagacatgtgatggaggtccaaaataagcctaactttgaaaagaagggtaaatcttagaagaataagaagggcaaggctaaagatactatctctaagctgaacccaacgcccaaggctagactagctgcagat

SEQ ID NO: 86071 - DNA, 470 bp, Zea Mays
agcctaaaggcaaatcattcaaccctaccaaacaacccatcaacaccttccacactgaagtagcgaagcaattgttctctacaattatatataaatgcaagcagagaaaaaagtagcaaaacaattgttctctacagtaacgtataagacatttgtcaataaatcaggctatttttcatctccttaacatgcttagcaactaccctcattatcagcacacccaatacttgtagaaatatattccaaggcacctatatggtgaattttctaagatctaagataaaagaataggcttgactctaattaataggatgaaagattttctacataaattttaaggcaattaatgtatggatatgagagggcagattgacagaacaagcaaaaaaaacttattccagtgcccgtaatattccagtgcaaagaaaatatcctctgaaatgtagaaacagcaagaaacgaacatgaat

SEQ ID NO: 86072 - DNA, 452 bp, Zea Mays
acacttatatagtcctctttagctttaccaaaccatatatcagatgtcaaagcaacagatgaaacatgtttaaggacttcaataagtagttcaacacgatcattaaacagtcgaatcaagtctctagcagtagtttgcctagaagatttaataaacattggattatgggcacaagttatatactcctgaaaagcactagattcaccaaaacaaagtggcaggtctagcctagctattaagcgacaaagctcagttctagcaacaaaaggggaatactcccaatgattaacagatccatctgaattatatttaagcaaatactgagatttcccagatatatccttttctttcttagcagggcaaagatccaagtgtctgatcaaatggccagttccaaatgaagatttagcagacatgttattcttgcagtgaagacaaatggcagatactct

SEQ ID NO: 86073 - DNA, 392 bp, Zea Mays
tatacaatatttaatgtatataacgagcaataaaatgggacggagggaggttgcattgcatgagagtgactcgggcattcttctctgaccgatgcgggcgtaaaacaaacatcacaagtgtactacaaacgatagcttacgttactaccgtgggtcacgtttttgttgttggattagatggcttcgcgtacgtggaagaatctggacgcaaagcaagacgcgcggcagtagtatcctatgtttctgcgtgggcggcgactgtacacagaaatagctgtagaaatccaacacgcgcgctgtggcggccccaaggaagcaaggatgtccagtccagtacagccactacactaggtcgttgacctctcgtggattcccctgtgtctgtctgctca

SEQ ID NO: 86074 - DNA, 380 bp, Zea Mays
cggctgttacctctaaaacgccgacgtcgccatcgatcactcggttgttacctctaaaacgccgacgtcaccatcagtcactcggttgttattcctaaagcggagacgtggctccaaaggattcggctgttacctctaagatgccgacatcactagtaaccgctcggtcgttacttctaaaacaccgacgtggcccgctatcacttagccattacttcaaaaagtgccaacatcaccaataataactcggccgctactaccaaagcgccgacgtcacaaataaagcagtctgaagcatgatccgatgactccaagttactactcaagcattgcagacaaaaaacatcatcggcagtaaatattacaacgatcgacgactg

SEQ ID NO: 86075 - DNA, 534 bp, Zea Mays
ggccatgtgagatcattagcatgatggcatggtcattaatgtgatggagaaacctaaacttgttgtacctagagtggatgatcttgctccatgtacatgagctcgttacgacatggcacgtcaggctcgactaggtaattgggccatgcttagctgacccacgtgtcatagccatagcccaggcacaacacgttggcctgctaaccgtgctgagccgaaccgttagtccaatgggtccattgtgggtcatttcttttaaatggaaaaaatcaacaaaaagcacatcagagtcccacgattccaatcccacgtgctttgttacagccaacacacgatgctagctatgctcagctaacgagttgaacccaggtttgttcatgtcaaatggttaatagatagtgtaaatatatgtaaagtgttttttaaataaaaaataatcgtgccaggtcgggccaacactacgggtcgagattacatcccaagcacgacatgcctctcgtgcctagcccacaacaagaacactaaaaatctcca

SEQ ID NO: 86076 - DNA, 1169 bp, Zea Mays
gttcttttggttcttcaattgttcatttggtgctacacctcttgagttgttattcacaatttcacactacagatgagactaggaggcggcgtaataatgttcaagttatcttcccagaatctgtgttgcccgaagcccagaacgatggcagtggcaccggcacggttcaagccacgcgtgaatcagttgcatcggcttcatctgatgttgcagtcggttcttccataaaggataaagcaattgctgcgctgcccacagaattggctgagatggctaaggatactaagagaaaggcttgatcttcggacccagggtgaaaatatggattttggccagacattgcaaagaacgagatggttcagtgtattttttgccaaaaagttgtaccagcaggaatcaaaaggttcaagcaacatattgctggcgggtttggtgatgtagggaagtgcccaagagtgcctgaagtggttaggaaggagatggcagtctactcgaagaagaatgcaagaaataagatggtttttttagataatgaagaggaggatgtagaagggggtgaggaacatcaggaagatggtgatgcaagagaagtaccaagttctggcacaacaggaaaacaagtgaagaggaaattagctcaatctactattaagtcattcatggtttctggtccagttaaaccacaaacccaaaagcaatgcaagtcggttagttccatgttgtgtaagacaccggaggaagttgttgcagaaaggaacaactccaagtgttctcaaactactcttgatcatctcacaaagaaggacaaagagtcaaaacagattgttgatgatcatgtggctaacttcttaattgagaatgggataccattcaatgtcattaattcaagaagttgggaaatcatgcttgagtctattggtcagtacggtcctggttataggtcaccaacataccatgattgcaggggcaaattgcttgatagggctgttggaaggacagatgaactcaggaagaaacatgaagatacttggaaggagtatggttgctcaatcatgtctgatgggtggacctctacaaaccatcgtcatatcatcaatttccttgctaatagtctaacggggacctttttccttggttcagtggacgcttcaagtgaggtagcaaatgca

SEQ ID NO: 86077 - DNA, 435 bp, Zea Mays
aaaaatgggaaaaatgtttaaaccatagaacaaccctaattaggccatttaagtagaaagggagcaattggtaaaaagaccatgaaaaacatggaatcatggcttaggccaattataaaagtcgaaatacaataattaagctacaacaattgttataaatgtttggccaaaataattgattaaaatctccaaaaaggccattcaagtggaagctctctagggaaaatctgaaattcagattgctgaatttcagccttcacctagaacttgagcatgttcaccttgatccctagctcaaatcattaagtccccattcacaaaattgttctaaactaacccctctgcaacgtgtgtgaagatggcatcaagattcgtgccctagacacgtcaaatctgggatttcctctccaagttcagtagtgagacaaaccaaac

SEQ ID NO: 86078 - DNA, 364 bp, Zea Mays
aaagcttacaacttgtctattctctaaggcttcactaggttggctatggcatagaagacttggtcatgttggaatgaagcaactcaatcgtttaaccaaacatgacttagttcgtggcttgaaagatgtgaaatttgagaagaacaaattatgtagctcttgtcaagccggaaagcaagtggcaaatactcatccaaataagagtcaaatgtcaactcatcggccattggaattacttcacatggatctttttggaccaacatcatttgtgagtatttgtggtaattcctattgccttgtgattgtggatgattattctagattcacttgggtttattttcttcgtgataaatctattgtgttt

SEQ ID NO: 86079 - DNA, 495 bp, Zea Mays
cttgtgtgatgagttgtgcaaaatgaagattgaagtaattccttctggtgctttgtctcacatttctgttgagccggctttgcaagactagatcatcatggcccagctcaatgacaagggagtgcagattatcaaggagaatctccatcagaagactgagaagtataaatgtttctgccaagatggaaagggtatattgtggtttggaagcagattggtggttcctaaaaatgaggatctcaagaagagaatcttggatgaggctcatctctccaaattctccatgcatacagggagcaccaaaatgtaccacggtctaaagcccttgtattggtggataagaatgaagagggagatagcccgatatgtatcagaatgtgacacctgtcagaggataaaggcaagccacttgaaatcagctggagctttgcagcccctgtccataccttcgtggaaatgggatgacatcatcatggacttcattgtgggtctgcc

SEQ ID NO: 86080 - DNA, 442 bp, Zea Mays
gggtgattactataccctgctaacggagtaatcggcttaagtcggaaatgccttaatttggtgcgacatgctcacgcatacataactctatgccccaccaatgcagcgatcgacttaagtcggaaatgccttaagtcggtgccacacgatcagttaagcaacaaaaagctcatagcgcatactatgccctactcacactcaacaaagaaggagagtaactcaacgttcgacaagagttcaaaaaaccgcgaaaaaattccatctcaacgaaaagttgttttatgttcgctttcactctctggttactatgcaggagcatcctcgcgaggaacctcgtccgcgggatcaccagatgcagacggattactcaaagtacctcatacaacaagtacatcagctacaatgtcatcaggctccacaacgccaggcctcttcatcaaaa

SEQ ID NO: 86081 - DNA, 618 bp, Zea Mays
ccgaggtgggaccttcggaaactacaccagaaaatcttgtggaagagagccttccagagaaatcctcggcacctgctcccgaagcaccttccaagagtgatttgaattttattgtgcgacatgcttcgagaaaacaactatcagcagagcagattgacgaaactgaacattatgctaaggagatgaagtacccccggggatccttggtatatggaggagataacgatgatgatttcctatactgtctacctgacggtaaggagattaatgtttgctatgaaatgatggataacatggggtatccgaagattgaactcggcttgtctgtgatgaccaaggatcagcttgcagatagccttgcctacaacagcctgaaggtgtgtatactttgatttgttattttgcaatttgtgttacgataaactatttttgtggtatttcttatggtcgttacgtgttaactctttgttttccagggattaattctaagcaaggctctgaaagcccagaaagatgtagaggatgagagctgccgaatagcgcttggaaaccttcgctcgaaggtcattacattaagaaacgaagctcttgagaaggataaaatcctactctctttag

SEQ ID NO: 86082 - DNA, 275 bp, Zea Mays
cacggacctcgcgcggcagagaactccgtgctcgcccaaattccgcacctcaaccaccgagctcctcggcgcaattttcttccccatgcctctataaaagtacccgtgcagcagaagcatggagagcttgggcgtcgatgcttgtgctctggcatcgcgctgccgtaaccgagcaccaagagcgagaagagggagagaaaatggatgtcgccgtcggggtaacatgccaccaccaccgttggtgccccgctggctaaccaatgagctttgccctg

SEQ ID NO: 86083 - DNA, 356 bp, Zea Mays
tattactgaagtttggattaaggagaatagttcgaccaaaaatctgtctgatatgtatcaatctgaatagtcatagtggtattatttggatgttcgcgtcatgtcaattttcttgtttttacaaggttgtcttctaggagatgcgtaaatgcttttctctgcttcattccatgcataccagcctcaaaaaaagacagtagcctctgcttattcttatggttcgctaattcttatgtcttttttccccagtgatttgggtgtttgcgtgcttgctgcttgggggaattttatcacagcttggaggagaccgctcgccattttgcgtttccaatcgtcggttagtttgtgtgcctatg

SEQ ID NO: 86084 - DNA, 935 bp, Zea Mays
tgcacattcaacataccacatacggaatcttgctcgccgatatttgatgcgacgccgcaaataaatgtatgattactccccctcactgtatttttatataataagtggtgtactaaacatctaatctgtatctaccataattgttacagtgtccagtaagtgtccacctggcggcacaaacagatctccccgacagtggcccatgttttgatcagactccatctgaacatgtcagctcattaatatacattttcattataattgccaaaattgtgtagagattgaaatctatataatatattaggtttctgttgaaaccgaaccagacacaaacacttctcaggttgaccatgattcacatgattcggatatgcaatgtgtgctagctctacgtgactacttgtgtggtacgcaatctgacaacagcaggtataaagtccactaaattcacttttgtggatattctagtactcgtacgcgatctcactaattgttatcaaaatgtccacaggaacataatagactatggtgaatattgtgcgacatgttctgatatatatgaatctttcgccgacgggaagtgcctcgacaatgtgttcatgcagtgcttcattcaatgtgttgatgatgatgccataaatcagcagccttccatgagttccagcagattgattattgacgttaacgttggggtaaactatcgtaacatacatataccatattcatatacacaatggtatcccaaatatactgactccattaaattttttattgtagtcactactgaacttcgaggaacaggaacggcacagccgaaacccacaaccttttgatgaaactgtcctacacacatttctcgacaatacattgcctgagacagacaaattagataaatgccaatcgctaacaattgtattacaatttacaaacatgat

SEQ ID NO: 86085 - DNA, 436 bp, Zea Mays
tttgaactgtatgatatcaattttatcggtttcctttcctacatttgatctatcatatacatgattatatagtgtttaatttatgtggttgttggatggttgggtaattaatatgatcgggactaactacccgacaactatctggtatttacccgagtagtatctgttatccgtttcttacccgcccgaattattatccggtcccgtcatgtatccgtctcgaatcttaactacccgtatctggtcctgtatctgatagaaatacattagtgtaggatacgagatgacactgtatccaactgtatccgtcccgttttcatccctaggtatgtgtggtctggtggttagacccaaattttggcagcagaggggtgtgggtttgagtgctgttccacactattttttgcggtcgctgggtgtggcgagggtgaagtcg

SEQ ID NO: 86086 - DNA, 420 bp, Zea Mays
catttcatatacttatgactatgtgacttatacgtgctcacctcttctgacatttcagtgacctcgcctgcccgtgagccgtctcccgtcctgcctggattttcacctctcgtgtgagatttccaggtagacattcgctcttttgtcatcctatcgactgtaatcttcttatgcttagcttctctctctcatttgcagtcatcaggtcaggatgccacgcatgaagaatgtgtcagcgccagcgggaggagatgacgaggaccctcctcgccccttcaggcatgttaaggggaagacgatctacttagagcagcaagaaggccacaagaagcagcgtctagatagagcagcccgagaagctctagcagccgcagcagccgctgagcaggcagagagaggagatcagctgcggattttttc

SEQ ID NO: 86087 - DNA, 491 bp, Zea Mays
ttctaggtgtattacaacacaaccatgccaatgcacatgatgtcatgccaagttttagttctaataacaccaggggtgttacaaagacatccatgaattcctccaccacaaatatgctttctactgctagactgaatatcattgggtcttgggctgatggttgagctttacatgagactgactttcctggtgatcggtgagaagaaatgtcttatctgcgcagcctatgatgccattgtgccgggacaaccaatccattcctaggattacatcaattccgtgggatggtagtacagctaagtctgccaggaatactaccccacttaaaaggattctgaattgggagcacttgaggtggtagagaaggtctggccctggggttcaggtgaacagagggacttctaatggtgcagtggggatgccatgcctttccacaaaactagcggcgatgaaagaatgagatgctctagaatcaaaaagtaatgtggtag

SEQ ID NO: 86088 - DNA, 484 bp, Zea Mays
tgcaagcgatgcggggaatgttttggtaaaggtatatgtgaaatgtgaataagtcattctatgtgtgcggtatgtgtagtggtggtatgagaaataggtttaaaatcaactagttgacatattcagttaagagttgtttcgttaatttggtttgtatggtgaaatgatggcatgacttcgtagccatcacgtcatttattatgtgactagggttgagtgtcaaaaaaattggaatagcgagtggatgataactgaaatggctgtggaaaatgaagtgaattgttgtcattactaggactacatgtatagttttgggtatacagctgatctagtaaagtaaaatgtgttttctgtagatatgttctatataaaagttgtagttaacttatatatctagcttttcctagagtttcatgatcttaggagtaatggtttagaaattatgcttctcacaagtccaacacctgaatctgcccaaattctg

SEQ ID NO: 86089 - DNA, 441 bp, Zea Mays
cagccactatcgacccgagagcgagtaagatgactcaatccatcttttcaatatttcgatattcgatactatctctcacttgctgggaaagaccgcaggggtatcgttaaccaatgaccgcgaggcagtccaggctatctgaaaagattttttggagtcgaaggtcggcccgtaaagcgtttgtgactgctctcaaaaccccatagcaaggggcgattatgagatctgtactatagcggccagcaacctagtgcacgagcgcaaagggcatttctaaatcatgtttgagtcctagggaatgtctgactcatggtttatcgtggaaagaggcaacgatccgttagacccggtcgatcggggtcgataactatatgattcgaaacctaggaccatgaggacgatcaccagcggaccccatgcctgactcttgctgaaagagcc

SEQ ID NO: 86090 - DNA, 453 bp, Zea Mays
gcggttacaaacacccgaagggctatgcactcggcgataactcaggcagctaggcgataaagaccccagatatgcagggatactgtaagtgcatctagcccttttgtgtggttttggtggattgaatgacaacacagttaaaggactgacaagtttgctaaatgttgaacaagaaattgagtatattgaatacacttgaataacgtataatgagttgtatactaaggttcaacaacaagtcaaacttgatgatattctattgaagaatgaatcaagagtgcataagtgaggaaataccaatcaaaggtcaaatgacaaaggagagagagtatacaatggatataacatggtctctactttggtttgcttatacggacaaagatttggaaaatcactttgcattgatatgatcaagatagaaatacgaagataaagattgaagtcaatgatatg

SEQ ID NO: 86091 - DNA, 605 bp, Zea Mays
ttcttgtatccctggaagtgacaacagacaatcagaagaagtgtatgaagaagaaggagatgatggagatggtgaaggattcataaactccacacccactagtagcagccgctaaagggctagtagtacaacagacacggccactagtccacctaaaaaaggaaaaagttctatgataaaggtgttagaaggaataattaatgaaatgcaaacatcaaggactacagatactaaagttttcacccaatttacaaatacccagcaaaatagaagtacactacccatagaagaaattgaaagttgtttgaacttggcagaagcaagtggagctgataaagcatcagatgaatactttgtggccaccaagttgtttagggatgactacaacagagctatcttcaaccaatttgatacagcagaccaaaggttcaagtggctgcagagatggtgcagggagtactatggttgactaggagattatgtcatttgagagtcttttagtctgttgtgtggacttatgtcatttgagagtcttttagtctgttgtgtggacttatgtcatttgagagtcttttagtctgttgtgtggacttatgtcatttgag

SEQ ID NO: 86092 - DNA, 440 bp, Zea Mays
aggatacactcatgtattggtagcagtcgacaaattcaccaaatggatagaattcaaacccattgcttctttaacctcagccaaggccgtggaattcatacaagacataatattcagattcggaataccaaacaatatcataactgacttaggatccaacttcacaagttcagaattcttcgatttctgcgagcaaaagagcattcagatcaagtatgcttcggtagcgcacccgagggccaacgggcaggtcgaacgagctaacgggaggatattggaggcactcaggaaaagggtcttcgaaaagaatgaaaagtttgcagggaagtggataagggaattgccctacgttgtttggagcctaagaactcaacctagccaagctttgcatggaaacacccccttcttcatggtctatgggtcagaggcagtattacccg

SEQ ID NO: 86093 - DNA, 950 bp, Zea Mays
gcgtcttggtttgagtcgtgtggactaatcgagacgtgattatgtgtgcaacatgtctcttggcttgtgatgcgcatgtgtggaatcctgaaacaatggtcaatggtggaggtgaaggccatgtgggttcgtgctaatggaccgatagtggtgaaggatgagcgttgggtcttgactaaggactcgtgaagccgggtgactagttgtggtgactaacacttgaggttgggacattgaaagtcgcctgaagtaggatgaatatgcgaagcctaaaaattacaaactttgaacacgaacgtcacccgaggttagagttagaacaaatataaatgtaatcagagtgcggaagagtagttcttcttgcaatgaatatcggcacagggtacctcacatcaaaacggtgcacaaagctgtaacaaccgaagttgttatgatactgctccttcccaattgccttcgtttggtaggataattcatgaatgttgcaaaaacacttggcatctggctccagcccttggcttctcacggcccaaataaaaactccgactttaatcaaggcttcaggattaagctgatgaagttatatctcaaatgtctttagtacttcgaccagcatcttgtgcaacggaaaacgaagtccagccttcataaaacttttaaatactaccacctcatctgcctcaggaagaggaacaatgttttctcccccagccctcactatagatatatcatggaaatatttgcccttcatcgcttcaatttgcccttgtttgaaggtggactcccgaaaacaacatggcttggcctccacggccgatcttcggtatcttcgttctcactttcaacattgaagctctcgctatcgctggaatctccagatatcctagctagcatttcatcagtgatttttcaatattggtcctctccacggctttgtagaaaccagcgag

SEQ ID NO: 86094 - DNA, 521 bp, Zea Mays
ctgctgacatacatgcttataaataaaatcaaaatagtagtgaaatcgtaatatattcactatgaaataaagtatacttattgtgaaaatcaatcgtgagaggagtgctgcttcagatacagaacaacttacccttgaaagctatatgaagatgagtagatggtctccaattacttcctcatgttttatgtatctgacatgttcttggtactgacttaatttaagatgttgtacttctccagatggaaatgaggtagggaaggtacagtgcagagggagaagaatagagatgcttcgtcgtcatcacgaggccatcaaacttgaagagactgcgggtacggtccttcctccaccgcctgcctccctgcgccttcaatttttccataggtatcctgggttgcatgtgtgggtgggtgagggggtcaatttgttgtggtatgttgttttctcataaacaacatcatcgccatgttgtcttatatatttctttgtgtaacttcggtttggtaccacaacagaat

SEQ ID NO: 86095 - DNA, 467 bp, Zea Mays
attaaacttagtgaactcagggagtcgatacttgagtggcacagggatcggatcatactcactgggatatggtttggtgtagctaattgccttttgcctcggaatcatgctaaactgatccctcggaataatgctaaactgatctgcagtagcagctcctaggctgagctttcatgactcggcctagtggtgtacttatccagccaagcttatttctcgtcgtctgatctataaactcctgctgcacccgtttgcactaggtgtgctgttctgccatgatccgggacatacatacatgaatacccgtgaggaatgtggttaggcggattgttgaagaactagcaatcctcaggaccaccacttgtcttgtaaacaacatacattggtgatccaagtggaggtgcctgcggggcggcgactaaatatggcagtggtggcctagtctggaacaaaatttcccctttgta

SEQ ID NO: 86096 - DNA, 573 bp, Zea Mays
tatgcagacaacaggcggagagaacttaggttcgaggaaggatacttcgtctacctcaaggtctccccaatgcgcggagtcaaaagatttcaagtgaaagggaagctagctccacgattcgtcggcccctaccctatcattggcagaataggacccgcagcctaccgccttgaattgccagaatccatgtcagatatccacaatgtgtttcatgtagcccagctccgcaaatgcctgaaagtgccaaaaagtcgcatcgaagaagaggcaattcagatttagaaggatctgcagtaccgagaaaagccagtaaagattcttgactcagccgttcgaaaaacccgaaactcagaagtaaaactttgtaaagttcagtggagcaaagaaggagaagaagaagctatctgggaaagtgaggactctttgaggagggaatacccttaccttttctcaaacccagtctaaatatcgagggcaagattcctttaagtggggtaggtttgtaacatcccaattttaaccccaaggttagaaaccctaaaactcctaaacccccccccccttaattatctc

SEQ ID NO: 86097 - DNA, 533 bp, Zea Mays
ctttgtacttttagtgatagattatgatttcgacgacaatgggtgacaatggtcacagcctagtgccttgctgcgcagggcatgctcggaatgcgcagggatcgaagaagatgttggctgtcaacggtgggctcaccgacaagtccatagaaaaagtaaaataaagggaaagggttgatcagtaatggattgataaaaagaagggaactaataggatacagatgatgagatgaatcttatatgatgctggcacatatgtgacgtaggaggcaaatctaatttactatggattctcgtctatcagatctccttatagtagtgggcgttgtcacacctccctctatatctctctctctataatcccttcattcccccaaatccaccctgcccccaaatccttgtgcacggcgcaccttcgtcgacgccccgccatcatcgccaccaaatcctcgcggtgatcccctagcgcaatccaaggaaagtctccgtcgacgtcccaccatcatcgccccatacgccgtgctcatgtcccc

SEQ ID NO: 86098 - DNA, 482 bp, Zea Mays
cattaatccaatcatcttcaatcttgttacacaattaactcttgaaaatttccctattcaaggaactagatggctcatcatgaccacgaaaacctaagccttacatcaaaagaaatcttgtagaatctaatgaacaagtcaatcggattttgaagagctcttcagcctggggagtagtactagacatgatagaatctatgcttttcctttgattattaaaatcatcaaaatgcaacttagcattgttgtggatactattaacaccaccaacatggaatctgaactttttaactgcatctttcccattattttacctaactttgatgaaaagcttcatatttatcaccatttcttgttagcttgttagcttgccagcaggggcgcagaacggcggaaggttgcagacaacagcgaccgcatcgcgcgcttcattgtagagctgtgacggcagcgtacgagagcagcaatgaacagcggcggcg

SEQ ID NO: 86099 - DNA, 314 bp, Zea Mays
caggaagagttggaaagtgggccacagaaatgaatgaattcactattgattttattcataggtcttcgatccaatcccaagcgttagcagacttcattgctgattgacgtcaggggctcaggtcgaagaaagcacaacagatacgaagcttggacaatgttctgtgatgggtcaagggggaccttcggcgcaggtgcagctgctatcctaatttcgccatccaagatcaaaacccgctatgcagccagattggagttcaactacacaaataacattgcagagtatgaagcccttctcttggggcttcgaaagct

SEQ ID NO: 86100 - DNA, 1818 bp, Zea Mays
ataaaactttcggagatgctcgatattccaagagttcccaatcggagtaccgtccatttgtgatagccgataggagaccggtcgagtgacctccgtcaccacaaagggcccctcccagggtggtgatagcttgtgacgtccttctcctgacagtatcatgcggagcactaaatctcctactacgaaggataaaaaacggacctccttgtcatggtagcgccttagagtttgctggtacctagccgattgaataaccacattcaatcgttcttcttctaacacatcaatctcttcaagccgagttgcctccgcttctgcgatatctttgaaagtaagtctcggtgctccaaacgctaggtccaccggtagcactgcctctgagccatacaccataaagaaaggggtgtttccttgcagtgctcggcttggttgagtccgaaggctccagaccacgtacggcaactctctgatccatttccctgccagcttctcgtttttgtcaaagaccttcttcttgagtgtttccaggatcattccatttgctctttccacctgtccattggctcttgagtgtgctactgaggcgtacttcagttggatacatttttgttcgtagaagtcgaagaattttgcgcttgtgaagttggatcctagatctgtgatgatgctgtttggtatcccgaatctgaagatgatttcctgaatgaattatactgctttagcagcaataaaggaagctataggcttgtattctatccactttgtgaacttgtcaatggccaccagtatttgtgtgtatcctccttgagccttcttgaatggtccgatcatgtccagcccccagcatgcaaaggcccaagaaactagaatggtctgcaggcgctgtgctggtaaatgttgttgcttggctaggaattgataggcttcgcacctttgcactaggtcagccgcatgtctcttcaccattggccaatagaatcctgctcggaatgctttcccaaccaacgttcttgacgctgcgtgaactccacattgaccagcatgaatttcttccagcaggtgctttttcgtgctggtgttgatgtatttcatgagaatacctgcaacccctctcctgtacagggtgtcacctaagactatgtagtgggccgactgcctcacgagtcgctcagcggccgacttatcatccggctcttcttcatctctgacgtacctgataatcggcgtcctccagtcgtctgggtcttgctctgcaggtggttttgcttgttctattgctttacattcttctctgggacctgatgaaatgctgggttgctgtacttcctgaacaaagacatctagtggtgcctgagcctggcttgatcctagcttggataatgcgtcagctgccatgttgcggtccctccctacatggtggatctccaagccttcaaacttgccttcaatctttctgacggttgcacagtagtcactcatggattccatagagcagtcccaatccttgttgacttggcttattaccactagggaattttcgtataccatcagcctttttattttgagtgacatggtaatgctgagcccatgtatccgagcttcatattcgtttgcattgttggaaacgggaaataggagttgcagcgcatacttgagttgatctcctttcgggaagatgaagaggatgccagtccctgctccttgcagcttcagcgactcatcaaagtacatcttccatactaccatccgctctggattctctgggccctgctgctcgatccattctaaaatgaaatccaccagggcttgggtcttgat

SEQ ID NO: 86101 - DNA, 272 bp, Zea Mays
gccggaggcctcattgtctcaattgctttgatcttctctgggtttgcttcaatgccccagtgcgaaaccaggaatcccagcaacttccctgcggagacaccaaagacgcacttttccgggttcagcttcgtgcatgttgcccgcagcttgtcaaagaccagggttaagtcttccactagggtcgaccctctcttagtcttgaccatgatgtcatcaacgtatatctctatcctgtccctaatcaggtcaccaaaggtcttactcatcgcccg

SEQ ID NO: 86102 - DNA, 419 bp, Zea Mays
attcaacgaaggggacctcatactcgtaagaaccacccagacagagtcatggggcaagctagagccgaagtgggaaggtccattcatagtcaagacgaaggcatcccctagtgcttataggttggcaacgtcatctggcgaagacttagaacattcctggaacatcgataatctccgagaattttttgtttaagtcccagggcctacgcgcctttgtaattctgcaaacaatgctattcaggcccgcactcttttctcccagggggtgaggtttttaacgaggtggcgccatgtaatataccagtgaaaagcccccgcaaaaaatttcaagaatcacctccatgtcaaaaaagaccgcgccgacggccttcagcattcgaccgattcgaagtcgacaggtagcgtagactaccctcgcg

SEQ ID NO: 86103 - DNA, 592 bp, Zea Mays
aacgaacaagagccagatagggaaaataacactctcggattgaaatggaataagtgaggctaagaaataggtaaacatcatggtaaatatggagagaggtcaagggtcaaaggtgataataggcaaggatatacaggaagaggtaaatgtgcataaaaaccaggagtctaggtacaatcaagaatagaaataagataagtcttgcaagaggtaaagtataggatataaccacgggtgagataagtaagagaccacgcttgaactaaggtgggagattggaggttttagataacgaacatagcgtaatcaccaaggtaagattgagagatgagaagggtaaaggcaataagaagcaaaagcacaacaaaggatgaggttacaaactcgcgagccaaagaagaggatatgaccaagagaaagaaggtatgagacggaagaggggcgattttaaagggcaagtatgagacaaacatcaatgtaggatatagaggtgtcaagggtgcatatgataataattaaaaagcataacaaaggatatagttaagacaagactcgcgaaacgacaaagtggagaaaacaatcaagggtaaga

SEQ ID NO: 86104 - DNA, 1422 bp, Zea Mays
cattcaatctggccttggtgacagcaccagtccacttccagccgggatccctatccactccgttccatccctcaatctcatctgctactacactctcctctatgcacaccacggtggcaacaccatatcactatcataacatatgttttcccacaactatcttgctctaacttaaaaaagttacactcagtaatcagcatgagctttctatatcactaaaagaatgcaaaaaattataacagtaagaggctatgttcattaagaatgattgagatcatatattgaggacttgagacatagcattaccatttttcaattctccccacttactgcactgaatacatgcaactccaacaatcttctgtactggccttgttcaatctcagcttcatttgcaccatgcagtagcaggagctcaatgatgcaatcttcccaatcaatactgtcacaggaacctcttcgtctctttttcctagcacctgaacaacctgtcatattgtcactgggaaggatatgatcgatatcatccttcttctttccccctcgattcttcatggtcaatttttttcttacaacgtcttctgagttatttgcttttgcagctggagcagcaggagccttcctagttgcatcaattcgctgcttagcagcttcaatacgtgctctcctctgcttctgcaactccaaaccagcagtaaacgatggtggaggtgcatcatagccaacgtcaatatccaccacatcctcaagcagcatgtcctttctccaaccattattcactgtgtccatgcatggctccagctccagtcctcctttcaatcgcttcctcctgtcagtacctttaccaaccttcccaagtttctgtagctgggcaagcctatttaagacattttggtaagcatctgataggcccttctctgagatattctgattttcaaattctttctcctctggctcaagattatcgaaatcaaagtcatcagaacccactggagtaatgtgaaggtatttagacacttcgtcatcaactttagagttagcctgcacaattgcagcaatgttcggagcgcagctcataagaaactcttcagaagggtccgattgtgaccgcatctccatgagccggagcaagaccggagcgttgaggagcaggttcttggcattgacatcggcaccccatggaagcaggtgccccgcgacatgcaccagggcgtcaacgagctccttgtatcggagcaggctggtcctcaatcctgccgagatgtcccttgcaatgtcctccaaagagacagaagtgaccccgttcacctccgcagagaaggcgagcagagccgcgacgaggggaagtggaaaccgccccgtggtgagcgaccacttggatgcgcagcggaagaggaaccgggcctgggcgagaatggcgtc

SEQ ID NO: 86105 - DNA, 495 bp, Zea Mays
gtaaaagtcgacatctctagcatactagaagggagagccatctaagttttctgcaagagccttagggatcggaagttatctcataaactcatacaaaaggctacaaccactctagctgctctaattcaagttgcacacaagtacgccataatcgaggaggtccttcagcatatgacttcgacccaaaaaagacagagaaaagtaggaagagagggctaggctagaaaggagcatggataaggaacacaagacaaatcgttaacttactacaacaatttaatagggggctcaacgaaagactttcattccaagggaagacaagttacgatattttttggaagggcgttgcacctttcatctaggtggcaagcataaaaccaaggattacttccatctcaatggatactgtcggtaccctgaaacaggggtacctcttactacagcatgaagacacggtgcccacgcggctatctctagtcgtgtggtgaacagcac

SEQ ID NO: 86106 - DNA, 643 bp, Zea Mays
cgacggggtaggaaagttaaatacctagatagcatcaaaggatgacactttaagtggttcacaatggataatcacagcaagtccttgccagctcattcttgaagacagctagatgttcacgtgccaagttggatagaggccccaaccggctctaaagttgtagaggtgaaggtcttgttggttgagattgttggtttaaaagacaaaggtctgaccgctgaagctatggtggtcgactttgttttcaagaatatccagcctctaaagacagagttcaccctacatatgtgtataccggggtcatagatccttcccaggtgacagacaaacgaatttcaaaggaagacatcttgagtcgggtcgagatgatgctcaggggtgctattgtgaatgtcggtgctcctcgatcttactctgcctggaaccttcctccattggtaagttttgaccacttggtttcttgttcgacgtttgccgaaattttgtatgctttgtgctgatcgtgctattccattgttgcagagccctttttctgagtttgtatccaaccctcccatcattgaagagggtagcaattctagccatagagtgcagcgttccccagacaagatagtggccatagttgctgcgtactgagatctgc

SEQ ID NO: 86107 - DNA, 383 bp, Zea Mays
cgcatgaaaacatgtacaactacaaggaccaagatcgtgatggtcacaatcatgacaaccttcgtcatgaagaattcaacatctaggatttcctctatgatgaagcttccctgctgacaccagtattacaagctacaccatggccaccattgtacaggcctcctacactgcctatttacgatggcctaactgacccaaagtagttcctcatgagctgcgaggctaccatatcctcgtatggcggtaactcaacagtgatggtgaagtccttcatcatgaaagtccaaagtgtggcccagacttggtattcatcgctttggccaaggattgtcaattcatggcagaagctgaaaaaaggcttctcactagcttccagggttttt

SEQ ID NO: 86108 - DNA, 490 bp, Zea Mays
caactcagcggttatttctaaaaacgctgatgctaccagacttcacccggccattgtttccaaagcggccggcgtggcccgttatcactcggttgttacctctaaaacgccgacatcgccatcgatcactcgactgttacctctaaacgccgatgtcgccatcagtcactcggttgttattcctagagcggtgacgtggctccaaaggattcggctgttacctctaaaacaccgacatcaccagtaaccgctcggtcgttacttctaaaacaccgacgtggcccgctatcactcagccattacttcaaaaagcgccaacatcaccaataataactcggccgctactaccaaagcactgacgtcgcaaataaagcagtctgaagcgtgatccgatgaatccaagttactactcaagcgttgcagatagaaaacatcatcggcagtaaatattacaacgatcggcgactgaccaaaaggcaaaataatgaac

SEQ ID NO: 86109 - DNA, 379 bp, Zea Mays
cggcgcgctgcgatttgagctgcgtttcccataggatcgccttcacggggttgccctttgtctccacttccaatcttaatgataaacgtcactgcggacgacgttcggttcagtgctggtttatctgtaataatatttgtcctcggttggattgctgacgccggtgcacatcatgtgttgcacataatgtactggaagctgataatgatgcgggttattatctgggcatgacaggcttaagttaggacatttaactgcaggatgccatgataaatgtgacaccacgttatttatggtgacgtggaagaaagagaaatggagagagaaggaaagcggattgcccactaagtagccagctgaaagcgggctattcacggac

SEQ ID NO: 86110 - DNA, 680 bp, Zea Mays
agcaaatgaaggacctgatgaggaattggacctttttaggccccctccttctatgaaccttgctgacgaacggtctcctgcagtaggaaatgaagaaaccaaggatgatgaagactagaatagtatagtttagatgttatacttatgtaaaataagtactgaagtcaagttgtacactggagtctgtataattacattttggtaatgtaatatgatggtgtatgttggcatgttatattttcccaaatgtttctttgcctcagatgccatcacggactcgcgcacatgatggtgcagggacttcccgtggtcgggaagatactcccaacccgccaccaataccatcgactttggctgaggctatcgctgctttggtcaatgccaccgcagataatacacgcttcttgcttgagatggtgggcaatcagttccaacagcatggaggcagagctcctccgcaaggacatcgtgaaactacataccaggaattctctgagacccgacccccactctttattaaagctgaagaacctttagaagcggatgagtgggtaagagtcatggaacaaaagtttggattgattcgctgcacagagacgcagaagccattgtttgctgcccaacaactaagagggtttgtcagtacttggtgggaaaattttgtagcagttcaaccagcc

SEQ ID NO: 86111 - DNA, 630 bp, Zea Mays
ggagaagctgtttccaaataccaaactaggaaacatcggtaacgctctaatcagaactggtacaagcgcatagtgactagcattattcttttttttctccccaagcgtctcgtcatttgattcttctcgagacatagatatctgactccacctgccttcttccttgagcatatgatgactggaagaaatcatttatctctcctctctccactctcctctcactccccctctctctaccgaccatgacatacacaggtactcctatcattcatactaccaaattttccaactaagaatcatctagcagttgccactagctaggaaactagggttcagcttttgaagagaaaagctaaagcaaagctgcaaaggtgtgacacacacacaggagtagtagaaggaagagggcagtagtactgtatatacttgagcaaatatgcgaagaagccttcttaagccccaacattctatatatcttcctgacaccaccagggggacagcatcatcacgaccattgaacaaagatgaaaggatgaagaagcaatgacaagagcatcaatcaagattacctaactgtcaggttttaaactttgaatcatgatgaacacagtttcctagctagctactcca

SEQ ID NO: 86112 - DNA, 537 bp, Zea Mays
atcaagtatgcatctgtagcacatccaagagccaacgggcaggttgagcgagccaacgggatgatactggaggcgctcaggaaaaaggtcttcgataagaatgagaaattcgcaggaaagtggataagggaattgccttatgtcgtttggagcctaagaacccaacctagccgagctctgcatggaaacactcctttcttcatggtctatgggtcggaggcagtgctacccgccgatctcaagttcggggcgccaaggttgatcttcaaaaacatagcagaagtcgaggccaccaggctggaggacattgatatacttgaggaagaacggctgaatgcggtaatccaatcagcacggtaccagcagactctaaggcgctatcacgacaaggctgtgcgacagcgatccttctcagtaggagatctcgtcctccgccgaattctaacgggggagggacggcacaagttatcgcccttatgggaaggacctttcatagtagcagaagtcactcggcccggatcatatcgtctcactcag

SEQ ID NO: 86113 - DNA, 598 bp, Zea Mays
tgcgacatacctcaagttctctattgtataggagacaatagagatagtcatcctcgtcatttccaccatagacaagagaggtcgatgggtactttagatcttcagcataatctttgacttcggcaatttgctctgcagtcagtccccccctgaagcatgacaacgatgtacttgtgtcgtctaggcggtaccatctctatggacactgaagctatttcctctttagagccctcatccttaggacctacaacttcatccctctcttttcccaaatcaaggtcagccttcagactaacaaataactccgattcagttttcatgctctcagcaatagatgtgctaagaggagtttccatgaactttgccaaggcgaagccaccttcgtaggctttagaacaactttcagaatgttagccatcgtattccctttccggggtgttcccctaaggattgtcttaagcttcggccgagcctctaccttcgtcgatgcttctggttacaagctggtcaaaggcacttcaacctagattagcacctcagtaagttcctcctcatccttcttctcctcctacattgagaattaaaaccattgtaaaaa

SEQ ID NO: 86114 - DNA, 384 bp, Zea Mays
ggacgcttgttttgcttcggcagttgaagaggtcccttcgccaaattcaggcactacggccggttcaatatatcgcggccggtgagtcaaaacctttattttcttacccttcggcacaacagtggtggccgaagtggcaacttttctcttctttccttgccttcgtagtgggtagtgatagtcagggtatacgaagccaattgcatcaaacaccctgttcaatcttttcttccctcgacccccgaaagctgcggacaaggcatcatcttcggccttgaaatatgtcccaagcagctcgtcgctggtagcttcaatacatttcaaccagtcatcatttggttcgtcaaacttttctctaaatctgaaggtatacttcaatcgaac

SEQ ID NO: 86115 - DNA, 916 bp, Zea Mays
tagtggtcaccctaagttaagtaagtgtgagcatgttgcaccatcttaagtcactgccgacttaagccgattgctccattagtagggtatagtggtcaccctaagttaagtaagcgtgagcatgttgcaccattttaagtcactgtcgacttaagccgattgctccgttagtagggtatagtggtcaccctaagtcaagtaagcatgcagatcgaaaacagttcgagtgcctttgagaatgaagtctttttattgatgatgtattttccgattacagaatacaatgctgccccgatagcttttgaaatctagctaggggtaaaacttcctgagatgctctatattccatgaattccctatttcggtgccatccatttgagtcagtcgatatgatcctagccgagtgacttctgctaccatgaatgacccttcccatagtggcgacaatttgtgccatccttcccccgttagaattcggcgaaggaccagatctcccactgcgaaggatcgatgttgtatgaccttatcatgatagcgcctcagagtttgctggtacctagctgactgaattactgtattcaatcgttcttcttccaatatatcaatatcctccagtctagtagcttctgcttcagctatgttttcgaagatcagcattggtgccccaaacctgagatcggcacgtagcactgcctccgaaccatagaccatgaagaagggagtgtttccatgcaaagctcggctaggttgagttcttaggctccaaaccacatacagcaactctccgatccactttcctgcgaacttttcattcttgtcgaagactttcttcctgagtgcttccaatatcattccattggccctttccacctgaccgttggctctcgggtgtgctactgacgcatatttgatttgg

SEQ ID NO: 86116 - DNA, 473 bp, Zea Mays
ccgtggaagcgacggagtgagagcaattcctcgtctgtgaccgcgcgccgccgtgaagccgctcacctccgtggacagtgccccgcattgcctgaactttggtaaagtcagtccccaccattttgcccaccatctttccctcttcgatttgcaccgggacgcgttaagattagggccctgttgactgctcgggatccgtcaccggtggcaccgtcgtaacagtgtctgagtcgtcgaccgtgcgcggatttgggacgatgaacgtgcaccgtcaaattcaacgtgcggagtggattagatctctgtgtgttctataggggagttgatcagggccatggatggtgaaacggagggctgagattagaagctagggtaccggttcggcccaatgacgtagatccatctgatttaaatcgtgcgcctataactcgatcctaggtgtttaaatcccgtccgttggttgctgatctcgc

SEQ ID NO: 86117 - DNA, 562 bp, Zea Mays
tgattgtctccaaaagtgatgctatcataggttgagcaaccctcctcactcatttcggtgaacatcctcatatcactggtcatgtgttgtgtacaaacactatccaacacccaataatttcctcccgtcttgtaatttacctacaaaaggaaatcaatttattttaggtacccaaatttgtttgggtcctcggatgttagtgaccaagtattttgacacccaaattgctttctttttggtaccactaattgaagtgccaacaaacttagcatgcacaccttttgcattatgtgaaagaacatagcaatgctcaaaacatggtaaggatacatttttgaatttaggacaatttttcttgacatgtcccttcttgtggcatttgtgacacactttgtcacattctttcacaaaaatggtcttttgctttacaaatgcattctttcctttcttaggaagatacccaagaccctcacgataaagagagaaacgttggcttcccaatatataatctagtttagcttttccaccatatgctttctctaagtcatgagttagagcattt

SEQ ID NO: 86118 - DNA, 410 bp, Zea Mays
ttagtgatgattttcataatattgttcagaagcgatattggtcggaaatcacccaccaaacgagcattatccttcttcggaatcaggacaataaaagaaccattgatacttcgatgacaaacatccccgtggtaaaattgatcacataagtcatagaagtcctgagaaataatcggccaacattttttgataaaattggtattaaacccatcaggtcccagagatttgtcagaagggagagcagcaacaatgctatcaatttcttgctttgaaaatggctcatctaaccaatgcaagtcactatgaaagaataacaagctagggagatcaaagacattttccaaaaaatctgaagatcccaaacgacatttgaagacattccaaagcaggttagctttaagatcatgctc

SEQ ID NO: 86119 - DNA, 481 bp, Zea Mays
ctggaatattcagtttgtccaccatcctcttactgataaaactagttgaactacccgagtttactagaatgaccatcacttggttgccaattagtgctcagactaccatgcattcttcatacattgcaccactgagagcatgcaatggcagcttgtattcttcctccacttgctcctcctattcaatcttgcttaacatctcatcagtgagggtcatgcctaattctttacgcaattgcatctgaatcttctttgggcatttagtctggtgaccttgctcaaatttctatccacaagtaaagcaaagcccattttgtcgcctatactccttcactaatctctctttaaacagttccactagtgtcatctgcaatcgaatgtcaggtttaaacatgggactattaaacttgggctatgaacccatcctcaagctcttttgtctttgcttctccagcaccacttgctaaatctgggctaacta

SEQ ID NO: 86120 - DNA, 375 bp, Zea Mays
gttgtaggcaagccctgaatggcttcaaccttactgctatccaccgcaatgccctgcggagtaaccacataaccaagaaacaggacacgttgcgtgcaaaaggtgcattttgtccatgttaccaaacaagcgagcagcacgcaaagcatcaaaaatagcacgcaaatgttctaaatgctctttcatagacttgttgtaaataaggataccatcgaaatagacaacaacaaacaaacctatgaaggtccatacaacttcgtccattaaacgcataaaacttttgggagcattagtcaagccaaatggcataaccaaccattcatataatccaaattttgttttaaaagttgttttccattcatcacctagtttcat

SEQ ID NO: 86121 - DNA, 719 bp, Zea Mays
cgcggaagggagggagagggttgggccggattcggcccagccgagggggggagatttcctttttcttttctatttctatttctttcctttttcttttaatctcctttttcttttgaacaaatatttatctatattttcttgggtgtcaaaatattctatgtgaggtgctactaacaaccatggtgcatgcatatgatgaaagaaatgtcttatgaggtggggggtcttaggagataatcaggggggtttaggagttttatggtttctaaccttgggttcaaaattgggatgttacaaacctaccccacttaaaagaatctcgccctcgagattcagactgggcttgagaaaaggtaagggtattccctcctcaaagagtcctcactctcccaggtagcttcctcttctccttctctgctccactgaactttacagagtctcacttctgagttacgggtctttcggatggctgagtcaagaatcttcactggcttttcttggtactgcagatccttctgaatctgaattgcctcttcttcgatatgactttctggcactttcaggcgtttgcggagctggaatacgtggaacacattgtggatatctgacatggattcaagcaattcaaggcggtaggctacgggtcctattctgccaatgataggataggggccgatgaatcgcggagctagcttccctttcacttgaaaccttttgac

SEQ ID NO: 86122 - DNA, 329 bp, Zea Mays
tctccaggtttgcttcaatgccccggtgcgaaactaggaatgctagcaacttcccagcggagacaccaaagacacacttgtccgggttcagcttcgtgcgtgtcgcccgtagcttgtcaaaaaccagggtcatgtcttccactagagtcgaccccctcttagtcttgactatgatgttatcgacatatatctctatcatgtccctaatcaggtccccaaaggtcttactcatcgcccatacaaatgttggcaaggcgtttctcagaccgtagggcattacaacatagcagtaaagcccatccactattacaaaagcggtatgcttccta

SEQ ID NO: 86123 - DNA, 358 bp, Zea Mays
tgattcagagccgtccgatcaactccggacgcaccagattaaatcctgaggggtctgaatcggtacgcgccatgagcagtccgatcgtgatccgacggtcgcgggcgaaacattacctagatctaatcctagcccttcaactggttaatcaacggtcaggattcaatcggtcgaatagctctctcaggcaatctgatcacagccgcaagaaagggatccaacggtcggtgcctttctccctccctgcgcacgcaacagggcaagtgcgagcgattcgcacggcggcgctcccggcgagctcaccgtggataccgccctggctcacacatgccattcttctccctagagagtgctatac

SEQ ID NO: 86124 - DNA, 549 bp, Zea Mays
atctggtctcgcttcggcctccgaaggccgaaggtgaatgttgttagcgatgttgaagcatgccagaaggactttagtactgtttgtgcctttattggcacgagggatttaattcaagagcacatatccttcagggtatggccacatgtggagagttgggatatgccgaaggaaacttctgccgaatccagtgaaggtggcctggttcgattgaaatataccttcaggtttagggagaagtttgatgagctaaatgatgactggttgaaatgtattgaagctaccagtgacaagctgcttgggacatactccaaggccgaagataatgctttatccacagccttcgggggtcggggcaagaaagattgaacagggtatttgatgcgattggcttcgtataccctgattatcgctacccgctatgagggcaaggaaaaagagaaagattgtcgcttcggccaccacagctgtgccgaagtgcaaaaaagtgaaggttctgacccaccaaccgcgatatattgaaccggtcgtagtgcttgaatttggcga

SEQ ID NO: 86125 - DNA, 409 bp, Zea Mays
aaaggggagtccaactgccatggctgaggctgctccccgaaggatgacgtcgtggctgcgggtggcgcacaacgaggcaaggtcgcggacgacggtgcaagatttcacggctggcaacgatcgtgcggtggggtacgaaacaaagatagaagaagactcaccgcgagcttggtcgtcaggggaaggtgactggtgtccatggcgccatggctgagagggccgagcacgaccaggacatggtcacgggaggaggcgtcggccatggagaacaggaagggaaggctttgcgtgctgctggatggagaggaccaggggaggtcgacgacatgtgctaaacgcagttgtcaagaggttcaacggcgtggggatcgtgggcatgtgaggtggtttcctaggcgacgagctggcg

SEQ ID NO: 86126 - DNA, 1281 bp, Zea Mays
ccgatgaaaggcctccacctagatctcttaaactcggtccacgaaatgctctaagagggatattagggctcaggcccttatgaaggggccatccaagatcgcacgaacacgacgtccaccacctccaacagatggtggttctccctctccagcttttctaagcgatactgcactttgacgaagttctccttggcagcatcaaacttcctattcaaaattggacaaagacatgttcgattgaaagggctaaagggggttagaacaggtaccagatcatggagtaagggtacaaagatcctatgtcacagggaggcccaaagtctctcttcgtccttaactataccacccacttcctcattcaaagccacggcctaagctttggcggtctccttcctctactccaggatgtaaaggcatgattctgccctcctacacttgaggtgggcgagggcaaccgtctcctcatctcttttcgctgctttagccaggccgtcgtaggatatttggatcaattcaacacgagcgcgaggttcggcaacctcattccttgccacctaaaggtcacccatgaagcgctcccatattctccttttcccatgaagaaagtgggacttacccaccaacgtccctgcaagtgactaagaacagggaggcaggaaacaagaggtcaagtcattaataggggagcatatccttgactcattgcccgaacatgatttattgaaaagcttctagcgcatgattgaaaaccgatgcaaattggctcgcattgcgctaagagccctttcaatgtcgccgttcatctcgaccagctcctcgcagagggcctagaagtcggcgcccttggcagggttgtccaaaacaaactgggcgctagatggaccacaaggcacagaaaccctacctcagactccacatagtaggaaagggtcaccaactctccaagcaccatggccaccatggaggcaggtcccccactctcccaaacaggaggcacgggggtggggcctggaaactgcctggaagccttggtggggcgggacgaagcggcgacccaaggttgcaacttgaacgtgggtggcagcaacttttgggtccgctacaaaggaggaatgacccttagcctcacgatcaaacccaaacgtaagctgccaaaaaacagcgagaggagcaaactgagagcgctgaccccggcgaccttgaccgccgctaggtgttggaaggacaccgacagtgtagacgtcccgctgtctccacatagggtagacaccaactttctct

SEQ ID NO: 86127 - DNA, 690 bp, Zea Mays
gtaggtttaggaggcgtcaggaatcaccctcattctttgtggcagccatacacagcattggcgtcatgctgctgttgatggtcagccaaacgcagtgggcagggcagccaaagagatcgaaaaggaaggacaaggcaaggacgatagcgaacagagtgaggtctcactcacatcctgtcgtcacgattcgtgaggctccaaacaccttaaagaagatgacaatatggatagccccatctttgttttcattcacaaacttcgttttcagcatcacctccaactccagagccaaaaacaaaaagcaggacacacaaacagtgcagtggagtggagtgggaagagctcatcttagccatactgggtagggcaggggccgtgcacactcgcctccactcagccagcgagagcgtcctggccacacaaaactgccaccagaagtgacagctgagcctgagcttcgcgtgtcctgaactcctgatgtcaacccaagccacagccaagcaacattcagacaagagcttcagctgaacgagtcttggtggcaaccagccagcagagaaagccatgctgaagcaacagcattggtgttttcttcacttgttcctcgacgacagcggcattacattcagttcaggtgacgtctggttccagcaccgtaacgataacgccaatggaacggggggataccac

SEQ ID NO: 86128 - DNA, 482 bp, Zea Mays
agtttattcattcgctctcttatttaatccatgtagtcccgaaccaagtcatttcatctcacatgaagaaacggatgaacaacatgaccaaatggattttttggctagccacgggtcaaccgtgatgttatttgacattcaaacccatctcatgtgctatgaaattaccgtgaccacttattggtaaacctctttctgtgtgctttacccaagaggttgcatctgaatctgcttgtgtaagatcgtgtatttgccactcgctcaacagactcagatagtacagtgtcattagaaaaaacaaactgcacacatggaaccttatatgttcctttggtagacatcgcctctattggtggacatctctaaattagcttaaggcgttacatgttatgtccactagagaaacaacctcctgagacacccgcctttgcttggaactgccttatattatcgccgttatggataggagttacatgcttctc

SEQ ID NO: 86129 - DNA, 655 bp, Zea Mays
ctcggtgcgtggtctggggctccgtatcagtgcctggatcatggagggggcggtgccggggtggttttgcgttcggagcaccttcaatttgacgtcgtcgcagcgaattcggtgtgcgccgtggccaatgaccttgccgccgtggaacaaggtaatgtacccccctagggcgttcgccatgtcattctcaacatttatctctggtcaattttgtgctcggggaatgtggctggccggattttaccctcgccggtgagctacaccgccgcgggtgaaccttgccgccgcgtacagggtcgcgttgggggagaagataatgtgcgcgccgttggtttgattatgcacgactggatttgatcaagcggctcaggctagttagcgaagatctggatggttgatctgtgaaccaacggtcctgaacccacgatacctcttcgcggatcagttttgcacaagagtccctccgttattttagaataaacccgccgtcctcagcgactgtttcctgtgtcttagtatttttagcaccggggcccctgtgtccttcagatattgatgcccagtccagagctcatgaaaatcaaataaataaattcagaaatggatttttaatataaaaacaattcctagaaacttatttaatccatagaaaatc

SEQ ID NO: 86130 - DNA, 570 bp, Zea Mays
agaaaaatcagctagcgatagtcctagtagtaaatctgaatttaaaaagcttaatatgccacaggttaaggaagacgtatcatcgtctaacactaattcacaaccgataagcccactcggattatcaatttggcacaacaagaggctagaaaaactcggtgcacaagagctgaagaagagaggcatgacatgggcccctaatgggagttctcaagatccaggtaaggatgatgcttttggaagaagtggagtaaggcaaacaaaaggaagaaagcaagtacaggacgtttgggtgataggtttgccctagcttatcaaagctattggtcattgcatcgtccatattttttagctatgccatatacgttgtcccaaggtatgttcggttatccttcatggtatcattttgctccatatgcgtctttatgttatggaggagcgcaactgaattattatgcatatggatagttgcgatatgctgctacttacatgaagccgaagtatttcagttgttggtagtaatgattctttgtataatttgcttcggtcatatttattcatgggatgaac

SEQ ID NO: 86131 - DNA, 320 bp, Zea Mays
aaagactgcaaggtgggaccatggagcagcaagatggaactatcacaagagcacggctgagggggtagtttcttcttcataacttgtcgtgcatgtgtgcagaccaatagtccgggttcatgggggcagaccccaccgggttatcatacacgtttgtgtcatttagttataaaaaagggaaacagactcgacccctttgtcttgctctatggatagaacttatagagatatttggcatcggggtaaggtactcctccagtcgtagctagatggttgcccctgggtcggtgcactcccgttaccttggagggtccttccca

SEQ ID NO: 86132 - DNA, 341 bp, Zea Mays
aagttgcctaagggtgcagccggataagcacaacaagtgcgttaatcgaagtcttttactaaaaagacactccgcgcaaaagtcgcctaagggtgcagccaggttagcacaacaagtgcgcgacacgcagtctctcactcaaagaaggccaacaggccacattacaatacaagttgcagttacatacactcagcgagggcaccacattctacatcggctcaaccttcgggatgatgcccgcctccctataattgaacaacattattttcaattcctcaccctcaaaaagattccttagatccccctcaccaatgctcgtcccaatcggcaaagatagtagc

SEQ ID NO: 86133 - DNA, 505 bp, Zea Mays
gaaaagatgattaatctgctgcaactcatgtttttgagttgcaatgtctaaaatggtttgctaagtttatactgtgttagccaactcatgttaagtaggagtcgattgcgttaagtgattgttatatacatattgtgtctcggattgtgatgataatgggttagtcaacttgttagatggctttggttaaactcgtaatgacgataaattgcttgttgttgtctaaatacgtatgcttatggtcgcggatgaaaagtagtagtactcatatgatgtccaagttaaaatgcaaattactgtgtcaagagctcatcgatatacacatataccgggtttgattattgtggtgaatacgtttgttaatggtgtgtggtaattctagtgcacgaaatgacttggataaaaattggtaagttgacttgttgattctcatttgattattttaactccaacaaatggtaaagtgttagaataattcaagtctctagaacacgacaaattcttg

SEQ ID NO: 86134 - DNA, 488 bp, Zea Mays
ttgtaaaatataaactatcaggcaaaaatcataaaccccacagttcctgtaatgttttacagagttttgaattaaataagaaaattgcccaaagttcattaataaagggaaaaacagaaatattgttaaaccaggattgagaaaaatagtggagaccctaacctagtggttatcctgtttaaacataataaacaccccagtatacaaggttaaggaggatttattaactaaagcttggttatgctcaaacttagggaaattaagaaaagggattaaaaatgaaaacaagagggcaaccatatttttcctagcatacctaagttatgtagttcacaagaaaaatccattgaaccatagtccagtgagaggaaattgtactcaccattattcatgaaaaactgagaaaactttgaaaaatcataagaaaataatcctaaggagaaaacacccctaccttaggaataactattcttgtgctaagaggaacc

SEQ ID NO: 86135 - DNA, 494 bp, Zea Mays
aagtgatagccgagtgatagcgggtcacgtcggtgttttagaaataacgaccgagcggttactagtgatgtcggcgcttttagaagtgatagccgagtgatagcgggtcacgtcggtgttttagaaataacgaccgagcggttactggtgatgtcggcgttttagaggtaacagccgaatcctttgaagccacgtcactgctttaggaataacagccgagtgactgctggcgacgtcagtgttttagaagtaacagccgagtgataacgggccacgtcggccgctttggaaataacggccgagtgatgacatggcacgccagcgttttagaaataacggatgggtgatgactgggcgctttttagaattggcgtctggcccgggaaaaccccatatgtactgcactgtcgcacgcctctgcattctgtgccctagttttgcttttctgcatctaggccttctctgctctcttgcaatattgcctccgctccgct

SEQ ID NO: 86136 - DNA, 689 bp, Zea Mays
aaataatgggggggttaggagtttagggtttctaaccttgggatcaaaaccgggctgttacagacctaccccacttaaaagaatctcgccctcaagattcaggctgggtttgagaaaaggtaagggtattccttcctcaatgagtcctcactctctcaggtagcctcctcttctcctctgctccacttgactttacagagccttacttctgactttcaggtctttcgaatggctgaatcgagaatcttcactggcttttctcggtactgcagatccttctgaatctgaactaactcctctgcgatgtgactctctggtacctttaagcattttcggagctgagatacatgaaatacattgtggatatctgacatggactctgataactgaaggcgataagctgctggccctattctgccgatgataggatagggaccgacgaatcgcaaagctagcttcccttttgcttggaatcttttgactccacgcattggggaaaccttgaggtagacaaaatctccttccttgaaactgagttctctccttctgttgttcgcgtaactcttttgccgactctgagcttcgagtagtctcttgcggattagggcaactttctcttctgcctccttgatgaaggcaggtccttctagggtcttttcccctacgtttgaccacatcagaggggtttt

SEQ ID NO: 86137 - DNA, 336 bp, Zea Mays
cttcgcaaaaaatgaaaattacgacctgtggccccattaaaaacctttctctcctcttgaaaggaaaagggtgctataggagaaaatgggaaaattacatagtttacacgtaatatcttcgaagctcatctgtattccaaaatcttgggacgtcattcccatccatgtccttcaacctatatgattcgggtcttgacgaagacactaccttaaagggaccttcccacttaagttgtagcttccccactgtgtttgggttgactattcttcggagcactaaatgtcctggcttgatattctttagtcttatttctctgtctcgtcacttgaccgtct

SEQ ID NO: 86138 - DNA, 343 bp, Zea Mays
aaagagggcttagttatcagttttcctttagcacaagagatgcatagaaagtctttagaaatttgtgtggttttcatgccatggccaatagagctagttatgatgtttcacatcatccttaatctagggtgtcctagtctttcatgccatactcgaaaagactcaggatttttaaatatagtagacatcgcaacaaattcagggggcggtttaattcttgagtaatacaacccagaggaggtgccttgtgctttctctaccacttttgtttcacgttcgtccgttgatgtgatatggaggtattcaacaccacccacacatgcagttgtaacgtgatagccgc

SEQ ID NO: 86139 - DNA, 405 bp, Zea Mays
cgatatatgtgggtagccgcaatcccttcaaaggattgtgctgcggctgccatcaaggagatacaagcacaagcagaaggtagatctggggcgaaattgagagcacttcgtacagatcgaggaggagaattcactgcaactgaattcgcgaagtactgcgcagctgaaggtatacatcggcagcacactgcaccttacagcccgcaacaaaatggagtcgttgagcgcagaaatggctcagtcgtagccactgcaaggagcatgctcaaggccaaaggtttgcccggctggttctggggtgaagctgtaagtaccgctgtttatgtgttgaacagatgcccgacgaagagcgtggacggcatgacgccattcgaagcatggcatgggaagaagccagcagtgaag

SEQ ID NO: 86140 - DNA, 529 bp, Zea Mays
cacggccaacagtctggattatgatatgatctcccatgggatagatctttacaccgaggatcagtttgaagattatgctcaatattatgaacctaccaggctgggtatttctaggcgtttcggagagactccaggcctgagacatcatcctgcagtgatcaacaaaattgtcagggtcaccattcttcctaagagaggggacaaaagcaaaatcagggataaattccagaatatcattgatcatgtaatgaaggggaggtgatgaatgttgttttatttatggtgagcaattaaatgacctcaagatggacaaaaatccgaacctggcctatgctccttacattatggctctgattaaagctaaaactagatttgaagggatgtgtgagacagctcacaatccatttagaacttttaagaatgagattggctttcttaccaggcccctcactccctttcccgatgatgagtaagttcatgaagatggttttgctgctcagcctgatgcgcatccaactcagcaaatgcc

SEQ ID NO: 86141 - DNA, 596 bp, Zea Mays
cgatcctccaccgcaatccgcgcccgcctgggagattcgtgcctggggacagtggataactttggacaaattcactactccgcggattgagtcggtgggggggggggggtaaaagatcgggccgtcgcgcggcactcccttgagtgcttcaagccgcggtgtcaccgacgcctgagctctcccttactgtgcctctctactatgtggtgtccatgcgcttgtgtcgtactctcatgaccgtagatagctagccatgccatcgcgtcattgtctgccacgacacttggccgtagtgaaagaaatccgagcgtctccatgaacgctctcatcccaaattcatgaagcacacgagtgatcactataattgaaggctctctctcctccaccttcttctttcgaacccagcgcaccactccccactcccgatcatcaaccatagctcgtgaattgcggatttcccccaaatcggccagaacgccgccgtgaggaaccgtgctgtggccagtcattctcaggtccgttcacatacctctgatccatgtttctacatcctctagtgctagtgaaactcccggtctaggcaaattgaatgctac

SEQ ID NO: 86142 - DNA, 586 bp, Zea Mays
cgcgaacgccgtcgagtcgtggacctgggcgtgcttcaaagagcgccgcggtttggccttgccatcttgatcgaccggtaaaattctttccaccctgttcgcattaacaccccctccgcgtagcactcttcagatccgggttttgggaaccagagagggaaactatgcatctccggcgaacttcattgtcgtgagcttggcagcgccgccgcgcgtgggctgcttgatggggttgtagctggagaaaggaacagtggctgtcggataggcgatggatggacgagattatggcatcgtataccccttcgcgcgatcggatttgggccgtagatgcggaatcgggccgttctgatttggttagggcgtggcaagtcatcgaccgttgatcccatatccaatggacctagttgcatacagattcgttatatttgagatctaaccctagcccttgatttttaatccaacggctcagaactacagataccctttcggcctggaagacttgcataagagccactctgcttttctagaataaacccgcagtccacgtaacagtattgtgtaacttaggaaaatgttcactgaa

SEQ ID NO: 86143 - DNA, 459 bp, Zea Mays
ccagtcctctatcactcttgacgcgaccctgtagcagtgtcgttcgcctccgccagtccggctccagcctccctgtagcagtgccaccgcccaaatccgctcttgtcattacatcttctcccaagttatacaattttctcaacctgattctctttgttttcttattcataggcgagggtagagcacctccctggccaatgggcagcgaccacctgacccacgagcgctatgtgttgagtgttgactgcctgctgccatgtgcccgtgattctcccctattgtaagaaattgttcccgaatgtcttaccccctttccctacctgccatagttttactggattgttttaaatgttactaccccgttcttaaatatttatcgtccacttgttcatttttgaactaaagcacgaaaaatggaaagacagggtagcacatcattacatttgtatagtggcccag

SEQ ID NO: 86144 - DNA, 489 bp, Zea Mays
gttacgccgctacaatagtgatttctataagtttattccctagcgtcagaagtgagtattagagacctattacccgttggtgcttgcgcgtaccattgtaatggttgtaccaaaggggatagtcttgcgagatcacaccaacttaatttgtggtgtaatcgtcactacatactagaggatattttccctaatgttagaagtgaggattagacacctcttactccttgttgcttgcacacaccattataatagttgtactagaggggtttatagtcctgtgagatcacaccaaccacgtttatggtgtgaccaccactatgtactagagagaatgagatctacgatgttttggccaaaaacttgatagtgaatatgatggacaacattcgggagaggccacaccagagacactatttgcacacggggaaggattgtggctatccacagtgttactcaatcaaaagcttggtcttcacttgggcttccctt

SEQ ID NO: 86145 - DNA, 485 bp, Zea Mays
aaaccaaataacatgaggcaaagatgtatgacatacaacatagacaatgggaggatttgacatgcaccgcacacaagatgataagaaattgggcatgagagtcattaggaacagacttttctccacttgtttccaagttctatgtacatcacctagcaaattgtggcatccgctcggcttctcttttcatctgccctcatgagttcaccatggatattctaagatttcattgaccgtttaagatcggttccacccgtaaagtttcatcgtgaaaaacatagtggatggtatgttcacaacgaaaggttgcttgtattctcatagttaattttctttgtttcgatattagtatctagtaatcactttgttgtgaaagcattcgtcgctctgtatagtagctgaccaacacgaattccaaaagtacgcaccataactgttgagatatattttatacccagctctgtgaagttcaagttcatccagat

SEQ ID NO: 86146 - DNA, 1319 bp, Zea Mays
ttcaccttgagccccgtcgaagttgcaaaagagtttagaacagctctgagaaaaaataattgtctagggcaagcttccattatcaacaatgtgtcatccgcatattgaacgatcggaaaatcttgaccacaattcgtggcgaggggcaacttgagcaggtcttgttgtcgcgctttattgatgatgctctatagcagatccgccgcgagaacaaaaagaagaggcgagaggggatctccctgcctaaccgcgcgcttgcaatgaaaagttttccctggtacaccattaaggaggaccgaggacgtgccagaccgaagaatatccctaatccagctcatccacctgggcccaaaacctctacgcgacatcacctgaagaatcaactcatgctcaagagaatcaaaggccttttcaaaatccaatttgagcacaataatctcttttttgagatatggcaaagatgaatatattcatatgcccaggccaagcagtcctgaatggttcttcctttgatgaagccatattgatttttgtgaacaagggaagtcatcactgcctgtagctgattggccagcagctttgtgatgattttcatactattattcagaagcgaaattggtcggaaatcacccactaaactagcattatccttcttcgggatcaggacaatgaaagaaccattgatacttcgaagacaaacatccccgtggtaaaattggtcacataagtcatagaagtcctgagaaacaatcggccaacattttttgataaaattggtattaaacccatcaggtcccggagatttgtcagaaggaagagccgcaacaatactatcaatttcttgctttgaaaaaggctcatctaaccaatgcaagtcactgtggaagaacaacgagctagggagatcaaagacattttccaaaaaatctgaggatcccaaacgacatttgaaaacattccaaagcaggttagctttaagatcatgctctgaaaagattgagccactgtcatccgagagcaacgcaattgtattgcagccatgctttaccgttgcatgagcatgaaaaaatctggagcagatatctccatcggtgacccatttgatggaagcccgttgcttccaataaattttttggaactgaagcaactcaacagtcttggattgcaacaactcacggaaattccattcttcaatcgaaaggtcacggtgctcttcaataatatcaatgaattcaataatcaacttaatttgtctcacagttttgtcaatttttggcagtgatcgctgccactctttaaggatctttctggtgaacttg

SEQ ID NO: 86147 - DNA, 539 bp, Zea Mays
actactacaacagcgactccaaggaagagaagaatggctagcgttttaaatgctgttttagaatccatgaaagcgccaactcccgcttctgccgaagcatctggcaaaaaatctgaagatgcaagggaggcgattactgcaagcatggctactattcttgccgaagccagaccttcgaaagctgcgccaataaggctggtggaagagagtgttcctgaaaaatctacatctcctgctcctgaagcacctccccatggtgacttggaatacattgttcgacacgcttcgggaaagcagttatcattagaacaaattgccgaagtgcaacactatgccaaggacttgaaatacccccgagggtccttggtatatggagggaatgacgaagacgacttcctctactgcctggccaacagtaaggaggttaatttttgccgtgagatgatgaacaacatgggatttccgaagcttgagcttggtttgtccgctatgatgaaggatcagcttgtggacaacctcgcttaccatagcttgaaggt

SEQ ID NO: 86148 - DNA, 878 bp, Zea Mays
gttctggcctgctcgcactatttctgagaagtgcagggtcaagtttgtaaaaattatgacctttgtgtaattactttataactaggttggatggcgggttcatttcgcagatttccagggactctttagaaagaagaccagggccgaaggggtatatgttattcctaaccgtccgatccacaatcgatgatccggattagatcaaagctccgtgaaacggtacccagggatagccatcagattagatctcgacgacctaggtttaatgttacctacatcgatcacaagcgccagatctagatcggacgaaccagattggttcagccgaaccggtacgggtgttctaatcctagccacccacaccgagatctacgactcaggactcatcggcgaaggggatacactagactatatctaggccactgatctggaaactgacggcatgattttgtttgacgcatagatatggatgaattgaatcacaaccgttgactcatggatccagggccttggctgtttcttccccgccgcggtgagcacaccaacgcccagcccgccggcgacccaggcacacacatacgtccacgatcggacggccaatacgccatcttcaacctctcgcctcccctattctcgctcctcgccagctagcccagggcgaccgaagccaccatggcgcactgaccagccggaaccaccacgacgccagacgcaccagagcgctggacccacacctaatatgcccaaacggaacaaaagtagagaagcagagggggagacactcaccggcaagtggggcggcgatccataccccagcctatagcggtttggtcgtaaactctggactccgaagggaccccgctcgccatgacatcgat

SEQ ID NO: 86149 - DNA, 515 bp, Zea Mays
cacttacacatgtgatcagaacatttcgaaattcgctagcaaacgagattaggtaatccaaaagttcatgaaactcttttaatggtttagattatggagatgaatacgacaccaaacttgagctgttgcgagatgattaaattccaagctaaatgagatttttcgaataatctcggtaataggagatagatataatatcaaaatcgttactcacactagtatttcatgcttaagtccatactcgatgttatgcgcatagtaacacctagggtgttacatactcgggccatgagatctaatttacacagccaaatctggccaataccccttcgctagccccatttgacacatgagtcctcgatttttgtctgatttaacccgcgatcctgagttgttataagatcatcacagccaggccccggaatttaaaaagttaaccctaacctttaccaatatggcggtcacagtccaagtaacctagattctaatctgtgccgattagctgtgatcggacg

SEQ ID NO: 86150 - DNA, 820 bp, Zea Mays
acccctagacgagttcttaaaatttagagtactatcgctcctatttgttctagtggagtaggagtataaaaagaaatatcatcttgctaagtggagtgctctatgtatgccaaaagattttggtgatctaggaatacataacctagaacttcaaaataggtgtctcttgagcacacggatatttggattgattaatggggatggggcttggcaattctaagaaggaaatatctatctaataaatctataacttaggtgcagcataggataggggattcacaattttggatcactttatgaaggcagaagatgttgttgtcttgtgacacttttaacgtgcagaatggggaccaagtgaggttttggaaggaaatgtggttaggtgacaaaccttttagtgaggtttaccctagcttatttagaattgtgaggcatgaaggtaaaatgatggtggcagattccttaagactattccacttaatgtgtcttctagacaatgtttggtttttggaaaccagatcatctggtttgacttatcgtcaaaagtagtactaggccacttcacaaataggagagatgttttttggtgcaactttagtaagaatgtcatattcacagctcgggccatgtagaactttgatttgacaagatgttcttcctgacaaaaggccacctactagcagggacggatttagtggtacggtgggtggggctccaatccccctaccactcccgaacctatagagccccaccgaagctcctcctaaattttaaaacatgcaaactattatatattgtaggtgatttaatgagattattt

SEQ ID NO: 86151 - DNA, 465 bp, Zea Mays
ccttttcgtagtgtagtgcacatgctcgcaacatgtcttccaaaatccgattcaccctttctgtctggccatctgtttggggatggtatgctgagcttcgtattacttgggtcccaagggattcttgtagctgctcccaaaagcgtgtcacaaacagtgctcctctgtcagatacaatggtttttggaataccatgcaaccgcactatttgatcaacatatatttctgcatacttctttgtcttgtgggtggtatgcactggcaagaaatgagcagtcttagtcaatctgtccacaataacccaaatggaatcatggtgcctggaggtattgggcaatcctacgataaaatccatacaaatgtcctcccatttccaagatggtatgggaaggggttgcaaagggcctgctgccttcaagtgactagcttttatcctctggcaagtgtcacactcggatatgtact

SEQ ID NO: 86152 - DNA, 414 bp, Zea Mays
gcatatcttccaacacttggtttgtcctttctgtttgcccatccgtttgcgggtgatacgctgaactaaaatttagcttggtatccatggactcatgaagtcttttccaaaagcgcgaggtaaattgggttcctcgatctgatacgatcttctttggtactccatgcagacaaacaatcctcgacatgtataactctgctaactgggctcctgagtaagttgtcttcacaggtataaaatgtgccactttggttaacctgtctactatgacccatattgaatcatagccatctcgagtacggggtagtccaactatgaaatccatactgatttcttcccatttccattctggtaccttgagaggttgcagcaatcctgctggtctttggtgttcagctttaactcgctgacaca

SEQ ID NO: 86153 - DNA, 371 bp, Zea Mays
acatcaagctaaaggttgaacctccttgtattgttctttcaaaagaagaaataaagacaaaaattgtaaagatacattgtactaagacactctctggtcaaaatgttgtgctaccttcagtagatatgtcttgactcgggcatagtactgttgactgtgcgagcctcaaactcctcccgagggttgcgctgttgctgagcctggtgatgccttctggcagttggttatggaccaagtttggcgctagtggtggcaattgagcccaggaggtttgggagttacttgccaaagcaatggacgatgtaggttgttgattgcccacatactcagggatatacggagaatagcatgaagcagtatgaaagacctgc

SEQ ID NO: 86154 - DNA, 627 bp, Zea Mays
gctctaccgagtgctatggccctgacacgcggcaaagcacctcttatgtgtccacatatgctgctcaccatatcccacaaaaccaccttctgtattggccacgagcccatctatctggtaccgaattttggcacaagtcatcgttgcaggtgggcggtctgtcactacgacacctttcgtaaagttcttgatgtctaggcggaatggatggtcaggagggagaaattgtcgatgtttatcgaaggacgaatatttgccaccctttttcaaccaaatgaacctaagagcttccttgcaaactgggcatgagaacttaccgtgaacacaccaggcgcagaatagcccatacgccggtaagacatgcatggagtactagtaccaaacatgcattttgaagtttgtcttcatagctcggtcatacgtccataccccttcctctcaagcacgtaccaattcatcgatcaaaggctccatgtacacgcccattttattccccgggtgtctgggaattatcaacgacacaaatatattctgcctttgaaagcacacacactgggggggggggagattgattgggataacaaacacgagccaacatgtgtacggggcagcgctcattccatagga

SEQ ID NO: 86155 - DNA, 609 bp, Zea Mays
ccttcaagaaagtctcaaaatagcagaaggtgaagaggccaacactcgtgaagcctaccgaaccctgaagatggactacgataagaagttaaagaagctcgcccccactaagaagatccggaagcggaccaagagccaaggatgccagattgaacgaaaagaggaagccccaccaacattgcctccctccaggatagaaaacttgtcagacgttgaggatatgttcctagctagccttgatgaccttctcagggaatttggggacaccttagaaagggagtttggaagcaccttagaaagcgctcgcgcgtagtgtggtttgtggtaactgaatgcttgtaataaacttgtgtgatgaataaaataacgtgtttgaaaaaaattggcatgtgcatagtagtaatcctctccccctagtagatggcttcagataaaaccatgcctaccgccttagggattggagcaaggtctcctctaattgctgaaggagaaggcagtggagaagggagtgaaacccacctccccgcaccttcggagctgcccttagatttagcccaagttctggccaaccaaacccgactcattgaggtcctcacccgaagccttgag

SEQ ID NO: 86156 - DNA, 483 bp, Zea Mays
atcgaacggttccagcggcggagataattcagctgaaataggaaaaagttaatcattccgaagccataaaaaccaatgccgaagctaaaagccaagaaacaatacctatacgtttttcgcgctctgcagcttcttcagcttgtctcacttctatccgggcgtcatgggtgccttttcacttttctttataattttatgagccatctctcggccaccattcacccagacatcattatagaattttccgcccatcaaggttgcttcagctgaaggatccttcgtgtcgtctgcggagaaggcagcttcggcttgggccatggtcttgatgtgatcacatctcgccttctccaagatagctgaaatctcccgtgcaccagaaaatgcacagacatccccgtgatcacttaagatttcttcgaagctctcggcctccccacttatccattcaataacgccttcggggtcacctcgtatgaagttttc

SEQ ID NO: 86157 - DNA, 485 bp, Zea Mays
agaagaaaaccacaaaacacacacgcccacacgatcggccgtttggcccaggccagcaccaacacctcgctgcgatcgttcccctgctctagccggtaccggagctttctcgcgacagcttcttcttgttgcagttacgtccaccattaatggagattagagctaccatttttttgtagatgaatgcatctcttaattaaccactaaatccgagttactttggtcctaatcccctcggccttcctctcaaccctataatggagcatgtttctcttcaccctctgctataactctcacgcacggacgcttgatacgtagccactaggaaacgccaatctctcctatgagctccctcgccgatgtcgtttcccatccctcttctaggcatataaatccatccacccgtgccgagctcctctccgctcgaggctctctgcccttgccgcacttcactgcccagggtcacggcatcctgctgctattct

SEQ ID NO: 86158 - DNA, 998 bp, Zea Mays
caattcagagatcgctgcctccgtgcaactccatgcgggtccaagactacgccgctccgacgaagggccgaataaggagccacgtcacaaaatgagcgcatatctgatacggtcagaaggtcggaagaggtaggcaaaaggcagacccatggcttcgccaagaactaagtaaacccccaagcaatcctcacaggttactcgggagctcgggggctacataatactaatgcacttgcgcgcactcgaggctttttttatccccggcaagaaagcctctgaccgactctaagaagttgcacgaaggctcgaggggtgttgttaggtagccaagaacggggtacccaaggcgaggcccataaacctctctatggtccatttaccggccaaggccccgtcgagcatgtctgcgaggtggaacgaacattcaagtccccaccgagcaagtctatgaggcaacgaccaagctcccgccgagcaagtctacaaggcgaggcaaatggtcgagtcctcgctaagcaaatctgtgaggtggggagaacgaccaagtccccgccaagcaagtctgcgaggcagggcgaacgaccaagtcctcgcgcgagcaagtctgcgacgtggggcgaacgaccaagtagatctcctgtttaaagcccaacccttgagctataaaagggcatgccctctttcctgtagggacacaagaacacttgctgtaacacattccaaagcaatataacgatcaacactgcactggactaggacctcggactaaagcagtataacccatgtgtcatatttcctcgctcggatctatgagatccaccattcggagtgagtccgcagttacatcccccaccgaacacaaatttattgtcccatcgatttctgcaaccacaacacatacccacccttatgtatggattttgagttcccattgtcatttctaaacaaacagtcaaagcagccttaaaggtccaaacctgctgtgccaacatctttcg

SEQ ID NO: 86159 - DNA, 956 bp, Zea Mays
tttgttacctgacaacacttatcatgggttacaattgattcatctggacgctatgtacacaccattggagatattggtcacaaagaaatagaaacagaggcaagtgtacttaatttttggagttgcatcatgctttaaaatcgtttggaaggggaggttgatacttgataatattgtttgtttgcccagttagaataatcaatttcatataagcttgttatttaagtacttatatgagcttttgtagctgtgtgaatgatgtggtacatgatgacctcgaggtggtacatgatgtggatctagaggtccatggcgttgatctggtgaaatttcttccagaccctcttcaaagatgactttatttctttttgtggttgatgtcttgactactaataattttgtgaggtacacgatggtagatccaatttctatgatttctgtttcgatttgttggataggttcaccttaatctgtttaagaatactcttggtgtgatatagggtacatatgttacatggatgtgtgtagtctttctttctagtccagttatgtaggagaccttctagttctacaggttggtttccatagtatatgaccatgttatgttgcatggcagatatgtgaacgtcaaaaggggatgcaattgtgaactgtgagaaacttgccaagtactacgctcacattgtttgggacaatgggtgagtgattttgtatgttgtgcagctattaatcttaatgttcttcaacaaaccattgagctaatcaacgattgccacaatgatataaaagtgtgttgtcagttggtttctatgtaagtgtgggcttcaactagttaagataaaaaatctcaaccttaaaagttgttatggttcatctttctccaaatttttgtggctttgaatggagtgcttgagatctgtttgttcttaataagtgcaatgactgttgaattttgc

SEQ ID NO: 86160 - DNA, 490 bp, Zea Mays
gcggaggagggttactcacgtgcatgcatgtagagcccggccgctagctcgctctacccctgttcgttgtacacgtcacagtctaggattctccgggcggcaaactagctcccaaagctcacgtgacggcgacggatcgtcgtcgtcggcccgagcgcgagcgaggtctcggctgctcgcttcggaaagtacactcacatgccattggcagaacgtatgcgcatgctgctactgggcaacaaacatttgcttgtatggcgcatgtcaagttcatgtttgtaaatgtgtcgtcagtacgtacgtgtctgattggtcaccatgcattccatcatcagtacgtacgtgatgtgctagtgctagctatcctgccctaatcgtgtgcgctaagtgtagtaccaagcccgaccgatcgtcgtcgtcgtctctctcgttccatgaattacacacacactagcatctgcattaattaatctttttcctgccgtatgcc

SEQ ID NO: 86161 - DNA, 622 bp, Zea Mays
cgggtacatgcgtgaatttgaacggagcgggtatgggaaagtgggtcgacgggagcgcgctctcagacgtgttcgacggcggcgaggtaaggttctcgatgccctatcgcggtaatattcaatcggttgggccgacaagctatgttaacatttaaagatgctagaacatggcacagaggggaaaggaacgaacctgggaacggttggtcaaggccgggtgcctcacggcggcgtaaatgaccactgaaatttgtcagctcttctgggtaattggaagcgaagagtggtgtgctaggcacataaccagaaggcagatcagggagagcctttaatttatagtatctatgtaagtgcttcatgaatttgggatgagaagatctcacggccggaagggaggtgagtctctggagggcaactatcgtggagcttggtgaggtagggcccctagcggtaaatgggctgtccacaacgacctattgcgacgtggtaacgtctccaagcacgtggcatccttgcggcaagtggcagacgccgacgaggacattccggccggttgcgaagcaagtggttacggtggccagctcacaaacttattagtagtcacgatcttttcacttgctcg

SEQ ID NO: 86162 - DNA, 602 bp, Zea Mays
tccgcagccatggcgccgccgtagacaccggagcgtcgtcgtctcagtttgatcggggagaaggagaacgtgggggaagcttgggcaccgttgatccatttaccgatggtggagattagacgataggtaacgattcggccagcgtgatcgtgagccgttgatccgtgctcgaacgaccgcgattagttcgcatataacgtttcggcttgggttgttcagggtcgttagattgagatcgtgcgggtggggcgtagtcgcgtgggtgatgcgcctgagctatagatttccaatccctcggttcggattagattgggcataattaaattgtgaccgttcgttttgatcgggcggtctgaaatcgcgcataccgtttcgcccgtgcacctttataattaggacatttcactattatgtaatcaaccagcgctctgtcctggtggctgcctgagtctgtggaatcttgcgccaggccccctgccttttgtagtatttgaggcccaatccagagagtattgaaaatcagaaattaatatcagaaatagatttttaatgtataaataattgctagaaacttgtttaaattgtagaaaattcatatgaac

SEQ ID NO: 86163 - DNA, 662 bp, Zea Mays
aacaaatttcacgatcttagaagctctaaaactggagatatgattattttaaggaagagcaaaaatctgcaactttgggcacctttagacttggccttgggcccactcgtcatagacaccaagggtcttcttatacctccctgcattcacgtacaacaacagacagagggaggctcctcagctccggccatgagaggggcatcatgctcccttgagctcagagcagaggccgagcagccctaggcacgcagcgctacggaggtcggtgccatggacaggagaagtgctgctgcatcttgtaacagagaggaggcgtgtgggagaagatagagaaaaatggctgatggtatgtaggagagaagccatggtggctggcttgaagaagtggaggagaggaaaccgagttcctgcgccaaggaagaagatcgacgttggtgagctgctgctgccaggaatggaaaatggcgtggaggagaagggagagagcatgtgctgctatttatagagccaagctctggacatgtcagactgcactagcaggtggcaggtgtgacagtgccaacattgggcggccgttttcgtcgttttccccttggaatcggatcaaggttactgtaggaaatatcttccttgatctacactctacaatatttgtacatgac

SEQ ID NO: 86164 - DNA, 590 bp, Zea Mays
ttcttttgttcgtttgcctttacattagattactaagttgtgaaaatcatgtttgtcagggtttggatacattgacgcctaccttgataataggtgacagtcttaagatggtaagtcatgttctggtattgttttccctactctgtactgtgcctttgggttgtggactgcagcaggtcctgtactgctgtaggttagctgcacagggtgctagtaagttttgcatttttcatgaacatactatctaatttattgagtttcgaactttagatcaagtctcacatacctttgttcacttgtattgccagtcttcctgatcaaaatcagttactagttagttgacttcttggtgactaacagagtacaaagtacgtattcgttgtgactgtagcctgtgccgttgaatactgtaacagaacaacatgtatttggattttggaggccataagttacttatttcttgaagtgccaaacctgcatttactactgattagctattttgttgctgatgagggcaacttattttattaagcatttgtatatctttctttgttctaacaattttcttctttacaaaatgaaagaaagct

SEQ ID NO: 86165 - DNA, 450 bp, Zea Mays
cggagtagtgcttcatacgcctatcaaagcacaatagtactctcgagccaagagcacatccttgaatgcacgggtctcgctgagtacccacctcatcaaaccttgtaagtagaaatctgaaaaaaatatctttggacagagctccggcagtagagaaggtatgtagcatctctttgtggcatctgttgccaagggttaacaattggataacaagattcggtaattttcgttcaacccactcacattgtttacctcagctttcatgtcattgatctttacttgagcactgctaagattgatagctactttagcagatgactgcctaagcatcatcatttcaatttcatactcctttctcatctgctccatctcagcttcgagcgacgcaatgtgtttcttttgttcagtatttgaagtttcaagcctagctttctcctcgcaaatagtctg

SEQ ID NO: 86166 - DNA, 459 bp, Zea Mays
gtttgccagaaatcgttgaggagtaaccatattggtttgaatgcttctacctaatgtggatgtggatatacccgagattaatatcatatccacatttgacttattggcatttgatctattctgcggggatgcctgcggatatgatccatcggccttagtcaaagcatatgttctgattgcagattcacgtggtctgtaataactctcctccgatgaactcgccctgctggtgatttgcctcacgaagaggttcatcttgatgatgaaattcctagcaatgcgcgcaatatcattgtgctaggaatacagaacaatgaatcttttgtttttgggaaatgacgaagatcattattaaatgtgggagacaaatgtgtcgacacctatattgcctctatagattgcaaagggatccaaaacaaagtcctaggtatgagtgtttgaagctctcttatcgggtca

SEQ ID NO: 86167 - DNA, 888 bp, Zea Mays
gtgaaggagaagaaaccgatttcactgagacagcaccaatttccgaagtcatgaaacaatcaggtctagttgtgacagagggaactactaatgaaggtacacctgttgctaaagctaaacagaccgttgctgaagaagaaaattttgatggagatgaggaagattatagtattttgatcccaacaaaacccagccatctagattttgataaatctaatgtgtctgaagctgacatgcccatgatgatcaagctgggctactttggggaagctaaaagcaaacttgtctgatttgccggagaagagaccaccccagcaccgaagagtgatgaggtagtggttttcaagagcttcttcagagtaggactacgatttcctctgaacgagatgataggggaagtcttgaaaaattttgaaatatatcttcatcagctgacccctaacgccattgtttggcttagcgtcttcatttgggccctttgaagccaagggatgagccgagatgctgaagcattctgtcgagtgcacgagttgcactaccagacgaaggccagggcagacggtcttcatgaaaattttggttgctacaattttgcgtatcgcaaggatacgaaggctccagttctcagttaccgcacaaaatagccaaccggctggaaaggtgaatgattttatattaaggctgatgagaagaagaaggggaaactgatgacgatggtcatgtgcccgctgtccttaaacttcggaatgaccaggcccctgtgcaacatgcagctaggatcaccatgccagctagccggagtagaattcagggtggtggctgagcaaatcagcaccagggacttggtgcaggaatacctagccaaccgaacgtatccaacatcaagtg

SEQ ID NO: 86168 - DNA, 682 bp, Zea Mays
ctgaccttgggaatacttttcctcaagttcagagtaccgccagaccatatctaacaaaaaacagttgaagaaggacacacagttaaaaatagactaatcaagtagccaatgaagaaacaaaagacactaaccaacatttgtcattttcaaatcagatatctatttatgagcggcaacagattccattgcatcagagacagagccccttctcggataaaggcaccttgtgatctcaattgaccagccatcccatcgatcaaagcctgatattgaaaacaaatgagtacagagacagtaatttgctaggagtatagctagagcaggaaaagccaaattacctgaagattggagaagaacgaaggaaatcccaaatcacgagaagccaggtggtggctcgacgaaggaatatcaaccggggcaatctgaagaacgtcaccaggaatcaactcaacatcaccatcaggcatgagaactctatcatccggtgcgccgatctctaaggcgactccctcatttcaagcatgcgtcgttactatgccatcagaatgtggtggagaagacccgacgtggacatccatggaggtatgagaaggggagcccgcattgcccattggagccggatcaccaccggcaacaccctcgggggctgggttgcagcttgcgctacccacccgagccggat

SEQ ID NO: 86169 - DNA, 435 bp, Zea Mays
tagttgtgcgggtcgcacgatctgggcaccgcggcaatggcgctgccatggtccgctcggactcggttgctggcgtagggtggaagaagacgacacgggagccctcgatctacgaatgaacggctcagattgatgcattcctatcgcagcgcgtcagccataggatctgaatccatgggttagtaaacgtccgggcttcataaaatctggggcgcagattgataatccaacggctgtgggcgtaccggttcgcttaaatttcaggatctaatctagaccgttcgtttataatcggacggctctggctggccaataccccttcactttaccagtttgcagaagagaccctagaaaatttaagaatcaacccgccgtccaatacaacagccctctgagtctcgggaatctttttaagtttagccccttcgttttcca

SEQ ID NO: 86170 - DNA, 892 bp, Zea Mays
gtggacccagggaaaccattaaaaaaggagtggcaatgcaccaaaaagatgagaagcacactccattgggtgaacgtctgtcttgtcttctgtctattgataccatgaaatgtacattttataatctgcagatttgaagtgataagcactcactaactacttttattcaacttaacctatctatatgagatctatctaagatacatggcccatgagacctatcttttttcgtatgttgaatagttgcatatcgttgagtccatcgatcaatatcattgcaccaattcagttagggtttggtggcaacacactcacaagtcacactctcccacatagagtgctcgcacttgagctctatcaaatgatcgagctaagcacttggcgctcttcacaccttgctcactagagttttttcttagcgtctcccacggggtgagcacgatacccctcacaatgccttctctagagccacacacaacttctatggtattccatggagccacaaccttcaggccatctaggaggtcacaacccctaagagtaacaagcaccaccaggttgcaaatcaaccacccagcgccacttgatgtaactgcttaatacaacacactagaaatcgctctcatgggctcagatgtgttctcgatcaaacatacctgagtagagggataagtctaagaacaacacttgtgcaacacatcctcaaggttctctcttactccaaatggtcagccacccctctatttatagaggaaagggacaactagtcgatattgcacttttcaaggatttgtgcacttatggatagttcatagtacaaaccatggatattccataatagaaatctaacgggtatatttcaaaccaaagtatgtctaacaacttagttagt

SEQ ID NO: 86171 - DNA, 315 bp, Zea Mays
atagcacaactttttcgcaaattcacaactaagcccgaggcctctccaaatcaatccaggatcattttgacacaaataagatcgtcaactgcaggcttgacaaaaagaaccacatcatctgcgtaaatcgagagactagatttcacgtttctgatggccaggtcatgcagcaatccactttcctcagcatgcttgaataagctactaagcacatccatcacgattatgaaaagcataggagataaggggtcgccttggcgcagcctcctccgatgacgaatataatcccctggagttccattcaatagcacttgt

SEQ ID NO: 86172 - DNA, 435 bp, Zea Mays
ccagtcgagctcttcatggaaacaccacgttcttcatggtttatggatcagaggcagtgctgctcgctgatctaatgtttggggcgccgaggttggtttttgaaaacatagctgaagcagaagctaccaggctataggatattgatgtgctggaggaagaacgattgaacacagtaattcagtcggctagataccagtagacattgaggcgctatcatgataaagtcatgcgacactggtcctttgtagtgggagacttggtccttcgccgaattctaacgggggaaggactgcacaagttgtccccactatgggaagggtcattcattgtgttagaggtcactcggccaggatcgtaccagcttactcaaatggatggcacggaagtggggaactcatggaacatagagcatcttagaaagttttatccctagc

SEQ ID NO: 86173 - DNA, 390 bp, Zea Mays
gcagagtcgagacaatgttcttataaagagtggcagcgcacagggaaaccttgtcaacatggattggcagtgattattgcccaggatgtaaggaatgttggtatggagaagtttgtcgatgattattattctgttgacaagtttaggaaagcttacatgcgaatggttccagcaactcaactggtgaccgttctttttggctgaaggtggagttttcaaatgaagtatgtgccccaatggctaaaagaggggtcggacgacaaaggaaaaacaaaatcaagagttgtttagagggtggtagtgggaaaaaaatgaaaggtcgtagagaatgctcaaggcacaacaaagataaaaagacaatacactttgccaaaactgtggccaactagg

SEQ ID NO: 86174 - DNA, 562 bp, Zea Mays
attgggggatccaatctaccccatataaattgtcattttcatccaatggacaattcttgtacttacaatgtgtgcaatctatactttctatcataccacgaaatccctcccccttagtttaaagtcgcctaagaatgtcaacaatgggacgccgaatatgctacttacttaaatatgaaatgataccactaaagaaattttgagacaaaaagacaagactttcctctattttgatatactcatcaatgaagtcattaacactatcatagatgagcatgcaaagggcagcgatgcatttttggtgggggagaaactgttgtggttgagtgcattggttctaagagtcaaataggggaatgctcactcaacctcctcaaggtttaaagaaagagactcttctacataagctaccatagataaaagtttactgtaggataaatgcacatgttgttaaaatagacttgcatcaaccactcatgggcagcttcacgactctagttgatatagttctgatgatgtgtccttcgcctccttctcattgaggattcagagacaagtttta

SEQ ID NO: 86175 - DNA, 805 bp, Zea Mays
acagcgccggagctcagggcatcgctgcttgggctagcgaggcgagcacaacgctagtaccattggggatgagtcccatcctggcattggtgtggccaacgtccatctctgacgcgctcccaatattggattccgctgctgaccacctccgacgtctggatcaggttcttagcgcccgcttggaggccgagggcggcagactctgtcggtcggccatcgagtacatcttaacgtgcttctagagccacgatccgactgtctccttggggccagttattgcgggtccggtggccaacactgaagatgctgctcgggagggcgtacaggatgttgttgacgtggtggttgggcacttccagcgggatcctgttgacgatgactagccaggcctgcatggagaaaaacgagggttcctctggggagcgggttgcaatatgtctttgattttgtaagatactctttaggtactacttgtcgatgacgttacaacttatctgcatgcccttttttctgctgtatgcattgttgtcggcttctttcccggtacttggcctccctgggatatggcctcgacttgtcggggtcggatgccaggattcttaaggtggcactggtgccatcactccgaagaggcaaaccctactgggacccttcctggacacggcctaggccaggtatccttaacatcgcacccataaggtccgccagctggtatttcttatcctttgattcacgcaacaagaccggcaacagggcggtggggcgtgtgtagtctttgtggtccttgaccatgcggccgtacggc

SEQ ID NO: 86176 - DNA, 530 bp, Zea Mays
gtcctcctcatcatggagctcatcctcatccgaaggagatagactgctctccgagagaaactgaaggggagccggaagaacggaaatgctaatcttgtaggtcagacatctcgcctcctgattaaatggcccctgctcaatgatgtggaggtccatatccctgtgaagcttcatcagatccaaacaccatgcccgaagcttgagtgaggagagatcagacttgctcgcagaggcgggatgcaactccaaaatgtgataggagtcgtggagaagctccttggctgtggtcagaccccacgcgtgcgctgagatcccacggatctcaatatccatcaaatgaggcagtgacgtagccgaagcgtgtgtaaatcttgtccactgcttgaacacgagcgagaacatagggcctctgaatggccttccttcgttaagcactcttatcgccacttcttcatccggcaaaaacagaaggaagtcttccggcatggtttgatgaatagacatgtcatcaatattgaggcaatagcgac

SEQ ID NO: 86177 - DNA, 459 bp, Zea Mays
cctctgtaagtagcaccagcatttttaagaccaaatgtcatgacaacccattcaaataaaccaacgaagcctggacatatgaaggccgttttagacgcatcctcttcggccataaaaatctgattatatccggcattaccatcaagaaagctaataattctatttcctgatgcattattgattaatgtgtcggctatgggcatgggatactcatctttaggagttgctctatttaaattgcgaaaatcaatacatactctaagcttacctgactccttcttctccaccggcacaatattggagacccattctgcgtatctgcaaggtctaataaaatcagcttctagcagccggtggatttcgtcctggatccgtgggagaatgtctggatgaaatgttctagctttctgcttgaaaggtctgaaaccggacttaataggcagtcgatgctctacgatc

SEQ ID NO: 86178 - DNA, 360 bp, Zea Mays
gaagacgactagaatgagcatgcatcatgattgtcgcattataattgtcttttgtgcatcaacatgcttctcgcacctttattccaataataagaacttgtgaataatgtgatgtactgctatgttagaaatgccttacctcgtgtcagattggtaagtcttgttaggttgtgttatgtgtttctcttgccttgctatctaggtggtattgaaattgttcaaccctttttgcaaaaaaatgttgtttgtttcctcataaaaagaccccacccaaacaaccttgagtttagcaagtgaaacctcttttaaaaaaatcctgcttgtgttggtattttctagcccttgagttttaaccttaaa

SEQ ID NO: 86179 - DNA, 558 bp, Zea Mays
gtggcatcaagactgcaacgggctagcagtgggggcgtgtggcgcgagtggtctcctatggccctatgactaagggagtacgaggttggggtagcgacaagaggcatgcgacagagtgaagtgatgagaggccaagatcgtaaggattctctataggactaactacccgtcaaggaggtgagccgatccacgaagctccatgaagacacaaaataaggtggtgtgttctccaaggtagaggattatcgacttaatcagactaaaggagagacgacttttctaaccggactagaactcatgctacggactactagtcgtcggaattgcatggctcgaccccaacatctggggtcgacgctctagctgcgtcgttgtcatccaagttcagtagtctttcatgggctcactcagtttctaccgaattcatcggttagataccatttttgtgacttcacgggctttatccttggtggatcgaagaagatcgagcatcatgtcttcatagaggttgcagcgacagctttgggcaccagctcttgacaaccaataaaatgtcca

SEQ ID NO: 86180 - DNA, 570 bp, Zea Mays
gttttgtcctaaatttcggtaacatttcgaagatggtaccccgaaaattactgttttcgttttcaaccctacacacagagtacacggtagttttgcgctgcaaactggaagcaacttttctgtgttttttcttgccccttttattcaccgagtaacaagatgcagagaactcatattgaacaaaacatgcagactcagctaaacttgggcttgatttacaactaacaaagcattgagctgaatccattctagtgcaagcagatccggatgctcttcttcattgccgacgctggtcatgccctcttgcagcctactcgtttgccagaagtccggttggaatatgatcagtttagggctcgttcgtttcttccaactcgaaaacaggcatgttttcattcctacgccggatgaagtggatcgaggtggttcactagaacgtaaaaatatctgatttggtttgattccagaggcttgtaggtgtggatccaatccaaactactgagagggtgaaaaggactgaaatgacttggttttattctgaattgcccatatccgaacaaccatttttgg

SEQ ID NO: 86181 - DNA, 1550 bp, Zea Mays
gggggcccgacacactgaggaggccaccggctgggtaggggcccaaggaaccggcgactttgggtgtgagagggtggggaagagagagagaaactggctctgatactaagatagaatgaaaaaccttaacttagggttgagagttgtattaatagacttagattgttgggtctggcccattacacagggatataactgtgattaaggggctaactccaaaaccctaagcgggtaccctaagactgtctccagtggttcgcgtaaaatagggggacgcggaactgtatatgacactgtttgcatagtaaagtttaaaatagtgaatgccattggggattgaatatgagatttgatggagatagcctaacaccacctgtcttttattttttagtgacacaacgtcatcatacctcttcgctttggtgttggacaggtgagaggattttttaatcatagtctgaaactcgagtgttgctcagaccatcaaaccaactcaactagagtctcttttgcttactgataattcttttaactcgagttcttcagttctctaatgttaacctaatgtcagtaacggatctaacggtagggcgggtggggctctagacccctctaccgctactaatactaaactcttagagcctcatcgaagctcctcctaaatttaaaaatgtgcaaactattatatatgtctactacgaatgattattgatatcatatcgttgtaacactttaatttagccactcctaacttttttttttcagttccgcttccgtcccagcctgctgtgtcgttaaaacattacagtacttcttttgtttgtcttggcacatgtggagtctctgatttttttcaaccaacttttcgatttcatacacttgtctgttgcttgctgagatttcacagcgggacgggggacaagtagaggccaaaaaacaatgggaacgcagttcggcacactgaattttgacttgccaggtgccctcagagatcagaatccaatgctccctgacggcctgaccccctctcgctgtctttcgccccctcccccctactacactcacgtgaaacatcctgtggaagtcttctgttcctccgtttgcccatgtttttgtcctttgtttgttgttggtgccgttgcgctgacagctgggtttggaagagtgaaatacgttgttcaaattagttagttgctcgcatattactatggttttatatcatgtatgtaaatcttacttaaataagttttttattaaaacacgattctattttttagttttaaattattagcatatatatttacaatatctattttatagaagccaaactctttatatcaagtgagtagggttcaaatccgctatatcctattttttggatattctatgtgggaggataaatttattcgaccgctaacgcacgaagaaactcacgcttaaatgtagtagagaggtatttatttaagcagagatattgaaggctgaaatctggtagcgtagaacctactcatttcgttcttaaattattttttattaaaccactataaaat

SEQ ID NO: 86182 - DNA, 1026 bp, Zea Mays
tggagcaccagcttctttgatatgttcttcagctcccacacacttcaaatggccaaccaaggggcatgggaggggggggggtatatatagcctccaaacaaaatatagctgttggagactgcacaacctttctatgtaggcacagaagagttcgatgcacccacagaacacgtccggtgcgtccatggcagctagtcgttgagcttctagccattaccaatcgttggagattgagtgtccggtgagccactaggcatgtctgatgctttatggcctttctccaatacggctgcattcctcgctgagttccctattcggtgtgggaattggtgcttcattggacccgtccagtgcacacctgcttgtcccgtgcgtctgattgcagttgcccttctttgacatagtgttgtgctattaagtgcccttctcaacattgcaccgagcatgttcgatgtcactatgcaacatccgatttattctgtttcttcgtattgagttattgcaccaaccagtttaacccaaaagcttaagttgatggagagatgaacaattcacttgtattgcaacacttcccctcacatggaggcttcctgaggtctcagatgtggaacaggagtgagcaactattacttcattgaattgctctaatcgggattgggactcgagacctttagctccgataccatattgagttgcatgtatcaatcaattcagcccaaaaggttaaactgatagaaagaggtgaacattcacttgtattccaacacactttgtatgtcttcatccaggcctgttccatcttgtatcttatcttagactcttatatgtactaataggtcttcaacatgtcttctaattcttgtttgaggtgttgatcatccagatcaccacttttcctaagcccaagttcacttgtacatcttttgaactatatctaagaacactaccaaataatgctagttgaaatggttatgttgatcatcaaacaccaaaattaaactgtaaatgggccgaagttcattttcc

SEQ ID NO: 86183 - DNA, 765 bp, Zea Mays
gctaatcaagcatccacttattcaacctcattcatctcatttcaacatctactacccctagtgcaagcataatttagaagcggagtttgtagctattgaggaggaggagatcacttcgagaggaaagctcccaacacatttagattgtcaatacacctcaatagatctaggtcacaccaaatgttggggaaatgatccctggtccctaggacctgccagtcagtgagcgcgctgaaggaagagcccttgatcgctaggtcctgttactcattcggaagaggcaggtgtgccaaccaaggaaggacccaccctcggtcgaaccccgcggcacaaagcccggggccgggcgtggcgaagcatgacaagggaggacgagcatttcgaaagggaaccactcgagtggatcctgtccccggccctagactgacccaccataaatgattggccgcattaaccacgcctggtgccgaaccacatcatgggtgccagtccacttcccactcatgacctatggacccctcaggtcgcattgtactcatgagctacgagcccctggactacgacacattaatagcatgcaggcccctcggtctgtgggtgcactcgtggcctatcgggctaggcctgagtgcacagacctcccgcagggcactacacgacgggttgcattaagccccaggctacggaagccaggggtcagcgtagccggaatgatggcatctaggaccatcgtcgtccccgcgtcatccactaaaataaatacac

SEQ ID NO: 86184 - DNA, 428 bp, Zea Mays
gccccttctcccgagaacgacagtcttcgcctcgctcgatcccgtctcaggtaaggaagacaaacccaggacaagactcagccgaagtccgcaggggagagaagcattcaatgcacatacctaccccacacaggattgcaggtgaactggagtaacaagactgcggtcctgtcaagcttcaacaacaatgatgacgcgtgcgaccactattcccgcacaccgtatgccaaccccccgatgggacgtacaatacgacaagagtgcaggctggccctcgggcgcaaactctgcctcgcctgaagtagaccctgattcggggcaaactctgcctcgcccgagcccagcctcggttacctactccccgcgaatcccacaggaggcaatacttcaactgtggcgcgcatgtctttgaatccaggaacgagctc

SEQ ID NO: 86185 - DNA, 493 bp, Zea Mays
gttgggtggtaccttctcttaggggtgcgcatcacctgttcgacagaatgtgtgggtcaatttgcaaatgtctgtcttagcattgggtacttggtagtccagaagttagcctatccaaaagagcacaatcggcgtcatcctgtagcagaaatagtttcgtttttttagtacgccttcatggttattccatagagtggatgcacgttcagtgctttaatttagttttcaaatttcttttgcaccttcaattcatagtgagacatcgagttatagttctagcaaactctctgtatgactgcacctaaacatttttatttgaaggttatttgatattcatttttagcttgcagtttagaaatggtctttggattccctggtagccaaggttactgaagggtaatagaacatcttgaccaacgaatttgtaatatttactctgtttggttatcaatgtttacttgctatttaagttttgtttgatcttcaacttttt

SEQ ID NO: 86186 - DNA, 317 bp, Zea Mays
gtcggttgaacgttgtacaggcgcgttgtttagggattcaacatttcaaccacctgtgtagttcaacaatgaacacgagatttctttttagttatatcccacggcactctgcggggaactcatctagttatacatgttaatcctaggccatattagcttactaacattttcatacaaccaccagatttgcctgtccaggcaaaactcttcaagtctatagaaaactcatcaaatgcgtctttgttgaactcagcatcgcttcaaagttcaaacaatgacactaccgattctgactcacaatatggctagcttgcttc

SEQ ID NO: 86187 - DNA, 829 bp, Zea Mays
gggatatacccctgggtacccacggctatagacatgggttgcaccaccagaggaggcccaccccatgacatcaaggcttgcggcacaaggcactagtctgcgtgcaccgcaagacatctagattacttaccatataactgattaggatacttttcttgtaaccctacccctctagagtatataaggagggactggggtcccctaggcggcaacatctctcatgatctctcatgaatacaatacatcggaacacaggatgtaggtattacgtcatactgacggccgaacttgtctaaatcttatgtctcgatgctctttgtgttatgtctggatcgcctcaagcgcacctctaccgattcatctactaccgcggacatacccctcggtagactatcgacaataaaccatcgacaacgaccccccgtcgtgcgcacacggtgaacccgcacactctctccctgcaagctcgctgccagcacgggggcaaatccagcagagacacatgttgggccgactttgtgtcaggtgaagcagcaataagcaacttttttcagctctctcccaccccatccacttgtgagcactagtagaaaaaagctctatgcctgcggtgggcagtaatttgtacaggcggtttccattatgacccgccagtggtagtaaagtggcaggccccacctaatgaaccgcttgtggaaacaaatttccatagacggttcacttaacacaaccgcctgtgatggttctactataaatatcccttcttcctcctcgagcaaaactgtttctcccagccaccttccattggaggccatttttggaggtccaa

SEQ ID NO: 86188 - DNA, 373 bp, Zea Mays
acaaaagacaatataaaggccagaaaggacttagcaaaactttgtaaccgaccaacccaggaactcgacgaaaatggaaaaaaagccacgtgctcaattttgtctaaaacctaaatagaagaatgaagtaatggaatggttgaaaaatttgaaattcccagatggttatgcggctgggtttaggagagctgtgaacttgaagacaaagaaaataactagattgaagaaccatgattatcatataatgatggaaaggctcctccctataatgttccatggatatttgaaagtcagtatctggaaggcgttagctgagttaagctacttttataggcaactttgtgctaaagaaataaagaaagaggtgatggag

SEQ ID NO: 86189 - DNA, 580 bp, Zea Mays
ccaggaaggagcactcgtgtacacaggccgaatgtgcgtgttacgggtccagagtgggtgacagcttagcaaggcccagaaaggagcgactgtgttcatgcgctggcagctgtgcagagagtattaagtctgtaagcagagagttgatgggggtatcgaataatttataacagaattctacctactaaactgcagctgcttctgtcctccatcttgttctccacgtcttctcttcttatgtgtgtgttcttgtgatcgattgttaacatttggtatcagagggctcgatcttagccattccactctagatcctgctccaccccaccatcacttcactcgtcttcagcgtcgactcggaggtcggagcgatggatataaacacgaaattgatcctggacgaaatggaaaagaagttcgccgccatggatcagaaattggagatgaagttctctgagttggcggggtcacgcgatcagcggatcagtgtcctggaggagatgggcgcggagctgtcagcttggaaacccaaggtcgacaccgccttggatgatgtcaagctggagatccggaaactgaacaa

SEQ ID NO: 86190 - DNA, 430 bp, Zea Mays
aatatcttacgacatctttctatttatttgatgagcataaagatgaagaaaattataagcttatattccagtgagcattatgacctcctagttcccctcacctctttggttttggtgggagttatagcctttgatcttaatccacctttatgcatgtcctgagatattgtgtggtggatctctaactcatagatatgggagtgtgtctcataaatgttaccctgctcccccttttatagagcaaaggaggagagaagtcacattagttggaccttaggtacaaccgactaagacataactatcttatccatatcatgtttcagaagcaaaaccaagtcttcagtcgtggcatagtgatggatcagagtgtccttctctagtggctgtcatacttgttgcggagatatatgtattatgtcacttctacgag

SEQ ID NO: 86191 - DNA, 997 bp, Zea Mays
tggggtgttacaaccctcaggcgtaggtccgctgacccagaaccaattgctgttgtggaaggagcagatctcccaaatgaacccatggacgactggagaacgccatatcatatcttcttaaccaattgcttgctttcccaaggcaaaacagaggcgcgaaggcttcatcgatgggcccagtcgttcatcatgattagggaagatctctacaaaaaggggcatatctgaataagtcagttgtgcatcccgaccgaacaaggaaggcaactcctggaagacatccacgatgggacctgtgggcaccatgctgccccaaggagcctcgtggggaatgccttccggtagggcttctattggcctaccacgatatcggacacacaccaggtggtgagaacatgcgaaggatgccagtactccgtgcaatggacccatctgcctgcacatgcactccaaaccatcccagttacctggtcattcaccgtctaagggcttgattttgtcagacctctcaaaaaggcacccaagggctacacgcatgtcttggtcatgattgataaattcactaaatggatcgaggcatagcctattatgaagatcacctccaagcaggccttgaaaatcatcaccaacattgtccaccgctttggggtaccatacttaatcaaaatggacaacagtacacagttcaccgagagcaggttcctagagttctatgacgaatacaacatccatatagattggatcgttgttgcccactcctgtgcaaatggacatgtcgagcgggccaatggaatgatcgtgcaaggcctcaaatccgagttttcacctacctcaagcaactcggccaacaatggccgcaggcgctaactgcagtcctttggagcttgaggatgacctctagccgctcaactgggtacatgccttgatttatggtctatggagccaaggcggtcctccccactgacctcgagtatgatgcccaagggtagagctatat

SEQ ID NO: 86192 - DNA, 399 bp, Zea Mays
catttgcttttcctgggtgatattgtatttccaaatcatagtctttgattaactcaagccaacttctctatcttaggttgagttctttctgtgtgaagatgtatttcaagcttttgtgttccgtgaagattttacacttgtttctaatcatgtagtgcctccaaatcttcaaagcgtgcactacggcagctaattccaaatcatgcgtaggataattcttctcatgcttccgtaacttccttgaagcatagtcaatcacctttccttcttgcattaacacacatccaagtcctagatgtgatgcatcacaatacacatcaaatcctttatgaatatcagacataattaacactggtgcagtggttagcctttcctttaattcctcgaaacatttctgac

SEQ ID NO: 86193 - DNA, 441 bp, Zea Mays
atattcattcacactaccaaacctctccctttcctggctggccagccaaacccatctttcttgaatagaaaggatcttcaccaaacggcacaagtagggggtaaagcaagcaactttgttaccaaaattattgtccctttgcatcttgcaaaggttgccatcctgctaataataatgagtacgtactaatgttccagcaaagaaaatagtggaagagagtacttcgcgttgctctttgatcaatgctctatacagtagccacgctctccactccatgcatttgcagtaaaagaacacacacttgacagtttacctagctgcatgcatgactaactttaattaccatgcacatgagctctgctccggtagtataaaccaaattaaagtagcataaaacaaagagcagcattggatccatgaccaaattatgccccatgcgta

SEQ ID NO: 86194 - DNA, 383 bp, Zea Mays
gtcagtatcggggtacaaaatccagccgtccataaaacagtggtaaggcaaaatctccccactagcgtctccattactgccctcggcgttgaatcggtagccatagcgtggtgtccaccgcaggatttcaatcctccgtggctggagcctcttcgctgcataaaattgtggtaagaacctccccactagtctcgcaaaccctctattgcctgatttacgcctatcgggggaaacatggggctcgagctggccgtattgtggttcggccgacgatgtcgtcgccgtcgtgaggagtgccacggctctgccccagcattgtgtcggtgttaggctcctacactcgcatccagtccctctcggtcatttcaccatacgatgcaccg

SEQ ID NO: 86195 - DNA, 308 bp, Zea Mays
cttgtaccccctactatgagcacctaggtgcaagatgatataagtctcatccccctcgctggaagtagggccttctcttgcccgaactaggataaatcttgtgtcttcttgcaccacacttatgggccagggcatgcaacataaattcacttgttggttaggaccctcaggtcaaaacactaacagttagcgcgccatgtaggggctcgctgcgtgtttatgacacattcccattaaggatccagatggctaatcctgaacaccctttgcagctcggcacagtgatttagtttgggagtctcgagttc

SEQ ID NO: 86196 - DNA, 321 bp, Zea Mays
ccttcaaccacaaaggcttctggttgtgacataaatattttctcctcaagctccccatgaagaaacgttgtcttcacatccattttctctagttccaaatcaaacagagcaaccaaagccaataaagtccgaatagaagtatgcttcacaactggggagaatacctcagcattgagtcggttggatttctcctacaatcttttattggtggctcagtggaggcttttaggattcttctgttgtctggttttgtctttcgtttctcgctatcgtgtaaagaagtgtgttttgttgtttaccgattaagatctcttaatgtcg

SEQ ID NO: 86197 - DNA, 481 bp, Zea Mays
aggtcacgtcttacggatgcaagtgaaatgacttatattgcatatgttcatgtaggccacgtctcctacgtacaagtaaccaaacagtagctcacataaaattaacacacacgataatacagaataagatgatgcgggcaaccaatcaactagatagtgactcagcgggatcgaggtaacagtcgaaagacgtgctctcctctcatggcccgggggcgatagtcaatgtggagatcgctgatggaagggcgtcagcagtggtggtagtggtggtgaatcgcaatcatcaacggagccatgaaaagcaggcgcagtaagaaaggtggaaaaggtaaaaattctcgcatggagctcccctcttttcaacctttcctgtcgaggttcatgacgatttgacatggaatttgtatatggacagaatatcgggctctgtacgttcgcatgctgttaaagcgagttcgagtccctagctacgccggac

SEQ ID NO: 86198 - DNA, 1488 bp, Zea Mays
cacccgccgcctccggcaccgccgcccgccggcgcggcgtgctgaggcctgaggaacagtactacgacacacgcaccccatttggtatgccggccggactgagcatattttatgtaggtttcgatcgatttgccggtgcatgcatgcatggtttatttgctactaccgttttgctcgcgctgctggtgctgcttcttcttcgcttagactctctctaccgatcgtgtgccgtgctacattgttatttcttcttctccgtctctctctctctctctcctgctacacgcttcagttcctagctaccgcttattttcgtttcaagcagtttaatttgcttgtagaagcaaatcttatcattggatcattgaattgaagcctatatatatatgcttttcattcagtactgctcattgtagagatgaacgaagatggacttgcatacttgtgtatcggttcattgtacatacgtacgtgtcctcgattcatagtacagagagaggacgagagagctagccagcgcgggtaccgggatatggccatcccctctctcctctgcagttcttcgcgggtgccaagtcccatcaaggacgtacaaatttgacgcatccagatctttggctttctttctagttctgattcctgtgccgcttcctttttctggtgcgattgcgctcgatcgatcggcgccgcgcgttagcccgggaactgctccacccactgcaccattgagcagtgtgacaacgggcatggccggactgatcgatcgagccggatcgtggatggtactgtcgcggcgcactgttgcatgccatcctccgtcccattggctcggtgcatatcttgctagatcttgtctgacggttgaatagggtgcaactgttgttcttctctagcgcgctcgtgccactggtcaggctgccggctggccggccggcttcgctaccctccagctgcagtgacgcccataggaggtccaatggatgaatagttgtaatatgtttgtgctgtgtgtgccactgcactagctacctctccggcttcttgtctagcaccatgaattagtttagtagggtgcggccaaataaggagatgttcattgattcactgtaattagcagcttcatatctatggctctatctcttgtcgagctgcatggttgcattgctaaaattggtagtacattttgacatacatatacacaggatttcattggttgcctggtctctgattcctgatttcatgcatgcaacaaactagtgctgctacccatctgaatgcagtctgcagtatctatatgttaacatgataaaaaaaaagctctttaattatttgcaatctccaagcaatcatttggtgatctgataataatgggattttatatatgactataactagctagattagtaaaatgttgggttagaagcagctcttgaacttactcatagtttatcattaggctaagatacaatatatatagtggctggattt

SEQ ID NO: 86199 - DNA, 873 bp, Zea Mays
cacgatgcaagggaaacgaacagggaagcagcagccatggcaggtgtaggaagatgctcgccgggtatctggggtattgggtgaggtgcttggctgctcacgatgcttttggttttttggaacgggttgcggtggcttgggttttatactccagaggataggattagccttagctagatggctcagctgttgcaaccatccaggaatctaggaggtggttaagtgcgcgtcctgaacgaactcagagagaaggaagatatgggccgcagtagttgtagttctggctctaggatctgcatgcggttgttagaatggaggcggtgctaatcttcgtatccacatgcaaaatggccgatccacgcgctacggagggagaggccgagtaggaagcaagtttgttacgacatgaacgtgacatgcacaagcagcacaccaccagctcgacgtgcatgtgcatgtgcatggcacatgatcatgtagttgtggctccgggagtggtttccatgtgcatggctaggcggaagaagggcaacggaagaagggcaacggagaagatactaggccaggaagggaaaacagcataatgatcccaattctctaatttccttttgtttttatttcccttttcaattccttttggatttctatttctagatttcaaactcatactcaaataaaagtttgagttagatgcacaaaccaaaatctcggcatggatgcaaagtgccttttacctatttatttagtacttactttagtaactgcttctaaatataatattgatgaaaagagtattcactcaaataaataggaaatctttctattgtttattttattttatttttttatttttttcaagcttcaaaattatgt

SEQ ID NO: 86200 - DNA, 468 bp, Zea Mays
ggccaagggccactagcagcatgatcaccatcaacaataggtcaacaatctcactagccaaaaacaaccaatcaaacccccctaacacatgcaagaaaactgtcaacctataggcataggagtcaggccaggcagaggtcacataaggggccatgaccaagaacaaagacattactgcattttccatggtgaagacattgatcactcatccgaggactaaccaatcacagtgacggcaaagagagaatggctacgatagtcctagagaagccaacaaagggtatagcccacacctatcagcaaccagtcccccatgtttccattataatcaaccagcctatcccctctatcccaccaattaccacacacagatctctaaccaagaaagattgcctcttccaccacctccacagatcattccacccacccaccagctatctcccacccaaagtatgaatacagttttgc

SEQ ID NO: 86201 - DNA, 445 bp, Zea Mays
gcttattgcactattattgtactcagagggaattatagtcttgcgatatcacaccagccacttttgtggtgtgtccaccgctgtataccagaataaatgaggggcccaacgttttggctaaaatctcaatagtgaagacaatggaaagcggtctgagaccatcttgaagattcatttgcatgtggggaaggtctagggatacccatgaagctacccaacctggagcttggcccttatggtgacatctttgtgaggggctccaacgagtactacagaaagcttacgctttttcaatacctcgatacaaacactgaagtcgttgatggaagtttcgatcgctacccatgcatttgaactgtgtatcttggttgtgtgctttactttcttaacatagtttggtaggcttggaacctggatcccacaactcttcattgtgacaactaac

SEQ ID NO: 86202 - DNA, 785 bp, Zea Mays
gggtgattggccacaaggaacgcacccatcattatcgactctccttccggtgtagtggccacttgcgtgtaatatattcgcccagtcttcttaatattattgcccgctgaattatttgccacgttccccttgccttgatttgagttccctgagttctgctgattgttggatttattctgccttgtatatgggtagtctttgatgaaatgaccagacttcccatagttgaagcagccagttgaggaactaggaagggcggggaaacgagcaccagaggcactcggctgatttgtagaggtgggggcaatggcagggtgaatgaagacaagttgtttgaatgggaaggagggtggacgaggcgaagaacagttctgattaaatggtcggattaccaacctggtttgcttctcaggtccctgattggacctgtcacctctgaatcccttggttttcccatggcctgtattcttagcttctactaccagcgctgtgctaacagccctactgtacgtgagatctaggcaggtggccatttttctttgaagccggtcgttgaggcctctcatgaagcaattcttctttttcaggtcagtatttacttggtcaattgcatattgggatagatgattaaatttgttgagattatgcatgacagtatctcctccttgtttcagtcgaatgaattcctcttgtttcatgtgaagcactccttctggaatatagtgctcacggaatgccaatttaaattcatcccaagtgacctgatgtccgtcttgttgaattgc

SEQ ID NO: 86203 - DNA, 585 bp, Zea Mays
ctgtgtttttatatagtagtaaggggtaccctagtttcagggtaccgacagtggcccccaggcccacctcaggggaggatgcaagcctacaggtggggccaaagcttgtactttgcctcaacatagcctgatcggtgattggcgcgctgttttagcacgtttgctgacacgcacactgtcaatccacctttggtcacgtcaactgccatatctgtccccacggctgactgacccatggctccccacgcctggtggttcgtcaagccaagcgcggggcgcctcgttgctgctgcattggttttaaaaataaccttttgtcttctgcagtggccccaaggaggcgcgctatcgcgtgcggcggttcacaccccgctctttccgcacccgaaatccagaacacaaactgtatgacttgtggagccgggcccccatgtcacaaactgggctgcctgggtcctaggtgcccgtcgaacgggatttcttgcggtgtttcaggggtgcgcgggagagtttccctggaaaaggattcaccccgcgtgcaacagttaccttttcgcgttctctcccaatcggctgtgccccttt

SEQ ID NO: 86204 - DNA, 301 bp, Zea Mays
aacaactaccaacacaactagaaaggctactattaccccaccccctccgtaaccaatccactagcaaaggtagttaccctcaccgctaaaagtagaggagggctacccccagcctccagtccatggcatcataaacgtatttagcagaggctcaagctcaaatttcgagacttggagacagtgaagaggatactatcaaagtgtcaaccacatcaccatcagcggactgaccatccagacaaaatggtcgcacgttcctttgatgttcgactcaaacgatgtcaacctccacaacgtccca

SEQ ID NO: 86205 - DNA, 428 bp, Zea Mays
ggatggcaaggggtgatggagagagtgtccactgttggatcgtaatcaacgattgcgatgaatgctagagatgacgtttcaagccattaagtctggggcgttcggtggagatcggatggtgaggattagagagggatataagatgatatggaccgttcgacctaaatggatggacgatattagaagtggcgttcggattcgggcaagtgaatctgagccattgagatctcaaatctgactgcgggatctgaaggctttaggggtattttaaatcactaccgtagatcttagatctaacagctgtggatgcgtaccagatctgaccgatacctcttcggcgtacacttttacataagagaccctaacaaaaattagaataaccctccgtccctctcctattaaaaccagtcgtgggttggtccctgttg

SEQ ID NO: 86206 - DNA, 665 bp, Zea Mays
ccctagggcttggacagtatatgatggtattgaaagtaactacagaattctcttttggttaacatctacctttgtctcattttggattgtgcttgttaggagaacctgatcctgagctcaatatagtgtgccgtcagatatctccaattattccacacaattatcaacagagcagctatccagttgcagtgttcacttttaccgtaatactacatacatgaaattccttcaatcttctattttacctgttcttaactttatgatatagctccacacctttagcaatcacgtaaaaaaatttcaggtaacaaactcaggacatacagctgctgatgtgactttgctttttacatgggctgtaagtttcagtaaagtttttttaacagatatttcgtaacttctatcataattgaatacttatattttgtatttctttttttctctgaaccttcttgccttatgtttgaacatgcagaactctgttggtggaaaatctgaactcaccggatatcattccaactccagtatgatgtaagaaaacaataagtataaatgtttagctggtttttgagcttttctttaataaacaagttgttgggttatatttttaatatatcctaatggatgacagagaaaaggatggtgttcatggcatactattacat

SEQ ID NO: 86207 - DNA, 526 bp, Zea Mays
atatgagcctagcccatagcccactaggggctttattactgtagctgttagggttagggtttgggtaactataactctctcctctcacatattcttctaggttcgggtttcaggtttagggttttttgcgcagccctcataggatgtgtgttgtcactgttagtttatgccggttattctagaaacggcagtccggttcgtgccgcggttcatggcttcatttgacagtaataggatataactggcagtgacaggtgacgtgttaattagcttatgtccaaaagtaacccaacgcgcctctcttgtaacggttcatgaccacagacccaaattgtgatatgttgacattagaaacggttagaaattttctcatggtaatgcagaaaagtaaatttgagtacatacgacaccaaacaaatcaaccgagacactatgaaaggaaaaaaaaacccagagaaaatcaaccgtgaaaaacaacaacaacatagaagagcaacggtttcttcaccatgctcctccaactcag

SEQ ID NO: 86208 - DNA, 355 bp, Zea Mays
caaaaatataaatagccacaactctaaaaactaaccattataactttttagaagcatcaaatcgaatggtaagcattgggccatatggtgcctttgtttagtttaggtctatgagcattagggcaagcaagagggttttgaggcccaagcctatcaaaccgtctatcggtgatttggaggcccaaacaatcaaacccagctagagaagcgtatctattatatctcctccatgttcttgacacatgtcaccatccatctttgattgttcggtcaccaagtgcttgtgctattgcttgacttggtcaaccatcgtattgacatggtaaatatggtccatggaacctccacatgtgca

SEQ ID NO: 86209 - DNA, 568 bp, Zea Mays
cctgaaggcctgtagataacacaagacctcaatgggcacagaatcgtaaatctgataatgactaaagactgacggacacctatcaccttataccttcaaggtcactatcacccctctaaccaaagcgaagccaaaaggttaaaacacagaagctgtgacttcgcaatgatcgacagacaactatacaagaaggaaataagccaacccatgctaaaatgctaaactaaagtcgaaggcatagaacttcttcgcgaggtccacagaggaacatgcggatcacactcgggacctagagctctcactgctaaggtcatgcgtgaaggtttctactggttagccattgtgtgcgcagccaacagagtggtccgctcgtgcgaagcatgccaaaaattctcacctcgcaagggcaccccttcgcagtttacaaagctcatcgcacacacctagccactacaacgttggggactcgacatcgttggaccactgcccacaacacagggcaacctaaaattttccttcgtcgttgtcaaatacatcaccaagtggatcaaagccagggctgtgtcaa

SEQ ID NO: 86210 - DNA, 708 bp, Zea Mays
ctccaccgttcccaaaattgacagtgcatggtgaaactatagtcctttacggacgtgtagccttaatctcgcctcccaattccacccgagaccgttgcggcttcgtttttacccttttctgttacccgcgagccaggatcctccgcgccccgtggtcagctcgtcctaggtctgctcctgcttgttttaatcatgttccagtatctatatgcgctagtgatgctcatcggccctgccctttttgcttagtcacaatcaatcacccggaacacatgaactcgcttcggtattttccgccaccgtggtcagtctaaaccagggtcgtaactacgtaactgaaacccgttctagggtagtctcatgcccgtaacacccacctagtaattaaattgggcagccactaccgatcttggccggtccgcgcagcaggatcatcgttgatgagcgcgccgtcgatttggacctcttcggagaagaaatagaattagaggggtatgattgcataatgtcagtgactcgggaaatagtcccgggagcgttttctgaattatttgaagtagcgagggcctttccgcaagactaccagagcagtgcggacgcgcgcgtttccacgtggacatgggccgcttgaaccagattcggcccagtactattcacaagtttctctttttctttttattccagagctaaaacaattatagaaaattg

SEQ ID NO: 86211 - DNA, 576 bp, Zea Mays
aaatgctttcgtcaagacagcaagggagttctatggtttgaagaccgattggttgttcctaagaatcccgaactcaggaagaaaatattggatgaagctcatctttccaaattttccatgcaccccaacagtaacaagatgtatcatgatctcagatctttgtattggtggaccagaatgaagagggaaattgctaagtatgtatctgaatgcgacacttgccaaagaatcaaggctagtcatttgaaggtagttggtaccttacagcctcttcccataccatcttggaaatgggaggatatttgcatggattttattgtgggattgcccaacacatcccgacaccacgattctatttgggtcattgttgatagactgaccaaaacatctcatttcttgccagtacataccacccacagggcagaaaagtatgcagaaatctatattgaccaaatagtgcgtttgcatggaataccaaggaacattgtgtcagataggggagcaccgttcgtagcacgtttttgggagcagctgcaagagtcactgggaactcaggtgataaggagctcaacatac

SEQ ID NO: 86212 - DNA, 706 bp, Zea Mays
atagcaaatgcttgtcaaggaatgggaaatgagcagtatgtcttatcacgagttgaagaagttctcactataggagagcagggagaaatcgtcgatgctgcccctgcccctcaacaattagaagatggtgttcaactcactattgatgaattagttgagatcaacctaggggctgaggatgatccacgtcccacgtttgtaagtgcaagccttacacctgaggagcgagaaagttaccgagaattccttatggaatttcgtgattattttgcttgatcatataaagaaatgcccaggcttgaccctcgagtttccacacacaagctttctattgatcctaagttttgaccagtgaagcaacaaccacgtcgctttcgtcctgagctgcaggacaacatcatcgcagaagtagaaaagttgatcactgctgggtttatcaaagaagtgcaatacccacgatggcttgcaaacattgtccacgtaatgaagaaaaatggacaagtacgagtatgcgttgattttcgtgacttgaatcgtgcttgccccaaagatgactttcctattcccatcactgagatggtggttaatgctacaacaggatatggtgttctatccttcatggatgggtcgtctggctataatcaaatcaaaatgaatgaggatgatgcaatagatactgcattccgcacccctaaagggaattttt

SEQ ID NO: 86213 - DNA, 1450 bp, Zea Mays
ccggaagcagcccaagcgacccaattccaggggaaagcgcgagcgcccgcacccgcgttgcggactttgcagaaaggaccttggcttaatgaataacttgaagcgggaccgaagcactattcaaccgagtcactgacatattacagagaacccctgctagttctgtttcttcacagaccagggtccccgacggtgagcggcgcggcagagctccggcgagctcgtagaccggcagaacggggcaaggactggtgccctacttcggtcgaaaccgaattcatgacctagtgaacgtttcccctaaatcaatttcatgaatggctacccaaatgtctctggccacggtgaccgcgcggatgatccaaagaacaatgcgttcccggcgattggtggcagtctagttcaatcgggtgggtcgacgagcatcacgggttcatgagagcactcaaacgagagagcagagaggatgagctgacctgtatcgtgctggccacggtgaggttgctttgacggtggcggaaactcgatttaggggaaatccggaattagagctcctcagtgaacgattgagggtgattcttggtggctgggtactcgactaccctacagagctcaccgtggcttcaatttatagcgatcggttgcgagcgtagcgaattcgagcgacggattgtgatcggtaagacggggtgagtcactggtggccgcacaacgtggtcattaccgtggcgacttctctggcgatcaccggacatgcgtagcatggttagccgtgacgtggtaaagtgtttggacacgcggtggacgacagtgatggctcaacggcggtgagatcttatctgcgtaatcgatgagcatgggggtacggcgagcttagccgcggtcggactcaagctaatccaggcgccaagatctttacccgcccgcagttatccacttaccccaagcacgaatcgggacgacgatggcacgaatcgcggcggagggatcgttggtggcgagctgagctggtgacctgatctatttcagagcactgtaccatggccattcctcattcagtgcacctgaaagtcaaagttttagggcgaattttctcttaattttatgtagtaacatgatcgacactctttagcaaagctatagctctaggatccagctataatcttggtatagcaaccccaggaaaaatcttgctcgatcatgcctgaattcatgcccaaagttcttgcagttgcactgttagtctgaaattcagacaccaaacaacctgacagcccaactttgggtgcatttttctctaatttcttcataacaaccatgcttactctcttaagcaaagttattctcctttgataggtctacaatgttgatgtggtgatctagggcaaaatccttcttgtttggaagttacaaggtcacaaagatgagctcaaaacactgaatttcagac

SEQ ID NO: 86214 - DNA, 864 bp, Zea Mays
caaagttccatgacttatactagttggctaatctatagatatgtttgtctaaatcataggaacaccctcatatacaaccaaatcaaaatgaagaagaattacccaaaataaagttaagtggacaaatatatgaagcactggtccgatcggaggcacactgaaccgagtacgcagagaggtctatataagagaattggtcgactgccttatcagactagttcgatggcacgatgaactagttttctagagagactattttagaagactaaaggcattggggcataggactagtcatgtcttaatggtcggagttccagatccaacgactagctgacatggcgaggtctagtggcacgctagaccagttcggtgagcgtgataagactactccccgtcagaatagctacctacaatgacagtctgactaggtctgatggtgcaccagaccgacattattcaaggtccggtgcacccgtagaaagtgcatatcgtggcattaatgctaatgactatttgagtggttggagctataaatatgaaagtgcatctagcccttttgtgggttttggtgagttggataacaacactcttaaaggactaattagtttgctaagtgttgatcatgaaagtagaaaaagcaatcatgattgaaaacaatcaagatacaaggattgatatgaaaatctctcatatacaaaaaagtgtccatgatagaaaagtataaaggattaacatcaaacaatgagaaggatatcctataagtaaggtcatttggatatgtggagatgggatattccatgaagatcaaaagtcaaaagatcatctatcagataattagacatcaaaagattcaatgtacactca

SEQ ID NO: 86215 - DNA, 458 bp, Zea Mays
gtccttacatctcgcttagacggtgttaccatgcaactattgattagattgtgacctagcttagattccaaacacaatatgcaggtatccataagtttaaactcatatttttgatgtggtacgatgcttacttatcttgtgtttgataattatgtctatttatttgtgctaacactagaaataggtggtgacaatttcgtgctcgcatcatggatggtaatgatgatgacaccgtgtctattgactggaatagctttataattgagaatgctgaaaataaggaaaatggggggactgatgatatgtttagaatctgtgatgagggatgcgatgtatgtgttcttggcacttggagatgaggatgaggagatgaatcgaacccacccaaaaccaaggaactttgcatctcatttttcatcggaaagtaatagttttgatccaagtgatctacatgctgc

SEQ ID NO: 86216 - DNA, 421 bp, Zea Mays
aaaggagtttaggaagggcaccatcgtcacgaagggaccacccaagcgacgtagtgggatagaaattacagaagagcataggaaacttgtcctagacgagagtgggaaaaggtatcaaggtattggtgtggagcataactgaactcacatatgtggcttgtgggagcttccttatgctaagtcattgattttgatgcacagcattgatgtcatgcatcaagagagcaactttggtcaagccctcataaatacatgcatggatttccctgataaaacgaaagacaatgacaaggcacacatggacttagtcgtgatatgtgatcgtccaacccaagtgcttagagaaaacggaggcaaaccaaaagctaactattgtctaaaacctaagcaacgaaaagaagtgatgaagtggatgaaggat

SEQ ID NO: 86217 - DNA, 356 bp, Zea Mays
ctgcggccttcgagttgttcagagttgcgagaaatttgctgtatttttagttgcgagaagctattacgtatgtaataagtacgccagagtggaggccgaaagaacatattcttttatgaaagatgtaatgaacagtagaatcagaaattcagagttatgctcgtgcggtttcaacaaaaaggtaaagcaaaacaagcgaagaattgaataggaacttgggatactgagcaaacaaagactgaaaagtaagtcaaagtggattttccccttccattcaagccttcttgagatcttttgtttgccctgttttttgtctgatgaaagactgaaactcatgtattttcgtgggctttcaa

SEQ ID NO: 86218 - DNA, 347 bp, Zea Mays
ctttcgaagcttccgcaattctcctcaaaggagttgagttcaaagtcttcactgtttctagcacatctagtatgtttgccatccttctcctcttaggagttgcgacagaacctttttgtgcctttggcactgttacctctatcaaagggcttaaaatttctaacacttttgtttctccaatatttgattcttcagctttacccttatcagtcttcgtctcagctagctcaactgaaggtagcttcggcattgtagttggatcttcagtcctttgcgcagagggagcagcttttcctgattcagtagctgaagaagcttccccgccaaactcaggcaccatggccggc

SEQ ID NO: 86219 - DNA, 462 bp, Zea Mays
gtgaacgtgtagctaccaagcaacttgaagtacgacccatcgctacaaaagatcagctagcagatgcattgacaaagccattggcggcacctgcttttattcattttagaaacaatctgaacatagtgtctctacgtccaaattgaggggggatgttaaaagatagaaggatatatccatccttgggagctgcgatctccctgatttcctgaaccaatctattcttgggaagttattatctccctgatttcttggagctgcacctccgtgattctctagatttgttaccatgtaaatcatgtgtacctcgttcctatatattgaaggatgccgtgacccttagagggcaggctgtgcattgcgtcaacacaatgtactaaaacaaaaggaattagaaagtaccagggcatgaattcactggctgataattggacggagatcgctccttagcaggtctactga

SEQ ID NO: 86220 - DNA, 1416 bp, Zea Mays
ctcttgcgctgcattacatcacattccatcgcaagaacaaagccatatcgctgcttgaagacatccaaagattcaatgtctaatggatgtagtctagtttagatatgtaatatattgtgtatacaattgttccataaacttcagctgagtcatgtgcgtatactatggcaatgacggtagacgtttcttatgttatgtcaatgacaacttggggaacagtgatgtctaaactggaaaattgtaccctatgtgttttatcttcatgtgtgttttatgcacttgattctgctaattttttgtacaattttatgctgtcaaacaacatcgtgttatgcttattttgtctcaagtttatgatataaacatcactgtgttatgctggaaacatctctttgtacaattataagcttcacagtctgacaagtttatgcaataaacaaccccgtgttatgcatattttaacataaatttatgctatatacgtcaatgttctatgctataaaaacctcgctgtacattcataaatctacatatctgaataatgcttacgataactttcacctacgtttatgatattatgcgtacatatttatgatgttgtcggtgccttgacaatttaacatacgatccacatttacatccataatataattttcaacttatatttccagcatactgtatgtcgttcattcatttgcatcactagttacagcggtaaacaagcccattgtctcataaatcttttagtattctactctctaccagatgaatcatcatctccgacatacaccgttcgtttttttgacgttgatgtctcattccactgtggtgctgcacctctgattttgttccttgaaccaggaggccgtcctcgcttgcgtccaggtaggttagccaatcgaaccctattatcctccatagttaaacacgtacggctgttgtgaccatcagcgatgccacatttttggcacttcctgctcatcttcttagctcatttcgcacccaatttaagaacttgttgctcactacttttgatcgttcttcccttaggcttggccttatctggtcttgctaagtttacaccttccatatgaaactccagtttctacaaatcaaagatattaagtcagttttcattttcacatactaatcatatattatagcaatgttattacctttctagcttccacatccgtagcactactatcaaccagacacataccagtgttatgttccaatgttaatatcggcatattacattgatcatcgttagtattgcattcatttttattagaccccattacaatttcctatgaaataacacaaaaccagtgaagacacaaatgttatagagcagcataaataatacattataaaagtttgttgcatacctcgttcccatcatctaaattgcgt

SEQ ID NO: 86221 - DNA, 562 bp, Zea Mays
gggcagcaagggcgacagcgacgacagcaagggcgacgacggcaagggtgacatcggcaaaggcgacggcgacgacgacaaggctagtggcataatgccgctggtttaaatattagtatagatagcagtagtagtagcaataagtagtagtaagtagtagtggattagagtagtattagtatagcgtagtgtaagtagtagagtagtgtaatgtagtgaccaggggtggaagaggccgactcataatgagtcagcttcaagtttgtgttgaatccccctttatggatgaagaacatagttatttcacttaaccatcgttgcacgctttttgttcgtgtgcctgaaggcatgccgacattttagaggtagagagacggttgtgattcttacttttccgagttatgatctgccattttagaggtaatgcctgacttatggagccaacttatactcatgtcgacgtgtcttcttgagttccgaaccctaaatctcacttttctcctctgtcgcttctctattttccgaattctcgagcccgcccacttcgctcgagagattgcaa

SEQ ID NO: 86222 - DNA, 423 bp, Zea Mays
cattccctaatttgaggtattgtatatacttgaggtaaagaatcagatttgtcggtgatgtgaggatacgaaggtgctggtgtgtgcacgagacagatgcgagaaaaaaaactgggtcctttttgtgaagagtgcatcccaaggaaggatacctgttgttgtgaatgtcatcttgatcactaaccttttattttaatttattttagaaagctcgctcgctaactaatcaaccgtcccaattattaccctttaatcccttttcagggaggtaatgatacactgaacaaagaggagtttgctgatcacggttcctcggtaggaagccttgccctcgccaactaattttggtcaatgcctcccgatcttcagattttgacaccccactaaccatcacctctcaaatcccatgtatagctagtactt

SEQ ID NO: 86223 - DNA, 385 bp, Zea Mays
gatggaccagatgcttgacgatctgcagcctcaactggcaccagatcattatgattcacctacaccggaggttcagaagttcttcgacctactcaaagcgtcagaagagcctcttcacgggcacactgacgtgaccgtactcgaattcgtgacccaactgatgtcaatcaagtccaagtttgcattctcaattaattgttacaaggagcttgtggatttgattagcgaggttcttcctacgggtcacaagatgcccaaagacatgtactagtccaagaaattgcttgaaggtcttggtatgcagtatgagaagattgatgtttgccaagacaactgtatgctttcctgtgtggatgatgggtgccgacttgctttcctgcttgac

SEQ ID NO: 86224 - DNA, 499 bp, Zea Mays
accagttgactaacatattcttcacataactcacaattcaaaccaatcttcaccatactaacaattaatcgcaaacaacatatacaacacccaccggctacttcatttgaaatactataattatcgatcatgccactaatacaaggcacttcggcgcacacactcacccactgatacatcctttgcataaactggtgtttcaaaccctgctcatcacatcaaaacacaagacaacgcgtatgtttctctgaaccacatacacattcacgccactgcatgcaatttgagaatttttgtcaaacacgtaatacacatcacaatataacatctaacaagagcctgagaaacacaaagaacatcccaccctttttcacttaccttcttttcccacaagatcgtccgtactcgcacaagcactgcctcggctaggtgtgggctcgcagggagacacgacgatgccacaaggcgacacaagccgcaagcatgatgagcatccccg

SEQ ID NO: 86225 - DNA, 637 bp, Zea Mays
gttgattggaagccggatcgtctgtgtgacatctccaccaaatcgatagttatctttacctgacggaagatcgggcacccccgttcctatcaagtggtattcaaagacttaggtattactctcaggcttaccctagtttagtttaggtttttcatcctataactccagataattgccatacaaaaaaaatatcccgctgtcctagaacccttgtttagccttgcaatttcgtttcagattgctttgttgagtttgtgtccgtatcgagtcttgttgctggtttaggtcgtgtcgtcatcgtagttcaaccgctccatcgctgttatttgtttccaccgctatcccatccaccttacccagattacaagtcgagacaccacattactctatttgcctcgctagccgccttgtgtgaattctcaccacgctagccctagattaggttgcaagccgcattgcattgcaaccctccttgtttcatcatctggcgcttacctatttcttataccagggaggtttgtgcccctgtgttctatagccgccgctacagttcctaccaatttgtgccctggaaaaccataacttgaggtaccttccataaaacgggcataacttttcgctcggtgctccgtttgag

SEQ ID NO: 86226 - DNA, 466 bp, Zea Mays
ctcacgtcagggcggtcgtcactcgctggcgtcatcacctatcaactctctctccctttcatcaacgtgtagcggtcccagtgattagcttccacgttacctggccaatggggagaaagagagctctgacttcaccgcgcctccaaaaatcaaagtttccaccactcattctttatccctctctactaggaacgcctactcgcaagcactcaagctcacctcgccacagatagggattctcattattgtttagatgtgctccaccactagagatggcatacatgcaaagttcgaaaaactagaggtaaaaccaagccgggagacggagcagagctaaccatgcaataattgcccccttatataagcatcaaactatctgaaattgaaaaaaaagaaaaatgacgtgtaaagaggagaaatgggaaaaaactaactacggctgcctcatgtttgaactgtttttttc

SEQ ID NO: 86227 - DNA, 432 bp, Zea Mays
gtcagctaactagccaccgctaatcagccacaatcatccaccagtgagctcgaattcgcgttttcccccaaatctctttccgccaccgtgaaacaagcttcaccgtcgtcagccctttttccggtcagtccaaccctccctttgcttcgtttaagcttctccccgtgtctgtgatgcttaccgaaccgtccaattgagctagaagtcccctgaccgtcgggaacacatggatctttggtccatccacgcgctctccgtggccagaccaaattaatccaccaattatgcaattaacttaggggaatcgttgactggggtgtgaattcggtttcgaccgaagaaggacgtcagtccttgccccaatcggccggcgcagacagctcgccggagctcgaccgtgctccacgccgtcggggactgtgaaacgtaaag

SEQ ID NO: 86228 - DNA, 455 bp, Zea Mays
gcaggggctctgctagctgaagttggactgctgaaggagaggggtctgactgcagaggttgtggttgttgattttgttttcaagaacattcacccgttgaaggacagggcttacccggcttatctgtaccgaggcctagctgactcaactcgggttaccaacaaaagaattccctctgtagacttggtgaaccgacttgagatgatccttagaggcaaggtatcaaacgttggtgccccagtggcatactcggcctagaacctgcctccttccaaagctttcactcattttgtttcgaatccacatgttgctgatggcagtttgggccttagagtgcgaccctctgctgaagaagttaacgccttggttgcctcgctcggggaaattcctgatgatgaacggcaagttcactttgaggtacctttggatcctagtgacgcagaaataagtgttat

SEQ ID NO: 86229 - DNA, 399 bp, Zea Mays
cgtcaagtgctgctaatgctactccatgcacaagctcaacctccaacagaagaaggtaatgaagatgatgatgataatcttcaagttggggtcaaaagaaagctcaagtcagatgtatggttagaatttaaacaagttacagtggctggcaaattgaaagctgattgtaattggtgtgagaaggtactagtcggagatagtagagctggtacaaatcatctgcgtggtcatctaagaacttgtcaatctaggcaggttagaaaaggactaaagcaatcaactttgaagttgggcaaaaatatggatgggtcagtagtagtggaaaaatatgtgtttgatcaggaaattgctaggaaagagcttgctttaatgatatgtttacatgagtatccaaaatcc

SEQ ID NO: 86230 - DNA, 864 bp, Zea Mays
ggcctagtctctccgaagattaattctaatgggctttgaaccaattcctccttcttctcatcaactctggcttaaaaccattcagtcttccagccagctggccacttggtacgatagctgataactggagacttcgcatccttgcgataagcaaaattgtagcagctgaagtttttgtgcagcccatcttctctagcttttgtttgataatgaagctcatgcatccggcagaagccttcggcaaacggttctacgccctggcttcggagggcccatatgtagacgctaagcctaacgatggcgttgggagttagttgatgaagataaatcatctcattcaaaagaaatcttaatcctgctttgaagaagcttttaaagactaccacctcattcttttccggcttcggagtaatttcctctccgccaaagagaattagctcctttttggcctcactgaaatagcctaacttcatcaacttaggcatgtcatcttcggtaacggtagacctcccaaactccaggtggctaggtttagatggtacggcactataatcatcttcaaattcatcttcctcagcaccaacctgcttagcctcagcagcaggtgcaccttcatcagaaacatcttctgtcactactagccccgaccatttcatcacttcggaaatcggagcggtctcagtagtttcaacttcttctccgtcatgtgtaacactagcagtggaaagtacccttgccatttgatgatgaattcctcacaatttttgatgaaattgttgacttttttaattttccgaagctcttccttttgtgacgaagcaaagtcaacagcggtgcttcggctaagtgcgatgaacaagcttc

SEQ ID NO: 86231 - DNA, 760 bp, Zea Mays
aggggagacttcgagcttcctctttagtggattagaggacggcggacgcggtggcaagcggttgcgggcggagagcggcttggccgcggaggacggggagcggaagggggaggcgccgtggtcgagggcagagtggtggttgcgcgccggggaggaggggtcaacgttctctttggggacgcggcgacgaggtggggtctcaacgccgccggagaaagaggcgggcggcggcgtagtggggtgacgcgcgtgccgcgacaagagggacatggctcaatggctggctgcggaggccgcttggggagaacgagacgttggcagggggggagggggatttgaattttttcgaacggaactagactcgagtcgggggtggggggaaaggatgcgtccagagtccagactccagacgatgggatctgacctcggatgccgtgtccgtatgcggaacaacaggatgaccgagccccacatttgagtttgagatgaaagatttcatgcctcctccgtcctcgactcctcgtctctaatcacatcttctattttaaatattactgtaaaaacagtattttgtataatcatatgcataatctgctaaagatactctaagttatgtacagatggaaaaggtggatccaagccctacctcttgctcaggctcctcaattaatactaatgaacctacaaacacgcaccaagcaataaaatataattaaacataaataaaaacactacactaaaattggaaacttcttaaggc

SEQ ID NO: 86232 - DNA, 543 bp, Zea Mays
tctcatctttattctgataataaataattggaaaatgtgtgaagcatgattgtcctataagcaaatttctagctttgtttgttgtgtcctttagacatgtatttatgaggcctgtggttcttagtcaattgaccgctagtgcaacttgggttttttttcgtgcttgtgtgctggtagaatgtaggtagtttgtttacataaacccaaagctaggtaatgtcctcgtttagtgaaccataacccaaatcgtcctcaatcctccaaaaattcctccaagtctccaagcagggatgagttcgagtttttctttactactccaggaccgcttagataagctttttattggatgtaaaatgcacgcaaacttaaaataaggatctcgagtacatgttctcgtcgtttcatatgtgactcttttgtagtcatttttccatccaaaatcatgcctttactcgcttggtgcaagctgatgtttctattccactctgtatcatcttggagaccatgtcgttattttatcaacctaacctaggaaagccatgt

SEQ ID NO: 86233 - DNA, 745 bp, Zea Mays
cgacagaacccttttgtgccttcggcactgttacctctgttgaagggctcaaaatctctagcatttttgttatttcttcaatttttgacccttcagccttatccttatcagccttcgtctcaactagctcaactgaaggtatctttggcaatatagccggctcttcagtcctttgcacgggaggaacagtttcttttgttttgttagccgaagatgctcctttgctaaattcaggtatcacgaccggttcgatgtaacgcgacctgtgagtaagaaccttcatcttcttgcccttcggctcagctgtgatggctgaagcggcaacctttctagaaacatcaatctttctttttacccattgccctcgcagcgggtaacaatagtcagggtatacgaagctaatagcatcgaataccatgttcaaccttttcttatttcgacccccgaagactacggacaaggcattgtcttcggttttggaatacgccccaagtaactcgtcgctagtagtttcaatgcacttcagccaatcatcatttggttcatcaaacttatccccaaacctgaatgtatacttcagccgaaccaaatcaccttcgctagagttagtgatggtctcctttggcatttcccagctttctacaagcggccatactctgaatgctatatgttcttgaattaaaactcttgtgccaatgaaggagcaaatagtactgaaggccttctaacacgcttcggcagcgtc

SEQ ID NO: 86234 - DNA, 384 bp, Zea Mays
caacagtcgaggtggaagaacaccggctccagacgtttaacaggaggacgctaatactttgttcgatgtcggtaccagcatcaacctagacatgcctaggacggagactggcataggccccacaagacgtacccctaccgactctatggcccctactgatgtggcttgcactgctgccagtgatgatcgcggtagcaacaaatcaaggaagagggcacccagatctaaagtctagaacgacttcgaggagctaactcatgtcatcaatggtaagagggtcaggtatggttccatttgcaagtactataagcagactttgagtgccaaaactagctacggtataggccacttgctctggcatctaaagtgtaaactatctgtgaa

SEQ ID NO: 86235 - DNA, 610 bp, Zea Mays
atcgactataccagcctgaataaggcatgtcccaaggactcgtatccactcccacgtatagatcagatcgtggattctacctccgggtgcgacctgttgtccttcttaaatgcttactctggtttccatcaaatccagatatctagggaagataggaagcataccgcttttgtaacagtggatggtctttactgctatgttgttatgccttacggtctgaaaaacgccttgccaatatttgtgtgggcaatgagtaagactttcgatgacctcatcagggacaaagtggaggtgtacgtcaacgacatcgtagtcaagactaaggcaaggtcgaccctagtggaagacttaatcctagtcttcgacaagctacgggcaacccgcataaagctgaacccggacacgtgtctttggggtctccgcagggaagttgctggggttcctggtttcacaccggggcattgaagcaaacatggagaaaatcagggcgattgaggcgatgaggcctccggctcgaatcaaggatgtccagaagcttacgggtcgttagccgcccctagccgcttcatttcaaggctggttgaaagggcgctacccttcttcaagctcc

SEQ ID NO: 86236 - DNA, 701 bp, Zea Mays
tatatttatgatggccaaagggagtacaatgagagggtaccatggcttccttgggcctcaaaagagagtgctagggtttcttcatcctaatcttcatttcgttggggaacaccgatcctctaggagtggttgtcaccgacaatatagaaactgctcgtggaagctttaatttgcaaatggcaagggtagactaagattcgatcgtttcactcatcccttcgtgtctgtcatacaccaaaggaacgtgaggtctaggacatgctgatgcatgcgcctagcatgttcatccctttgcgaaattggagttgcctacatcccttatcatgttttggcatgcccctagaatgaccactggacgtaataggcaggttgggtcacattgagatgagggaacaacatcatgtaagaggtttggttccctatttgctcaagtggcaaacacatgtcaagtagcagagacttgtctaaggtccaagcatttgtctaggcctcccacctgagccttgtttggttagactggaaagttgggtcgggacaatccaaatatgcctaggctctagccctcattcttgagctagatttctaggccattagccttgggtaacataagcttaggtctcataggctttggtcggtatccaatggtgggaggcaagcgcacccgctagatgtagcccttagatgattggcaagttcagtca

SEQ ID NO: 86237 - DNA, 1020 bp, Zea Mays
tgaagggtcatggtcccctagatcctagggaggcatgtgttatgatgcctctagggtgtggcgtactctacaaggagctcaaactaaagtgtgatctaaggggtcagtaacatgtgaccctaccatgtcatgtcctctagctagcagtaatggaagacaagactgagcatgattacaatgtcgtctatgtcatggctcgcgattagtgttgctagatgaggtgtcagaggtgagtactccattgagtggatgtaccggtgacaccatagttgcatagcacaacaaaaacacaccaaatttaagaaagaaataagcctacttggcacaccaaatgtcaccgtgatacaacaccagggtatcgtaagtacccaaacgagagataaagtctatagataaagcaaggggcatacgatggaggcaccctaatggtgggtgcagcctaattaccaagacatgagcagtttatagaggtttggttgattcctctttgagtatggtggatttatggacataaaggcgatgaaaattacaagcttagatatcaaccgagcgctatgacctcttagctattccttcccatttggtttcggtgatagtttttggctactagtccctaattcacctctatgcatgccctttaacaccttaaatgagtttgagttcttcaatctgaattgaacctaagtgaatcaaccctactggattggctgcccttatatgttgccttacttctctcttttataggctaagggaagagagagtcacttgcctattgaatgatgaaccccatccagtagagtctcaacaactcatcttgttatagtcatgaagtcatatatagttgcacgctttagtcatcccacaatgttgagcatgtcttgctgcaatggcaagtagcaaagtgcactcttttgggtataatatagttggtaattggtgtagcacacttaggcctccttccgaatgcaagatttttagaggaatcatataataattttatagaaatcagttcattttcac

SEQ ID NO: 86238 - DNA, 286 bp, Zea Mays
gagcctctagttatgaacttgctcttaggctactccacaggctcgcggcaattgatgcctatagctatttgccacatgctagtcctagctacggatgtcagatcgagctccatccttgtattgggaggtgtagtagaccttgccgactacttttgtgcatggaacgagactgtcggtaccctgaatcaggggtaccccttactacaatatgaagacacggtacccgtaccacgatctctagccgcgcggtgaacaacacccgaccccaccacgtggacggctcaag

SEQ ID NO: 86239 - DNA, 1329 bp, Zea Mays
tgcgctacattgtcggcacaatcaactatggccttgtctaccccaagtgttgcaacatcggcagcaggttgacgagctacacgctaatcgagtacactgaccgtgacttgggagagataccgatgagatgaatcggcagcatcatcttctttgtaggagacatgtcttcaaggttattaaagcgataaaacgttgaggcgctcatgggaactttttaaatttaaaacgtttaagcgagctttaaaacgtctttttaaacatggacaagatatgaatataacataatttcacgtaacaatataacatgtccacaaccacactaccacaaatccataataacacaagttcaagtgttcaactaatagcaactagcaagtcaaaaaccacaaacaaagtggaatgaaatgtgcagtagtccacaatcacaaacatagcacaaaagtaactgaagtggaaagcaatgtccacaaccacagatgcattagcatcattactggttgccattttcagtctgcaaataaccaaaatcagaggagaatgtgagcagggaagggaaggaggatgacagcggggacaagggcagctaacagaggaagagcagggaggcgactaagcgaggaccgacgagctgaccgagcgagagcagggagtgcaagcagggagcgcagcacagggtggcagcggcctcgttgagcatgagcagagaccaagtgcggacgcagcgcagggaggcagcggcgagctgggagcacgagcagggagcgccatggttttcaaatcgtctgatttatcacgattaatcatcctggtcgaccacatgcagtagataaggacctccgacccgattaggtgggctggtcagacgacctgtcgtcctagttatcgtcgtgtaatcgtgcttaatcgtccgtttgttaaatgttgcgaccttaaactagaatttggaaaggtagtgtctgggtcccgtttttgggcgcctcttttccattttgacgacatattcattgtggttaattattgattgacgcctcttttccaaatcccaatttgctttcctgttttcatctctgtctcttctccttcctggccggccggctgctgctccctgctcctctctcattctctcattcctggccggctggctgctgctccctgctcctctctaattccctccagctgctccacctctctgaagaactcctgatcaagaaccatcaggtgtcagctcctccagtccttcttgatcaactcaggaagatgagtacctcatttgaaggtaccgtgatcatactgatcaagcaagtttagaattattagatcaagaattgg

SEQ ID NO: 86240 - DNA, 868 bp, Zea Mays
ggcatgcttgcacttcatttccaattgcgattgatggcctcctaatgccgaagtgtgaccatatgggacgttgaacgatgcccctcacatcctccctcttattcagataatttttacgtaaaaccattgcttcatccaggagccgggccacttcttctgaaatgtaggcacatggtaatttgcctcagagcgaggcacaaagctataacaaccaaagttgttatgatattgctcttttccggttgccattgtctggtaagatagctcgtgaatgttgcagaaacatctagcatccggctccagaccctgactcctcatggcccatataaaaacccccactttagtaagagcttcggtggtaagttgatgaagatatatctcgaatgtctttagaacctcaaccaacatcttatggagcggaaagcgaagcccagctttcatgaagctcctgaagaccaccacctcatcaccttcgggaaggggaacgatgctttctcccccagccctcactatgaaaacatcatgaaaatatttgcctttcatcgcttcaatttgcccttgtatgatagttgacttttcaaaaacaacatggctcggccgatcttcgacatcttcattcccactatccacatcaaaattgtcgctatcgcaggaatcctcagacaacccagccaacatctcattggtgatcttttctgtgttggtcttctcaacagcttcgtaaaacccagacattacgagatctatgatcttcttctcctcagccattcgggtgatggttgcggcagatgccgaagctcaaaagtcaatcgagcccgcaaaagagaagaatgctagaatggcaaacacagtgcaaacaactagatgg

SEQ ID NO: 86241 - DNA, 447 bp, Zea Mays
aacccgtcgagaacacattatttccaaagcccttcacactccaatcccactccgtagcaaccaaccttctcatcgcactagtgatctgctcctctgtcattgagccctccacaacagtcactttaccaacacaactaccttgctttgatttgacatgagtaggttgaggtatatagtaaaaccccaaaccatctaccgcatacccacaaggaactgcaaaagttttgcaagtacgaaccactgtacatttcgaagttaagtgggtcttgatatcacacacttcacaaaacagctcaatattgcattcactcagctggtgaccttttattttacacctgaaacaaaacgacacctttttttggccacttgaagtgttgaggatcccacctggtcatctaaatgggatggcttagaaatctcattgatcgtctcaagttttgaactacg

SEQ ID NO: 86242 - DNA, 336 bp, Zea Mays
ctcctcaagagggggaggctaatgaggacacgcctagcattcactcatcttcaaatgaaactccacttgatattgttggtccaattacaaggagtagagctaaacaattgcagaaggaaattcattctcaggtgaacgctaaccttatgtttaataatcagtctatgttgaatgaacctatgcttttgagttcttgtttcaatgtcctcaggaatggtggagtgtatgaaccagcatgggatcaagatggattcaagcctctggacatctgaaccaagaagcctatggtgtgcatgaataaaatggtcgttcatcaccttagcatgggaatgcaac

SEQ ID NO: 86243 - DNA, 827 bp, Zea Mays
ccggggcctcgtcgggtgaagttgacacctgtggtgcttggaattgctcgccagaaccgagcggattcggcgaacccgcaccgtgccgcgaacgactacgcttgacctctcaatcaccggtaaatactaccttcgtattttcgcgctagttcgtccttcctcttgcgctggttcagtcgtggtttggtgcaccctgaacacgtatccactacaccggcgaggttggggaatgacgccgccgtgtggagacctggccaccgcgtgttggggaattaggcgagggagagagcctgtccgttcgtccaggatcgaacggcgtggattagatgcagctggacggtaggtcgttgtgcgctacgccattggatgtaagttgggcggctcagatctggtggagagcaccgtttcagacagggtagcgtggatcgttcgatttgatcggagggctgtggttggggcacatcttcgttaaacctcgaccacagatctcagatcgtgcgcaccagaacagatcgcgacattttaaaatcgggggccatcggatcgtgatccagtggcccataatgcaccgtaccccttcggttgcgcgttttacagaaaaaaacccgcagaattacacaaacaacccgcggtccacggcaatgttagcctgagtcttaggacatttcccgtggacgcccctgcgcatttctgtaattgaggcccagtccagagaatgttaaaatcagggaaaagatatagaaaatgagtttttaatgtgaaaacaattcatagaatttgtataattcatagaaaatgcatacaaactccaaattggtccattccag

SEQ ID NO: 86244 - DNA, 429 bp, Zea Mays
aatagttgcacacttatactacacttctttgttgtcttggggtcgcgaaggggtcatttatagcccccatgccccaagtagccattgaaaacaaaacaaggaaattgatctacgtgggagcaccgaaccgagtcctttagcccctagtctaggaccttgattagcagcttccttctggtggtcatcggactagtccggtgcaccaccggaccgaggttcacgtaagcttgtcattgggccagccattgctatgtgaactagctgttactcagcgttgtagacggtccagtgaattataaaatataattatcgagaccgttgagttcatccgtacaagcggtccggtgcacccggaccactactgtaggtctgatgcgtcaggccgcctatgtcttgttctgacttctttgcagaggcggtccggtgcac

SEQ ID NO: 86245 - DNA, 978 bp, Zea Mays
ctgggcttatggatttaagggaagcccaagcatgagaaaacttcaaaagatatgagaaatgatcctaagataccctcatggaaggacttgagtggcatcaaaaccctaaagtgctaaaacccctgaaaagaccccttgaaaaccctaaattataaccctaggggctaagtataaaattggtgcaattttggaccaaagtgcaaaaaccaaggtattagggcacctcaaatcatatgtttcacacatttgaggatttgcaaatcaaattatgagatttgggcttatttgcaaaaagacaccctatacctctcatattgctaagtctgaattcaattgaatagggctcactttagagctctatatttctaaatctacaaggaatttgtctagggtcaatacatcaaaattatagagctactaaaggagtataactttggttaagtcatcaggcataagtgatgtacaaaagatggagttacatggactccaagtactgctatcagtcacccctatagcctgaatttttactgacagtgagatttgatcaactatggactcgatttaagctcaaaggagtgggcaaatgagccaggtctctatagtcgatttgtagctggattataggactacaactttgatgcagagagttggtcaggtcaccacataaaatctgaagcaaatcgtgctgcaaaatgctctgtcagaacaactgaagcaacctctgatggtacagtagcgaaaatatcccagggttcagtccccctcgccgccggtgatccacgtgcccggattcacgccggtcgtcgtgattcatgtttggcacgcagtggatattcacggggaagtaaaaagatcgcacgggggcgtggatttggtcgcggcagaggcttatcaccgcgcttgtagccattgcgacgtggccagaccgccggtgtcgccgtggaaactccggtgacctcggttgtgccacaccgtggc

SEQ ID NO: 86246 - DNA, 2091 bp, Zea Mays
gcaccagacatattctgggaatgagaactttctttccagcatgtgtaccagttaaaatctgagcttccaaaaccatgtctcctagagcagttatgataagtcttgtgccattgcataaaccttcagattgatttagatttcgaagcaatataatcggtactccttctttaagcagcagtttatgttgcggaaagttgttactatttattgaatttagaaaatcaactggatataaaagatctaatgtcccacctgtatttgactgtgatgcaatccggtcacaacttaaatattgtttgtgcgttccgggaataaggtcaaccacatgttcgttaattaaatcagctatctcatttgttggtgttaagacagcccgatgttgtagataggttggatcattataactttctgttatttctggatacactgttgcaattaaagctgaaatatgatcttcttggggcagtaagaggaattcagaaggaatttgtatccatgtgggctccatttctcctggtttttgtatagctggtatattgtcgttgccaatatttaagatccatgcactaaaatctgcaagttcagttttttcgctatctgttaaatccgttgaacgaagtctcatgttttgtgtaagatgtaggactgtgactgaattccaaagtggcgaattggttatagcagcatttataatttgtgcacgattgccaccttctatcacaggtaatatctgtctaggatcacctcctagtacgatgaccttacccccaaaaggaatggtagcagattgagcagatttcaaagaaagtaaatcacgaagggaacgatctagggcttcaaaagcatttctatgtgtcatgaatgcttcgtcccaaattattaaagaagccgcttcaatcaactcagcaagcattgtacctcttttaatgtcgcaagttgatgtttcgtctagttcgcaaggtattctgaaccttgaatgtgttgtgcggccacctggaagtagcaaggaggcaaccccagaagatgcaaccgttaagactatcctttttgtgctcgtaagtgtgttatgatcgcattccaaaggaaagtctttccagtgcctccatatccagataaaaagaagaatccaaatatgtttgataggacagtatcaactatagtattaaaagcatgcaactgttgatcattcagtttcacacggagattgtatgcagtttgtgataaagtatcgaagttatatgataactcttcctcaataaatcgattgtcgtggattgagcccgttgaattagttttttgtggcaagttgtattcttttatattggagccacatttgttgaaaagcacagataatttgtcaattaaatgatctcgcaattctattgttggcatttgataggaaggaagattcaatgtttttctcattctatattgaatatcatctgttagttgtttccatactttctcgaaaaatgcatactcatctccaacctcacaataaagaagcatggtgacaaatagatgtcgcaactgctcagaagtggcccatctggcagcttcgtcaaaggcattgtaccactcattgtcatcgttaagaagacctcgtgctctacatgcttccttaaatgtgggatgtaatatgttgttatatcttctcaaatcctcgtagcttgtagcacctttaacgatcataagaagcattcgtaaatagtatctttctcctgtagatggatgtacataatatatacgacctattttcccttcctttgcatgtcttggtttccagcttcttgttttgtcttcccatcgccatttagttggaaattcaatatatgttagatcccgtgctgattcacatgttgaattaacataaaaccactcggtgagcattgtctttcgaacaaaaccttcagacaatattcgtgatatgttgcttgctgcattatgttatgtaattttcatttggtaaatgcacaggcattcgttctactgcaggataatgtctatggatgtcatatccaagcacacgccaacaggaatccttgtcgcatagatagcgagtgtccaaatattctttcacttcatttctcg

SEQ ID NO: 86247 - DNA, 619 bp, Zea Mays
gggccacaactgatgaagcttttacagaagaaggaggaggttgcggcaatcaagaagcctgctgaaaaaagcaaaggattattattgttattgatgctattgaagaaatgccaccatcggcttcggtgtcaaaaacaccggttgccgaagacactgcagctatcgaggctgcccccgccgaagctgcaactgccaaagctgacacggccaaagatacaaatctagagggcactttttctgatattgataagatgcttttgaacatggttgcggaagaagctgctacagctgctgaagagactctagccctagtgccccggaaagagaaggggaaagagaaggagattgccgaagatacttcgaaggtaaaggattttaattttcaaaacatactagggcaaaagctgtctaaggctaagaaggaagagctgagggattatgcaatatcatgcagctatcaaccaggagcattgctcttcggtggcgttgacgaagagagcttgggatgtctccaggactggactggagcgaaggttgtcagcactttatcaaagagtgttggctttccgaagcttgaggccgacctcagcagataccggcggcaacatatcatcggcag

SEQ ID NO: 86248 - DNA, 425 bp, Zea Mays
ccaacgtgtttccataaggaaactgtccgtgacgcgcgcagcacgtgcagaggcaggacgtgacaagtggtgggctatgaaatcaggttgagagcgacaacagctggcaactcatgtctgcaataaaaacagaatgccatggagttttaagaagatgaataagaccgcgccgccaccgtaacaatgtcctgcattgctggcgccgacgtcatttttgacggtgttaatatatttcgttggagactgaaatatttgaatttacaatagggaatcttatgattggcttcccgagactccatcagaggggcaacggtgtattaattgtaagtaacatcttatgactggcaacggcttaccggagaagcgtaaggaccggtcccgatgcgttcaaattcaaattagtaaaattggtgcgtcgttcctcc

SEQ ID NO: 86249 - DNA, 557 bp, Zea Mays
cgggcaggttgaacgagctaacgggatgatattggaggcactcaggaaaatggtcttcgacaaaaatgagaagttcacaggaaagtggataagggaattgccctacgtcgtttggagcctaagaacccaacctagccgagctctgcatggaaacactcctttcttcatggtctacgggtcagaggcagtactacctgctgatctcaagtttggggcgccgaggttgatctttgaaagcatagcagaggccgaagcaactaggttggaagatgtcgatgtactcgaagaagagcggctaaacgcagtaattcaatcggcacggtaccagcagaccctgagacgctatcacgacaaggccgtgcgacaacgatccttttcagtaggagatcttgtcctccgccgaattctaacgggggagggacggcacaagatatcgcccttatgggaaggaccattcatagtagcagaagtcactcggccgggatcatatcgtctcactcaaatggacgacacagaaattgggaactcttggaatatagaacacctcaggaagtttt

SEQ ID NO: 86250 - DNA, 561 bp, Zea Mays
agcagcagataggcgaagccccactcgcactcaagatacccccccacatctaggccgaggccatagggcaggtagatcgaggctgccattagggcagaggcccccaacaataacaaaagttgtatcgtgtcttccatggcgaagacgttgagcactccaccaaggactacccaatgaccaaggatgacagagatcacatggcttggacgatgccagacaataacccgagagccatcgcacacacctatcaaacccactacccctcactatcaagacatacaaccacccttttgccactaccaccaaaactacaaccaacaccaagaaagacttcccccacctccccatcaataaatgcttcccctcccaccccaccacaaataattcccctagcacaactccccctccataacctaaagaagagaaaaacaactgcttgtctcgggaataatccacatgatcactagagggtccagcatggacttcatgaacaatcggtagaagaaagaccactatcgaagagtgaatcatgtcgctgtcaacaaacccatagtacaaaca

SEQ ID NO: 86251 - DNA, 295 bp, Zea Mays
tttactttcatgaataaggttggcacaatgttctttggcgcctgaccctaaatccagctcgatcttcagaaaccagtcgttttgccatcaccaattgttacaattatagatgcattaaatagatcgacatctgctttatcacaaggtagttgcaaccgagtccatgctttgtctctatctgtccatcgtagccacagccatctaagccttaacgctcttacaaagcgctctagatcaaggatgccaagacctcccttattctttggcaaacaagttgtagcctaattgatcaggc

SEQ ID NO: 86252 - DNA, 499 bp, Zea Mays
aagttttgcacagcgaaagggtacgggcagtcattggccatccgattagaattcggccgcctagattaaattggttgcgcgcatggaccggtaccgcgcctcagccgtgtgatcgcagataaacgtaccagatttaaaaccctccagatctaacctcgcccgaccatattcagatcaacgctcaagttcaaccttgccgaaccgttacgcgctaactaatcacggtcgcatattaaagatccaatggccacagtgtctcccttccccagctctaatcctggatgcccatcgtcaatcgggcggccctagtacatcgcctaccttcgagtagcagaccaccggagcagagccccccgcggtggtgctccggccggagcaatgtttcccccacgaccgcaatccattccattggctactggctaatgtactcaacgaaccaggttagagaaccataccggtgagcgaggcgacaatggagcttgcccccgggagtatgcgg

SEQ ID NO: 86253 - DNA, 440 bp, Zea Mays
accagattaaaaccaggcgctcaactcacccgcgtactaccccgaccgacggatccgagatcgatggcctataacacactacgctaggctccaatctctactggacgatttgcatcctatggtcaaaatttaatgaagtgaagagttatcgtgacttctaatcgcagccgaccgagaaggatcggactgtcactacactgtctcctaccccggtctgaagcgcgtgactattcccccctgacggcggcggcgacggatccggtgagcacccaaatcgccgtgccagggcccgaggctcaaattgatggctacaaaacgaagcacacagcgctaggaatgaaataggacaaaggttacctgcgaatgtaaggcggtgctgcttggctacggtaccaggcgaatccgcggcgagcttgaatggccggcgagcaattcccaat

SEQ ID NO: 86254 - DNA, 514 bp, Zea Mays
ccggcgtggaagtgatcctcgccgggttcgcggcggcggtggccgttgtcatcgtctgctacatccgggtcaccagggagagcaagaacggcagcggcagtgtgggagagaagcgcggaagcttgggagggttctgagctcgctcgctctgtctagtgtgggcagatgtagatgtaccagcgagtaggcacttcttgtaaatgaaatgaggtgtagggagtgagatgagaagaagcgtcgtgtttgtcgaactcttaatcaatctttaggaaacattctgtgtgcatcatgttaccgggcattctgtccgatcgagcgaaattcgcaactgaatttgctcatgaaccatggactatgcagagtttgctattcagttggcccattgttagtccaccctctttcactgaacttcgtcgacctcctactaacaagtgttccaacatcccccacaatgcttgattactggaccagcagcactggtggtggtggtacatgaactctctccgacccccca

SEQ ID NO: 86255 - DNA, 774 bp, Zea Mays
ccgggatgttgtgcggttatggagggcgtaaccaccggccggatcttccgcctcaccatgaaccccacctctatatagcccgccgttcacccacaattcccaggtgcatccggcactagcgatactaatccaaagatccgggcgccgtggtggagagagatgaagagcgcccctgtgcagatcttcaacgagcgcgtgatgtagggagggatggcctcgtttcgttgctcgacaggggggagacttcgtcgtggagtcaacgaatggctgggggatctggcacagggtggggatcatcggagctgctcgggctcctggtcggcggacaccgccgcgggctggggagcaaccactactcagtttacctcacatgaggaagatggaggaccgttggatccgcgatgatggattgaggtaaggggatttgtatcggccgtagatcggaaatccagtggctggagcggtttaatgcaggggagtggtttcggaccatagatctcggatcggtcggtcgccagcgcataccggttggggcaactaaggatctaatcctaaccgttgagagctaatcggatggctggcgatcaagtgtacccctttggtcgccacttttgttaaaaagcccctgttctttcattaaataaagttgttaggaagataatttaggtccctagtttttgccacaaatcccctgaagtttattttaagtgcaaaatagatattataatagcttaaaacttgtttaacccataatttttgcgccttaattctgat

SEQ ID NO: 86256 - DNA, 2274 bp, Zea Mays
cccctaattatggtccccgacaatagggtagtagccggtgaagtcggagggacacgtccctaggacgcgtgggccaaactctggatgttgctgcaagctgctgcgcgcgtaaacaggagcaatagctaaccgcgaatgggtccttgacatgcaaatgatttctctccgttatgaggggatctgaggtaggacggagtagctatgactaggctgctggtggtggactggcggtggacgaacgccatgtgacatgcgcgtgtcgctggagttgatagggcagtacccagtgacgtgggagggacatggccctaggacgcgtggccccaactctggatgttgcttcaaactgcggcgcgcgtaaacaggagcaatagctaaccgccaacgggtccttgacatgcaaatgatttctctttgttacgaggggatctgaggtaggactgagtagctatgactaggctagtggtggtggactggcggtggacgaacgccatgcgacatgcacgcgccgctggagttgatagggcagtagtcggtgacgtcggagggacatggccctaggatgcgtgggccaaactctggatgttgctgcaagctgctgcgcgcgtaaacaggagcaatagctaaccgcgaatgggtccttgacatgcatatgatttctctctgttgcgaggggatctgaggtaggacggagtagctacgactaggctggtggtggtggacttgcggtggacggacgccatgcgacatgtgcgcgccgctggagttgatagggcagtagccggtgacgtgggagggacacgtccctaggacatgtgggcccaactatggatgttgctaaaagctgttgcgcgcataaacaggagtaatagctaaccacgaacgagtccttgacatgcaaatgatttctctttgttacgaggggatctgaggtaggacggagtagctatgactaggctagtggtggtggactggcggtggacggacgccatgcgacatgcgcgcgccgctggagttgatagggcagtagccggtgacgtcggagggacacggccctaggatgcgtgggccaaactctggatgttgctgcaagctgctgcgcgcgtaaacaggagaaatagctaaccgcgaacggatccttgacatgcaaatgatttctctccgttatgaggggatctgaggtaggacggagtagctatgactaggctggtggtacgtggtggactggcggtggacacacgtcatgtgacatgcgcgcgtcgctggagttgatagggcagtacccagtgacgtgggagggacatggccctaggacgcgtggccccaactctggatgttgctgcaaactgcggcgcgcgtaaacaggagcaatagctaaccgcgaacgggtccttgacatgcaaatgatttctctttgttacgaggggatctgaggtaggacggagtagctacgactaggctggtggtggtggactggtggtggacggacgccatgcgacatgcgcgcgccgctggatccgatagggcagtagctggtgacgtcggagggacacggccctaggacacgtgggctaaactctggatgttgctgcaagctgctgcgcgcgtaaacaggagcaatagctaaccgtgaacaggtccttgacatgcaaatgatttctctccgttatgaggggatctgaggtaggacggagtagctatgactaggatggtggtggtggactggcggtggacgcacgccatgtgacatgcgcgcgtcgctggagttgatagggcagtacccagtgacatgggagggacatggccctaggacgcgtggccccaactctggatgttgctgcaaactgtggcgcgcgtaaacaggagcaatagctaaccgcgaacgggtccttgacatgcaaatgatttctctttgttacgaggggatctgaggtaggacggagtagctacgactaggctggtggtggtggactggtggtggacggacgccatgcgacatgcgcgcgccgctagattcgatagggcagtagctggtgacgtgggagggacacagccctaggacgtgtgggcccaactctggatgttgttgtaagctgcggcgcgtgtaaacaggagcaatagctaatcgcgaacgggtccttgacatgcaaatgacttctctccgttatgaggggatctgaggtaggacggagtagctacgactaggctggtggtggtggactggcggtggacggacgccatgtgacatgcgcgcgtcgctggagttgatagggc

SEQ ID NO: 86257 - DNA, 418 bp, Zea Mays
aggtgatgacatgtcgtaagtagtcatcgcttcctctatatcttaagtcgggtcaatacgcattatgtgttcatcgagatacacttcacacctagtgtagggttgtgttcaagacgctgagtagacgcttcaagtaatcaagtaggagtcgattgcgttaagtgattgttatatatatgttgtatctcggattgtgataataataggctagcctacgagtatgttgtatagcaggctatgtcgctgctctagttagccgaattgttagaaggcttgggttaagctcgtaatcatggtgatttgcttgttttggtctagatgcgcatggttatgatcgcggataaaaattagtagtgctcatgtggtgtctaagttaaaatgcgaactagtgggtgaagagcgcatcgatatacacaca

SEQ ID NO: 86258 - DNA, 1108 bp, Zea Mays
gtgggagtccctttaattgcatgtgcgttgggcaatgctcgggcttagatgtagcaatgcttcggctttggtgcgccgaaggtggagcaaggtagtgctattgtggtgggtagaaaactgtatatttttgtgcaccaccttgtcctatgtggatgtacctgaatggtctggcctgggtgctcggacggttcgcgaaggaaatggacgatctgtgattatacctagactatctggtaatgttgggaatcgcttgtgagccatgtggtaggctcagcatctctcaaaactgtctagcttagggtttcggacggttcgtgaaaggaccaggcagtccgaggttataccttcgttgtccggttgtgccaagcatctcttgcgagccacatggcaggctcagtgtggctctagactatatggcatagggtgtcggatggtccgtgaagggataagacggtacgaggttatatccaggttgtctggttgtgccaggtatcacctgtgagacatgtggtaggcttagtgaggatccggacggtccggtactaggtgccggacgatccgctatgaaactggacagtttggggctatatttgaactgtctgatagtgtttggaactggctatgtgccatgtggtgaacttagcactacatcagatagtttgacatatggagctaggtggtccacaagagggctggatggtcttagactgtacgtcgtatgtccgagcatactcatcgtggacctatcgtaaagtgctgacggtggtagcggatgcccctgatatgagttcattaacatttcataatatggttggcattgagaaattccatttgttgttgatgtgtttggcacagttgtttaagagcctaatttatgctacagaaatttaggtataaatttttttctaatacatgcatcattttctctatagactccaccataaggtcaattcgatcataagaattcttagtagattgaataacgccggataacacggtgttacttacattgggggttgttgcgaggccataaaagaagcaggctccacttccctctcctgaatgaacttgttgtggtgatctaccgtgaagtgccagaggtacccac

SEQ ID NO: 86259 - DNA, 408 bp, Zea Mays
ctcactggtggtcataagtcaagtaaacaaagattgggattgcttgaccgactcaatgaacaaatattgtgcagcggtgcggaagttggaggacaagttcaaaggattagaattccaccatgtggaaagggatcgcaatgcagcagctgacgcactgtcaaagctggggtccagtcgggcccaagttccacctagggttttcgtccaagaaatacagcaaccgagtgttgccacagataagatggaggaatgccatgctctgagtcaggcagaggtagatcctaatgactggagagagccaatcatcagatacataaaaacgaggaggaaccggatgacaaggccacagcggagcgcatcgcgagacagtcggcccactatacctgttgggggtatgcttcgtagccg

SEQ ID NO: 86260 - DNA, 705 bp, Zea Mays
tggattagcaagttattacatggaattttgagaattgggcactgcaatttgctctgtcagaacgactaaagcggttcttgatggtacagtagcaaaagatctgctgattcagtgaacctcgccaccggtgaccatgcgctcggattcgctccaagcgctgtgattcgtgctcaacggagtactgatagttgctcggggtagtaaataccgccttgaggatgaacttaggccactgttcaaccccggccaccgtgtccgcctgactcacggccggttcagataagatcaccggagttggccacctatcgacagcgcgccacgtgcctaggtgccttaccacgtcgtagtaactcgtattacgcatgtccgttgattgccggtgagctcgccacggtgaaagccaccaattccttgcgacagtgctctcccctctctccggctgccaccgcgccatctcaaattcatgggccaccgccctcgagccctataaattgagcgtgccattggctccgctaggtagtcacgcacctaatccaccaactcgtgcctcaaatcgtccaccagagctcaccaatttgggatttcccccaaatcggtcaagaacaccgtgtgtgtgagctcgtcacggtcagcgctccacaggttcgatcatgttcttctcgctcttgttctagcattcctgtatgcccttgaagctcatcggcc

SEQ ID NO: 86261 - DNA, 774 bp, Zea Mays
tagaggcaatgacctagatgactctagtgacgatgatgaagacgacgacgaagaagaagaagaagaagaggaggaggagaacatcaacgaagaagccaatgacgaacaacaggaccactacgtggtgttttggcctgtcactaaacattatacctcaatgttcaagacagggcacttaacctactacaggatgttctacatgcgttgggaacctatgtcagacccctgtatgaggcaaggcgagtatacgagcctcctcgggcttgctattacatcactcgcattcatgtcagggtgagggatgcaggtgatagagcgtttagtactctgtcagctaatgagtctctgacgctgctatccaactacgctgctttggtcagcgatgatgctaggcgaactttgtggtcccttagccacacttattggtagcagctgcacaacacgaagtacatgcatcttcctctgcatattcatggagaaagcagaccagcattgttccaggtggagctggagaagatcgcctcaacaccatagctggtgtggtggtaggtcttaacatcgatctagatagtgctaccatggacctttctagggtacacttggagctggaggatgcacatgcaaagatcgcatccctggaagctcaacttgatggaaggaatcccctgaagttcaagtccctgccatggcgttatcccctccccgcaaaaggatccgctatggagaaccaggatccatcaccaggctactttagattttccattcatattgtaa

SEQ ID NO: 86262 - DNA, 595 bp, Zea Mays
gcgtcgttggttgattacaaagaaatataaaggggtcctattttgttgtccttgttcgatcacatgcctcgaatcttatctacggtgtttgttggcaagaagcgagaaagaaacagatcttcgtgcttcacgcatgatgatggaatgcttgtgacggtggaaactagtactttatatagtagagactggtcgagataacacaggctacttagaccatagtcaagccacataagcgcaagatcgtcgccaaaattaggggacggagggggacgaaacaggcagtgacgaggatatttaactatttgtcattcttacggacggcaactctttatatgtcactttcatgatgtatataacatatatgccactacttttgaaagattctatatttttaccacttttacctatgtggctcgccacgcacgccgacacgtcgtcgccatcatagattagcacgggaaatgtctcttttgtccctcgctagagtctgatctctccctcccttcccctgctacaaccacaacctcgttaagcctatcatggccacaaccatgcccaacctcctcatcagcgttgagtccatcgcctccactgc

SEQ ID NO: 86263 - DNA, 457 bp, Zea Mays
gatagccttattctaggctaaccaattcatgcctagaattacatctacatcttgtccctttataactatcatgttggtagggaattcatgtctggccaatctcacgggtacgtggaagactacatccttagtaaagatttgacccccatgcgattgaataacaaaaccctcctttgattcaatactatgtatgcaatgcttctcaacaaaagtcttgctcataaaattatgtgatgcaccagaatcaaaaaggatgacggcgggatggttggcaacaaaaaacgtacccatcatcatcggttctccttccggggtggtcgtcacttgggtgtagtagactcgcccagttttccttgtatttttgcccgctggagtgttggccacatttcccttgccttgagatgtgttcctagaagtctgttgaaaattagatttattctgctttggatagggacag

SEQ ID NO: 86264 - DNA, 635 bp, Zea Mays
caacatcctcgacagcggcttcgggggcaggagattttgcccattctcccgcgtctgtcccttctgtcatgccaacatctgaagcctgtggatcaattttatcttcaggcgcgacggccttcgtctcaataggcgctgcgggctcagcttcggcttcggctttggcttggactttagcagcttcagcaattttcttaataggactagggctcaaggcctttgcggtctccaagacattggccatccttctcctcttgggagttgtggcaggtgctttctgcacttttggcaattttgcctctgctggaggacttaaaatttctggcattttcaccattttttccacctatggctcctcggccttatcatccacagcttcggctggcccgactgtaagcaccttcggcgctacaatcgccttttcagcactctgcacaatcgaagcaacttgctttgcttcggcagctgaagaagtaccctcgccaaatttaggcactatggccggttcaatatatgcactacggccggttcaatatagcgcgactagtgggtcagaaccttcacctttttgttcttcagcacagctgcggtggccgaagcggcagtctttctctttttcccttgcccttgtagca

SEQ ID NO: 86265 - DNA, 694 bp, Zea Mays
atctgattatgcttatgcattaattcttgtattattttctgctttatttcccgtagtagataaataatagaaaattattaaaggtgcatgtgaagactatatagtgtatacctgaatcgctctaaatatttatgatgtgttgagcttttggactcatgtcgagcgattaaattgtatagtgggtacttagacacgtcgatcagactacgttattaatcgatcgagttatggcattggctgagcactggctgtgccctggcaacacgacgcagtatttgtgtcgtacgaacttggttgcatcatttgattgctatgtcgcactctcgcttaatcgaatcactcttgtttagtcggaccaccatcatcgagtcacgcatttttcgcacgccctgtaggcattgtttgtctattgtgatcatcgagccacaattatgcctgttgcgcatgtttcatggacttgtcatgtaccttgactattgagccacaactgcgcctgttgcgcttattacgaaggcttgctatgctgttgtagctctgatggctgcacacgcgttgacaccaaatacactagatcttgtactcgcgtggattgtggtgtgtcgttcaagccccctaaaatcatattatgtgcaacctttgtaaacaattttatttggctatatattttatttgattgtgttgtgtggcatcatat

SEQ ID NO: 86266 - DNA, 406 bp, Zea Mays
ggaacacgcattaatttgacaggaacgccatgagaatggtctgtccatgagcacggcggaaaccgcgaccatgggcacacgttcccgcataaccagggccagattgagtaatcggacgccactgtgagtttcacaagtgcacagagcggccgaaacaacattcaatataggcagaggcttaccagggtggtccggccacggagcgcggtgtttcgtgcttgccggagacagaaaagggggaaatggggtcgcggtggctctgggcgaaattgggagatgagatcggggctatagggccataagaggttgtgctttcaccgtgcacaatcgatttgggaggagatggagaaggcagtgcgaattttgggttcttctcgcgcttgcggttgaggcagtgagtgcctcg

SEQ ID NO: 86267 - DNA, 273 bp, Zea Mays
cttgcagggttgctcggtgagtacttggttgttcgctctgcctcgtagggttactcgacagggagttggtcagctgctctgcctcgcagggtcgctcgacaaggagctggtcgaccactccatcttgcagggttgctcggtgaggacttcgtcggctgctctgcctcatagggttgctcgatagggagttggtcagccgctctgcctcgcagggttgctcgacaaggaattggtcgaccaccccgtctcgcagggttgctcggtaaggacttg

SEQ ID NO: 86268 - DNA, 440 bp, Zea Mays
tgaacatgtgatggcgacactagcgactttccaattaaaataggcctacatcagggatctataatgagcccttatttatttgctttagtggtcgatgaagtcataatgaacatacaaggggatatcccttagagtatgctctttgctgatgatgtggtggtagttgatgggaagaggttaatagaaagttggagttgtggtgaagtcgaaaggtttcagacttagtaggactaagaccgagtacatgatgtgtgatttcagtgcgactagacataaggatggagatgttacctttgatgggcaactggtggctaaggagtattttcggtacttaggatcgatgctacaaaatgatggttacattgaagaatatgttaagctagaatttcagtcggttgattgaaatggtgtcatgcttctagcgtcctatgtgacaagag

SEQ ID NO: 86269 - DNA, 585 bp, Zea Mays
tgcagaagggacaacgagcacagtccgccgcatggcacaggcgcactatttcatgatagattggataggcgcgccgtctgacactgtctgccagcggagaggactggacgcattaaatgctgagggggcacatctttcgttggcttggcggctggcgtcgcgtccctactgcaataaatgcagtggctgcgcgactcaagtgacccgacgtcagactcttttcgttggctcacgtcatgggccgcaagccatgtggtagtagcgggtttctgccttggcggggagcgtggtgcaagccccggacacatgttagccccggacccctcccagggcagggcccgggtatttcctgcccctaggatccaggacccagtggtgaaccgtccggacctcacttggaagggtccgggatctgtcccggaggtccgcatgctatgcacggggtccggcgctttccatgcagcaggtccaggcctgctgcgtacattcggagcacttcttttcccatggcgacccccaaggcggctgatgttgcgcgacggtgagccgtttaccgtgcaacaagagtcttggcacaacgcattt

SEQ ID NO: 86270 - DNA, 1082 bp, Zea Mays
aaaaacatgtcaaacaactatccaaaagcaaaaggagctcgctactgggcaaacaagtcagtcaaatgaagtcttccacacttactcatactattccccatacatcccacatcgcattcaccatcaagagttgaagccacaaccttcaggttccatggcatctacatgcccgtcacctagccgctaggtagcacccttgcctttcatcccagcaccccaccgtatgaacaagaacctattgaccaaccacaatttccagtacaagacatactctggcatgacagaagggaatcgtctgaagcttgtgctgtaatagtgtggttactgagtctaagcacatcttttagagccagaggggatagattgaagaactgaagctgagtcgaagaaacaaaaaagccattgtatcatgttgtctttaccttctccccaaccttcatgtcaaaggaacaacatgggaatgcccttcaaaatttttgtaaatgtaactctaagattccaccgtcgagtgtgacaaagtaagcaaagaaattttgcaagacctttggatgaaggtagaatcaagcaccaagccaaggtgccgaagactcagaagtcgttcctaagggaatgcaaagtcagaaagaaaatcacctagtaatggtggtaaaagactccaaagtaatgcaaagtcaaagaaaagcactaaagtaaaagtgttaaagactccgacgacgttcctaaggtaatgcagagtcatatctcgaagaccttcaaaagaaggcaaaatcatttatagctataatataccttcgttgcaacatccttagcatcatacattatgcatcttgacatcatctcattataacatcagtcatacatttttcgcttttctcttgttcgagaaaaggaaggacatctttattcttaaatagcctacgaacaaaatcaaccaccacaaaagtgacaaagaccgccgaagcaactcagtaaaaatttattgaggaaaatcaagatctagggtaactttgtgttgaaatgtatgtctttcgtatcaccagcaaaaatacgctaacatatggctcaaaatcatatacattgat

SEQ ID NO: 86271 - DNA, 603 bp, Zea Mays
gaagggtccttaccatttcagttcgagtttgcctcgtgactctgttttgttgtcctgatgaggacgagatctccttcaaattctttgggaatgacaactttgtctctctagttcttcgttgctgcttgatatttgttcagtgtgctaagggtgccgacccggtccatgtcgaggagatcttttgctattacctcatcgacgtctgggatggtgtcggggtctgatctcagcgaaacatgtttgagctcttgcggagtcatggattcggctccgtacattagtctaaatggggtgaagcctgttgccctagattcagttgtgtttagtccccaaagaactttgggtagatggtctacccatttgcccttcttgtcctcaaggagtcttttattgattgttgtaaagatctttctgtttgcgcgctctatgactctgttggactgcgggtgatatactaatgcgcagacaacttttgttcctagggaggcgcaaaaatcccaaaagtcttgattgtcgaattgttttccattgtctaccgttagctcagagggtaccttgaaacaacagaggatgttttgccagaagagtttttgagttgttttt

SEQ ID NO: 86272 - DNA, 456 bp, Zea Mays
cttgatcagtttgagataaggaaagacgtgctgcacaatcgcgaaaataaagggacagttacggtttgaggagcattagtacaaggaaatcaattgtattagcctttcctgtacaaccgcatcagatccacgttcgtatctgtgtgttcttggcggcggcggaagggacaacatcgggcatgttttggcagtgattaacggcgagggaatggccagcactggcgatgacatgcaacctgtagcgtctatgcatagatcaataggtacgtctacttcaatggacatgcatcttgtagcgtctgcgatcaccggttacacagagggtgtatctgttactcccccggcggcgttgagggcacctggacatattgatgagaacacgagatcggcagacgtggtaggagcagataaacacatccccatgagacatattggggcgtatgaacaggacacacc

SEQ ID NO: 86273 - DNA, 945 bp, Zea Mays
agcctcgccttgtacctttcaatagtaccatcaggcctaagctttttcttgaacacccatttactcccaatgggcttacacccaaaggacgctcaacgacctcccaagtttcattagacataatagaatgcatctcactccttattgcttccttccaaagtcagcaccaggagaggaatatgcctcttcaatggtacttggggtgtcatccacaagatatacaatgtaatcatcactaaaggactttgcaaatccttggtctcttactctttcgagttgatacattgtcatcttccaccggattatgtatatgggattcctcagtgtgttctaccagaataaaatactcatggggtatcgttggttcatcactagatgtattatgtgtaactttcatgggaaattcgtcctcaaagaacgtagcatctctggactccataatagtacctaccaacatgtccggtactctagagtttgtaattaagaacctatatccaatgttatgaaaagcatacccaaggaaaacacaatcaacagttttcggtcctaatttgtgcttcttgttaattagaacattcactttagccaaacaaccccaggtgtacaaataggagatatttaatttcctcttttcccattcctcgaatggtgtgatttctttgttctttgtgggaactttattcaggacatgacatgctatcaagatcgcctcaccccaccattccttagatagtcctgatgtctctaacatggcattaaccaaatcagttagagtacggttctttctctcagcaaccccattgggttgtggtgagtatggcggtgtcctctcacgaataataccatgttccacacaaaaatcaaaaaaatcacctgaaaaatattctccaccacgatcagaccttaactgtttaattttcctttcgagttgattttccacttcag

SEQ ID NO: 86274 - DNA, 391 bp, Zea Mays
ggagtccaaaatttggaaccttcaccgacttgctcaatgatcaatctccataacatctcgacaccccctatgagtgtaggataggtctttttcgaggacctttttgtcatacatcatcattgtgagaggatgtttctgcccgtccccattccttgagttcacaacctctatttccatacccatatcctccttcatcgcatcctatcgaccttccatggatgttcctccttctaataaaaatcctaccaccaatgatcctcctatcaccaaatctcctaccatcgatactcctcttcctacacctttcatttatccataccctcctccatactcatatgggtatccaaatgatgatcctccttatctggtgctccttcccatatggtgctcg

SEQ ID NO: 86275 - DNA, 363 bp, Zea Mays
gttctctatttattggttgctaatttttaaaattattcatatcaacaaaaaagtgggtgagcatgctttctatttttaattgagctagcacatcagcaaccttccataatgtcttgaaaggttgaaattgtcaatgaaaaaactagaaggtcgcggcgacggcacgaagacaacacatggcactgaagttatatttgtggtcaataggacggtaggacgacacaaaacggtagccgaaatatggttttcgcgatgaatttagaaccaacattgatttagggagtcccaacgaggttcgtaaatgtagggatgaaattgggttttgtagggagtctgtaaatttaaggacctgctttacataac

SEQ ID NO: 86276 - DNA, 472 bp, Zea Mays
cctatctctatgtcaaaaacactttgctttggcaaataactttcaagactagttttgatcaagagttagaaaactcccccttttcacattatcaaatttctcccacataagagagaaatttttgcaataaaagggttttgataaaaaaccaagtatatttacactaaaattttgaaattcacaagtggtagctgatccagttgcttcggccttaatttctccccctttggcattaagcaccaaaatagaagaactatttggccttttaactccattgcctcacaaaaattgtaagtgaaactgagggcaatgagaaaaacatagatagtgacttggaacaagatacattgataccggaatgcagtggaagcctcttctttgtccaagtccaccttttctctttcaatccatctttgagactatatcaaaatcactcaagaaaacacattagtctcaaagggtcaagttgtag

SEQ ID NO: 86277 - DNA, 286 bp, Zea Mays
gttttggtgggaggaagaaggaaggaggaaaggaagaactcaagatgatcttgtggttgtctttttatttgtgctgcaattcatttggtcatccgttcatctatgcgattcggtagaggtgttgtccagaatttttgttggtggacgaacagcggtagtattagtagtttctaggaattttgcgggggtaattagcggtaattattgtgaaaatcatgtagagctttgtcatatctttccaaggagtacttatgcgttcgattcggaggtatattttaggagatat

SEQ ID NO: 86278 - DNA, 271 bp, Zea Mays
agctggtgcggtaagaggaggcagccagaaggagttagtgtggctgtagtgctgctggttggtgtggctgcagtgctgctgttattggaagttgtgtttgccggtgcttgttgtatagctgcttgattcggtgcttctgtgaagatgagtacagaagagatgaatcccaagagaatggaagaagaggctgcaacgaagggaacaattggtggtggttcaggtgggattacaaagagtgagatgatgagtgagacgaggattatgatccagg

SEQ ID NO: 86279 - DNA, 324 bp, Zea Mays
gggtgcttggcccttggatggtaaaggtgcggttaagattagatctgggggctggtagatttggaccgttgatataagatcgaacggtcgggtgttttgggcgggattcaaagttagtaaccgttagatcaacatcctggggctctgatgggatccgcgtgcgatcatactgtgggccgtggatccttgatccgacgggtagcagggcgtgcggactcatttggggttgggaactaatccgggcccctgatttccgatcggacggccagaaaccttagatatctcttcgcggatccgttttgcataagaacccctatacttttc

SEQ ID NO: 86280 - DNA, 507 bp, Zea Mays
ctcgaaacgccgacaagttgttttccattattgttgttggggaccagcgcaaagtagctagagataaagaagaaagtatttacaatatgctcgtggcaaggttgagcgcggtgtggtatctttggtaagaagttttgtgcagatgatgagggactgttagaggtgaactagaggtgcgtcttgtgagcaactattgccttctgatgtgaggaaaggactggaaaaggaagaagttggccaaaaatccctgaatagtgggaagccctgccacagaagtcggtaatggtaatggtagcgccgcgatatcgaacccaaccgatggccgtgatgtaatgtcacgtaattgtcaggtgagcctattcgggacagcaaggtggcaacgcctaggggaaaacgcatggggtaggaaatgcaatcgcggaatcatccagaatcgaatcgaaaaggggagagaagctgacctgtgcctgggcggtctcgatgcggcggcgggcgagcgggaggaag

SEQ ID NO: 86281 - DNA, 443 bp, Zea Mays
ttcggctttaactcgctgacacacgtcacataatgcaacatgagtagcaacatctcttttcaatccgtaccaccaatacattttcttgagatcctggtacatctttgtacttcttgggtgaatagagtaagctgaatcatgagcttctctcaaaataagttggcgcaagtgctcgatttcgggtacacagattctcttcttaaaccatactgtgccttgttcatcttccatgaaatctggggctttacctaaaccaatcaaagctttaatttccttaattttctcatcggactcttgtcctttacgaatctcttcttccaaagtagactcaacttccataattgttgcttctacattataaagcataccaaggttaagttgttccatttctcaacacaattcttttgacatcaaatgagtagagatgttgttcacttgaccct

SEQ ID NO: 86282 - DNA, 1073 bp, Zea Mays
ggaagtcattatgcgccccatctggtcccgcttcggcctccgaaagccgaaggttgattttgatgacaccaccgaagcgtgtcagagggccttcagtacagtctgctcctttattagtacaagagatttaattcaagagcatatagcattcatagtatggccgcttgtagaatgctgggaaatgccgaaggagaccatcactaactctagcgaaggtgatttggtccggctgaagtatacattcaggtttggggataaggtcgatgaaccaaacggcgactagctgaaatgtatcaaagctacaagtgatgaactacttggagcatattccaaggtagaagataatgcactgtctgcggccttcggaggtcagggaaaaaaagagaatgaacagagtttttgacgccatcggcttcgtctaccccgattaccgctacccgctgtgtggacaggggaagaagagaaaggctgctgcttcggccgccccagttgagcctatgccgaagggcaaaaagatgaaggttcttacccaccggtcgcgttacattgaaccggccgtggtgcctgagtttggtggggaggcctcttcagctgctaaaacaagagtgactgctccgattgcgcagaacactgaagagccgattgtaatgccgaagttaccttcagttaagttggttgagactaaggctgataaggataaggctgaagggtcgaaaattgaaaaaataacaaaaatgccagaaattttgagcccgccaacagagataacagtgtcaaaagcacaaaaggtttctgctgcaactcctaagaggagaaggatggcaaatgtgttagatgttgtgttggaaacaacaaaaaccttgagtcctgctccttcaagaaaaattgttgaagcttccaaagctctacccgaggctgaaacgaagcaagcagaagccgaagctgcaaaaattcaagctgaaaccgaagctgggccttcagagcccaatgagacagagcccgccgtagttgaagaaaaagcggcagagcaaattgcgtctgaaaaggttgaagctgctgctaccgaagcttca

SEQ ID NO: 86283 - DNA, 467 bp, Zea Mays
gattccctcccttgcaaagggtggagtacatgttcatccttgcaaccatggaggtcaatggggtcattgcagtcgttggtgtgtgggggaagctttggaagcaaggttagcagcttgagaggctttatgtgggtgaccagtatggctacgttgactttggccttatctctagcctctatctcggtatgcatgagtgcttggggaggaagcagcaggaggaggagatgatgatgccgggggatcccaaggatgagttgtttggggcttggtctcagggttggctcactcgaggagagagccacgccaaagacggaggctgcgacgaaaaagctagggatgagatactcgaagggaacaccaccaagatgaggagggggcatggacatgagaacttgtttctgcatgcatgcaagtagagggatcactcctaacaatttttcaaggacttagacaagagtcttagaaat

SEQ ID NO: 86284 - DNA, 626 bp, Zea Mays
agatttcatgcggatggtttggattaggctcgggttaaaccgttggattcggggtgaccggcggggatagggtgaccggcttcggtccttctcctccgaccaccagaggcggtgccgctcgcatccgccatgaggagcttaccggagacgagcggtgcgggtgcttcgggggtcttaaggtagctgggatggcctaggaagattcaggggtgcgaggaaccaaatggtgggggctgaaccaaggtaggggcaccggagggtggaggtccatggtgaggtgactctatggcggagctacaaactccgacgagcaattacatggagcagagagcgagggagggaactagaggggcaggggaggttcctttcctcaaggtgaaccttagggacctctcggtggcggcgatgacacaacagtggtctagaatgacgaccgcggctccagaactacacgaggaacgatggttgaatgcgagcagagcaaaccagagggagaaaggggaactggggcgagtttctagtggctagcaccaaggcgaagctcaccgtggtagagagcacgacagggccttgatgtcgatgaaagaatgggcgtggaacagcggcgaacggcgatggttcctccc

SEQ ID NO: 86285 - DNA, 1033 bp, Zea Mays
caggacttcatccaagaggaggtccggaagctgctggacactggcttcattgaagaggttcatcacccagtatggctggccaacccagtcatcgtccccaaggcgaatgggaagcttcgaatgtgcatagactacaccagccttaacaaggcttgtcccaaggacccgtatccacttccgcgaatagatcaaatcatggattccacctccgggtgcgaccatttgtctttcttagacgcttattctggtttccatcaaatccagatgtctagggaagataggtagcataccgcttttgtaatagtggatgggctttactgctatgtcgtaatgccttacggtctgaaaaacgccttgccaacatttgtgcgggtgatgagtaagactttcgaggacctgatcaaggacaaggtggaagtatacgtcgatgacatcatagtcaagaccaagagagggtcgaccctagtggaagacttggccctggtcttcgacaggctgcgggcaacccgcacaaagctgaaccccaacaagtgcgtctttggtgtctccgcaaggaacttgctggggttcctagtttcgtaccggggcattgaggcaaacccggagaaaatcaaggcgattgaagcaatgcgtcctccggcccgtatcaaggacatccagaaacttgcagggtcattagccgcccttagccgcttcatttcgaggctggctgggagggtgctgcccttcttcaagctgttgcggaagtctggtccattctcttggactgaaggggaagaacaagccttccaagagttgaagcagcacctggtgtccctaccaatactggtagccccagagcttagggagctgttgtatttatacatcgtggcggctgccgaagcggtgagcatggtgctagtcgtcgagagcatggcacaagaagcccaggaacccaagggctcgggaccggctacaggggtctggaccgttcagaagccggtctactacgtcagcgaggtcctccatgaggcaaagaccaggtaccttgaga

SEQ ID NO: 86286 - DNA, 540 bp, Zea Mays
tctggtggcactgtcgatccggtgagggtgctcttcgttttacttcatcttttcctgtgctcgagtatattttcctagttctactgtttttttgggatgttcagtatgcaatgtgtgttcttctgtttctattagcaaaggaacaaattatgcaattctagttaaaatttgtcctagtatatttgaggataacataggtattgttgaaatttatatatagttaatgcatgcaattttgaagttgtaatttagcattgaaatgtatgtgcgatgtctgtgccttgacggagatgaatgagtgtgagatgtctgtgcgaactgtgatgtggttcttttaaaggaaatctaggttgctgcctggattctctcttaggtccatcagccagggattcagacttacatatatatgatgcaactatgtctggtactatataaataggcaaatgaaaaaaaaagattaagtatagccgtatatataggaacaacactgtaactgaagaacagtggcaagtgttgtgatcttttattgtgaagcagcag

SEQ ID NO: 86287 - DNA, 1203 bp, Zea Mays
gaaggcatcaatcttctcgaccaggttagaaataaacctccgcaaataatttaccttgcccagaaacttctgcatttcgaccttataggtcggaggtcccacgttccgaatagatttgattcggccagggtctatctctataccatgttcatgtatgatgaatcctaaaaacttaccagccaacactccaaaagcacatttacgtgggttcattttcaaaccataccgacgcattttatcaaaggctttgcgcaaatcagctacatgagaactaaactcagccgatttgactacaatatcatcaatgtagacttccacagtgtttcccaacagctcatgaaaaaacaaattcatagccctctgataagtagcaccagcatttttcagaccaaatgtcatgacaacccattcaaataaaccaatgaagcctggacatataaaggctgttttagacgcatcttcttcggccatgaaaatctaattatattcggcattgccatcaagaaagctaataattctattcactgatgcattattgattaatgtgtcggctctgggcatgggatatttatatttaggagttgctctatttaaatagcgaaaatcaatgcataatctaagcttacctgactccttcttctccatcagcacaatattggagacccactctgcgtatctataaggtctaataaaaatagcttctagcagccggtggattttgtccttgattcgtgggagaaggtctggacgaattgttctagctttctgcttgaaaggtctgaaacaagacttaatgggcagccgatgctctacgatctctcggcttaatcccgacatctcagtgtaattccaagcaaagcaatctgaatattccttcaatagaccgatcatttcatttctaggatcggtctctagggttttgttcacaaaagttggccttggagttttaccatctcctatgtcgatctcctctaaatgatcggccgatgtaaacccctatcctaatttatcgagatctctaaattcctctatcatgtcccccacagaggaaccagatgatctttgtgtgatggcggactctccggtctcgggggccggatcatccatgatactgtccttacgctgtggtagatgttcggtcttaaagaccgaactgttttgtgaaagaccggaccatctagccttagaagccaaactatccat

SEQ ID NO: 86288 - DNA, 1062 bp, Zea Mays
tatgccctcactctccctgggtcactcttttcaatattatactcaaattcagatttgatagcatgttgatttaatgccaacttaaattctcgcatgttgggatatatgttgcctacactcattggagggtcatttctgtcataacaaaaaataggcataggtggtataagatctttcccaactaacccatcctcttcatcgtactcttcatcagattcagaatcagactcagagtcactctcttcactcgcaattttttcagcagtcaagtaaaagccttcctcgtcaacaccaacatgttcattatggggttcaggatttgccaaataaccatcatcgtcattgttatatgtgctaggttcacttgtacaaggttgtgtgggaagctttgctataggttcggttatttggctcactggtggtagagatggacaagccaaagaaggtatgcatgggatatcttcttcagtgtagcaccactctagaaccgggacaacatcggtgggcttagtgtatgtaatggtcatgagcactatcttgctgccaacatgtttgctaaacattttcaggagttcttggtctgttttaatttgtgggaaggttttttgggcaacatcatagtaaaaaacatgcactgtctcattgtatccatgcgggtactgatcaacaatttcttgaacaagatccttgaaattgcataaatcggaatctacaaccttgctgcattcaaagtatgaaaagtcctttctatgctttttaggattaccagtaagtctgattttcagcaaataacttgacttagggtccatcctgttcatgaatgaaccatcaaatatatgttgctacatcggattttaaaggttcaaacaccatatcaaagcacaagaacaagagatctccaagaacaagtggaataagagaagaaaaatgaaaactcacccaacaggaagccaatctgacgctgccatgacttcttggcaactggaaatgcgtgaatcgcggactacagtacctgccagatgtccggcgtgctgctgcaggccagggagatctccaggccgg

SEQ ID NO: 86289 - DNA, 560 bp, Zea Mays
taagaggtaggaagtggaggacatgatgacctttgttgattaggcgagattgtaggagtggtctgccaggaatgatgagagttataacatggaattgtcaagatttagggaatgacttggttgtttgtgggcctctagatgtccacatgaaggggctccctaataagtatatgtataccagaggtatcttactgtcgattaaataagagggtcatgacaggtaggtccgtgagctcagctgaggtgcctaagggctgggtccatggactagagagaaagatctacatgattggaagtccaaggaagatcaagatggtaaagaaccaatcagattagataattagtattaatatcttgtaaacaaggcaaaatcttgtatgataagggtaggactcctcatcgttagaaatagacttagttaggctgaatggttacccatatatgataacaaaccttgatacacaatctataatcgactcaaacatgtaattgtcctctctccttagactataaaggagggtcaagatgccctagaagagcagatcattatatcataagca

SEQ ID NO: 86290 - DNA, 339 bp, Zea Mays
ggggatgtgggcgctggctgatgcatcgaggactcgaggtgatagggaaacgcctgtgctcaatctgtcccggaagcaggggatagggaaacatcagccctctgtcttgaattcgttgccacagagccgcgagaccggatccgaaaatggttatttgcagttttgcacgatgtatcacgatcgcttcagtaccactgatgtgtcacctcgggttttgtcagatttaggatgcgcttaaaacccactcgtagatctaggatgcccctaaaacccactcgtatatctaggatgcccctaaaacccactcgtagattcacacatgcagtcttggtgttaaat

SEQ ID NO: 86291 - DNA, 328 bp, Zea Mays
gagagatctagtcaatgatttaatctcgaccgctggtggatgatcgaaccgtccatatttgcccataccccttcgcgtggcaaacttcataaagagaccctctgttttcacataataaacccgccgtccatcctagggttgggctgagtctggggaacacttatgatttcgcccccgtatttttatagatttagtactcggttcagatagttagaaaatcaataaattcatttggaaaatacttattaatgcaaaaataaatacaagagtgtgtttaattcatagaaaatgcatacttagtccaaatttattcattccaattcctata

SEQ ID NO: 86292 - DNA, 407 bp, Zea Mays
cgggagtgcgatgctcccaaggggatacaccggctgtgggcccactccagagaatgggcgtgagggtcccagacgggaccccgggatttgcagctgcttgaacgcagcatggctgatgacgttgaggcctgccccgccgtcaatcaacacatggtgcagccgcatgttggcgatgacaggggcggtgatgagtggtagtatgacgacccctgccatgttgtcggggaagtcggattccccgaaggagatggtggtgctcctccatcgttgatgtggggcagccttcgggacccctggagttgcagacaggacctcacggtgtagggacttgacgttcctgcgggaggtgagttcccagctcccgccgtacatgacgtatagcttcttgcggcggtcgctgtcatccc

SEQ ID NO: 86293 - DNA, 273 bp, Zea Mays
ggataggaactccttcttttaatcttcataaggccagtaggaatatggtaattcctaaattgagtggagaattctgcccaggcaatggtgttggcagcagcgtgagcagtgcaatatgtatcccaccaatgtgcagaggggtcggtaaggcaacccgatgcatagagtactttctccctatcagtacattgggctatgttgagcatcttgttcacggatttcaaccagtcatcagcttgtagtggatccgaagagttagagaatgttgataat

SEQ ID NO: 86294 - DNA, 329 bp, Zea Mays
gtgcggactcagtccgaatggtgagctgcgggggctcaaaggtggatctgagacgaatggattatactggttcaggctggagccctattctagtgtagtcctgacagtagtattgcctggaacgtgttaccgttgggtgcttgcgtgaagctatgggatgatttttcaatgcgggttgtctcgctcttttatagctcaagggtagacattacaatgagaacttgttttctactggggtggagttcgacctcctgcttctaggcctcgtagcccctatggagtcgtctgccgaggcgtgagccaccgtacctttggtagggcattgcgtc

SEQ ID NO: 86295 - DNA, 603 bp, Zea Mays
caatatgtggcccatgtctaaccgtcaatgccctccatcccgtcagcgtcggtctccattaggtcccacgaacgcgacacgaactcggtggacatgcctgtgaaagtgcctgtggagtcaatgagccagaaaatcatacgtacgtatgtgcgtaccttggaggatgtaagcgagtcggagtacctgtagaacatcaagccaccggcggcgagcagattaaccaccgctatcgcttgaggggtctcggtacgactttttgtagccaggttggtggcgattaggatgactaaaacggctccaccccgtagctactaaaacctctttccccgcgtttctatgcatggaagacgtggcgtgtgtgggtctgctgaaactactttccccgtcccctacggagcggcgtgaataggttgttgggctcctgtatcgatgcatttggcgcgggcgcacttgccatgtcggtcgatgctatcaacgaaagacacgacatgtgtgggtgactgatacgctcacgcaatcgtgaggggcgtggattcgctgaggatggggagtggataaacgaattgtattagatgcgatcgatgtgaagagaatgtgtcttgt

SEQ ID NO: 86296 - DNA, 382 bp, Zea Mays
tagggatcttcatgttgctagatttgaagcccttattagttttgatagacctgaactcgtcgttggtgagatcggcgaactggttgacaccgagccagaacttattattcccaccagcgttgaacgactcgatgaacttaacgttagccttgaacacctcgaaccgccgagccttctcggaggcgtctttgtagacgcggctgtactgcgccatccactgctcatgcctcgccaccatggcagagtcgtcgctcaggtcgcgggcagccaaggcagcaccgcagaagaaggcgaaaccaaggatggccaagatcgatgccttgagggtggccatggtcgatcactctagcctgctgctgctgtgcactatgcctaatgattt

SEQ ID NO: 86297 - DNA, 482 bp, Zea Mays
cgactgaggattggacatttggatcttagtttcttcggaggaggagcccaccacaagtatatatctacatatacttgccaacctgtcaatttagggacacacatcatgacaatctcctatagtcgtttttatttaacattgatcagctgaagaggatataccagtagcatctttgagattcaagacgtggaaattgaggccgcaacttgtgtatgtccacgggatgagagtcctcacacatgaaaaatgaaacaaaggatcggactactagctcgtttcctcgatcatggtactttggagagggtcgtcctctcttgatcattgtttttgttgctaataaccagctgttcagtcttcagaggcagcaacactttactgtcattgtttcggttgcctttacatgcagtttattgtaacttgtcagggtctttcttcagtttttttttcagagtatgtatgttctctttggttaattaggtccg

SEQ ID NO: 86298 - DNA, 353 bp, Zea Mays
catcttcatacacgccatcatccttcatccagcatttggaaaagaaagctggtgtgctgagaacaaaatttcctcgtgaaatcacttgtgcatggagctgagttcctcgcttgcttgtttgttcttgattgcgatggtacatcttttgccacggtgcttttacgattggatcaaggtttcccccctaactaaagtaatcattctagaggcatactcgtacagtcgtaccaccttcacacttacagttggcctaatttggacactggcatgtcaattaaagcggtagaaaaattctagataaacgggatccgagcatgatattttgggatatagggtcaggtgggttcctatgt

SEQ ID NO: 86299 - DNA, 420 bp, Zea Mays
gaagactccacccgaggcatgtcagaacgatccacaatcccaacacaaatgatgacaggtccaatcatacccagagcagccagcaaagctcacaatcttcgggaatgcagcaaacttcctataggtcaccagccccgagaggcagaggagggaggaacttcggaggaaggtttggtactctacccaggagattgttctgcttattctatggggaggataagggacacacgactaggacgtgccgagtcacgatccaaaagaaggaaatcgcttaagctgaagcacgatagaaccagccgaagcaggtctcgcatactgcttcatgctattccccatatatccatgaatatgtgggcaatcagcaacctacggcgtttgttgcttcgacgagtcagtcccaagcttcttgggctcagttgc

SEQ ID NO: 86300 - DNA, 500 bp, Zea Mays
gtggcattagatcaactttagagctgaattgtgcttgatcgggtggaggtatgagcaagaaccttataacaaaattaaactgatatgatggacaacaactttgttgtgatcggcttgatagattgttgaacgaaagccgaagagaaatgatcctcaaatcgctctgttaggcgcgctgaatggacatcgccatggtacagtacactgaagaagatcctaagtgtcgtgtgctcaccgtcgatgtcctgctgatgtgattcgagctcgcgccacgattagtgctgctgagacgtggatcaatgcgtggtaaaaagatctccgactcggattcgatgatcgaattaccgctctagccacggacaccacgtgtcctcaccgtgaatcatccaccgtcgccgtagccagccaccggacgctccggccgtccacgtagctggttggaggctcgcgtattgaaccaccgtaaagggttcgcggtaagtccgccacgttactggcct

SEQ ID NO: 86301 - DNA, 363 bp, Zea Mays
tgaggatagcacagactcgacagaagagttatgttgataaccaaagaagaccaatggaatttgaagatggtgaccacgtgtacctcaaggtgtcaccaattcgtggaatgaggaaattcaaagtgaaaggcaagctatcccctcgctttattggaccattcaaaatctttagacgaattggggagatggcctaccagcttgagctaccagatcatttgtctgatgtacacgatgtgttctacgtatctcaactcaagtgtctccgtgttccagagaaacagttaccaatggaagaacttagtgtgcaaagagatctaacctacacggagtatcctatcaagatcattgacactttgactcggg

SEQ ID NO: 86302 - DNA, 925 bp, Zea Mays
ggacgatgtaaggcgttttatgagcttctctcaagatatccatcttcacctctgatttctgaggcacacaaaggcggcccctgaaacgaaccaaatcattctcatcaatggtgaactcccgcggtttaccatcacccaccctctttcgagcttcctgcaatagacgatcctgctgctgagccacacgcactctctccatgagagaggattgaataagcatctgagtctccttgctatcggtgccgacataacacaaagcgatccccacacggtccagatcagcgatcaacgacaaggccaccttcggaaccccggacctgctaagggcatcagccaccacattagccttccctgagtgataatgaatggacaaatcataatctttaatcaattctaggcaccgacgctgcctcaaattcagctccttctgagtaaaaatttacttgagacttttgtgatcggtgaaaatgtcacaagtctcgccataaaggtaatgcctccacgacttaagagcaaaaacaaccgcggccaattccagatcatgagttggataattcccctcatgcttcctcaactgccttgagccataagcaatcactctgccttcctgcatcagcacacagccaagaccaatacgcgaagcatccgtataaactgtgaaacgcttaccgctctcaagcaaagctaggataggggcgtccaccaacttgctcttcaatgactgataactgacctcacaatcgccggaccagacgaagggaacacccttctccaagagcctagtcaaaggcttagcaatgctagaaaaatttggtacgaagcgccgataatacccagcaagccccaagaaactccggatttcagagacactagaaggtctcttccactccaccacagccgcaacattcttgggatcaaccgcaat

SEQ ID NO: 86303 - DNA, 772 bp, Zea Mays
gagcctgctcggttgtcagatgagtctgctgctgagtaagggactagagtatcgcagccaaagcaggatcaatagcaggaggggtagcaggggcagcactggaactcccggcctcatgatcatgtgagcgatgaggcataggaggcggtggcgggatcccaaagtcatcatcatcaacagcagcatcatcagtagttgtaccctgggtcttgaactggcggaacgcctcatcctcagcctgaatgtctggcactagatctggcactggggctgggtcctcaggggctggacgatatgatccaaactggaggcgtgagacctcgagggtgccctagaactgaggcggcctgatcagctgcgcgaagatgtgacagatgtagtgcgcatacgacagctgacgacgagcatgaagaccatccaaaactatgccctcggtctcacagataagaaagtcaacgacgtcaaactctgagtgtgagatcaaggcaccaagtagccataactgaatgtgtgtggtggcctctctgtaacccatcctgggtagcagtgtccgtctcatcacctgatatagatacttcgttgcagggtgaagtcagctggagagagtcacgacccatctatgaaaggtggtcggaatagggctgcgacgtgagcagtggctggagtgactccgtcgtgagggcgatgaggaggatatgatgtaccatagcacagattgtgaagatgagtcgacgactctggaaatccaaatagctagcatatctggctggca

SEQ ID NO: 86304 - DNA, 462 bp, Zea Mays
agtttgtaaattttgtctgtgtgatactgaaccttgcttgctgcgcaggttctgaggtttgggcctgcgcacacaaccgctacttacaatactattcttgtggcggcttcgactgtggctgccgatgatgattcgtttggctctgtgtctaagtgttttgagtctgatgattctgggagttcgattgcgtggacggaggagtcttcagatgaggacttggattattttgcagcgttagatgtggctggagcggagccttcgccgcgcgtggagggttccgaggggctcccgggtgcgagtactgggtataggcgccgaagggcggtggcgaaacagagagtgagtgaattgttgcgaagtggtaggcgtcattgtagtgaaatggagagtggtcgtcttcgcgtggacgggactggtaagcgagaattgttgtcctcgccgattggggcgagtgtatgtgag

SEQ ID NO: 86305 - DNA, 432 bp, Zea Mays
aaataagataatcatgaactattaaagtcaggataaatgatacaaccaagtatataaagtgagttaaggagaaagcattatcaaggagtagagagccaaaggtttcatacatcaaggtagatattgcgcaagggtggcaacacaatggcatgaaagcaaaagtataagaattcaatagggagaaaacattatcaaggagaaaagtagagaggcaaaagtttaatatatcaaggtagatattgcacaagggtggcaatacaatggcaagacaacaaaagtataagaagtcaagggttatatagcaatattaaggattagaaaaccacttataatataatataatattgccattaccgatctagtcgaaaacttagcactatagaactatcctatcaacctaaccaagaagaatggtaatagatccaaagaatc

SEQ ID NO: 86306 - DNA, 489 bp, Zea Mays
gtgtgttgcatttggttttggatcgcagaccgcaagagaaaagctgtagcggcgagatatttccgccggaccggacccctccatgccgttacgacgggtctgctcaaacacttttccccccttcagcttgcccaaacattaaagccctccgtcgcctgcgtgtaactgcttagtagttgtataaaaagttgcatccatccacatccacacacgaatagtaaaactatctagttgtgggtgtaacctagaattactttgagacaagcacgtctaactcaaagatccttttgagttatgcttccgaaaaagatgtatcttgttggtattcaatattttatcaatatgccatattatatgaccattctaggtccgcatacaccatgtggtatatgtctgaactcatagtccgcacacacccgtgaaaccataagagtcggccacatacatttctaacacctcaaccactcacagactagcggtagttacctc

SEQ ID NO: 86307 - DNA, 1359 bp, Zea Mays
ttcaggcccgaaccagcccaaccacacaggaaacaggggagcgcccgcgcccgcgcgctcaggccattttgcgcagagacccttagggtttcggctaatcagaacgggcgtcaatcactattaccttacgtcgctgaccgtttgcaaaaacatcctcacaactctatttcttctccaaggaactccccgacggcggcgcgctcgcagagcatcccaaacgtggtccgtaccggccatggccgacgatgactgctcggaataactaacaggaggcttcaccgatctaagatggtctcggaacacgcatcaatttgacaggaacgccatgagaatggtctgtccatgtgcacggcggaaatcgcgaccatgggcacgcgttcccgcataaccagagccgaattgagtaatcagacgccacggtgagtttcacaagtgcacagagttgtcgaaacaacattcaatatgggcaggggcttaccatggtggtccggccacggagcgcggtgtttcgtgcttgccggagacaggaaaggggaaagtggggtcgcggcggctctgggcgaaattgggagatgagatcggggctatagggccgtaagaggttgtgctttcaccgtgcgcaatcgatttgggaggaggtggagaaggcagtgcgaatcttgggttcttctcaagcttgcggttgaggcagtgagtgcctcgccgtggttcatgccgctatttaaagccacagcggaccgacaagcgatcagtggccgcagataaccttgctagcgcatgtataccacgtagaagagaagtacagtgaggtagaattgaggtgagagtgacacggcggcggaaatgactggtgcggtggccgctggtgaatcactccggccgagctcaggagatggcgccacgtatgaatcaccctctccccggcgttatccaatccctaccgcccacgaacccgaacggcggctgcacgaattttggcgcagagaggtcgccggcggtgaacatccggtgctggcagccttatcccaatctgagcactgtaccatggtgctccctcagtcagtcgacctgacagagctctttgaagccagattttctcttaatttcaaatggcaactcaactaactttctgcagcaaggttacacacctataatccatcttcaactttgccacaatgcttaccatcaaatagtcactgaatcttattcaaaatcgggctcaaagttcaccccatcacactgttactgaaaattcagtccaggggtagcctgacagctcgactttggacttaattatctctggattcttctcaacaagtgagcttacaaccttgagcaaagttgttctccttagtttgc

SEQ ID NO: 86308 - DNA, 344 bp, Zea Mays
gatggtatgagatcacgccccttggatccaaaacctacggtccggatcacatctctgaaacagtacgatggtttctctaatctgcgtcgtccctgaccgaatcaacggcgcaaacattctcttctaccccaggatggtcaggaacggcggtgctctacacctacagtggtgggttcgccggagtgaaatccccaggtgccccaaggcctaatccctaccctggcagcggtggtatggggtaagattatggtgaacccaatccggggaagggcgcaccgacgacgatcatgaagacgacaggttacgcgcaggcggatccttggcgaggctaaaccaccgacgag

SEQ ID NO: 86309 - DNA, 464 bp, Zea Mays
gtaaatgatgtgagtgaatgtggagagagaggagaggctatatatatgagattctccaaagaacagactgttggagaagttctgcgcaaagtgaggttgaaccacatagaaagatagttaaaccgatattttccaaagtgaatcccggttcgacaaccggttcaagtgcaacttcaaccggcccaaaacccggttgaaccacacctaaagggtcggttcaactagtttctaccaaagcatatcctgaccaatcccggtattttccatagaacatatcgaactagtgaaccctagggaggtcgaactatgcacttcacactctaaagaccaagttttaaaatagggtttgaaatggagattttttagctaatggcaagtgctgttacctcttttgtggattccactaagtattatggcgatttctatgactcaaaacaaatataaaatataatgtcttgatcaca

SEQ ID NO: 86310 - DNA, 618 bp, Zea Mays
ttcgacaagactgagtgtgatgggtgtgccctacacatatcgagcatcaccacattgtaaacctagtatgccaccctgctagatgagcatgatgagcttctatctaggtctagcttgttaggggcgtgtcagacttgtcctggcttgcaaactgagtagcgaagaagaacgcaacacataccttcgatcagtcttgaactaggtgtctagcaatgagccccatttgggcatgatggtcaatcagtttaagaggagaactggtggaccggggttaggctttgctgttaaggatgggagcgatgctagctttggtaaggttggtgagtgcagtgggttcacaccatcagagaaacatctagcctccctaaagcttatcaaaatcactccacctaaatcttccaccgtgttatgaaagatagtgtttttggagcctgtgagagccacacctcaaaaacaagtgtggtgtccaaaaccaaaccatctcatgaacacacttgacactttgcaagacatctcttgtgacccccttcctagatcatcacagccacccaaaaagacccactcccccaaacagattccacctaagagagaggtgaggtaccattgtgagtattgtga

SEQ ID NO: 86311 - DNA, 996 bp, Zea Mays
agaaaatcatcaacactaagttcacattctatatagtacatctgcaagcaaagtaagataggcttattaaagatatcaatagacatggtaaacgaaacatgatacactacatgcacccaaaaatggcattgaatgaaatggcatattgtcagctaactcaatccctgctagttattgaacaaatcattagatgtagtgcagagtggcgatgtagatgcagctaaaacatatattattctccttttttcgaaaaacaaaataaaagggaacaagaatacattagttgctgccaatgtgcgattcctgagttctatcatcttcatataacaacagtctgttacaccacagtattctcaaaattgtaaatacataaatggcataaacttggaactatctagacatctcaacccaagcaaccaattcagggacttggctctgcacatacaaaatgaggactggtcgacgcaagtatataccctagacaaggaaatgtgtttctagcccgctaacgtccaaagcatccatggtgctggagcaaatgacccatttggtggcacacatttattatacccatcatggcgctcgacatcaatccgattcatgggcctcacgcatgcaatgcaaaagcaagagcatgaataagatgacgacgatgatgattagtaattacgtggaggcggagtggattcatgggcctcgacgagcttgacgtgcttggtctcgatggtgaggcggagtggctgcagcaccaggcaccagctcggcctacggcccgtcgagcacgcgcccaactgacccaagcgccgtgatgaccgcgccctttgttgtagcccccttgaagctatctggaacgacacagacacacaaagaccatcacaactccatcatccgccaccacgagatcccaatgcgagggaggagagggtagaaaggggccgcagacaccaagatatgactgaatggattgctgcagcgcggcgaacttgccgcggttgg

SEQ ID NO: 86312 - DNA, 514 bp, Zea Mays
aaaattgctatttcgaatgatcattccatatcaaatgtgctcttggttgagtctttgaattttaatttactattcgtagctcaattatgtgatttaggatttagttgcaatttcaccattgatgatgttattatctctagtgttgatggtagcaatcttaagtttaaaggttttagatatgaaaatctttaccttgttgatttctcatctagtgaggcaaagctcacaacttgcttattctcaaaggcttcactaggttggttatggcatagaagacttggtcatgttggaatgaagcaactcaatcatttaaccaaacatgatttagtccgtggcttgaaagatgtgaaatttgagaagaacaaattgtgtagctcttgtcaagtcgggaagcaagtggcaaatactcatccaaataaaagtcaaatgtctactcatcgaccgttggaattacttcacatggatttatttgggccaacatcgtttgtgagtattggcggtaattcctattgtc

SEQ ID NO: 86313 - DNA, 331 bp, Zea Mays
cgaagggatatcatggggtgttggccgtcggatttccacaggatggcccggattatacccatccgctacacgcaccactacgcaaccagagtcgtgggattagtgatgaacggcagatacgcatgtgttagctctagccatgcgatgggtgatcaatggccagctccttaatgctacgaaggggtacctacagcttctaatacggaacttccgctcaatattcaacggaccaacacattccccttcctcccggctgaatccaagcacggaggcgaagaatttaagtttaaaattcgtagttcaaattcaaatctgagtcacaagtaaagtt

SEQ ID NO: 86314 - DNA, 319 bp, Zea Mays
aggatgatgtgtagggaggaggaggacgaataaagctgtgaccgtaactgctggtgggagacggggacgataggctgagccgcccgcaaggcattttgtgtaggactggggcaggcccagggtctctcttgagaatgcaaacaaacaatattggcccataagtaaaaccggcccaactcacgcgtcctctcgctctggatgtctcatgtcagtctggatgaggatgacgcacgcgcggcgcgagctcgtaccgcacaaacgacaggcgcgactgacgctgggccccgtatcgggaccctaaagattccctccctcggct

SEQ ID NO: 86315 - DNA, 666 bp, Zea Mays
gtaatcatgataaggtaaaataagacaatatctccaaaaaaacctttgcaatttcacttgtttagtcatccattctgtgctccatactcatctgaactaccatagaacaaacagatgtaaacagatgttcaggctgcaatgttctaggtcacttcttcgtcttttaatgttaaagagaatgattcattctaggcctctcgtgctcacagacatgtgcgcgttctcattctggttggcggtggcatcgacatcaggagagtctgtgtgcggactacggagagagcagggtaggagagtagaaccttttagttgtaggtcgatgaacggtggatgaccctcctctctgcgctcgcattcacctgcgtcgtcgtcggcattggcgtcggcactgcagcgaaggcgcacacgacggctcacctccagattcattcacccttctctatgctctcctctgggcatagggattcatttgattccttcgcccttctctacgcacgctcgtccccaatgtcgcaagactgaagttatcttcgttcgttacgcgtgttgatagggaaagttgttaggattcatgcaaggtatgggctagtgttggactgtgagccgaggggcctgcaggccagcgttcttcgaaagcacggtaacgtgccatcaattcgttgttgg

SEQ ID NO: 86316 - DNA, 538 bp, Zea Mays
gactgagttcgtatacgtataatatgatggccgttctgcatggtagctagcaaaaaaagcagcaagctagctgtttatagataacccgaacgctgacagctagacattcagatagataggaggaggaggttgagcgtgaagagcaggaggcttttccgatgtagaaaaagactgatttgatggcctaattcctttgactttcagtgaaagaaagaaatctccggctttctagactgacccacaccccacatgcttctttttcactctgacatggaacctcactccaactgaacgaagaacccctactgcatttgaaccgtgcccgatctctctctctatttctctctcacacacacagctgagtaagtgttggctcgtgctttcgggttcccagataaaccacagcatatgagactagagtccttaaattgacgcaaaaaggaaagaaagaaagaaagaaagttagtgttggcacacatgcatgcagatcacacacccacaacaggatttaattacatgctgatatgcataggaccga

SEQ ID NO: 86317 - DNA, 525 bp, Zea Mays
tagtagttacatgattccttcagaatgcacgatatagtatgaggccaaaaatatcagccccgccccaaaagtccgctgctgggtccatctccatccataatctcaataaattctacaactaaaacctgccataaatttcatgctagagatcctcctaatctagatcactgcaaaagcacagactgttcaatcctaacatcttcatatggaccaaaactaagcttcacataaagtacacaatgtccataaactaagctttgcagtaaatagtatatgtatgcttattgtgaacagacaactggtgtcacgcatggaccaaaatattctaaacatttttttttgccaagctccttatgtcagtaacagtaaacttcatataatggtatagcaattcagtattctaggcatggcaaattatcatgttatagataccaaacgttcatatactgaaacagagtcgtcatgagcaacaatggcactgatccgagagaacaagtgcaccttaactgaaaaagtaatgctaaa

SEQ ID NO: 86318 - DNA, 498 bp, Zea Mays
gccgtgactccctctaaactccccgtcgaccaccggagttactgccacgacggtgaacacgtgttcactgcaccagcattattcctcacttccgaccgccgcacatcaacgcccaaattcacggccgccgctgaagggtcctataaattgaagcccccgctagctccgcaaggtcatcctccacccagccaccgctaatcgctagcagtccttcgccggagctcgcgaattttgaattcgccccaaatcgactctccgccaccgtaaaccacccatcaccgcggccagccttccccaggtctgctcattcccttctcgttcctgttctagcacccttacatgttggtgatgctccccgacccctttaatcgaaccgaaccgccagggatcgccgggaacacaatgctctagccgccatgctctcggtcaccgtggccagagctccttagttggtcttagatgcaattaggttgggggaaatgatcaaggtagccccga

SEQ ID NO: 86319 - DNA, 309 bp, Zea Mays
gtaagaatctcttgtttggcaaaggaacacttggtcagtttaatctgccatttgtccttcctgagcagctgaaagactgattcaaggtgagacaaatggtgagacgatgtagggctgtatattaagatgtcatcaaagaacaccaggactgatttacgcaacagaggtgctagagtttggttcatcgccccttgaaaagtagcaggagcaccagaaagaccaaagggcatcaccttgaattcatagtggccttagcgggtttgaaaagctgttttgtgttggtcagcagaagacatacggatttgatga

SEQ ID NO: 86320 - DNA, 559 bp, Zea Mays
actccttgactacgaagggcccaaatataaacacttaatctaacaatggcattaggggtcagctgatgaaggtaaaccccaaatttctttaaaacatcagcaatcatcccattcaaaggaaatcttaatcctgctttaaagaagcttttgaacaccactacctcattcttttccggcttcggagtagtctcctctcctccaaaacgaaccagctccttttttgcttcgctgaagtaccccagcttcaccatctttggaaggtcagcttcagagatggtggactttccaaagtccaaatgactaggtttagttggtaccgcacagttgtactcatcctcagaactagcctcttcaacatcagcttgtgttgcttcggcagcaggtgtgccctctgctgtaactagcccggagcgcttcatcgcttcagaaattggaacagtttcagcagcttcggcctcatctccttcacgctcaactctagcagtagagcgcactctggccatttgattttcaatttcttaaaaattccttgcaaattaataaccttttttcccgaagc

SEQ ID NO: 86321 - DNA, 650 bp, Zea Mays
cctagcgcttgcgccagtgccttcttcttcctctggccgtcgcgcgtctcgcccgattcaccagccaccgccgttgagccctataaattgaagcctccaccagcccaacaaggtcattagctacccagcctccgagaatcgttagcaatctttcgccagagctcgcgaattttgaattcgccccaaagcagttctccgccaccccaaaacccacctcaccgcggccagccccattccgatcagttcatcctcccctctccctcgtttaagctttctcatatgtctacgatgcttgctgacccgcacaattgcgctaggagccctctggtcgccgggaacacgactgtctagccgcaatgtccacggtcaccgtggcccgaataaacctattggtcattagtgaaattaggttgggggaaaggtttgggatgggtccaattccgtgtctgttgctcgggaaccctagtcattgccccagtaggccggtacaggtgctcaccggagcgcggccgcgttcaccgtcgtcgtggacttcaccccgcgaaggaatagaaactggaggacttttctgcaaatcgttagtgacaccgtgaaacagtgaaagaacctgtctccagttagccaagaacccgaggctcttttcgtaaaac

SEQ ID NO: 86322 - DNA, 822 bp, Zea Mays
caaaactccatcgctgtcgcatgattcacgtcgcgcgcaacacgtctgatttacgtgcaattcaccggatgtcgcacgtgtcgtcatgcgtcgttcgcatgctgtccgtgcgcgtcgtcgttcgcgtaaatcactgtttgcgcgctttagtaaaatcatttcgttatatcgttcacattaaataattgattacttgtttagttgtgtattattaaaataacaatttaatcgaacccaattaatgattttaaggatgcgtttgtagatacctgttagtgtgtgtacgccaacttaaatgtcgtgtttaacgcttagttagtatgaatacgacataatttagcagtatccatgtatcgtgttgtttataagttcattagagggttaaatgtattaagtcacttgcggcgtaactcgttcggtcacgtccactctagcggcgtcaatttcatattaggaacattgtttgtcgcgacacttgtttatttaattaatgaattaactatttacctgttagttatttaaaataactaatttatcattttaacttacgctttataaatatatgatagtgtgattaatgactacacaaatgttttaagtttaatacttgtctagtatagaggcgacatctatgtggtagttctcgttgcgcgtcagcgtgctatttgtgcgcgtagtcgtgttgactcgcgcatgtcgcgcgctgttgtgcgcgttgtttcgtgcatgcgcagtgcgtcgtcagggtcccgacgacgttcgtctactcctagatgacgttcgtctacccctagacgactctcgtctatccccgtctacccc

SEQ ID NO: 86323 - DNA, 835 bp, Zea Mays
cccagaccacccgcattgcgggcaatctgggagagaaataggaactcgcgctcatcgccttcctccgggcaaatgtcgacgttttctcttgggaaccgtcacagatgcctgggatccctagggaggtgattgagcaccatctgaagatccaccttgatgcccggccggtgagctagaagcctcgaagatagtccattgagcggcaggacttcatccgtgcggaggtccggaagctgcttgacgccagctttatcgaagaggtccatcaccctatgtggctggccaacccagtcatcatcccgaaggcaaacaggaagcttcagatgtgcatcgactacaccagcctgaacaaggcatgtcccaaggacccatatccacttccacgcatagatcaaatcgtggactctacctccgggtgcgacctattgtcttttctagatgcctactcaggtttccatcagatccgaatggctaggtaggataggaagcataccacttttgtaacagtggatgggctctactgctatgttgtaatgccctatggtctgaagaacgccttgccaacatttgtacgggcgatgagtaagaccttcgaggacctgatcagggacaaggttgagatatatgtcgatgacatcatggtcaagactaggagggggtcgactctaatagaagacctgaccctagtctttgacaagctgtgggcgacgcgcacaaagctgaacccgaacaaatgcgtctttggtgtctccgctgggaagctgctgggatttctggtttcacaccggaggattgaagcaaacccggagaagaatagggcaattgaggcgatgag

SEQ ID NO: 86324 - DNA, 425 bp, Zea Mays
caatgttcataaaaatacaagtagacataggcttggtgatcctaggccacacgtttcatggtaacaccattctaggcaagtagtggatggtagaagtgtcactagtagtgctagggcatgaggacgacttgctagacatgctcgctctagaggtatcaagaaactaagacaaattatcaacaatttcatcctatgcattaacaaggcattaggttgagtgaccctcctatttcattgatgacatctatctaattgatgtcaacctcaccaataactaaggatgaaccaccaacctcaaccgagatacacgctgccttgaaacctcatgatcttgtacctaacacaccaccactagcaaccaagaatccaccctccttgaacaagaccaaagatgctcaacaaccagaacttctaccatcaccaac

SEQ ID NO: 86325 - DNA, 762 bp, Zea Mays
aagggggtagcaattcgtaaacgcgagggttttacttccagtttgctctctggtactggcaaccctggtcgtaacagctgtgattaggtgtctggttttaatttggggagggagggcaggcagaactaagcagcattcttttcgagtttcggcgaagtggttggcgtcattgctgctgcgggtgattgtgacaggccactgtgggacttcggctcggcatcaatctggagccgaaaggaaccaaatgaatgatggcatttactagtagctagtagtatgctgggtgtcctcttcggtccgacattgcgaggaatagaggtccactattagatctcgacgctgttgggttgtgacttggtatgagcagttttaccagcctctcgccttgactgtttcacacactttacaagttacaagcacttccagatgaaacatagtgcactataacatgatgtaaatgcagtagtacaacattacagctgactagcaaggatgaacttgctgtcaagacatgactaatttgattggagtcctggtttgtcgctacttggaagaagttatgcttttaacgtcttattactccaggtgacaactaagtaaactatttgcattttatctagactgctgttgttatggcatttgatacaggtcctagtaatacagtacaggaagtgatgccgacaattttggcattaaccaaacatgtgtgtgaggcatccaaggatacacttagtcttagataggatgttgggggctgtactg

SEQ ID NO: 86326 - DNA, 464 bp, Zea Mays
cacgctatagctgatggcatgcttgtcggtttcgattttagaattgctggttgacacgcgcctggctctgctggaatacgctttcaacctgaattagcctcggggcctgtttgatcggttgttcctcggctctcttcttcttcttcttctttttcctccggttatgtgatcggctggagtagtttttcgccgtagccgctgcaagtgggtggctgtacgtgggcaccagttattgccgtaatgtcttgcaagacgaccacagcagcagacgtgcaccagacaccagtgcgccttttattttaccatcgttgcatggactacgcgacagaaatgcgcagagcagagagctcggatggaagcagatgctcgatttactacaacgcagcgacgaagcaggaaggcctctctcgcccacgccgcctcatgagagatcgtctagagaacaacatggacgcgacgcaggc

SEQ ID NO: 86327 - DNA, 875 bp, Zea Mays
gtcgcatgataggtagagagggaggggcgcatagggaccaaccatgggagagagagctcgaccatggggccatggctatgtgcacgcaggtagaagattacccaagaagagagaaaagagaaaggcaaatgagaaattggggaaaattgggatacaatgagttctgaccatggtcaacatgattagaatgttgttcttatgatcctggagagggaggagcggggatttggttactgagtctatgctactgagcagaggatgtcacaacaccgatacagaacagagaaggggcatacgtttctcactgaggggaaaggagggacatgcgacaaagtgtcgtcgacggtgaggaaggcgatgctccgggcgaggacaacgaggaacgatgctccgatggggaaaacgatggtgctcctcctcgattgttgtaggggcgcttcacctggggatgcacacctccgtgtgtagagcgagtggaaactgttgtatgagagggtatagtggacgaggtgattgtgcgatacgtggaggttttatggagcgaatggaggaaccgtcgctcgacgtacggagggaggtgttttaggatgttacatcggggatgctccggagtggtcataatgcaggctccagtgctcgtggatggtagcggcgctggttgcgaggggagagtgctcgggtggctaggggttcgaattggggtgagtatagggtatagggggtctccactaatactcgtgcgctattgattcgagggcggtggctccagtgtgagcaacgaggtcgtgctccagttgaatgcctgtgagcccacaccattaaattgcatggtgtcgggggaggaagagggggagaaacatctgccttgaatgctc

SEQ ID NO: 86328 - DNA, 899 bp, Zea Mays
gcgggagggggtagcgggtggcgacgattagccggcgggggtggatgtctagaagcttctcggtgcgtcgtgaaatagagaggccggttggtgcggcgatttcatagaactgttgagatgcaatccaacggctggaaactttttgtatgacgtggacaccgtgaaaacgctggttttgaaccggctttcatatataggaaacgcaatgctagtttttttttgggttctactgtatttgctggtatgtacagtatatagtaagagtccgttgacgatctcgttggagccctccatcgccgtgttctcccttgatgatatcgtcagtgagttcatccgatcctccacgtcaaccgcgccaacctggggcttcactgccactaccgtacgtgcctctactagtgatgattgggctacaactatttcgagtttgcttcttttccgttgggtcgtcataccattcattccagtgtactacatacgagagtaatttgggcggtgtaataccaggattattaattagaaggtatagctttgcatgatatgtgcatatctctactattctataagcacctaatgtagactacaccgtgcaccatggttctgccttctatacatgtgcaccgtctgttcgtctttgttgaatctgcattatccattcgtgactgtgtccgccaacgaccgcgtgcgtcgcccctcggccttccgcgcggtgcgagcaaccctccctctcggttttctatctgccgtcgcgcctcccgaaaatcttgtcatgagatgcgcctgcgtctgccccatttctgtacccttgccctcaagcaagccccgcccccatggcgtaggtccgtgaccgccgccccttcttcccctccacaccccatcttcgaatctgcgacaccctg

SEQ ID NO: 86329 - DNA, 1113 bp, Zea Mays
cttcggatgaagacttggattattttgctgcgttagatgtggctgcggcggagtcctcgccgcgagtggaggttggcgaggtggctggtcttcctagtgcgaggaccaagtgtcagcgacgaagggtggtgtcgaagcatagtgtgggcgagttttcgtggagtggtaggcgccgtcagatggggaaggagcgggacagtctttgagtagaatattttggtaaacgagagctattgtcttcgccgattgggacgagcattggtgaggggatctgcggaatctttttgagggtgaggaattgaaaataatgttgttcaattataaggaggcgggcatcatcccgaaggtggagccgatgtagtatgaggtgccctcgctgagtgtataaggtgccctcgctgagtgtatgtaattgcaacttgtattgtaatatggcctgttggccgttttcccgcacttgtgctaatccggctgcaccctggggcgacttttgcacggggtgtctttttagtaaaaaacttcgattgacgcacttattgtgctattccggctgcaccgttaggcgacttttgctcggagtgtctttttaataaaaaacttcaattaacgcacttgttgtgctattccggctgcacccttaggtgacttttgctcggagtgcctttttaataaaagacttcgattaacgcacttgttgtgctattccggttgcacccttaggcaacttttgctcggagtgtctttttaataaaagacttcgattaacgcacttgttgtgctattccggctgcacccttaggcgacttttgcgtggattgtcacacgcgagggtagtctatgctacctgtcgcggtgacttcgaagtggtcgaatgtcgaagactgtcgaaacggtctttttcgacatgttgcgtctgagtttttgtttttgcgggggcttttgctggtatattacatggctccgcctcgttaaaaacctcacccccgggaggaaaagagtgcgggctagaataacattgtttgctagattacaagggcgtgtgggccctgatggttaaacaaaaaaattgcggagattgtcaatgttccaggagtgctctaggtcttcgccgaa

SEQ ID NO: 86330 - DNA, 934 bp, Zea Mays
caaatgggcaagatccctatagaaaaattgtagctggtatatagggctacaagtttgttacagatggattggcaagttcttgcacaaaaatccaagatctaggcgttgcaactctgtctgtcaggcgctctgaatcaggttttcgatggtacagtgttcggatcagatcgccaggttcagttcatctcgccgccgttgatcccgcgtcgtgatcctcatcgccattgtgattcgtgctctgtggggtgcagataactcataagggtaagaaatatcgcatcgtggatgaactcaggccactgttccgctccggccgccgtacccgcctgagtcacgaccgcttcggataaactcactggagttagccacctcgcgaccttgcgctatgtgttttggtgctttaaccacgtcgcagtgagtcaccttagccacccgttcatcgttggtgagcttgccacggtgaacgccacgaattgcttgcgccagtaacctcttccctctccggccgccaccgtgccaactccaaatcacgagccaccgtccccgaatcctataaattgagcacaccctcggctacgctatgtaattatgcacccaacacacccactcgtgcctccaattactcaccagagagcctcaatttgaaactttccccaattcggtccagagcaccgcgctacgtgagctcgccgtggccagcgtgctacaggtccgttcatgccctttgctctcccgtttcagtacccttatgttctcctgatgctccttggcccgttcaattgagctaaaccgcgctagatcatcgggaacgcctctgttcatccatagttcgcgttgtcaccgtggatagtgtgattaagagctcagatcgtgcaattgatcgaggggaaacgattattaggtgttgaattaggagtcaaccaagttagagcac

SEQ ID NO: 86331 - DNA, 419 bp, Zea Mays
ccgaccaggcgcacacgcttttttggctcactgtaccacctagttacgtcaattataactacgcgttatgctcaatcttgttacgttttacacaattttggtgtgcgcatgtttcgcggcatccgggcccacgaaaagatcatgtccccgcaatctgggcagcttacgtctatcgggcccacgaatccaggaaccgagcactcattttttcagctcatctctcccgtaactctcgcggcggccgaaccctagccaaatccgccgtcgtctgctgcttctcctccgcgcccgtcgaaccctagactaatcgccgccgtgagcttcttgtccaccgcgcccgccgaatacacagatattctccccccgtcgttccaccgccgtcgcattctccttcaccaccgcagagacccggactcgcc

SEQ ID NO: 86332 - DNA, 645 bp, Zea Mays
atttttcatcttcttttaccatcctagcagcctgtctgctcaaaacactaacaactctcttcctttttaccccttcggcacccttgttgagacactcgtaatcaggatattcaaaattcagagcgtccattatgcggtttaaccttcgtttcggtcgggtaccgaaggccgcagtcatcagttgatcctcttttttggtgtaatttcctagcacttcattacacactatttcaatcatttctagccactcttggcaaggttctttaaattggttctcaaatttaaaccgataaggagtcgcacaagctcaagtcccttctttgttccttttagcttcggcatgctaaattcgctcaaggttggagatgttctgttagccaaatattcttaaactagatctctggtgctgatctgttcggctaccaccctgaattctgctacagcttgttggcatggtgaccccgacgtcatgcggcacacgggcctagtcaacccgaagcttaaactcagtgggctcatccctagcgtcttcaacttctccctcttcttctcatcggccttgacatagaaccactcacttttccaaccggttggccacttggtgcgatagctaagcaccggaccttcatatccttgcaatatgcg

SEQ ID NO: 86333 - DNA, 604 bp, Zea Mays
gtcgtctttagaaactgttgccccctaggtccagaccaaggcgaggattgtggtttccaagaaagctcatcaagaggcgtgatcatcatctttataccaagaggccttgattgcaaaccaagtacgcactttccctgcctccagttctcgtgtcggtacatttttgctaattgcatttcactctcctcccaagccttcattgctgaagtatctagtggagaggatcaggcaccctgagggaactcacccctggaagctcttgattttcttgccaagaccgtcgacacagtggttgtccttcaagatttgcgtgggccggtcagccctgagccagtcgttgatcccatcctcaaaaaggtaagttgtgtttattaagttatatgcatcctctccctttcatgatactgatttttgttttctattttagggattcaacctttcagagctgatgtcatttgaccctgccttggtgggctcgaccatcatcgatgccggtgatcaaccatcaaggctaaatgctatctttggtaagctccagtgcatcaaggacatgctctcaaccccgactcaggcattagtctaggactctgaggaggcaatgtgc

SEQ ID NO: 86334 - DNA, 431 bp, Zea Mays
cagaaactaatctgataacgacgagataaagagatggaaaaggttgagattagttttggcaaataaatttgtgggatcgcagcggatgaaaaggattaaactgaccctaaacaaatctaaactagcaacaagacattggcctaggacacaaactcaatacggcagaatctgaaactaaattgtgcaaaggctaagacgaagtctgtaggtcaggatacactaatggtttttagggttatgataaaatgttaagactctttattctttggttttttgtgggttataggacgaacacaatgaatctaaatgttggattataccttagggcaacctaaatcctgatactacctaatagagggcaagacctgatcttctgtaaggtaggataacttgatttggtggaaatctcgatgttgatgatccaaggctcc

SEQ ID NO: 86335 - DNA, 382 bp, Zea Mays
ccagattttagcgtggtagggcagactttttggtttagcggagggtcttatgagtcctctgagctggtggtgtggacttcaccctcttgctcggtggcgactgccaactgtttttgctttgcggtgtggccttctccttgccggtcggtattggacttcagattgggtggtggggaatataatggtcagaggcgagggcgaccctggcatcgttaccgtttggtggtgagttggggtgggtgttttttgggaggcatcgtgggtgttttctttgtcgcacgaacggtgggcaccaaatgttggccactgacatgcgcaagcgtgctgtcagctggacccaaacactcaaaaagcaagtgagattttaggtgcgcaataagac

SEQ ID NO: 86336 - DNA, 2007 bp, Zea Mays
aaatatttatttgtttgtgtcttaatgctagctgtattgctttggatctgcaaaaggagacatagaaacaagtgaagtcagagtcatagaagtcaactaaaacgttcagtcaatggaggaacagtgtaactatggcctgaaagggttctgattttgagccatggcgatgtctatcgagatgcaatgctgcttgcttatccatctacgcttgcagtcaagtttgatcactttcatggtttgggtaagcgctgtggttacttcgtattgaaacttagtgcttggttacagcaagctccatggttataaagtatttacatcgacttatctgccctgtaacttgtaaaagcaagtgtgtctctatcgtgcttgctggtacaaaccttactgactcttgattataatagaagttcgttatggcgtgtaaacaggtcataacggtggaagcactgagttctggtcactagcattgtggagcaactttgcaagtggatggagccatgcatgctaaaagggcatcctctgtcacagttcgcctagcaaatgatttcctttcagttgtgttgacatcaaatcacaggggatgcacgcactcccatccaggttagtgccttgagcttatttggcgttgaaaacttgcatgcttccttatcgtggagagccatgctgctaaaataaatcgaggttgcttttgctgtgcggttggtaagttggtttgtgggtgctcttctagagcccctacctgttggcttggccatatatgtgttacggggggcaattgtaaatcctcgtggccttgtttggataccctagtattcacctcaatccacatggggtgaggttgcaatccacctcaacccatgtggattgaggtgaatactagggtttacactccaatccacctcaccccacgtggattgaggtgaatattagggtatccaaacaaaaacaaggcctgcatgggttactcctttaccttttctttccctgttgtgctactgcttggttcatgaatggctctggtacgggtcgtaatccgattcccagaatgtgctgtcttgatatgcacttgttgggcgagcacgtctgcactgggagtgggagttggtctgagccctgggttgcaagttggacggacgatcttgacagcctgcacctaggcttctgctgatggaagcggccacttggcctgctgtgggtgtcatgcccggtagtgagctggagaagcctgccatgcagtgggagctgtccgcttcatgggaagaaaggaaaaaaaggtgacactcaagttatgtccctgtagctacattcttgcaattgcaaagcggactacagtactgcccagaatctgaaattttgaatccttcagcgctggcagctgcagcacctctagattagcacggcagtgtccgagtcacttcagcattcagaaaagcgaggaacagatcagtccctttggctttgctgctctgccaagctagatggttgtagagcgcccgggatctaaggctgtacagtatattgttgttagttaaccaaggcgcttgatccattgaacgcacgcagatttttttcatggagacactgcaacagcaggctacacgtgtgatctggggcagttccattgaagcttcaggttgaggcattgcctagatctggggcgaccactagtgatggacaccgttgcgatggcccatgatcatgcaggatggagtatttggtatcgtggccgtttggtgagatctgatggggttggaaagaaaggaacaggcacttggatatggccaggcaggagcaaggaacgaaggctggggctggtgatctttgcctcttcgtatattcagacaaattaaaggtgccgaaacttgtcttggaggtgctgttacctgacactgagctccatcagtttcccgcccaaaccatgcaggaactgacttgtttctcccctgtaaattgtacagtcgcagcgtgtgggcgtcaagtgcccggctgagcagcggagcgtggctg

SEQ ID NO: 86337 - DNA, 556 bp, Zea Mays
tttttcctttattttatttctctagccgctaatgccaatggtcatgacgagacatcgtcgtttatttctcatgtgatattgccgcctagaacccaccgctcagcatcaccatcgcgcgcacatcaccgactttgcgggctcctgcggcgacggacttcatccttgcatatgtagcttttcccgtgtatgacgggtgggccacattgtagctgtgtttttcccttcggacaatcggatctcaacgaaatcgcgtgcactgcgccgattgttgctgccaactatgttgatgtgggttcctcgcgggtagttgggattaagctggggcatatatatgagcacgccgcctctcctcgatgcagccatccgccgagcgccatcgtcaagcgatagcaagcagagaaagatggagcaccgccacaccattagaaaccagagagggagaagaaggagaaggtcgtacccagctcctagcagccagcgagctccacccttgcctacacgctctgtctttctcccatgcgcgtcgtggcacagctgccctgaccgcgggcctccg

SEQ ID NO: 86338 - DNA, 347 bp, Zea Mays
gggacatcttcaaactggcctggtagctattattgtaagagaactccgcatacggtaagctcttatcccaactaccaccatgtttaagagcacaagctcttaacatatcctccagtacttggttagtcctctcggtctaaaattcaactatgtgtccaagcactcgtgcaacttctgccaaaaccgagaagtaaaatgtgatccccggtctgacatgatcttcttaggcaccccgtataagcatacaatctgtgccatgtacaactctgctagcctggctcctgaatatgtggtcttcactggaataaagtgggctactttagtcagcctgtccacaatcaccgata

SEQ ID NO: 86339 - DNA, 693 bp, Zea Mays
cttcgacattcgaccgacagacaagtcaccgcgaggggcagcgacggccacccctcgcgtgcgacaatccgtgcaaaagtcgcctaagggtgcagccggactagcacaacaagtgcgtaaatttgaagtcttctcaaaaaaagactatccgtgcaaaagtcacctaagggtgcagccggactagcacaacaagtgcgtaaattcgaagtcttctcaaaaaagactatccgtgcaaaagtcgcctaagggtgcagccggaccagcacaacaagtgcgtaaattcgaagtcttctcaaaaagactatccgtgcaaaagtcgcctaagggtgcagctggaccagcacaacaagtgtgtaaattcgaaatcttcctcaaaagtctacccatgctaaaccctacaccaaactgcccgcgccaggaccgaccacaggcgcgccggaccggcataataaacatactagaccaagcgcacaacgcctttacaagcacagcgcaggcgcataacctcatcatacaaattacaattacatatgtacagcgagggcatcacaccttacatcggttcaaccttcggaatgatccccatctccctatagttaaatagcattatcctaagctcctcaacctcaaaaagacttcgcaactcaccctcacctacactcgcaatggccggcgaggacagcaactcctgct

SEQ ID NO: 86340 - DNA, 639 bp, Zea Mays
gagacttcctccgagtactccgagtccccaaagtcctctaagggaggacttggggggcgcttgcgcttcccatcggctgggtggtgccctttcttgcctttttccctccagccatggctcactcggaaggaggagaagcaaggaagaaaaagaagaaggcgaatgaacgagaacaagtggggagtgcagccaaggcgagcaggctatttaatggggtcgggagatgaccgttcacttccaactcgctcaccgaacagtaacaaaaattcaacagtgattcaaacctcctagaaatgagtaaggcgcctggcgccgcttcgcataacatggcacctgatggaatcaaagtcaatcgctcaaacggagtattacacctctctgtcgtatcaagttactatttcaggactacacgatggacatcttttactgggcagacacccgttgggcacacccattgggtgtaccgcccggattctctaagattttctggagcggtgagacctgcaacatatacgcaatgaatataccacgacaaaggagaaggtcggctgaaatgggaggaagtccagatgcggtcaccaagcacaagtctaatctacacaggcattgaagttcatggccgagtggcgtccagccagg

SEQ ID NO: 86341 - DNA, 665 bp, Zea Mays
atcaggtgcatgcagaactagcctgcaattgtcctcatgtccgtgtgcgacaacgacacacccaagcgtgaccaagcgcaactaggcacgctagcgcctaaggcgaaacgatggagacatcaataaacggggcaaacgtggtcggagcagggcggacgcaacgagaacaggactggccgcactcagtcaggcatgcgggttagagcaacatgacgactagggaaggcattgtagggcgagcacaatcgaagcatgatcgacctctgcgaggcacacccgaggcaggagcggtttgcttgtagcacacacacgaaggatgatgaagaaaaggtgtccaaggaaaaatgaaactggtatgtgtgtaacaagtggcattggtggttattttccccaactatatcaatttaagagtttggtgaagcaccctttgaggagcttcactaaaaacgaatctgaccctaagataacccattcgttgaatccagattttgtaaacctagaacgtttgggtcacctgcgcacccgccatcttcgacgaggatggtgggtcggcgtcacctacgcacccacaatctttaacgaggagggtgtcgtggacaatggtgatgacgtgcagggaccaccatcattgattcctccggtgcacctgcgagatccagcctcgc

SEQ ID NO: 86342 - DNA, 601 bp, Zea Mays
caagcaaccatgaggacccgttgctatcgctacctaggctgtcctgtttggttgcaaatatttttgtgtgtgtgtgtgtgtgtgttgttgatgcgtcggcatccatgtgtattcaagcaaaatttgcgcgcgcgagggtagcgaatgaaaccctggtgtggtggaggtggatttcacttcacttggacgcacacgcaaacacgacagatttgatgaatgggttgggttgcgtatccgcccggcgacgcaaaagccattgacggacgtgcaattgatggacggacggacagcgagagtgggtgtggaaaacggcaggcccggcggaggaaaaggggcagcaaagcaaaagcagagcgcgcgccaccagcggatggatgatgtggtgagcgtgatggaccgacagtcagtggagctaatcccatcccatccaatttatgaccctctcatccagcaaatttatgaccgtttacccgacgccatcaaatcaaatcaaaccaaaatccttgtgattctcgccaatgcctccacaactcacgatagctacagcccggccctggtagattagattagctcagcccagtccttagcagcttgcagtaca

SEQ ID NO: 86343 - DNA, 322 bp, Zea Mays
ctacctagcataactaatagatcttgacaagaacaacggtagtataaaatctaccaagataatgtgatagcaccatacgatcctgatgaaatcaagtagagaccacattagggcaacatgacacataccttggaaaacccttgtgaaaggggtggcaatgcggcgaggagttagcaagcacatcctccttaggtgaacgaatgccttctgataattatcatgaattgtacattttatagtccttgaacttaaagtgataagaacttcctaactaactttaatctaatataatgcctatctaagatacacagcccctggggcc

SEQ ID NO: 86344 - DNA, 854 bp, Zea Mays
tacctggtgctgcagatcacactaattttgaaatgttatattctgtaatgtatgtagtctatgatttttgtacttcgttccctgttgttagaattttttcaggagctgtgccaacacatactgctggactggcatgttgttttttttcctttttttatgagtgcatcggatgtagtgtgtcatgttcctggtcgatgatgtattgtttattaatgagtcacctctcagacttattcacattcatatgtgtttctggatacatacatttccttaggaaagttggtatgcattcgggttcaattggagctatacatgcagagtgaactgtgaagctatgaataagaaaacaccaaattctaacggctaccaattttgtggaaagagggtgacttctagaaagactatgagaccttttcaagaagtaatataagcggaacgaaataaagacaaaacaactaaggagcaccgctactaccttgcacccccactgcccacgtacgacataaagtcatcggagcaactcaaattactgaaacatgacgattgagacattgactataggtaccaaccacaatccatttggtcgccgttagggtgatgcattcaaggccatgcgaattcatcttctgaccacttatcttctatttctgtcttagaatttgcttcctgcatgctcctccacatgccatagaaacatgtcaccttgcagatatagatagaggagcacaactcagaatagatgacatcaaagacttcttaatctgatcgccaaccgatttaacacctgagaattatagtgaaattactatttaattgtagttgtttattataacccttccatgttacaagctttg

SEQ ID NO: 86345 - DNA, 1084 bp, Zea Mays
gttcccttggcgaattgctgttacttcttgcttccgtttcatcagagacataactgtcagctctagctaaacacacaagataaaccagaactaatgaatggttctggttggcattctataatggtttcggttgcatcagcagagtgagttgtactcctacctattcagagctaaactgcactagtgttattagtagatagtttagtccagacctgtgccatgtcgccagcacggcagggaaagagacatggacatggtttgatatgttcacaagcagtgagtagacagtaaaccaagtacagcagtacttggctgggggcacggccacatgtcatcctttgtcattgctctctttgagatgccctgccgttcacgactcactgtgctagaatgcaacaaaatgggcatcagaatttagacttgtcctgtctcttggtccaataccaaatgacagcagcagccaagagagtagtatctgtcctggcccggaaatcctaggctcttgttttttggatgctggtcacttcgattcagagtcttgtcctcgaattaagccctacacgacccatcacaattcattagactatggatgaggcatcatggatttaggaagctccataaaccaaacatcccctgaatcgcaaggatcaaaggtgcgggtcgctatgctatgcggttcagtccaaatatttgtctgttcattgaagcgatcgatttggacttgtctttagcattgttcgcttcacattgcagaccagagaaagtaggagggtaaagcctagatgcttttgcagcatttttacgctttctcatagtcttgccacggtagtatgataacggcacctgcatgaaaagcagaggccttttcttggtcggttctcgctccacttggatccgatggtcaccatactcggttgtgataagcagacaaatccaagttgattatgttcacaaaaaaagccttttttatccgtgatcctgtcggatcattcatcctccgtcctccctgtgtaccaaacaatatatccaacgcaatctgtaagattttcactatgaaacagacaaactgttaattgcagcaaga

SEQ ID NO: 86346 - DNA, 491 bp, Zea Mays
atactaatgcacattcaggtggtgaagatcaaaactatagaaactctacccaaacaggtggcaatggagggaatgtggtgctgaggactttgtcaaggacaaacgccctgccaatagcagttaccctttccaatcacagtgtctcaacacccattggaaaatcaatattggctaggtcctctctgaggttgctgaatcaagttgacgatgaaatgcatgcggtgaagacaaaaactgcagcaactaattattcagtccccccggcaacgcttcttgagaagcaacacaaaaaatggggtgattcatgactcatgctgcatgcagcaggtggaagagattctgaagaagcaagagatgaggcatgtgcatgtttttgctataactgcagcatcaaaataaagagtacatgaccatgcaacgggtgtgaagcatgggctgaaaacagcagcccagcctggagcacagacgcagcctgctattgcaggggagat

SEQ ID NO: 86347 - DNA, 371 bp, Zea Mays
attcctttaagggggaaggctgtgacaccccagtgtcacctagggttgcttctcagtactaactcaaagaaccattatttcatgtgaaccaattgggcaaaagacaccaatgaacttaagaataaaagttccactaagtatcttatcttaagaaatcatgcctaaaccatatggtgcattcaaaaaggaaaaatgttgaaaccctagaacaaccctaattgagccacttaagtagaaaggaagaaaaggggtaaaaagaccatgaaaaacatggaatcatggcttaggccaattataaaagttgaaacacactaactaagctacaataaagataataaaagtttggccaaaatagtttgttaaaaacctca

SEQ ID NO: 86348 - DNA, 675 bp, Zea Mays
cagtttatctttatattactggatgactctatctctcttaaatttaatggacaataatatttggattatctttcattccttatcctttctcccttctccgttgtcctgctgcctttcctccacgcttgtgccgccaccgtcaacccttcgcgtcgcagccaccgtccgcttcttctcaggattatagcgttaacacgagtttaaaggaaaagagagtgtgtcgttagcacgagcttaaaggaaaagagagtgtgtctgttatgcatccaaaagacactgcactatgccgttgggttaccgcagcgcatacatcggttcatgcacgagctgtattaggttgtcacgcaagtactcggtacacctcggcctcgggtcctctacgtccatgcgacgtacaaatacattcattggccatcgcgcatctaccatggccactagtagtacgtagtactacaaaatatactactagtacgtagtactacgaaatacactagcagccgccgtgcagatgatgatgaattcgccctaaaataaataaagaataaaaatagccgtgcaagaaactgggacgtcatccgccacgagtttagcgggaccacgatacgagaaacatggtacaagatcacgatgctaagcaatttattaacaaccgtgactgagacagcgtaatgggaa

SEQ ID NO: 86349 - DNA, 553 bp, Zea Mays
actttcgtccatacaatgcttcgaacggtgacatcttgatactggcctagtagttgttgttatacgagaattctgcatatgacaaactggactcctaatttctgtcaaacgtcaacacacaggctcttaacaaatcctcgaggaccttgttgaccctttctgtctgaccatctgactggggtgataggtggtgctgaagtctagcttggtgcccatagcttgctgaaggctcatccaaaattttgaggtgaactgtgtccccctgtctgacactatcttctgtggaataccatagagtctgactacttctttaagatatatccgggcaagggtggctcctctgaaggtagttttcacttggatgaaatgggataccttggtaagacggtcgattatcacctagatagaatcgttccctttttgggtccggggcagtccggttacaaaatccatgcctatttcttcccacttccattcgggtactggaaggggttgcagtagagttgcaggcttctgatgctctgccttagttcgctggcaagtgtcacactgg

SEQ ID NO: 86350 - DNA, 575 bp, Zea Mays
ggcctacatatatgaccccaactattgttagacaaccaagagctgagcaaacaattgcatacaaaagagaaaaaaatctaagtgatcgaagagtcccaagtgccacaaattgagtaaagagctagagttagccttgctttatgagaaaaagagacagagcacttgtgtgagatgtagtgtggagttgtgttgtgatcataagctttagggctaggctatcattgagttgtaaagcaatcaagatcttccaagttatggaaaaccatttgggactcggtatcacacttgagaaaataagaaggggaatcaagttcgatctttgttatcgcttgagtgagggaagggttgagagataccatgtccttagtggactcctgaacagagacataggtttctttgtgaaagcaaactttgataacaaatcatcttgtctctcttgatttgtttgccatttgattttccctctcctctctaagttcttgtttcatattgttgttaagtctaaattccacaatcctctttgcaacaatagcaagttttgaacttagctaatttccaaattaaccatatttttc

SEQ ID NO: 86351 - DNA, 1323 bp, Zea Mays
gtaagttcatggagcttacttttttggtctaattctcgcccaacttattttgatggtacacaattgttttgctttaaaatgtttgaggcaaccttatgtattatcatcgtgtcttttttttgttgttgttgtatcttctatggtgtgtgtgctcggctacctctcttaagacttggttgggagcaatgggaatgagcccaatcttcccaaacacgccgttagggtaccgtttggcgtgagatgcagcaagccgcttgggggcttgggccacagtatggtatttctgtgctagagaatcacctcgtcatgccttcgccgtattgaacgtgttccgaagtttacatgtgaaggcaacaggttccaaattttattactcctagatgccaccatctcgtttgtgctagttttggcctggatatgattggaatgtaacaagttcacgctgcatcatctagacggtctacaactggttgccctttcgaaattgtgcgctgaaaattgcacatttttccagcatgcaacctaaaacaaatgtgagcaacttatttgtccaagcttagctttggcttgtgacaagttatcacggacatcacaccttgtatcagtaggggcaccgcggcggcggtggagtgccccctacaggcggcatacagggagggggctgcattgcggttagtctaaattggatttgtcttttttttctacattttagtcttgtcgctcgacgactggctatcacgttgaagacaaatccattgtatatgtgacttggtgagtataaacgaactatgttctggatactcagttttttctgacctctttgacagagctttattattggaaaaaatttagatctagtatttattatagagtaccactactgtggatctacctaccatggaattatttcgttaactcaacagtttcggggacgttcgctttagattaaagctgtatgctgtatgtttggattgctgtagttgcaatctgtagagacaaaaacagtgtagaaacagtagaagtcgatatgaattaaagccaagtgaaatgaaaatgatccttactaatacatgcgcaagatctagcgtcattaaaaaaaactttgatagcatatgttactccaataaaaaactcttcttatttgcagcataatgctctttacgatgaaataccaacggatttagattggttgaactaggcagattctatttcataacatgattcatgacaaagcctgcaaaatctatgtttaggcccgttgacagcgatataataatttacttcacatgccatacgataattgaaccttcactagacccaaag

SEQ ID NO: 86352 - DNA, 716 bp, Zea Mays
gttgacccggtgctgaccggattttacgaagctatggaaaaaaccaacatggagaagatcaccaatgagatgttggctggaatatatgaaaactctagtgatagtgagagttttgatgtagaaagtgggaattgagatgccgaagatcggccatggagaccgagccatgttctttttggaaagtcgactattaaacaaggccagatcgaagcaatgagagggagatactttcgtgatatttcaatcgtgagggccagagggaagaataattttcctcttcccaaagttgacgaggtggtgatttttagaagcttcatgaaagctgaacttcggttttctttggacaaagtgttggttgaagttatgaaaactttcaaaatttatcttcatcaacttacccccgaagctattgtcaaaatgggggttttcatatgggccatgaggagccaaaggttagagccagacgccaggtgtttctgcaatatgcatgagttgttatatcagacgaaggcgactgggaaagagcagtaccacaacaactttggatgctacagtttcatgcacagtgccgaagccagctatcatgtgccgacatttcagaaaaaatggccaggatcttggatgcaagaatggttttatgtgaaggttgacctgagtcaaagggaggatataaaagggattattcagcgccctatatggtctcgcttcggcattag

SEQ ID NO: 86353 - DNA, 389 bp, Zea Mays
tcgtcccccacagctgcccaatttaggatttcccccaaatctgtcaagaacaccgcaaagtgtgagctcatcgcggttagctcttcacaggtccgatcacgccctcctagctcttgttttagcactcttgtgtgctcttgatgcttctcgacccggccaattgaactataccacgctagatcgccggaaatgcctcggttcatccgcagttcaccccatcaccatggacagagagattaggggctagaaccttgaaattgattgaggggtaatgatcattacgggtcgaattatgtgtcaaccgcatcggagcaccggtcattgcgttttccagctggttttggctcgccggagtcactgctccaccgccatggtcggggacctcgatt

SEQ ID NO: 86354 - DNA, 527 bp, Zea Mays
ccaggtggtgggtccaattcaaagccagtctagaaacaaaataggcatggaatagtcaccaacatcattgtacaaagtgaagtaagaaagacttaacaacaaatttttcacaacaactgcagcagaaaaacatgtcattttattcaaaaacaagctggtccacttaagcttacaaaaggtttcatgacgacacatacttactaactccaacattcataattactgcccttctcacaaacactaacatggtacttctacaagaaagtaaacctgtgtagctaggcacaactactgaaacaacaaagttaacatggtactgctaccatacctcattgctatagtagtccccatcgtcctgaggttcatagtcaattgggaggacatcatttggatcgacacactcgtcatcgttccattcatccaacctccttacctcacacttgcactcgaggcctagttgatcaaggtccttggctggacctgatgtctactaaagcctaattaaactcaagaaactttggcagatt

SEQ ID NO: 86355 - DNA, 361 bp, Zea Mays
ccgccaggtaccggtaccaaaatgttgacatcgaccaacttacatggatctgtatggagaacggaggggcagatgccatatcggggatacaacaagacacacccctacggacgacaccaggagggctagagcaacctaggggcaacaagtaaggacccctgagtagaatacaatttctgactataaaagccacctttgatctataaaagggcaggacaaccttctttctcgacacaagcacacttactctaacacgctcctgaacaatacatcgatcaacactacattggactagggccacggtctaaaccagtttaatcccttgtgcctcaactccttagctcggactcggatcctcgtg

SEQ ID NO: 86356 - DNA, 501 bp, Zea Mays
aagcttcggacaaaagactaacaagtccacaggcgtcgggggcaggctcaatcgaacagtcgagcaaaggtccctgccttgagcatcgcggactgtccggcacctacgcgcggatggtccgatgctcatgcagatggtctggctaaccaagccggacagtccgtccatggacagaggcaccagtctccacgcaaagcaaaaaagggatgcaagggcaaaacacatgtaacacacatggtcgtctagtcaaagctggtcctacttttgatcaattgctctccaggtatgctaacaagaaggtcgttctacgcaatcggccaggaaagaaaccccgaacaaaacgactgaataaaacagctcaaaaggcgacgcaacaagcttcgcctattcatcctatgatgtcaggatgctctccacccgcctactcatcgtcgatatattgccctatccaaatgtggaatggtacgacgatgaacccatggtacatgcatagtccctttg

SEQ ID NO: 86357 - DNA, 451 bp, Zea Mays
gcgcaagcgctaagtctaatctctcaaatcgatcgaatacaagcttgtatggctttggaggcgtgggagttattgcacttgatgtatatcactttggtgtagctcttgtgtctttaatgtgatgtttgaatagtatttatagccccaacaaccaaaataaccattggagaaaagctgcaaacactgcactgtcgggtggtgcaccagactgtgaatagtacatattcggtgcgccaccagaccatgaatagtaacatggcaggtgaccgctagagccctgtcaggctatccagtgtgccaccagacggtctgatgttctggttgcaaaaattaccaaagttggtgagttcactataattcacaccggacggtccagtgcgccatcggacagtccgatgagccgttggtgcactggcctgattctgtctgaggctgagcccttggaccggac

SEQ ID NO: 86358 - DNA, 828 bp, Zea Mays
gcctgatcaaaatccgttatggatagttcttgaaggctgacaagagcagacagagctggagaaggaatatcactatcccccctactacctctgtaatgccggctattcttacgaatcagcgggacttcttcttcctcttcttcgtcctcatcaaaaatacagacaatagctggtgcacggtcacacccattgggatcagcttcagcatggttacatccattgggatcaatttcggcgcggttacacccattgggatcagcttcagcatggtcacacccattgggatcagcttcaacatggacgccaccgttgggatcaacctcaggaaggaactctgctggcacttcatcacaaaccggagcagaaggaccggcatcctggtccaagcatgacagtcgctggagccgcctcttcttcttcttcttttcctcaacaggcgcagtcagacgactaacttggcgaggacgctttgggcgggtaccctcaggatttcggatctccactgttttgttaagctcttgtccaaccgtgatagccatcggttcaacatgggtcgagtcagaagattctccagccaacatactgagtacattatctatttctgcatcatctggacttgccggcatctcaaagtgaatctgtctctcatcattgggaagatcatgaaggggagcaaccagagcctcaacgtcttcagtagagggtcgcactctaagactcagaccaccatcactagtaggagggttggacacgaaattgaaatatgacctatgagatggaagattccaagcagaataggcaacaggagcaccaacatttgatatcttg

SEQ ID NO: 86359 - DNA, 537 bp, Zea Mays
aaaggggagcaccagcatttgaaaccttgcctctcaccatcaaatcaactccacacgtcctcctcagatattctcttattggtaattcgagtggggtcattaacaccagtgtacgggtaagcagggtagactctatctttcaaaggctgaatattcttgaaaacaaagtcgacaacaacagcttcagcagtcaagcctctgtccttcaatacacatatctctacaagtagcaccaccctggactcagcaagccctaaatatgtggggatttctgtccagctaggcgttcggacgtcgggctatctccctgatcgagcaggaagtgacttgttctgattttccatagtaaaccactcgaagcgccatcccttaatgttgtctttcaaaggaatgtcgagatactcagctttcctacctcggcgaagttccaagctagcacctccaacaagctgatgctgccctccagccatcccgggccaacaatggtaaaggtatttctatagcccaaagtgtggaagaattccaaggaaagcttcg

SEQ ID NO: 86360 - DNA, 453 bp, Zea Mays
attcgtcctggttcagaaaaggaattaaaaatcacaaaggacactatgcatcttatccttggtgtaccaaatcaaggcggtggaaaaccattggggattgatgaagcagttgcagcaagtaacttgaggtcagagcttggtttggctaaagacgagttcaatgtgacattgctataggatcatttaaggaaaggagaggatgatgaccttagcatcagatgtttcttccttatcttattcaaccgtctgttgtttccaactgctagctagggcataacaaaccatgaagtgcttctgatagaagaaatgcaccgtttccatgagacggattggtgccagctaatatttaatgacctttgtgaagcggcaaagaagtggcataaccgaagcaccacaaacgtctccacgacgatatacggatgctcaattgttgtccttgtaagtatagagttt

SEQ ID NO: 86361 - DNA, 1510 bp, Zea Mays
tacaattgagccctcttgagaagaattacaggatatgatgtataagactgtagcacatgtataatgaggttcaccatccatccaatatatccaagggtaattgtagtcattaacatgaaccaatcatatgtttggaaataatgaagcccagcaagagccagccttcggagctcctcagattgctccatggcagtttcatagtcccttccagatataagatcctcaatctgactgagcactaaagaaaagttcgccagtggcttaaaaggtttgaagtagagtgaactggattccttcagctctgagatcgataagggaagacatgcttaggggtaacagtatggtttgttgtttaatttggtagtcttggtcatcatactttttcattaaggaaaaaagaaattgaatgactgctgagattatagctaacagcatggagtagcctactgttatgggtgactctaattaaagatcaataatgatgtctctagcacccattcacaataccatactacaagcttataagcatggagtaggaaaattctgcagttcaagtatgtaacaaaaattgttttgaaaggatacgtgactttcggagaaactggttaagaatttgctttgtattggccagaacggcttcaacttcatcagcctgtatatagggaacaaactttaacaagcagtgttgagccaagcacaacaggtttttttgcatagcatacagttatttctgaccttccttagtttcaaataaggagtaggtaagctccccacagaattcatcgggcatggcaaacccacaagtgtagcctgcaaaagttgtgaagaattgagaaaagaaaaagggtttacttaagaaatctaaataaaattaagaactgaatatatggttgcacatggagattttcaagccaccattaggggagctatgtcagcctggttgacatctactctttcaaatccttcaagggcccagtcttttggagtgggtgtatcatgtttgtggttatctacaaaccgaaagccgtcatcaggtttctctgtataagccaggaactttgggcttctaattccagcaccccatgccacaagaggagtatctgtgtttgaagggtgtccgtctccatggcttcctgtaggtagcagtgctttatcattttggcatcataataaaggagtaatattgagactaacataacatactaacaaattaaccaataaaaatgaagcctttgcaattagtaatagcctaatgggtcaatgaccctcacccttgtgattgacccaagacagcattgcataaaccataaattgcaagtgtgcaattaaatttagtgtgctagaaagaattacatgtcaggattggatttgtcaatacaactaaagaatgtggctgtgtaggcgctacagaacataaaatgagtaaccttataggtaggtaatgcaactaattcattgtgcaatccagattgaattactgcaaccaataagccattcattttgggcagct

SEQ ID NO: 86362 - DNA, 410 bp, Zea Mays
caaggatccttgatggcttcggcagttccgttgtgcacggtggactcagggctttcaactgctctgccgctttctccagttttggctctttagccggttctgtcctagcttcgatgggctcagagtgacttggctcagacacagaagcggacccttaaattagctttggcacctcggctgtctcaatgtgcctgggtcgacgcgtcaaaacattaaccttttttgacttcggcgcgctagaagtcgccgaagtagcagtttttctcttctttccttgcttccacgaaggataataatagtctggatatacaaatatgatgacatcgaataccctgtttaacctccttttgccccgagctccgaaggcagttgtcatggtgtcatcttcggccttcaaatatgctccaagc

SEQ ID NO: 86363 - DNA, 397 bp, Zea Mays
gattgacataggagatggtaaaactccaaggccgacttttgtaaacaagaccctggagaccaatcctagaaatgaaatgatcggtatattgaaagaatattcgaattgctttgcttggaattacactgagatgctgggattaagccgagagatcgtagagcatcggctgcccattaagtccggtttcagatctttcaagcagaaagctagaacatttcgtctagaccttctcccacgaatcaagaacgaaatccactggctgctagaagctgattttatcagaccttgcagatatgcagagtgggtctccaatattgtgccagtggagaaggagtcagggaagcttagagtatgcattgattttcgcaatttaaatagagcaactcctaaagatgag

SEQ ID NO: 86364 - DNA, 473 bp, Zea Mays
ggcgaagccttgccctttgacgtgttctaccatgtcattggcacaccagccgtccgcaatccggagggtctacaaataaccaacgacgccgagggccatcgcatcgtcaacctcatcatgactgaagattggtgggccccaataaccctgttcctgcaaggatattaccactcaagtgacgtcaacgaggccaagcgcctcaagcactgaagccgggactttgcacttattgagggccagctatacaagaaggggggtcagtcaacccatgcttaaatgcgtcaccgaaaccgaaggcatccagatcctgcgcgaagtccacagcggaacttgtggctcttactcggggcctagggccctcgctgccaaggtgatccatcaagggttctactggccagctttaatctgtgccgcgaatcgagtcacgaggtcgtgcgaagcctgcaagaagttttctccccgctcgggcaacc

SEQ ID NO: 86365 - DNA, 632 bp, Zea Mays
gagagggagagagatcataagcgctagcctagctatctagctagctgataaattatcacggcctgctgctgataataactgataataaacaatacccaaccaggaacggtctcgcgtagtcgcatggaaaaggaaaccacttgtcgtccactcatgcatgctggatgctgaaccaggaggaaacctgcgcctgcagccagattcgtgcgtgcgccgcgcgcgagcatttctccgcataagctgtccaggtacagtatcccacatccgtcgtctctgccggtcctcttttcgttcgcagacgcggggctgaactccgatcctttacacgtcgaatccactctcacgtgacacttgcagcaactcgcaacagtgcttttattacgttggcagcctaaccaccgggcccctctccgcaccagatcaacagcaacaacaaccagcagatggagccatggaggggcatccctgctggcctgaatcgctcgatcgagctctcaaacgtacgtacctgatgggagggaggtgtacgccgtacgtgtgagaacgtaccgtacctgaactccattaccgtcaccgagcaattaattgtgtcctgggaaaagaagagctttcgctcagggcaaccattgctc

SEQ ID NO: 86366 - DNA, 276 bp, Zea Mays
agcaggggcctctacataaattttcctaagacacagagcccctggcgcggacggcgggttgatttcatttaatctgagggtctcatttgcaaaactggctcaacgaaatggtatcgagagatcctgaccgcccgatctaattacagcggacgagattagatagcaaagggttatgaaccgtatgcaatccaacccattagatcaaaatacaaaggctcagattttaaggaactatgatcccactagggcggtccagatcagatttaacggctcaga

SEQ ID NO: 86367 - DNA, 663 bp, Zea Mays
aacccagtcatcatccccaaggcgaatgggaagcttcggatgtgcatcgactacaccagccttaataaggcttgtcccaaggacccgtatccacttccgcgaatagataaaatcatggattctacttccgggtgtgaccttttgtctttcttagatgcctactctggtttccatcaaatccagatgtctagataagataggaagcataccgcttttgtaacagtggatgggctttactgctatgtcgtaatgccttatggtctgaaaaacgccttgccaacatttgtgcgggcgatgagtaagacttttagggacctgatcagagatagagtagaggtatacgtcgatgacatcgtgatcaagactaagagatggtcgaccctagtggaagacttaaccctggtcttcgacaggctgcgggcaacccgcacgaagctgaacccagacaagtgcgtctttggtgtctccgcaggaaagttgctggggttcctggtttcgtaccggggcattgaagaaaacccagagaagatcaaggcaattgaggcaatgaggcctccgtcccgtatcaaggacgtccagaagcttacggggtcattagccgcccttagccgcttcatttcaaggctggctgagagggtgctacccttcttcaagctgttgcgg

SEQ ID NO: 86368 - DNA, 397 bp, Zea Mays
tgggaatcaggataaagcagggaagatagttgatatggagaccaatgagaaacaagtgatagtgtatcagtggaggtggtataaaaattaggggagcaaatcatgcaaccagccacaatcacctatatctccagtcctagaccttccctcagatctctctccatcaagctccttgcctctacctgaaatgggtaatactgcaccttctcttgaaaatcttgatttacctcttgcacaacgtagggaatatagagtcaatgctagaagaccaccatctcgttttggctttgagcatgttagcacgaaacatgatatagctaacttcatgtcatactgtcatgtgtcacctacatatagaaccttcattgcatctacagatagtgcttactctaaagga

SEQ ID NO: 86369 - DNA, 702 bp, Zea Mays
tagagtctgacgatcacatagaaaaggttctagagtgagaaacagggcatcagactagtccaacggtagatgtcacacaatacaagcatacccgatggtcagtaatgtctagtgatgacatattactgacacaatagccgttcaatagccgttgagatgtgttggacccttacatattggtctaatgatacacaatgaggcatgctgtgtttttaatagctagtctacgccttggggctataaataagactcaagtcaaccatttgaggaatgtgggatccgaggaacattgcaagtgagttgacacttatttctagtagctctagacacttaagtacctaaagatcactcggtgattagcgtaggtgcttaggttagttagaccactttatatagtgtttgctctaggtttaggcctgacattagaaatgaggctagacactttttaccccttggtgcttgcatgcaccagtatattagttgtattagagggccttgtggccttacgatatcacaccaaccatgtttatagtatggcaaacaccgtgtactagagggaacaaggtatgtggggttttagtaagaaacttcatattgaagaaggcagacagcatccgggagatgccacacccacaccaaagcaccacttgcatgtgttgaagacatgaggatatccatgaagttacccgactgaaagcttgg

SEQ ID NO: 86370 - DNA, 301 bp, Zea Mays
taatgccagcatctactgagacaagcattgtacctgtgtcagcaccaagaatggttttccctgatcttggcctcacacctccagttacaaagaagagaaagagctcatccactacatcaaaggctgccaagaagaagaagagctcagccatgcctgttaggttggtgcaatacttgtttgtacagcagtctgttattactcctaaccttcactcatgcatattattcttgctacaagatctggacaaggctccaaccagccagaccctatgcctttgtctatcatgatgccatcaatggag

SEQ ID NO: 86371 - DNA, 879 bp, Zea Mays
gaactgcggatccatggcaccgactgatttcgcgtggcgggtgaagtaatggaactctagaacgccgaggatcgacggaatctgataccaatctgttagcaccggttacacggagcagaactgaggaagggaatggggtttcgtggagaagaagaacaggaggtggaggaataaggataggcttcgataggtattttcttcttcgataaccattcctccacgtttcagcagtataagtatttacttattacatgggcagcactggccctcatttcacccactctgggccagacagaaccacattgggcttaagcttcctcttgggcctcgtagccatgccttggtgattgccagtttcttcaacagccttgtcttccactattacatctccttgtgtgctgacagatgtctgatattgccaccagttactccgatgattctaaggcccaagaactgctaacagcgctgtctctttaacccggttcagtgccacactttactttgcaaaatgggttgcttcgttacaaaggcagactgtatgtaggcgatgttcctcatcttcacaataagttgattgcagcctttcatgattccccagtaggtggtcattttggtataccagtcactcttcgacgccttaaacaactctttttctggcaaggaatgaagacaactgttacaacttatgttacatcttgtgagatctatcagcgtgcaaaaccatatcgttctcactatccagggttgctgcaacctcttgaagttcctgttgcttcctagcgtaccatatcaatggattttgtcactgggttaccaaagtctggccatgttgattgtattttggtggtagtggataaattctccaaatataggcacttt

SEQ ID NO: 86372 - DNA, 411 bp, Zea Mays
gtgcagtagttgaacttgcagtaaattctgtaataagctgtaagaaaaatacatgcgcaatctgcttgcataactctagtggccatctttttgcttagatttcaaccagacaaacaatgctgatgtgcttcaagcttacaagcagcatatacatatatgagagctcagcgcgtgcgtgtagataatcattgaaacacaattacttggttcacgcgggcaggtgaggccagctgacttagggtcataacaaaaatgaaaatcagacaaagtccacacaactggcacacacttttttattgaaaaaaaaaacaatacagttttcagtatttattcagtgcaaatccattattggacagccatgacggtgcatcaatgattatctgtcccatacatccaactaatttatctcag

SEQ ID NO: 86373 - DNA, 496 bp, Zea Mays
atttaagtcaaaagaggatggttgcgggggttggtgaaaccatatgtgtaagtgctaaaggtagcggtaaggagaaaagtgtgatttaagtcaaaagaggatggttaattggattaatctattttaacttacttccctgttactcattattaactaatgttttaggggcatgagtcaatacagtcttaatatattcccttcaactttttaattaacacatttcctttctattctcgattcactactatgcatgcatgcttggatgaacgtcctctcatcaatcataggggtgctcctagggcatcccttctatcatagtgttggcctatatggcctacttatatagccacctatctaccccacctttcgtcctttgtctagcgttctagtcctaacaacccaacactggtttctaagcaagttttatttttgaaagcttggtgttcataacttattgagttctctgtaatggtattcgctccgataccagcagtgg

SEQ ID NO: 86374 - DNA, 424 bp, Zea Mays
tcaagtcctagaaaaccctaaaccgatggaaatctagaagatgtagtttgacgggtcactgaagctgcattagtcgaaggcttgatcctctttgtcgccccaaaggagaacaactcaagtatgtgctacaactcctcttcctagtatcaaacaacgtggcatagtatgacgcattagtacacgggctacacatcgttgtttcacatggcatgaagcagttaatggtatatggtgactcttttgtggtgataagtcagatcaacacttggtggtcataagccagaacaataaagactaggtcttctcgactaattatgtgggcaaatactgtgtcgctgtccggcaaatagaagataaatttgaagtcttggagttccaccatgtagaaagggactataacatagcaacaaatgcattgtcgaaa

SEQ ID NO: 86375 - DNA, 503 bp, Zea Mays
gtgcgggttacttctagcctttgggctttagctagaggggatttccttccatgaacctgtcatcccctcccgctaggcaacagaaagtctgttctgggtaccgtttggccaacacggtgatacgaaaccaagtcaactaaaaaaacatccagaataaaaaaacaaagaatttaaataatatgtggtggatggagcttaatcgtgcatagcagttggtgtggacagcggccatcgaattgaatgtctgtttgcctaattatattccattgcatgtaaagttaacacttgcttgttagctgatgggctgcctgtgattgaatcggcaacaggtaatctaccgacaatggtaaatatagacaatcagtcgaagatggatgaaacagttcacccaggcagcacagggaacgtgctttacgagcagcagaagcaacaacgcagcgctgcaacacgagcatccgtgagctgttgaaaccagatctcgcctgacatggtttgaaaatgcc

SEQ ID NO: 86376 - DNA, 1082 bp, Zea Mays
gtgtcttctgttgtacttgagcttctaatttgcatatgctaagcttcttcttagttttctgagttagctccttttggcaggctgagttggaggaaaaggtggcaactgtacatacagacatagttaatcatgtaagtgcacctagcagttcagtgaatgccattggtttgctacttcatgcttgtgtatgttggaagggaaatgtatgcagatagatataaattagaagtttaacaggcaactggttctggttgtttgatcaactgaaaatgagtgctttgtaactcgtactgaggacatagtgcttttcatgtgttagaatatagaagtgtcatggttttgggaaccaggggacaataagatttgtgttcggaggagagaatgctagcgtggactcaatctgaatggtgaatcgtcgggactcgaacggtgggtttgagatagtgggtttatactggtttagcctttacagtggagtctcgcccttgacgagaaaatagagggaaagagagaggcctatctccctaggtcaacgagctaggtcttctttcccgtgcatggccgtacccccgatatggtgttgtccatcatgttggtccctgtagcgagtccgttattgacgccctggtggtagtacgtggcgggtcctgcgagtctgtcctagggcgtgatcatacgcggcgtggtttcgcccgttgtatgccctgcgtcaccttccatcatacgtggtacatacgctcgttatggtgtgttgtcccgtcttttccaatatgtgggccactgttgagacccctgtgctgaggtctcccatgactgaggctgaccgaccttacggggcaatcgggggcatgtttgaactgtttgcaggggcgtacaagtgtgatgatgatgaacccttggcgctcgtcctgtacagtgtgcgcatgtccgggcgtggctaggtgatggcgtgtcttgtcgcatctggtgtgggctcgtaccactaggttcggattttcgcctcgcgggtttgttcagtggagacttggttggccgctccgcctcgcaggcttgctcggcggagacttagttggccaccctgc

SEQ ID NO: 86377 - DNA, 441 bp, Zea Mays
cttgaatcttaattcatatccttgagtgttgctaccaaattaattctgcaatcctttgagcacacttggcaagaactctctccctacaactccgattcgattatctctatctctaacatctagcttggcatctagtttgtttttaagtcttgaatttttagatgttgcttattaaaccccctctaggaaactatcaattggtatcaaagcctagctcttaatttgggtctaacaacctaaagagatgtcagacaagggatcccacaagagcgaggatgttcttttgggatacaggctcaaggagaagggcgaagaattcgcctactcgggttccaagtcctccaagtactacaagaggagagatggcaagaagaagaagatcaagaaggtggtatactatgagatcgtcgcctcgacatcaccatcgtcttcaagtagcag

SEQ ID NO: 86378 - DNA, 374 bp, Zea Mays
tttgatatagaccccacttgtttcgggttatggctagattctagccattaatatcggcttctggtcaccagccgcttcttagtctgtttatgtgataatcatttctataaaaatcgctaaaacaacgtgaatacagaatccaccgagtcgtcgccgaaacaacgtgaatgtagaatccaccgagtctccgatcttcgtagaccttaaatcatggagacccctccatttttctttgcatgtaggtctcacggtatctagattcttgttccataaacgcaaaattttcattttttctcttttccgaattagagcatctccaagacttccatgaaaaatgactggaaaattagttttaaaagacatctaaaaaatca

SEQ ID NO: 86379 - DNA, 514 bp, Zea Mays
ttttgaaatacagctaggggtaaaacttcctgaggtgttctatgttccatgagttcccaatttctgtgccgtccatgtgagtgagacgatatgatcccggccgagtgacctctgctactatgaatggtccttcccatagaggtgacaacttgtgccgcccctcccccgttagaattcggcggaggacgaggtctcccactgcgaaggatcgacgtcgcatggtcttatcgtgatagcgcctcagagtttgttggtactgtgctgattgaattaccgcgttcaaccattcttcttcgagtacatcaacatcctccagcctagtagcctcggtttctgctatgctttcaaagatcaaccatggcgccccaaacttgagatcagcaggtagtactgcctctgacccgtagaccatgaagaaaggagtatttccatgcagagctcgactaggttgagttcttaggctccaaacaacgtagggcaactcccttatccactttcctgcgaacttttcatt

SEQ ID NO: 86380 - DNA, 300 bp, Zea Mays
gttcttataactcaatattactgagaaaataaataatgtttatgagccgatattgggtgttattactactgttatatggaatcttgtgaaatacgaattgactagattattccgtaatgagtatgacgaattattaccaagggattgctaggttattaatgggccatattaatgttattactgctttggacagtgatggataatgattggttattatcgaggtgtgttttggtactgagtgatacacattgttattacatatttatttctgagttagtgattcagactgatgggtcatta

SEQ ID NO: 86381 - DNA, 507 bp, Zea Mays
gccgccatattgtagacggttcaactcaaaaacacgattcaaccgaacattcgaaccacagatttcccaactccgcaaggtctcagtcttcggcacatttcaccctacaatccttgcggcctcggcctccacttcgcgcacaaacgcggtcgggttccggccccataaatccacagcgaaggatggactttgcaccaactaatcgcccaaggtcggcatccggcggggcacactttgccaagtacccagccgtgtgccaagggccacagtccatagccaataaattcctcaaccaaatcatgcccactactcatgcgggcagcgtaccgaagggccccttcatcctcatcatcctccgccacctcgaatcgagggaacaccacataacagtgagagcacagaatggccggagggagcccggacagatcttcgacttccccataagaaacataaaaccaaaagtcccatcagttaccccacttgttcctggcacaagggactatctcc

SEQ ID NO: 86382 - DNA, 833 bp, Zea Mays
caagactcgacgagtcaatggtttgcactttttgttgtgaattgaaatatacttgactcttgtaacatagtttaaaatggtgcacgccttgattaatcatctagtatatagctcaaaaggtttcaaaacactatattattgtgcttcaaaatgttttatcaaaagatgcttgcatgatatggttattatattgcccgttgatttgttgctggccatatatgacaagagtacttgtccatgtcctaaactagaactacatattgtgtagcataactctggtaatttggtgggatgcaacagtaccacatatttgtaagtggtgtcacatcgtggcagtatcgcacaagcacacgacagcgccacatcttgaactacaacaacagtttggtcaacatagtagttgtgttggctcactttttccatctacccctaaggggccatagtaaatccatctctagcatctgtctccctcacccattatttcgctatgatgtctctctctctctcttgccactcgcctgcatcgttgaccttactatagcgctatgtaccatcaattgcatgtcactcgttgactaaattcatttgtccctagagtgtgtttaaggttgtgatcgagtcgttttcttccctctagtcaacattccctcagtttcaaggtgaaaaccctaaccttctccatatatgtcatgttagctcaattcttggtagttttttgtgttagtgttcgtatagacaagtagaagcatttgtgttggttgaatcggataggatggaagactatctagttgatttggtaaactgatgcaatagtgccacataaccacgcgata

SEQ ID NO: 86383 - DNA, 352 bp, Zea Mays
ctctcagccaggaatagttgttgatcctaataaagtgcaagaggtgatgaactagaagccaccaacgactgtccgtcagattcggagctttctgggattagcaggttattaccgaagatttattccggatttctctcgaattgtgaagcccataactgagctgttgaagaaagaagccatgtttgtttgtggtcagaagcgcgaagatgccttccatgcattgaggcaacatctgaccacaacaccggtgttagcgcaacccgacagcagcaagccttttgatgcgtattgtgatgcctctggcactggactaggttgtgtcttgatgcaagacaaccaagtcattgcttac

SEQ ID NO: 86384 - DNA, 606 bp, Zea Mays
ggtagtggctcttaccattgtgcagctacacttcagtggtaacctccgcagtgccatcggcttgcctaagggttcgatggtggcagatcaagacctatttacgagtaattttgatgccaccatgaacgttgtactcggggtagtgttcgaggaggaaataatccacaaccttatgtagctctgcttgtgacctgaccgtttcggtattgcgacatgcatgggtttcgggtcccctagatcctgacttgtctcaagattttccttggtcatggggcattttttgtgcagctttcacccgtctgccatactcgtgcggggcgagcccccgagtctctacatgatgcagagatccgtctaggggggtagtctcgtcttttaaattttactctccctcgtgcattcccttcacgagaatgatgggaggtgagctgtaccacactttcctcgatggactagtaatgacacttgttgagttacaaatgggtaatccgagtgagaccctagtttctttgataggatccaagcatggggtccgctggagactgccctcatactcctgggcaccctcactcatataattgctgattttgttcgacctgaatcgac

SEQ ID NO: 86385 - DNA, 455 bp, Zea Mays
cggcttaagtcaggaacgccttaagttggtgtgacatgctcacgcttacacgactcagggtgatcactatgccctactaaaggagcaatcggattaagtcgggaatgctttaagtcggtgcagcatgctcacacttacatgacgcagggtgatcactatgccctactaacggagcaatcgacttaagtcggaaatgcctcaagtcggtgcgacatgctcatgcttacacaattcagggtgatcactatgccctactaacggagcaatcggcttaagtcagaaacgccttaagtcggtgcgacatgctcacgcttacacgacttagggtgatcactatgccctactaacagagcaatcggcttaagtcggaaacgacttaagtcggtgcgacatgctcatgcgtacacaagttagggtgaccaccataccctagtaacaaaatagctaactcaaat

SEQ ID NO: 86386 - DNA, 312 bp, Zea Mays
ccaatttcaaatgtgtgcgagttatcacttattctcatcgagttgtgcgaaggtttttcaaaagtagatttgtgtggaggtgtttgcgagatcaaagaaccgaaagtaatgcataaggacatgagaatttagactggtttgggctctcagcttgagataatacctacgtctagtaggtggtgattgttcccccttcctctgacgtcacattccatcttttatagatgaaggggagaggcgattacatggaaactatctagctattttcaaatggaaatacaaacagaaaactactcttcctataaactagaa

SEQ ID NO: 86387 - DNA, 625 bp, Zea Mays
gcaaaagtgaccgatagatttagcaaagaaagagatgtctacctggaaggctcacacgagaggtgacgatccaggcaggacgggagacggcacacggtcacacaaggtcactgaaatgacagaagaggtgagcacgtattagtcacatagtcataagcatatgaaatgtgaataaatacatacacagagagatatggcacgagacgggacgatcaagaagtcaaaagatgtgaaaacgatgtttgacggataaatagtgccataggaggtttggaatttgaattgaggcacgaaacgatatgggatggagccgatacttcacgaataggtttatataggtgaatatgagtgaagtgtgtgcttggtttgaaattaggcgaagaaaaagggatttgggcactcggctcggaaacgatcgctctaaacgggaaatttggtaaaatttaagcctgggatctcggattggcgtgaaatttggcaaggatgttgctggaagtgttgtggaggtgcctgaaaaatttgggttcaatttgagcaagttgggctagtttgggcatttcaccgagcacgtggtgtgcggggagttagggtttcggtgaaacggccatttgaggagtgaaaaccc

SEQ ID NO: 86388 - DNA, 751 bp, Zea Mays
ttcatttctatcacaaaacacacatcttttattcctctgccaattctgtcttggtaagttatctttagtgagcacaacacccacaaaaatctttatctttaagggtaattttagattccaaagaactttgtgctggaaaacataactgttgttcatcagagttctatacatcgattgaacagtaaactgatcatatgaagttaggttccacctaactgaacatacacaagacgctgaacaaggttataccacaaaatcaagttttggcccactaaagacctacggaaagacacattaagaggaacagatctgaaaacattggctactgtggcacttttatgccgaacaatttggtataaagatgggtactgaaacatgagagattgatttcctaaccatttgtcttcccaaaaccttatttgttcaccattcttaagggtaaaaacaccaaggcttaagaaaagacccttaactctcatgagccccgaccaaaaatgtgagccccctggcttatacattactttagatagagtataattctttaggtatttttttcgtaaaacatgttgtcacatgccatcctcattaatccacatgaagagccacttgcttagcaaacacttagtttgaatgtcaatattctgaattcctaccccccttgttccttaggtttggcataccccatctagcaagtctatatttcttcttatgctcttctccttgccaaaagaacctagatcgaaagtaatca

SEQ ID NO: 86389 - DNA, 544 bp, Zea Mays
cgaactcacagttgacaacgacaagcagtttgacagccaagacttcaaggatttctgcttctccattggcaccaagcttgccttcgcctcagtatatcacccgcagtccaacggagttgtggaacgcgccaatggaaaatttttcacggctgtcaagaagatgctcctcgacgaaaaagggcaggtgggccgatttgttacctgaagcggtctgggcgctaaacacgactgagtgcagggtgactgggttcacccctttctgccttctatatggatcggaggccatgaccccacaagaaataaaacatgggtccccgcgaacagtttcgtcagctgtccccgacgtggacgaacccacttcgaaggatcttatcgctggagaccgcgtcttcgctctacaggctctaaataaataccaagcccagacaaaagcatggcgcgaccatgcagtcatcccaagggaattcagagaaggggacctcgtactcgtccgaacagctcggacagagtccaggggcaagctggagcccaagtgggagggccc

SEQ ID NO: 86390 - DNA, 749 bp, Zea Mays
attttccatcgcatgagattgatgctaaggctgccacacataactcatcggctacaaatgggcattcacaagcctagccattctattgcatgcgattgccgatgaagtcatataccgagcaaccatagcctcctccaccgatttgggataaaactacggttttgcacaacgtcggaccatccgagcttatcctcagactgtccgaccccccaacggatggtcccatcctttacgatagaccacctagagccgtgttagggtcatcgtactcttcacaaggtctagccgaaaatgctcagattgtctacacacccggaccatctgagtatcccagaacaggatgtggattatcacccacaatcttttcacctgccatagcggcaatttcccctccctatagttcatcgagggtgtagtatggctccaccctcacatgggaacaaacaattttcgagcccgaggaggccagacagaattaacacacaatatggggcgactagaggtagtatgagcatgccacaaaatcgcatacctcattatccatgggtaagaggttggcataatgaggcccggtcacatgctcctttaggcccaagggtcgatgggctactgctatatctctattgatatagtaagagaagaaatagctaaggaattccaagataagcttcgagttagtatgaccaacaagggacgatcatattggaaaccatatgacaaccaattcgacaccatcccatatccacaag

SEQ ID NO: 86391 - DNA, 550 bp, Zea Mays
attccgcatttactttgagcattttactttgtgcaattgcttagttagtatttgtagtaatgacttagggttgttgcctatctagtagtatttacttatggctagtagtttgggtgaagttgggctcatgcttagggtttaacttttgttggaattttagaaaagcccaattcaccccctattgggcatcgtgatcctttcagcagcaataacacgcacgaaagcaaagacaagagtgcaacactaaaacgacacagtaacagcccagaaatgcgctcaaataatctctctcgaaccaatgaacaaggtagtcattgagtcttagagttgtagtgtgcatttgtgatgtttggggtaccaggagagggtgcataggggctccttttatagccccaagaggcataggagtcgttgccttctccacaaggaagctggaaaacttctctgtctactggctcactggacagtccggtgcgccactggatttcataccaacaacggtcgccaggcgatttgattgttcggtttccttttccggcgtggtaccgga

SEQ ID NO: 86392 - DNA, 595 bp, Zea Mays
acagggccggcctgccaatgatggcattgaaagggaggttaacctccgcaacgtcgaactggacgttctcagtgcggaagttctcctcaatcccaaatgtaatcgggagtgtgatgctcccaagggaatacaccggttgagggcccactttggagaatgggcgagagggtcccagtcgggatcctgggatctgcagctgtttgaacacagcatgactgatgacgttgagcccagccccaccatcaatcaggacatgatgtagcttcatgttggcgatgacaggggcggtgatgagtggtagtatgccggcccctgccatgttttcggggcagtcggatgccccgaaggagagctgatgtggggctgccttcgggacccctgggatcgtcgaaaggacctcgcggcgcagggacttcacattcctacaggaggtgagctcctagcttccgccatacatcacgtatagcttcttgcggcggtcgttgtcatcaccagagttggagtctctagtgaggatgtccttgaggacttgctcgggggactgatacccgagatcctgttctcccgcggccgcgccaccttcatcggccttctc

SEQ ID NO: 86393 - DNA, 529 bp, Zea Mays
gcagcagcagcccgcccggatacgagcaggcggaggttagttcgcttcgcacgacaaaacctcgcccaccttccttccttccttctgcaagatttccttccgtttccattcgaactcgagcctttcatgatctttcgatctgctggatcccctctccgcgctctagctagctagtgtgagtggcggtcgtccgtagtttcattacactcttgtcacaagaaaacaaagcaaagattttgacatgcagtgcctgcaggtttagtgtttcatcagctgtagtagcagtgctcatgcatgctacagtcatactaggcattctcagttgcagagattgtggcgtgatgatgtggactcgcacgctagggaatactagagatcatggatacctgggggagtgggaagacggggagtggtctggtcgtgataggaaggcggaccactttccaaagcccgttgcgtgcgttccgcgccggtgatcactgacaacggatagccttgtcaccttgcagtgagtgcaggttcattttct

SEQ ID NO: 86394 - DNA, 760 bp, Zea Mays
gttcttgtttgtattggaaagtaaaaccaggatttcaaccctaggccaggcacacatgagaagagtcttgccacctgactacctgagtcctcattcagtttatcattgacgtcttcatttaggctttaattctatccttacccccacagacatcttcagttatccccaaccccactggtcaacagcaacaaccatttaatagtgcattaggatattattccaggttgcaggccaacactgaatttgttcttgctcatactgtcaagggaccaatagataagtattcactgcccacaaaatagtccaaaaacctgggtattttcaatagagagtaaggcttatagacctcagttaggcacatcgactctatctcaatttatactaccatatgaagtagaacatggagatagggaactacttcagaatcctacatcaacactaatcacttgcaccagccctgctgccccattgcacacctccctgtttaagcctttggaactcacaattttatatggcaacagaccaatctcccttttctaaagttattctctaaacatagttctatcaggttgcttcaaaaatcccaggtcaaaattacccagaacagaaactacatgggctcaaaatgaacctagctccttgaatatttgtttcagttaactgaaatagcccatagacagcctgacagaggaggtattgatgcattttactccaaagtttatacaacaccaagtccacctcactttaggatacttgttcc

SEQ ID NO: 86395 - DNA, 398 bp, Zea Mays
tgggccggtaggtttgtgggggccgcgctgtgtctgtgcgcttcttcggttactctttggaaccacttctctctcagacagggccacaggagcaaagcaaagtaattgcactgtgaaaatgctgtcacggctgacatgaagatccaaacgggcaagccaaatgctgccgcaagatatcctgccggttctttttattttccctccttccatttttctcttttgtgcctcggccgttgaatctttcaagagctcgtgctgggcaagttcggtcgatgtcggctcggcgtcttgtgcccctacaatggctggcgccagcagagctctcagctgcgccatctctgtgtaaaaccgagttaaaatccccccaagaaattcatgtgggcgcgcagctggctttt

SEQ ID NO: 86396 - DNA, 1142 bp, Zea Mays
gggaggaggagatggggggggctagggtttgatgtgtggctgcaagtgcttgagaaaggaggagatgggaggggggcggcggccaagagggtagggaatgggggggctgcacaaagaaggggggttagggggagggcggctagggttatgggggttagtgggccgaaacaagattcgcggcccaacacgcccacgcggcggctcccgaccccgatgcaagcgcctaaccaaaaaattctactgccctactggtgaatgtttttcctcaaattccaaattcccaaaacgcaactaccgaaagagaagaaaaaaacaaaaagaatacccgccaacttctcttctttgcaaaccgggtatcagactctaccccccttaaaaagaattcgacctcgaattctgatacttctatcggaacgacaaaaggaaagattaatgaatcaacaacacttacccacaacaaaaagttccggatatttctgccgcaccaactcctcaagttcccacgtagcctcgcgcttagactgattagtccataagaccttgacatacttaattgatctcttcctcaatacacgctccgagaattccaatatacgcaccggacgacactccaaagtcagatcctgctgcaccgcaattggtcccatctcaatctgatggtccggatcccgcaagaacttcctcaacatagagacatgaaaaaccgggtgcacccctgccatggaatccggcagcagcaagcgataagccaggctgcccactcgggccaaaatagtgaacggtccaatgtatctcgggctgagctttccagagacaccgaaccgaacaactcctttagtaggtgataccctgagaaggacttggtcacccacagcaaattctagatcccgcctcctcacatcagtataactcttctgacggctctgagctgccaaaatattctaacgaatttcccgaaccttttcagaagtctgctaaacccaatcaggaccaaccagggatctctctcccaaagtctcccagcacagaggggatatacaccgcctgccatacaaagcctcaaatggtgccatcttgatgctagcctggtagctgttgttataagcaaactctgctagtgcaagatgatcctcttagctacc

SEQ ID NO: 86397 - DNA, 552 bp, Zea Mays
taattatagaaagactaaatatggtagtcagcccttgatggtaggctgtccttgattgtaggcttgtacgcctgtgcgattggctgtgagccacctgacctcatacattgtcgtggaatagattgatttattctcacaattactctttcaaaagcaaacttcaggaaggtaatctcaccgcgagtttgggcacctgctgagctgtccacgttaagcaatgggtcagcggcggcgtgggaaatccggtgagaaatctccccaatcccagtactctattccatatcccgacctgagctacacgttgaggataccaaggcgaatcggtttaggaagctctcaccgtaagatgccatagaacactcgacatcgatgtgaggtggatctgcggcgatggtcatgttcaacggcgagcaattgctgcccctccggtgcacgtgcacttggtggctcctcagacatgatcggcgctcacaggcgtggaggcgaagaacgacgatggtggatcctcgtgcactctccggcttcgacctgctccccctccctcaccggctc

SEQ ID NO: 86398 - DNA, 335 bp, Zea Mays
tacaaagggggcgtagggtaaccggcggagttaagcacttcccacaagatggaaggaaaaccatcacgagaaaggaagtcagaactgaaacgagagtctcctccactggcgggggtgggtgaattcatctgtggaagggaatcaaaggtaaagattatggtggaaggaaaaagaaaaagagagcccggatggttttaagaaagggggttagctcaaatttttaaattcctctttgcgttttataatgcatgcatgctggaagaaacgttgcctctcaaaagaaaatagggtgcctttttagggcatccttaaaatataagtactggcccacgggg

SEQ ID NO: 86399 - DNA, 283 bp, Zea Mays
gtagctgtagctgttcttcgactaagatgtcgataacttcaccatcttctattgcgtctttgccctctgatggagggaagcctggtggtggtgcttgcagtacgcctccggagctgtaggtgcgtagggtgccttcgggggtgggatggtcttggcgctgtcttttgctgacagcttcatcttcgaaggcctcttagggggtgttgtccgcgagggccttgccttttttctccgccagtagcgctgccttcgctgcttcgtcgatggatggggctgccttcga

SEQ ID NO: 86400 - DNA, 362 bp, Zea Mays
gtggactcatcaccatactcataagcttttcccttttcttttcgtctgccttaatgtagaaccattcacttgtccagccagtgggccacttggtccggtagccaatcacgagggcctttgtatccttttggtatgcaaagttatggcatccaaaatttttatgcaaaccatcagcccttgcctttgtctaataatgaaattcatgaacccggcaaaacccttcgaaattagcactctttccctagcttcggagtacccagatgtaaatgctaagcctgacgatagcgttcggggttagctgatggagatatatctcatatttctttaaaacccccctaccatctcgtaaagggggaaccgaa

SEQ ID NO: 86401 - DNA, 843 bp, Zea Mays
cgccgactgcttctacaacattcatgaattatcttattagacgaaggcaatgaggaaggaacaatatcataacaattttggttgctatttcttcgtatactgttctgacacgaggcggcatgtcccaacatttcgggagaaatgaccaggatcttggatgaggcattggttctcgaggttgtccggcggtgccggacttctacacggtagtgtcaaaccacgacagtgctgggctcagagcggcactgccgcccagggatttaaggttttcttgagctgaatttttataggtagcctattcacccccctctaagcatactagatccttacaagtggtatcaaatcctggttcctctacaacgcttcatcacatgaggaatggctacgtctagacaaggaaatgaagatgtgagtgatgggattaatctctttagggaagaatcaagcaatgaaagcatattagcaataagctatgcaacacattatgcagaaatatctgaggaagaaagagctagaaggaaagaagagcgacgtctgagaagataagcaagaaagcaagccaaagaattagaagaagaggaaaagcttattaggagagcagcaaggagacttaaaagacaagagaactgagattggaagaagaagagagacaaaagaaagcagaaaagaagaaaggaaagaagatattgaagatgaatgagtctagtagcagtgatgatggagacgatgacaagtattatcaaactaataagagtggcaataagaaagataacaaggacaacaagaatgactatggaaaggttcccctcaattataattttttatgcctaaccttgaccatag

SEQ ID NO: 86402 - DNA, 754 bp, Zea Mays
cgacaacctgcaggtctactgcaatacgttgcatgaggaagtccatatactatactcacaattacaccctagtgtgcctgcacaccctgctgaggcggaagccggaccatctcacgtcgcgggacgcacgctgggtggggagttagacctttttgagccccctccttctttgaggttggttgacgtctggactcccacacctgacgatgaggctgccaaagtaacggaaagcaggactaatggtgtaataaaagtagagtagtgtattgtagggtgtactgttgtataataggttgaacttttgtataatgggtaatgtatcctgttatgtaatatcgagtctgtatcattactttttatagtaatgtaaaatggaaggtttctctggcacattatgtttacttcaaatgttctttgccatagatgccgaccaggactcgaggacaggacgcagccagaacttctgggggaagggatgttaccccaaacccacctccggttcctcccaccttagccgaggcgattgtcgccttggtgaatgacaccgcagacaatacccgcttccttagggaaatggtgggtcaacagcaattccagcagcaggcaggaaggggatatcagcaaggcccccgtgaaactacttatttggatttctcggaaacccgtccacccctattcgtcaaagctgaagatccactagaagctgatgagtggatacgggttattgaacaaaagtttggtcttctccgttgtt

SEQ ID NO: 86403 - DNA, 463 bp, Zea Mays
gtcagatcgaacaaatgtgagaagctatgaaggcagtacgaagccaccagtgcacatagaactttagatcctatacaactttctaaagcaccttgatgctttcgacattgtggacctaatattgcattggtagctcctggtacctctcatacctaatgatttctctgttagctctgatggatcatgggaaaaagaagttatatttataggcaacattaataattgaagtcattgtccctgataaagtaagctactttcttaaatccttggcacatcactttcacttgtggtatattccaatgtaagaataaaatgagaccaaatgtatacaaggagctagttggagatatacaggcgtacacatggtgatttacatagcaccgacaaaggggatacacactactacattgatgggatcagattaggtatctttcccatcatagaccatgtttgactatactcg

SEQ ID NO: 86404 - DNA, 424 bp, Zea Mays
ggaggaggcatcgacgcagcagcagcagcagaaaccggtgctaacggaggccatgtgcgacgagttgggggtctggcacgtctgcttgtcaatgcactcctcccgggaggagttggagcaggcgctggggatcctcaagcccaaatgggttgtttacaccatgtcgtcgtgcatggcggtggaactcagctatgtgaggaagcactgctccctgtcccaagttcgaacctgacgatcccctctggaagttgctagggatatctgatggaatgtctactgttaccagctcggcccaggcagtgctgctgacagtagaagctgtcgagaagctcgaggaagtgttcaacgcttgtgctccctctaatgatatcagccaggcactggaggagggtgcagaagcaacagtggttgatttcgaggtcag

SEQ ID NO: 86405 - DNA, 488 bp, Zea Mays
caagtgaatccaaaccacgtcctccggtgcaaataacactttcttcctatgcttgttcatacttgcagccttgcgcactgctttgagcttaattgcttcattggtcttctcatgtatctttttttatataagcagcacgcttggaggcttccatattggttctttcattcgttggagctggccaatccttgattgctttcaccttggattcatccacttctattccctttcctgaaacaataaagccaagaaacacaacatggtctatgcaaaaactacacttctcaagattagcaaataatttctcctttctaagctcatctaagacttgtcaaatgtgtttcgcatgttcatcaaaagatttgttataaattagaatatcatcaaagtagacaataataaatttttcaatgaaagttcttaagacatggttcattaatctcataaaagtactaggagcatttgtcaaaccaaatggcatcactaac

SEQ ID NO: 86406 - DNA, 553 bp, Zea Mays
cgccggtgacctccgtgcctggattcgcgccggctgccacgattcatgccctgtgatgtgtggaattacgatcagagtgaaaagatcttcaccgtggatgagtatgggacactgtggccgctctgtcgcctcatccacttgccggtgacgtggccgagcggccgtcatcgaggtgtatgtcgtttgccatgatcgcgccatgtcgtgaccctttcaccacgtcgttgctagccataatagttcactagtgaccgccgtagctcctcaaccagtgaatgccacggtagaacgccgcagtgactcagtccctctctccgatcgccagcacacttccttcaaattggacgccaccaccaatggagtctataaattgctgccccagtaagctccactaggttattacgcatccaaagcaccagctctcgcctccgatcgtccaccagagcctcccaatttcccatttcccccaaatcggtcagaacgccgccgtgagacatctcgccgtggccagacgtctgcgggttagttcatgctcttctgtgtgatgttcaag

SEQ ID NO: 86407 - DNA, 277 bp, Zea Mays
gttggggggtacccctaattacggtacccgacagcaggtgtcacaccgagccacatactatgctatctctttcttcatccctctccaccaatatttggttttgaggtctaggtacatcttggtggttcctaggtggatggagtaggctgagttgtgagcttcattgagcaggacttcccgtgcctctccttttggtacacacagacggttcttgaaccaaaggactccttgttcatctgtcctaaggtccggaagttgttctttgcgagctttttcc

SEQ ID NO: 86408 - DNA, 490 bp, Zea Mays
gtgattgaggagtggtatagtggcaaagcgagaagtaagtttagtatttttaaacagttagctgatagcatctatcgatgtcgtcatgctttctgttgtatggcagatcgatgccttgcttggtcaagtattgcattccattcccattgggtaaataaaaatcttgttgattgattagaggtcttatatgagcgtgatcgcagcccaataattattggaggcgggtagcgttcataagtcagtccttgttaaaattgaaaaacaatccaataagatatgcacataagtgctttaggtccctcagtagccaatgtaagtcttatggagttttatgtcatgtgttaatgcctctatgttagaccccctaaaatgtgctattttaggtgacttgtgggttaactaatttaagttgagcaatggttaagaaacactaattattctgctcccacccatgttttgagtcgtaatgtctaaaatggtttgctaagtc

SEQ ID NO: 86409 - DNA, 479 bp, Zea Mays
gcgcgacacgcgacccagatgcgcggcacgaacgcgcgaaggaaagtcgacaacgcgcaaacagcacgcgaataataatatgcgacgacgcgtggacacacgcaaacaacgtgtgacgcgtgcgaaccgcacgcgcgacaacacgagagtaacgaatgaactatacacacggacaacaaggcgacggtgagcaccgcacgtgcgaacagcgtgtagacagtgcgacgacgcgcacgactcacaagagttgctaatagacatcgcgtttatactaaacactaaataggtgttaaataccacatctaagtcgttaagatcacattatcacatatttacaatcgcctaactaaaatcataattttaatccaattgagtactcagtttactaatcgacaatcgaataggaaattaattagcgcaggggaatagacgaggtagacaggagtagatgggggtcgtctaggggtagacgaacgggg

SEQ ID NO: 86410 - DNA, 557 bp, Zea Mays
accacgactacctagtctaccacgagctacgcgagtgcgagcttctcaagcgcttcatcaccaaccctccaaacaagaaagcaaagtaggaggaagccaccaaagtaggagaacaagacaatattgtcaaaggtttccccgggctaatggggtacctcacgatctttagcgggctcgaggcatacaatgacaatcgtaggctcaagacaacatactagaaggtgcacgccgcggaccttattgtccccaagtaccaccggtggtcggagatgtcaatcactttcgaccgacgcgaccaccccaagatggtcacgcaccctgggatctagccctcttgtcgttgagcccattgtgggtttgaagcacctcattaaggtgctcatggatgggggagcggtctcaacatcttgtatgttgagacattcgacaccctagggattgcatgcaccgagctgtgccccagcctagcaccattccacgacatcatctcgaggcaccaagcctacccccatggcagatcaccctacctatcacattcggcgaatgtaaggcccaaa

SEQ ID NO: 86411 - DNA, 467 bp, Zea Mays
atcgggtccaaaaacaagaaccgaccggggtcccgtaaaaacgttgccagaaacaaatgcatggttggtatgttgacatgttgttgtgtggcgctggaccccgagcgccaggcagatgacaaaaacggtgtactacactgctaccaatcaagcagtgctgttccaaacccgtcagagacagggtcatcaatgttggcagcaatgatccgggattagtcgggtgggtgggataatcctgacaaaagaccgcgacagcatttcagcaggcagcatccaacccatgccagtgtgaggtcctgcagatctaacaattcaggtgagattaatctattgttcgaagcagcatcgtgcaagacccccctggtcctcacatgaggcatctactatatagaatgatcttttgtccaactgtgtgtcttctcccactcatttactacctattagagtacagtatacctcttagttcc

SEQ ID NO: 86412 - DNA, 870 bp, Zea Mays
gcggcaccgggagagctcgccggcgacctatggtaatggttggcggaaccaccggccgtttatcgtcggcaacgcctgctgctggatttgtgggaacaagacgtcccttttctctctaccgcccctctctcctttattccaaatccttgttcctaaacatagaaactagggagcagtataatgctcaataaggtaactaatactaccattacaaaattgagggatacttgctactaaataagccatagctgattactttccataacctattgtttcctaaaatacaccctgttcggttcggccatatcaatactccccctcgacaacaagcttgtcctcaagcttgaaatctaggtgtgcacgtcgaaattatagggcatcttcccacgtagcctcttcaatattcttgtcctatccattggatcaagaactggcgatgtccttgaatgaagcgctgagccaatatactgtaaggaaccaactctatagattctgaagatggataagaaacatcagcaggtagatctagagccacgaccggaggagggcctttaaagggtttcaacatggagacatgaaaaacatcatgaattttggccgtggttgggagagctaggcgatatgccacctcgcccaccttgctgaccaccaaataaggactaaaaaattgggcgctagcttgtgataatgtccctgtctcactgaaagttggcaatggctctgtagcttcaaccaaacccaatcacccaccacataaataacctcatggtgatgaagatcataacgttgtttcatccggttctgggcggtcaacaaatgataacgagctcgatccaataaggcatcccgatccactaacctgctatcaat

SEQ ID NO: 86413 - DNA, 323 bp, Zea Mays
cttgggaggaaggggtatggacgtatgaccgagctacgaagacaaacttcaaaatgcatgtttggtaccagtactccatgcatgacttaccggcgtatgggctattctgcgcctggtgtgttcacggtaagttctcatgcccagtttgcaaggaagatcttaggttcatttggttgaaaaagggtggcaaatattcgtcgttcgataaacttaacaatttcttcctcctgaccatccattccgcctagacatcaagaactttacgaaaggtgtcgtagtgatagaccgcccacctgcaacgatgactggtgccgaaattcgtc

SEQ ID NO: 86414 - DNA, 403 bp, Zea Mays
aggagctggaggtgcttccgtcgatcgtgacgggtctcatgtccttcgcttcgctcatcacctgtgagggggccacgaatgccttgtcccatgagtgatgcaggcacttcgaagtctttgatcggtccgatgaagacttcgaccgtgagatcttccaggtcaaagatgcggtgctaaagcggtctgctggggtgctttatgattggatgtggggccctcacggccgcgacactgtgcggggaaggtctgaccaggcgatggagcaggtacgaattgttgttattttattttatttttaagaaaatgtactgatgtttggtgctatttttgtagatggagaatgatgaggaggtcaaagacttaggtggcctggagagcgcgaaccctttggtggagggtgcga

SEQ ID NO: 86415 - DNA, 547 bp, Zea Mays
ctctaatcccatgtctggaatgtcagagcaaacatccatcatatcaccagcagtcagttacgacagcatatcttcaggaatgacatcctcatgggcctaatcaaaatctgttatggataattcttgaaggctaacaagggcagacagaactggagaaggaatatcactatcccccctactacttctgtaacgccggctattcttacgaattagcgaaacttcttcttcctcttcttcgtcctcatcaaaaatacggacaatagctggtgcacgatcacacccattgggttcaacttcaacaaggttacacccattggggtcagcttcaataggatcacacccattgggttcagctggtgcacggatacactcgttggggtcagttggtgcacggtcacacccattggggtcagtttcaacacgtataccaccattgggatcaactacagtaaagacctctgctggtacttcttcgcaaataggagcagaagggccagcatcctggtccaagcatgacagtcgccgaaaccgtctctttttcttctcc

SEQ ID NO: 86416 - DNA, 600 bp, Zea Mays
ggtgagtactcaccaaacatgttcgatgtggcaccgagcagggaacttaaagagatttgcaaactgtatattcaagtggtatactcaccagacgtgtctgataaggcaccgaataaaacactagataccagtacagtaatttctagtttaagaaactagtcgttcatgctttcatcgaacgtgcccgatgtagggatttggtgtgcattgggcatgtctagtgcgccgatgtaagttgagcagtgccaacgagtagttggttggattgggctactcataccccctctctgctttgttcatttgaggtctcttgcccatttgattagctgaagaaatcctttcgagtgtgagcaagagcctttgcttaatgaggagcttgagagctcataattatgtgattacagacctgattagcgcactgatagaagcaagtgtgcatccaccattcttattagacttgatttggtcaatgagagttagtgcatcttactcctgttggtcgacatcaactagatggtttggtagcgattaggagattggtgatcacctagagagattgtaggtgatccaactcaagttatacaaggctgtgggcggtct

SEQ ID NO: 86417 - DNA, 428 bp, Zea Mays
attactcggattcattgtcagccaccggagaattgaagccaacccagaaaaaatcgaggccatcatgagaatggaagcatcgcgatcacagaagaagatacagaggcttactagatgcatggcagccctgagcaggtgcgacaggagtcctcatgaagtggatgacaaggcagcagcggaacgcatcgcaagacaatcagcccactacacactcatagggaacacactgtacagaagaggtgcgacaggagtcctcatgaagtgcatccactcggctattgggaagcaactgttggaggaaatccataccggacaatgtggagtacatgatgcgtccagaactctggttggtaaagttttcagatctggtttctattggccaacagcaaagagtgatgtcgccgagttagtccagaggtgtgaagctt

SEQ ID NO: 86418 - DNA, 485 bp, Zea Mays
gttcagataggaatagcaggagcaggtaggaggaggaggaagagaggtaagacttgggaaggaaggaagttctgcgtatcctcttatatgcctcacccagcagcctttccctcatacataagcctcccgacgcccactagttaacccattccggcccataaacgacgacattgtccttcctgggccttgacgaatgacacaacacaattgctcttgttccttgtccggtacatggttgttcctttactgcactgctgacactcttctacctaggagactggactgggaagatgggagaagagaggaatgagaaagaaacgtggcaggtatttatagcggcattgtaggtagaagggcagagatgagcatgcggcttagaaggtgcttcgcaatttctttttgtttattctctgctctttcatgtattttgtattatatacggagtatatcatttatatgacttggttttgggttttggaatttta

SEQ ID NO: 86419 - DNA, 562 bp, Zea Mays
ccgggaaggaggacgacgcaccgcccgatgggacacacttatgagccagagggggcatacttccctgtggctgcaacccaaagtcctggggagatagaggcgtcgctctgaccaccaaggttgcgtccctcacggacttgtgtggcacatacacgttggctggaaagaaaggaaaggaggagtagacaatgaataaaagaccgaaagcaggaacacgagcaaattgatataacaggatgagcgcttcgtggtaatcaccttccctagcgcgatcgacgaaggaacaaaaaattgcgacgcgacccgacaagctgccaccacgtgactccctgcaggatccaaagatgtcacggtgcatgttgtcgcctactctgtcccgctcatagcgacgagtactgcaacattgatagaaggcatcgcggtcgaggcggggttcatgaccgaccgacccgtctccgtccggacgttagatatggttgtggtgtcaccatgtcgcaatggaccacccaccaacatcgcagttcccgctccaccgaaaattgtggaagacgcttcctccgag

SEQ ID NO: 86420 - DNA, 736 bp, Zea Mays
tcgggagttcgtccggtccggtcgggcgtgctcgagcagctaagcagtaagcactagcagtggcagggaccccgggcgtcgaatcgaagggtatctcggccgcgtttactcctacggtctaagccatgtttggctccgatccgactaataaacgtcatgggcaagaacaggctaggtcgtccctagtcgtcgtagttcagatcgatcgagtgatctgtgcagcgctcgagtcttgtgtaggaaaaacataatcgaaacgtaagctagctgagaaaaacagggcactacatggtcgactatatatacgtacgtaagggtaaggcgcgctaggccgcgccgatacataaatgaatgcagtgttcgtgctgtttgatcgatcaaatcgaacagttagctagctagctactacgtaccgtcggtcggtacctgtccatcgatcggtcgataaatcgcggcagatgaaccatccatatatgagtactgtgtttaagcaacgagtccatctacatctagctagatggaggctagtgactgttgcatgaaaccgtatgattgggcggcctctgcatgcatgatggaggatggccaggccacccagcagtagtcgatgaaccggctagtgccacgcctaacaagctagtgcgcgcgccctagagagagcgaggacgaccaagtgtcgtcgcgccacacagtttttgcctgtttcctacgagttcttgtgatgcatgccgacttg

SEQ ID NO: 86421 - DNA, 855 bp, Zea Mays
gcgacttttgctcagacgtgtcctcgcgagggcagtctaggatgctaattgtggtgactgttttgtgcgtcgaatgtcgaaggccattgccgcggtctttttcgacacccatggccgtgatgccagttggactgcttttgtttggggctttgcggtattatattacatggctccgcctcgttaaaaacctcaccccccgggaggaaaagagtgcgggcctgattgacattgtttcgagaattacaaaggcaatcgggccttgggtcttagatgaagaatttgcgcaggttatctatgttccatgaatgcgctaggtattcaccggatggtgaggtgagcctgtaagcatttggcgatgttttggttttgacgatgtagggcccctcccatttgggttcaagcttgccccgagactctgttctgatggttcttgtgagtactaaggctcctttcaattctcttgggatgactgtgttgtcatgccatgccttagtctgtgcttgatatttgtttagggcatccagagtgaggacacggtctccgtcgataagatctttggaggttggctcgtcgacgtcaggggtggctgttgggcttgtgggtggggatccatgctttagctcttgaggtgtcattgctttggatccgtacatcaagtggaagggtgtgaacccggttgctctggattctgtcgtgttcaacgcccatatgactttgagtagttggtcttcccattttccctttttattatcaagtagcctcttcttgatagcactgaagatcttgccgttggcgcgctcgactatgctgttggactataggtggtagacagaggcaaacactgtcttcatgccg

SEQ ID NO: 86422 - DNA, 505 bp, Zea Mays
ttggcgcttcacccttgagcatgtcaataaacaacgatgattggttgagcatgtttatgtcattgttcgatccccaccacctccaaaaaagcatgctagaaccacaagtcatacaaggcagtgcctcgagtatgatggttgaggatccaatgtcctccttatgaattgtcctctgtatccaatgggacagtatcttcacttttaatacatgcaatctatactcactatcatatcaggaaatcctcttttctccccttaactaacagatgcctaaggtcatcgacaatgggatgaagactgcactctgtcttaaaacacgccacaacacctctacaaaatagttgagacactctaaggcggaactttactcattttgatatactcatcgatggagtcaataacgctatcgtacacaagcatgagaagggtggttgtgcacttctggtggggtagaatctgctatgttgagtgcatcggtgagtaaagtagggggagtgctcaccca

SEQ ID NO: 86423 - DNA, 696 bp, Zea Mays
cgagtccgtcgcccgcatgcttataagggattgggccgagtctccttcttcccctcctcttcgccgtttaacctcagccgccaattcgccgtgtgcttgtcgggggaagcgaatccgccaccgcgagaggaacgtggcatcatggtcagcacggtgtttaccaccgccctcggtgagttctctttcccatgtttcgcttgaatctctatcacgtctagggtagctcggatttggcttaggtgcgttagttcgcgagaccatgccgatggcaatggcgccgccacggcgcgtaatgggtcgggttatacactcggcatcggccgaaattagtggtatcattgagatctgagagtcgttaattacgcgtggggcgagtgaatcgaggtatggtgttcgtatgggccggattcacgatctacggcgagcggaccaccgtggaacggcgtgcgccactgtgctcctccatcggaggtagggggtgtgctctgcgccgttgatctccatagcgacggccctgattagataggatatacccttttcgtgctgttgtattcggaccgtcggatctgtatccgacgattgcgattgcgtaccggttcacgcggaggtaggatttaatcatgaccgttcactcaaatcggatggctctgattgcacgataccgcttcggtcgcgcgttttgctaaagaacccccg

SEQ ID NO: 86424 - DNA, 352 bp, Zea Mays
gccgggtcgagaagcatcaagagcacacaagagtactgaaacaagagcgaggagggcgtgatcggacctgtggagagctggccacggcgagctcacacacggtagggttcttgactgatttgggggaaatcccaaattggggagttgtgagggacgattggaggtgagggttagttcattaggtgcacaattactcagcggagcaggctggggcatcaatttatagtttccaagggcggtggctcctaattttggcatggcgtgcttgcggccggagaggaagaaggtcactggtggctcagtcgtggcgttcaccggtgcagcggttctaagatggtaagcctaggcgtgc

SEQ ID NO: 86425 - DNA, 319 bp, Zea Mays
gcgcgcccgcgccgcgatgtccactttgcgcagggaaccctggcggtttgaaatttctataaagagtccttcccactgttcatctgtctcgctgacctttgcaaatacacccttgcgcttctactagttcacatcccccggtccacgacgtcgcacggcggagaactgagctccggcgagcttataccggccacaatacttaacaaccggtactctaattcggctgagacctaattcaacccttaacaagtgtttcccctcaaacaattgcagagttctaaccctaaatcgctctgtccacggtgaccgtgcaatcaac

SEQ ID NO: 86426 - DNA, 394 bp, Zea Mays
gcaaattccaccatagaaaaggacaataaaccatgaataccattttcaaaatttaaaacttgcctagaaactgctacggatcgtcaggactagaccgctagacctaagacgaaagaccttaggcatagagggagaaatatgtggctaattaagtaggccccgtgggccagtacttagacttttaaggatgccctaagagcaccctattatttggagaggagacattacttccagcatgcatgcattataaacacaaaagggaattaaaacttgagctaacccacttcttttaaaaaccatccgggctctttcattttccttccaccataatctttacctttgatacccttccgcagatgaattcacccacccccgccagtggaggagacacctg

SEQ ID NO: 86427 - DNA, 475 bp, Zea Mays
ctatctaggactgaattctggtatgacagtgtaatgaagccatctttgagcttaaatttgatcatgatccagtcattatctggttatgattactataacaagattaaagctgaataatagagctacaacttctttaaagacagattgtcaagtcattacatgggaaagggagatttctgctctgcaaatctggctgtcagtccaactgattggagtttaccatggtagagtgcctgaacaagatcagaccgccatcgcatctcactgccgatgatccccaccgcgattcgtgccgacgccgtcctgattcgtgcacggtatggagtggataacgccgggggtggataactcgtacgtggcgtcattccccgagtccaaccggagtcctcaccggcggccaccgtgaccagtaaattttgccgcggtggcactcatgccgtgatctccctcactgtgtctcctaccgacgtggtcg

SEQ ID NO: 86428 - DNA, 795 bp, Zea Mays
caacttccagacactgttgaacaaggcaattggccttgagagtaaaaaaaggagctatctgaccacaaaagaaaatttcaaggtcagtctagcaggaacacccgccctaacaacgctcaaggttcgcagttccgctctagaaatcaaggcggaaacaattatcaagtgcaatgctctagacagcaaggccagagaaataatcagagtcagaaccagcaaaggagcaactctcagaccaaccagaggtctggtgggagttcacagaaccgtcaaggtggcaccagtaacacgcaggccagaagcaacgcaccagtccaacccaatggctgtttcaagtgcggtgagctaggccactatgccaacaactgcccaagacgcaaccagcagacaccccaaaggagcaatactcaaaggaatgaccagaacacccccgctcgtggatctgctcagaacaagactccgcagaaccagagcagaggaagggtcaatcacgtcactgcagaatcagtgcctgaggatgccgacatagtgtatggtatgttccttgttaactccatacctacatcagttttatttgactctggagcatcgcattcgtttataactgagtcatttgtggaaaaacacaacatacctaagtaccctcttaagtagatattacatattagttcacaggtaggtgacatgaaggccacacactcatgcccccatgttaatatcaagattcaaggaatagatttttcagtcaacccagtggtcctaggatccaacggtattgatgtgattctcggatgc

SEQ ID NO: 86429 - DNA, 635 bp, Zea Mays
ctttgtagtacttgaaacaatcaactatcatgttaggccaatggaagctagacctttgcaacaaccacttcatctttggagctgattgatgggtaccacaaattccttcatgtacttcggccatggctaatatagcatcacctaggcccaagcatttaagcaggacgttgttgactgttcggcggtagagttcatcactcattaaaacatacttgaaagttgtatgtcgaacgttcctatccgtcctaacactgggatttcgtagataattaattatgggtgtcctccaatcgcttgcatcagcttcattaccagccgaatcaatcaggagaactttcctggcaaccctggacggttcgaagccctcactcggacggtccgcgacctggggaattggccctgtatcggttatcagattttcggtgttgtgaaatttccctcgctttatccaataacctaatgcatcttgtgccaaattgttagctctgtgattctcaactctagagatgtgccgaatgctgaattcgtcaaaagaatgaattatgcccgaacatttttcaaggtaaatgtttagagtaccatcaaaacattgatactcttctaatacttgttggacaaccaactgagaatcacca

SEQ ID NO: 86430 - DNA, 317 bp, Zea Mays
cttgctgatttcctgctgagagccgaggccgaggtagaggggttggtcgtacgcccgagccctaggggaggggtcgcccataccgtatttgttgtaactgggcttcggcatgggtaaaagcctgcttatgaggtgcgtcagtgtccctgtgtcgagtgatgttgtgattcctttgttgcagttatcgaggctagaacctagctcgggcgaggtggaagtctattcgaggcaacgaccgagccttccttgacgtgtgccaaagttggtggagtgccctcctgcgaggattcgtggtggagtaggtagccgaagctgag

SEQ ID NO: 86431 - DNA, 1302 bp, Zea Mays
agactggtttgtcggtagtggtgaacaacagttccttgtcgagcactctaggcacaactcctagcggcgggctggcccgagaacatcgtcgatcgcacggaaccatagaggtgcatcatcattgtggtcagcatagagctccccatcaaaattggtaggaggcgacacacaaactggaccaacaggacaagcgacgtagtagggtgtagaggagatggtaaaacatgaggtggtgaaggagttggtgttggcgatgtcgtacacaggggagccaaagcagaatgtggttctaggataccttcaggatgacctatggagacttgagttcgtacttcactgtgaacgggatgttatcctcccccatcatttgtgggtagctcatcccaggtctagcacacacccttgtcgaacacgacatagtcacacaacacatatgacatgataggttcacaagttttaacacctattctcaacataggagcatctaaccacatgtcatgcgtccaatccctcttctccgagctcaacaaggggatcagtgggactgtccgcttcgccgatggctccaccatgatgcaagaatgtagagcaatgcacgttgactaaggtctactacaccccttgcctaatgactaacatcaatagtaccgttggccagatggatgagagcagatgcggcattgacatcaaccatggcgtccttcacatcttctattagagaaaagacgaagctgctagtgtgattgacatgcacggcggggcgcctgtagcaacaccaagtgaccataggtagaccagcctgctttgcattgcacaactcttagagtacttggctatggtatggacggtttgggcacctcaacttcaacaacctatgcaagctggcttgggaggagttaaaaaagaaaacattggtgaccatagtggtgctgtgaggagagtcgcgtcctcctcctcgccttcttctacgtcctcacggatggtccgccacctccacacaaatggtccccgtgcttgcagagaagaacagagctctctgcgtagagtcacaaatggttcgatgacctaccacggacgtccgcgccttgtagagagttcctcgttccccgtaaaagagatgtagggattgttagtttgtggcctaaaaaggtgccaagaccctcaatcttgcttcttgttcatatcatcgttgttattgcagtagcaacatggtagattacttcttctcgtttaatcttgcagtagcaatagaacaacattaacatgccacttatttttattgacgtggacaacttaaaaaat

SEQ ID NO: 86432 - DNA, 631 bp, Zea Mays
aaggtgccggaccagggcaaggacgaggcgaggccgcacggtgaaaggaagtgagtgacttggaactgagaaccacccgacgtgtgactgctgtggcccggaggcagctgcaaggatgaggagcgttgcactggttctcctttccgtgtaatgaaacacaaactagactcagcaagcgcacggtctgaagaagtagacgtcggctctatcttcaactcaagggtggggcaatgaccaatgggaagcagccatgcgacatcatgggccacacggtgccctaggtcgtgcgcacgcgagcgcggctcgctcgcaagtaggcatgaagcttaggtccagcaccacgcggcaccgcaggcacaacaaggcatcgatcttgggcaggcaacgcagctagagaccaggcagataaggactccaccgcagatactttgaacctctcccggacttgaatcttctcagctcaactccactttaccaggcgccagaaactcccaggccactctctaaccaaaccaaccaagcaatgtcagcacaatcatggggctgagatctttccatttctccatatcttgaatcagcttcggccaccagaacctgcactcaaacttgttgaatgatgcaaaacccataa

SEQ ID NO: 86433 - DNA, 1079 bp, Zea Mays
gtcatggcaataaataatatctaatgcaacaaaaatattgttgttgcaatatttgtcgtggcattagggtgattttgcaacaactgttctagtggtcgcaataacacctttctcttgcaacgaaagtcatggttatcgcaatgcacaaaaaaagtggcaaaatggtccatatattgcaaccacttttaaaggtcgtggcaataaataacatctaatgcaacaaaaatattgttattgcaatatctgtcgtggcattaaggtcattttttagtagtgtgtattcggacgagagggtattagagtacaactagtggatgaagacgttattgggctagctaatgaccttttgtgataccaggtttcctataatcccctatattcaaggcatatctagatggtgtttatgtccactcaagtaaaacatgacacatcattatgccaaattgtttctcaaaatataataaagaccaaaggaaatttagccaaattgcgtaagagatccgtccaaacataggttaaggttgtaagacaccttttccaccatagagttgctaaaaagtttgaatataaagaattcaaaacaatagatcacctttgaaactaaaaatagtgtttctatgatattgagggcattgtaatcgcacaagaaagtattagagtacaactagtggatgaagacgttagtgggctagctaatgaccttttgtgataacaagtttcctataatctcgtctattcatggcatacttagatggtgtttatgtccactcaagtaaaacaccacacatcaatttgccacatcgtttctcaaaataaaataaagaccatggaaaatttagcaaaattgagtgagagaactgtccaaacataggttaaggttgtaaggcacctttttccaccatacaattgataaaaagttggaatataaagaattcaatacaacagatcgccttttaaaccacaaatgacgtttccatgatttcaagggcattgtattcggatgagagggtattagagtacaactagtggatgaagacatcattgggctagctaacgaccttttgtgataccaggttttc

SEQ ID NO: 86434 - DNA, 1631 bp, Zea Mays
atttttatatcagtatatcagaaattagcttgtatagaactttcaccactatgggaagtgcactaaaaaaatatgtagttctaacctttttgattccgtgcatgttgtttctattatgagcaggaagaccttctctacccaaggacgttcgtgcaaaacgtcatttggacttgtgtgaataaaatcgtggaaccattgctaaatctttggccggctaagatgttaagagatacagcactgaagaacatcatgaatcatatccattatgaagacgaaagtactaggtacctttgtgtatgcccagtaaacaaggtaatgcatgcaagaattttgtttgatttctttagatttccatcaaaattggtcaagttccaattcttcgggttaatggatgaggaagttctgtttccctttcccatttgactccaaaacttgtatttattttgagtcatgacttaggtcattcctgccacaacgaacttctatttatttggtgccagaccagagctaattccaatgcgccacaacgaactatttatgtcatgaaataattataactagcatacttttttctgtttataggcactaaatatgatttgttgttgggttgagaatccaaattcagatgcattcaagcggcaccttccaaggatctatgattatatatggcttgctgaagatggcatgaagttaaaggtatcaccccacaattcctatgtattggttgcattttggttccttagtcatagttaagaagaatggattagattaatcacgtcctatcttcatccttcaactttaagcagacaatttatttgtccaatatccattcaaaaaactattgtgatagtgaatttaagaaaataaaaaggtatatatattgctttctctatctaaatgtaactttgcccactcttcacatattgtaagcacacaacacactattaactaaggtggtgatattgtaatgctacaattaatacaccaatagcataagaagtggtctcgatccagccaggctatcctgccttgttgcactggacactagccagcaaactgctctaataattatccaaaaatgatgtggcaaatattaaatgttgaaatggcaattcgatcaggtgactgcgaaaaatctaattctccggtttatcgtaggtgtatgacggcacgcaagcatgggatacagcttttattgtcaaagcatattgctcgactgacctggttcatgagttttctccaacactcaggaaggctcatgagttcataaaaagtttgcaggtaatttaattgtattcttatgttcttaattttttttacaatatttgcatagaaagtattgacatgcatgattttagatccctgaaaaccaacccgaccatgaaaattattaccgccatagatcaaagggttcatgggctcattcaacattagacaatggatggtctgtatctgattctacagcagaagcaattcaggtcagtgcagtcgctatgtatatatggttttttcttcccttaattagcttgtatatataagtataataagggaagatatcatgtacacatgagtctttggtgcatatatggtgcacatgaaccaataaagtttacaaaaattctgaaaaaaat

SEQ ID NO: 86435 - DNA, 441 bp, Zea Mays
taagtctgtcacgtcagcttactccatccgtcaagttagtctctccgttaaaaaattcaaaatggctaaattgccctttgcttcctagtgagagaactggacgttcttttccttcgatgagaagccaaaacgtctcgtttccttcgaccagaagccagaaagttttccttgacagactgcagcttccatggagggctccgtgcggctgggggacttgaagccctccccatcgcacatcaagccctcgccatcgccggacactggtgaaccttttctcgcgtcccagcctcctccatctctaggcttgcgcgacctggctaggatagacgtgtgcagcccagcagtgtctagtcggacgctacctccatgccccgtagcagatgtgtctaggccagcgccgccaggccagatgacgcctccatgccccgcgtccgtcctgcc

SEQ ID NO: 86436 - DNA, 658 bp, Zea Mays
cccaagtgcatgggatggtgctagcaaacaatcggctcgaaaaggccgcagtgcacgtgtgaaatgctcgacgttgatccagggaccgcggggaaaccaattcaccgtgggccaaacccttcacgccgcattctctcataagttctcatcagccgattcgccttcgtcaccgtgttaatttttcaccgggttgcagggcgtatgatcattgaggactgggtttgtgtctcaccggagaaaacgccgcgtggtggcacgacgccgccgtgtcctggcaagttgaggttggtgacgacacgtgaaccattgatcgtgcatcgaacgtcccagattagaagtgagggtacgcttcgcgcgcgggataggatctgttggatcgcgatcggatggtctcgggtggatcacgattatttaaaatatgggtcgtggatctttgatccgattgctgtgtgggtgtaccggttcgttaagcgcctgatctaatctgggccgctcgccgttgatctgacggtcgggagcacatacctcttcacaacgggctctgtataatctgatccgttggggtcggatcggacggctgagatcacatgttagcgatgcaccgaggtagtttcatagaagtgaccctgggttttcttggaattaacctgcactccat

SEQ ID NO: 86437 - DNA, 412 bp, Zea Mays
gctaagttgaggaagaggttcttgcaagaagtcaaggttgataaagtgtagaagggttattatgcattgaggactatgacataaggatgtgacttgaatccatcgatgtaactcatatggttttacggttcaagtcataatgctcaagatcctagctcgagtgaagtcacggtcacaagaatgggcagaaagtatcaaagtcagaacctggaagggcccaaagagctaagcacactttgattcagagtttgggtcattcctgtgtttggaaaggttcttagtcaccattagaaggtgttagaactcaagaatagtgtagacttgatcaaattcagagttcgtggttctagagtccaacactcagctcaaaaaaggctagaaagggcaaaacttggtaaaggtgagctccagt

SEQ ID NO: 86438 - DNA, 1004 bp, Zea Mays
gaagatggcccatttcttgaaggggctaagaccagaactcaagactatccttgccagccaagatttcctcagcttctcgcacctctcaaacaaggccatacaagtggaaagggctagggaagaagaaaagggtcacctcaagaggaaattccaagtccttcgagctcagcagcaggacaggcaccagagagttcgatcttttgggtttccacccaagggaccaagcttcaacaagccagctagatccactctgtcacgtttcagttaggaggggcaaagttccctccaggccccctccgttgcaagcaaccaacctccagcaaatgcctgttggcactgcggagaccctagtcactacaagaataattgcccccagttgaaggcatctgtgcctacttactccaactcggtgaatggccccaagaatgccccagcaaccgcctccaaggcaccctcctccaacagccagcagagcaagagccagtatcatggcagggcacgagtaaaccaagtcaatgctcaagaggctcagcaagcctcgggagtcgtgctcggtgagttcctagttgaatttactcccgctactgtactttttgattcgggagcatctcattcattcatagccactagttttgtggaaaagcatggcattcccactacacacctagaaatccccttggtcacccgaaccccagggtcagaccttctatgccatctcaaatgctcccaagtcaggattcttttaagtgggatagtgttttggcagacttagccgtcttgccatcctaaggaattgatgtgatcttaggaatggattggttaaccaagcataatggcgtcataagttgcgcagataagaccgttcttctcactgaccaccaaggaaagttagtttcatgtcaggctcagccactcgcccaagatccaatggtgtttaatctagcagcagaaagcatatctgtagtagaagaattcatggatgtattcccagaaaaattgccaag

SEQ ID NO: 86439 - DNA, 406 bp, Zea Mays
cgaacatacaagtaacaagcacatttatcctctatattcgtaataattgcgacatagctcacacactaagaaaacactaaacacgttataagtttatatttttcttagtcaaggaacgacactaaaagactgacaaaggttaggctcacaatttaggacacctcaaacttaggctatgggtggaagtaatttaactagctctctaaatatcgaatgtgatgaccattaaggtaagacaccactttgccatataagctaaatcaacaccaaccacttgacggatattaccaactaactgcttgaaagtctaacaaaatctttcacatgatacttcaaccaaaataaaatagtcaactaagaacaagtgacactgatggattctaccaaactcatcattcgcacaatc

SEQ ID NO: 86440 - DNA, 296 bp, Zea Mays
tgaattgactcgcccttggattgggcctgcatattcctattccaaaagcacttgaacataggagctcacacaaaagcattggtaatgcatggtagcttgaatgcaatcacattctagcgcgtggccgagatttggactgagaggcgatggtagctcataatacagaccggctgtcacttcaaaactactgagactcatagctgcatttcagtatttcagcctgaaaaatattaatcactcggagcgctacactacacccatgctgctaggattaactaatgcatgaataatcaaat

SEQ ID NO: 86441 - DNA, 1024 bp, Zea Mays
agtgactaaggcttctgccaaaagtcacgatatgccgtttgaccaaggccgtgaggcgaaggaaaccataaaaaaaaccaagcaaactagaaaatgcgtgaatcaacgaacacgtaaactaccccataacatcagaagggatttgccaaaaaaaagtttaagaaacgtttgaaatcatttcgaatttatgtctcaagaactcacggttgtcttaaatcttatgcttgttcaaatattgtagacttcaatgtacttaaaggaagcgcaaaattctagtaacaagctgacgtgcccttactaaatttggttggagaaggatccttaatggcctctaggtaagggttgacttttggggcaacacctcacttttgattgaggtagtcttggctctcaaagataagagaatgtcttttgtggcatcttttgcgccaatgaaacaacattcataacatccatagagctccggattctctgaacattcaactgatctttcatcttctcaataaacttcttaaacttcatcgtgtgcatgtgctccatccgcatcatcctcgtcaccatctacttcctctttggcctctttctccactgggtctgcttctttttctttattatctgttcgctccttgatttcttcatcttcttcgatttctctgtcttctttatctacttcaggatatcaatcctctgataggtaagtaaaaaaagatgagagccttcatctcctcccctctctgcaaattcatgcaatttcttacattgctcccttctcccttatcgttttctcgaccgcttgctgcctgctttaagcctttcagagaatttcattctattataacagtcgtctgaatcctcaatcattggaggattctcctcatctacacctttagtacaagcatctcgtagaataatcctgatctctctgaaaactgctattgatgttcttacgttaacaccttcaagatcttctatccatggagtagctaacccagcaagtatgtttttatatttttcatgctctttt

SEQ ID NO: 86442 - DNA, 386 bp, Zea Mays
aagatcccaaaatataatggagccggaaaggcgaacgaccaatgattatgcgttgcacttaaagagtgatttgttactatgaagcttcgatcatatacttaattttgttgtcatacgagtggggtcagatgttccacaaaaaatgataagtggggccagtgggtcacgtacgtaacctgtcgataatgacgcgttacctcttaaataatctaggcaagtcattttctttggcagtaaatgacacaagcgtcaactgattagccgttcaagagaaaggaagggtgggaaaatgactacatgtaaaaatgcaatggagttacagagaaggtaactaagtaactaaccgtgtagcccgcgccaattcattttttcttgataaagcctgc

SEQ ID NO: 86443 - DNA, 1035 bp, Zea Mays
aagtctgaatttcagtgtaatgggttcatctttggggcctggtaacttccaaacaaaaaaggattttgccccaggtcaccacatcaattttgtagatctatcaaaggtgaacaactttgtttaagggattaaacattgttgttatgaagaatttggagataaatacacccaaagttaggctttcaggctgtttgaagtctgaatttggactgccagtgggtttgagcaaactttgagctcaattctaagcatgatctagtaagaatttgttttggaatactataacaaagatgaagatggtatgttagactaccactttgctacagagccttgcattggttgccaagcgaatttaggagaaaatccagcttcaggtcgctctgtcaggtcgactgaagatggatgccattgtacagtgatctgaataagaatagatcgatagctcaattcttcgccgccgacgaccgccgcgcacggattcgcgtttttagccaccgtgattcgtgctgaccgattggatagcgctcaaggtcacgtaaatatcgtcgccgtggataactccggccagtaaacaattccggccatcgtaccgcactcaccacgacggatttggataagctcgccggcggcagccgcctcacggcttggcgccacgtgccctggcacctccaccgcgtcaccgtgacccgctgtaatcctctgtccatccccggggagatggccacggtaacccgacactaatcgcgcgccagtaactccttgtccctccggccgccgcgcgtcgtcgctcaaattcccggccaccgctcatgcttactataaattgaagccaccatgagctccgtaggatcatcacgcacccagcaaccgagtattgctctcaatcgatcaccagtgagctccaattttgaacttcccccaattcggtttttgccagcgcagacagcctcaccgcggccagtctactccaggttagttcaagcttctcagttgtttgttctagcatccttaggttctcctcaagctcctcgaccc

SEQ ID NO: 86444 - DNA, 316 bp, Zea Mays
caatgctatcacagtgaaaggcaaatatccagtgccggtatttgatcagctgatcgatgaactcactcaagctaagtggttcagcaaacttgacttgaaggctggttatcatcaaatccgtctgcgaccaggcgaagaaccgaaaacagcttttcaaactcatttgggtcaatttgagtttcgcgtgatggctttcggactaactggcgcacccaacacctttctggaggccatgaatactaccttagcaccagtcttacggaaatgtgcattgatattctttgatgacattttaatatacagccccacttttgac

SEQ ID NO: 86445 - DNA, 305 bp, Zea Mays
ggagaaggggccaaagattaacgacgatgagtgtgtctctcagctggaattgaaggagatgatgcgcgcgatgactgaaggttttaaaaaataccatgactctgcggcgacatcctatgagcagcttgatcaacgagttgctgaacttgttacacgcatggacgtactggaggctcgtcccccaccaccaactccagccccagctcactctcctgtggacgacgacgacgatgacgatgatgtttatgcaccgctgcgacaacgcctcgcacgtaatcgacaaggtatgggaggtaatggtagac

SEQ ID NO: 86446 - DNA, 343 bp, Zea Mays
gcaacttgctcaaataaaacagattcataccgttggaccaaattatcatgagagcactttagctcctcatgttctttggtcatcttctccaggttgtcgttggttttgatgagagtctcctctagcctgagaagcatctcgtcttgttccttgttcctcctcaacaacttaaccaagagcactttgtcttctttgttgagatgggtgtagaatcggagaatctcctcttcttccacatcgtcggtctcatttttcctgtcattattatcagtggaagcaatacaagaacatgtaccttgtagtgatgaagactcctccttgctatcgtcctcatattcctcct

SEQ ID NO: 86447 - DNA, 559 bp, Zea Mays
cggaaagcagaggcggctgaaagcgcagtacatatgggatattcccgagtcagataccgtttccaaaagcgcccagtcagcatccggcagttacttctaaaacaccgacgtgccacgttgtcacccggcggttacttctaaaaccccggtgtgccacatcatcactcggctattatcctcaaagtggccgacgcggcccgttctaacttgactgttatttctaaaatgccgacgttatcaccagtcgctcgacatttatctctaaagtgtcgatgatgtcctcagtcgctcgacagctatctctaaagcgccgacgatctcctcagtcgctcggcggttatctctaaaaaacgctggcgtcgtcacaagtcactcggctgtcacctctaagagcgctgacgtggtcatcagtcattccgacgctgacatggtttcgtcatcactcaaactctatttcaaatgcgtaaatatcgacaaaaatagctcggccatcacccccaaagcggcgatatgatgctcgaattacttagtttctattccgaaggaatcaacttcacaa

SEQ ID NO: 86448 - DNA, 351 bp, Zea Mays
gccagtgcagaccgtgatgttcggctcaagctcaaagtacgattccggcagcaactacacgtccaacatggaccagttcaggaaggtggttttctagagcagtgcgagtacaccgggacgagcgagtacgacactgactccagggatgcggcaaccaggcgccaacaacatcgatgatcgtttcaactttcaaggggcgcctgatagaccttatcaagatgtatttctgatgtacaatatatcaagggatcgacgtcgattgtcggatactacaagagatacccagtgctcgtggtaactttagtccttgtaatgatcatcgtactctcatggaatcaatgtacacatctg

SEQ ID NO: 86449 - DNA, 683 bp, Zea Mays
gtgtcctgtcttgcttgatggacgtgaagagattatgaaatctgaacaggatttcaatgtttctagaagaaaggacgaacccctaccgacacgccgattagatgtgacgacgatatatttctcttgggagatgataaaaaaaaagtcggataattacaggtgagtttcctgcacctcacacacgctgctagctagtagtgcaggaccgggacacgtcaggccggctagcgatgcaatgcaagctaagcacagcatggcacatgtagcttgctagctagctactatatagctgcagcaccacaggtctctgtagctaattaatcgtataattttattgtcgatgcgttttgattacacatgtgtccatgaatcacccaataatcccagccagccagccctaataataatcatggccggctggctgcacgactgttggatacgatccatgtggaactgtcagctgcgggtggttgcctgtctctctgattgacccttcgtctctctcccggccggctgggccatcaattgttttttttccgttagcgataagagagttcttaatcaaccagagagcaagctgcagagtattatggcgacgaggacgacggctgtgtgtcgctcgttccttcccggccatgtgcagtgccggccggtgagattcttgcttgcttgctgcgcctaat

SEQ ID NO: 86450 - DNA, 618 bp, Zea Mays
taaacggcgagctagctggagtacaagtaaataaagcgcctgaacatccgagatgagctgtccagctgtaattggacgacacactaccaactctcctatctctagctactcccttagcttcccttcacttcacctgcatacagggggctatcatgggaaaaggggacgacaacctttgtgtgccgtcgtgcaaccactacctggaccatacacacacaagagcactagctatgctataatgccatctcacgccacacacacacaagagcactagtagcttgttagccttgcccagtacagcaaggactacttgggacgtggaccacaaggtacgtacgtcgaccgatctacccgtatcctagcctagccacgcactatcgatcgcgccgcgccagaaataaaccctgcccagtgtccagtccaggtacacacaagacgcacgcacgcacgcatgcaccgctcctgctcgttgccccgtccatggatctcgcggatcctacgcgcacgcggtgaatccacggggggagaggtaggtcgctcacatggacctcgtgcacgcagcgcagcgcagcgcagggcagcaaggccgcgcggggcgagatcaggacgagatcgcgg

SEQ ID NO: 86451 - DNA, 705 bp, Zea Mays
tcaatatgctcacctatggtagtattgctgactctattgatgagtatattaaaaaaagaaaagcttggtcttagagtgcctccaacattttcgtaggagtattatttaagattttggcaaggagtatagttgtcgtcccatggttgacgaccttagacgacttttagctaaggggaggagagaggttttcctagtatcatggggagcataaattgcatgcattagaagtggcggaattatcctgctcgatggaaaggacaatctacaagaagggataatggattcttgatcatcatgctcgaggcggttgatttgtatgacctatggatttgacatatttttggggtttagggtttagggttttgacctatggatttgacatgcttccgtgagcggggttgaacaatggtgaaccaatcgttgttgttcattgacgtgctcaaggaagaaacactaaatgtgagcttcaaggtgaatggacatgggtataaccaagggcactacctctctgatggcatctacccacggtagccggtgttcatgaatatcattgttgtcgcacagagtctgaaatagcgaatgtttgttgcatgacaggaaggcacgcagaagaacacagagagaaaatttggagttcttaaggctcgcttagattgtttcccgccaccaattactcagtgtgatcataagtttatatattattct

SEQ ID NO: 86452 - DNA, 1063 bp, Zea Mays
agacttagaacattgacaatctccgcaaattttttgtttgactcctcagggccagctcgcccttgtaattcacaaaacagctttattccggcccgcactcttttcctcccggggggtgaggtttttaatgaggcggagccatgtaatatacacgcaaaaaatcccccacaaaaaattacaacgtaaaaaaaagaccgcatcgacggtcttcagcattcgatcacaacgaagtcaccgcgaggggcagcgctggctaccctcgcgtgcgacactccgcgcaaaagtcgcctaagggtgcagccggactagcacaataagtgcgcaaaaccgaagtcttccccaaaagactatccgtgcaaaagtcgcctaagggtgcagccggactagcacaacaaatgcgcaaaatcgaagtctccctcaaaagactattcgtgcaaaagtcgcctaagggtgcagccggactagcacaacaaatgcgcaaaatcgaagtctccctcaaaagactatccatacaaaaaccgactacaggtgcagccggaccgacataataaacgtgctagatcaagtgcacaagtcccccacgggcacggccggatcagcgaaggcacacagcctcatcatacaaattatagttacacacatacaacgagggcatcacaccttacattggttcaaccttcgggatgatacccatctccctgtagttaaacaacattatcttcagctcctcaccctcaaaaagacttcacaactccccctcacctacactcgcccaaccggcgaggacaacagttcccgcttgccagccctgtccacacgaagacgaccaccctccacctcactcactctacgctttgccaccacccttcgctgcctacgcctagcactcggaccaagaagaacttcagcatccatcacacgcggagaagcctccgccgcagccacatccaatgccgcaaaataatctaaatcctcatccaaagactcttccgtccacacaaccgaactcccagaatcatcagactcaaaaaacttagacacagaatcatccgaatcattttcc

SEQ ID NO: 86453 - DNA, 614 bp, Zea Mays
caaagcgcgaagggatatgttctaacctaatctaagccgtccgcacagattcgacggcgcgcgagcttcttcaaccctcaaccattaaacacggtggcggcgtcctgaccgcggcagagcgccaccagcgactcccaaaaccgatccccggcgcgccaaattctactgagtagtactataaacattgctggggactagtcgaattacatgggtgtgcccataccttgtattacagcggcattaatgcggtccacgacggagagcggtgatggcggcacatgaggacgacgacgaggaatcccaaggtgcggtgtcccgattcgccccaagaacgtcgctggcaaccttcaccgcgaccgggtgaatccaattgaacacccgcccagagctttggttaggcacgactcgagattctaatgcggcggcaatttccccccttatcgacgatggcgcggtcgggagaagaaaaatgagctatggggcggcgcttggatgggatgcggagaaaaggccacggtgctttggttcttataccccggttgggtgggaatggcctgcccgagcatcgcggcgatcctggctgggcggacgtgcctccgttggcgagatatgcg

SEQ ID NO: 86454 - DNA, 598 bp, Zea Mays
ccgggcgacaggaacataattgaatccatcccaagcctttcccctaacttaatttcaagaatggcgatctaatttggtctggccacggtaagcgcgcggatgaaccaaagaaccacgcgttcccagcggtcagtgggcctctagtccaattggatgggtctatgagcatcacagattcatgaggacactcaaatgagagagcagaggagacgagctaacctgtatcgcgctggccacggcgaggtgtgttttgcggtagtggaaaccgaattggggagaatccgaaatttgtgctcgctagtgggggatttgggatgcaggtgggtgcggtagctgttgggatacatggcgaagctgaagggaggctcaatttataaatcaagtgagcggtggccgggaatttggggttgaatgcggtggcggtcagagaagaagcgagtcaccggcggggtgattcgtggcagttcacgggatgagaagccacgacagttactgggtaatgatcatagttcacggcgacgtggtcactgaccagaagcgtggcacaatcgcggcggaggacgcaaactccggcgacggccgcacggccacgttgccg

SEQ ID NO: 86455 - DNA, 534 bp, Zea Mays
cattgctagaataaccgctgcagagcaaggcttcttggctacagccaggaccgactgctaataaactgaagctttgatgatgaacatttggtctgtttccttcaccactcgtcgtcttgcgcctaaaacctcgtgaatctgtagaatctgatgcggacaatgacggctcacttctcgcatctgacaagctgccagcataatcacccatggtgcagttccatgcattgccaccagtataatagtcgatgaacgactagcagcagtggtgtatgaagtagtgctctcaaagcttttgaagtcatcattgctgctagaagcagatagttccttgtcgttaccagaagatgcactgcttacagcagaagtgatgacaagttttgctgtcacccgacagctggaggaggaagaactgtattccagcagtggcacccgaacggcaacacggctggacaaggacgccgaggtttcgccaccggtcgcgttagcgcatgtggaagaaggttgttgggtgggtggctcagtctacgcagatag

SEQ ID NO: 86456 - DNA, 400 bp, Zea Mays
tgtttttcagatttcattgttagggtgacttatacacttttgcaaattactccaagtttcaccacaaaacatggaaacccccaaacatgaaagttgcttatcttttgtttctctatcactttgatgtatacacttttgactaaaagtgcatagaacttgaaatcaccctataggacactatttagggttttagggttccaaattagggttttgagtgttctagggtacatatggcacttaagctctctaagcttaacctttcttgaatacttctaccaacttgttgagatcataccttagtgctcatctcacaaggccataggtctctaatccttaaggagagatactctaacctagggtcaagaatcccttttaccaagtcagagcatcacatcacttg

SEQ ID NO: 86457 - DNA, 586 bp, Zea Mays
tacgaattcctataacagggtccaatgccaagctagaagtaaactttgtcaaagaggtttcaaccgcttgacgatcaaagggcgaaaaatggtgaataagctatacacactgcctcaccccatgaacgcctcacacaagtatgtaaagtgcatcattgagcgagatgtctaacacggaggccataatagttaaggattcaaagaaggaagtgtagtaggggaatttaggcccgccatcacatcagaataaagggcaatgtacaatcttgaccccctctagtgagtccatggcaaagctatggatgggcacatattattggaagtagacaatgtgatccagtctaggagctctcgcaccatgtttgagccctcttgttcaacactctcccatgcgacaattggtcgaaacagagacgtgtgtactttggaaaggattcatgtacatcatattaaatgtgatgtgcaacgttacagtctaattggtacacggttaccacaacttaggcactaagcatactcaagactactattcaatatgtgtagtgaccctgttaccacgtgtaggcgtgacaatgtaccagaaagg

SEQ ID NO: 86458 - DNA, 622 bp, Zea Mays
ccgacatgaacagaccgcgctagtccaatagccttccttgtccattcctcatcatcggatccactctcatcatcagatgcactcgcatcatcagttccacttctatcatcagagccactgtcatcactagtaaataaatggagttcacatagcattacacaaattagtaaaaataattcacataagagttcatgttcagacttcattcatactaagacaaaattgttgctaaaaccaatctgctacttgctactttgtgcaaccaaactgaaagcaaactattaattgcattttcagtcactaaaaacatactacatgcttgatgctacttttactaaactaaaactgcattttcagtcactaaactgcattttcagccactaaaaaccaatgagtagaaacttctactgagctgcaatttcactgaagctaactgaaacatgcttgctgctacttttactaaactgaaactgcattttcagtcactaaactgcattttctaaactgaaactgaaaccaaactgaaacagtttgctattttctaaactgaaactgctgccaaacttggtgaactgaactaccaaactgaatcaaactgaactgctgcaaaactgaatcaaac

SEQ ID NO: 86459 - DNA, 722 bp, Zea Mays
ggaataggggctagggctttcggtgtaaacttttgtttttgtgatactgaacctcggttgctgcgcaggttccaacgtttgggcctgtgcaagcaaccgctgctggtaatactgatttttgtggcggccgcaaccgttgtgcctgccgataataatttatttggctctggatctgagtgttttgagtctgatggtgagtctgggagttcgttttcgtggacggaggagtcctcggatgaaggcttggattattttgctgcgttagatgtggccgtagcggagtcttcaccacgtgcgaaggttggcgaggctgctgatcctcctggcgcgagtgctgagcacaggcggcgaagggtggtgtcaaagcatagtgtgggtgagttttagcgaagtggtaggcgccgtcatatggggatggagcgtggccatcttcgagtagaccggattggtaaacgagaactgttgtcctcgtcgactggggcaagcataagtgagggggatctgcgaaatcttttttagggtgaggaattgaggataatgttgttcaattatagggagatgggtatcatcccgaaggttgagccgatgtagtatatggtgccctcaccgtgtgtatgtaattgtaacttgtattgtaatgtggcctgttggccgttttctcggcgagagactttgatggcgtgttttattgtgcttgtccggctgcacccttgggcgtcttt

SEQ ID NO: 86460 - DNA, 975 bp, Zea Mays
tgttaaatccttaggctcatggctgagcccatgagcccttctgctcaggctcttcttcatggagcttgacttggtacatattattgatagtgatccctgagtaccatttagctcattcattgattcaggaaaatgagactcttatgaatcttctagaatgaccatgtaaatccatccttgaccgagtccttgactcattctagcggcccctgagtctatagactcggctcggagcttaggactcaatttatttattaatccaacatttcaaattctgtaatcccataaaagaaatcccatgatgcttcaacttactcaggccaacaacttcattctccgctactaaacactccgcccagttgatcctttgccttccatcggagaacttttgtctaaagcttgctttcatcgtcattaatcctttaattgatctgctccaaattcattggtcccaatggtcgctgctcatccacacgagtttgaaccttattcaatagaacataaagttttgcaagtccttcacactacaagatcgttgcaggagaggaagataatcgaatagcgcgtgcctgacaaagggccttactagatgttgatccaagaggagattgtagtcctcgcaccattccttaaacacgagtgtttcattctccacaattcttcctcgaccttcttcaatgttaccagattgttctccaagatttcttatcaatcgttgtgtagatgtttgcttttagtgccttatatacaagtgatatcaatctctagaatacattttttggaattttactagataaataaaagcataacatttatgtttgtaatactattaagaacctaattatcaaatgtagtgatgttatcctattgcacccatagaagtaaaacaccttatcattcatacattcatagttccaagatgcttgatatatattgttgatacatgcaaaataaagaaacaatgccacaaaatag

SEQ ID NO: 86461 - DNA, 472 bp, Zea Mays
gccagaatagtactgtttggtggattacaagggcgcgtgggccctgagggtttaaacaaaaaatttgcggagattgtcaatattccaggaatgctctaggtcttcgccggatggcgttgttagcctgtacgcgctggggacgctttcgacttgacgatgaacggaccctcacactttggctccagtttgcctcgtgactctgtctgggtggttcggacgagtacgaggtctccttcgttgaactctcttgggacgaccacgtggtcgcgccaggccttggtttgagcttggtatttgttgagggcctgcagggcgaagacgcggtctttgtcgatgaggcctttggatgttggttcgtctacgtcggggactgctgatgtgcatgtttggggtgacccatgctttatttcctgcggcgtcatggcctccgatccatatagtagatgaaaaggtgtgaatccggttgcccagc

SEQ ID NO: 86462 - DNA, 324 bp, Zea Mays
ggtggtgagaacctgcacagggtgttagtactacacgcagcaaacccatctgcccgcgcagacactccaaaccattcctatcacctcgttgtttgccatctgggggcttgatctagttggacctcttaaaagagcactcgagcggctacactcacatcttgctcgcaatcgacaaattctctaagtggattgaggcgtggcccctcgcaaagatcacctccgagctggccgtaaaatttgtcaccaacatcatccaccgttttggggtacccaactcgatcataatggacaatggtacacagttcactagaaacaagttcatag

SEQ ID NO: 86463 - DNA, 997 bp, Zea Mays
tcgagtctccttgcaagcttgcggtttagccaaaaccttgtttgcgtgcgagtggggaacctcgacgaagtaagtaatgaagagtaagttgtccttttttgttttccaactaatattaggcgatatatattgtaatgtgttgaatgttggtagagtttattattcatatgtagtggcgtgaacgagtgtgcgaatcggggaaataactgagttatgttgattggacgtgatgtgtaaattttttttaaaaaaaatgtaggtttgtgtgtagagtgtactattgaacatgtatgtcgatgtattagagtcgtttgaagtattttgaatgcatgtcgaatatggttgcattcgaaatagggaaagagacatgttgtgcgatgaaaaggctagattgattttataggtcgtacgaaaaacattatattaagtgtatacgtcgagtgtgttaaatagatcctatgtatgcagagtgtagtgtattggttaggcgaagagttttggaatagacgagtatgaggcgtgcagttaagtcgagattgaagtgcaaatcctatgcaatgtgatgggattcgtgattatataagagttatatttgttgatgtgatgagtagtttagaaaatgctcgtttgcgtggaggatgtatcgttaagacatgagtgtcggagttcatttatattagtggtcgcgccacattgattgaagtgtctcgagtgcacgccacaatcgggttgtatgcgagacagggttatgcgcatgatgagtttggtaacaatccatcggtgtcactgatgttaagttaaggtttatttgtacgtggaaagtaataatgtgtttaatacttagaactctcagtcgatagtagaaattgttttggcttatatagagaggtggtgacatgccgaggtagtcatcacttcctctatatttataagttgagtcaatacaccttatgcgttcattgaatttcacctcgcacatagtgtacggttgagttca

SEQ ID NO: 86464 - DNA, 500 bp, Zea Mays
ttgatgtcgatgtcgacatggcactgaggcctggtgcacagtgtagtgctgaaaagtgtgaactcaagcttggtatatgcccttatggtttgagtttgtgatgagtgattgttaacgaagtagtgtcttcggttgagtcgagtggactaacaaggtgcgtgtgtgtgcaacatgtctcttggcttgtggtgcatagttatgaagtgtggagttggaggtggacgatgaaggtgaaggtcatgcaaattagtgttgattgaccgacattagtaaaagatgactgttgggacttgatcgacaaactaaataagtcgaatgactagatataaaggctaacgcacctcgggacaccaacatacacaaggatatcgtagagcatatcatgtcgctggaacgatatggtagagcatatcatatcgctgacacttgatcgacaaactgaataagctgaatgactagagggcttggtgggacatgtatgcatgcaacacatgggggac

SEQ ID NO: 86465 - DNA, 1046 bp, Zea Mays
ccgataataggtaaaaaataaaaaagaaaatcacatggatattattttgataatctaaaatatatcatggaatatctcatgggtactttataaacactcaaagctaatcgtgaaacatcatatacatactatgtgagtcgtgagtcgtcttaaagtatatcgtaaaacatcaaacacacatgtaaaacatcaaacacacatatataagccgacgttatttgtcacctaaggtgaagctacctggaccacctgcgcgcgtaataccatcctggcatgcccgtataatcggcaccagacctatcacacacaattaaaaacacattttgttgttctcagcgcccaacctaataataaaataacgtcagctaaggtgaagctacctagaccacctgcgcgcgcgtaataccatcctgacatgcccgcataatcgacaccagacttatcacacagaatcaaaaacacattttgttgttctcagcgcccaacctaataataaaataacgtcagctaatgtgaagctacctggaccacctgcgcgcgcgtaataccatcctgacatgcccgcataatcggcaccagacctatcacacagaatcaaaaacacattttgttgttctcagcgcccaacctaataataaaataacgtcacctaaggtgaagctacctggaccatctgcgcgcgcgtaataccatcctgacatgtccgcataatcggcaccagacctatcatacagaatcaaaaacacattttgttgttctcagcgcccaacctaataataaaaccgacagcccgattccccaaaacctaactttctcgatcctactaggtgccaccattttcgtctctccgcgtcgccttcactgagaagcacctaacctgcctcggccatcacaccttctacatcgtggaattcaccgtcttggagggcgattcgccgtctcctccgtggcaccgcgtcgccgtgtcgaccatcgtccctaatccctccgtcgcttccacaccgatgaccatttaaggatcgtcagtgatcttgagttactgcgat

SEQ ID NO: 86466 - DNA, 516 bp, Zea Mays
ctttttgttcagcgagagtcatgatgatactggaaagcgaaatccattgggaccttgccccagagtacaggtgttcgagattccgtgaaaaaaaagtgtgcagatgatggacatacgattcactataagtccctaacgtcttctactcctaataaccttatcttggttggtttgtcaaggagaaacaaattgctgctccaatttgtagcctcagaatgcaattttgcctccagaacggcactatgctttatgctctttccataacctagctagcagagaccctcatccattttaagccaaatttcattatccatgagaggtagccatcaagttttatgctgtattctcatgactccttgtgctctaagcacaaatcagtgcctctactgtacatatatagttatacatttgagaggtcattgtcatcccatgcatgtagaattaagtattacatacatggaacatcactgtaagtccacgtggataattgattataccatatgttaaatgcatgct

SEQ ID NO: 86467 - DNA, 582 bp, Zea Mays
aacccagacacaggttacccccgcggggacggccggtttatttaaaacaaacgcatggacttatgtgaaaaatggttcgagtgaaggggtacggggttggctgagccgtcagatcgagtttcaacggttcagattagatgtaccaaggcatgaacaggtacgctacgcccgcgcttggatcacgatctgacgacccatatttaataaaatctgaactacccaccgccatccgatctaagatctgacgacacagattcatcagggcgcgattcaatcttaaaccgcccatacctaaatctacggctgcgatcctgtcttctaccccttgcaacgcagcacagcggaagaacaggggctccctgagctcgccggcgcgatgcgcggaggcgtccctggtgctccaattcatggacggacaggtgctatacgaaatatgaataattgcgaatgaatgaaggtaaaaattaccggtgaatacatagcgctgcaccccagccacggtggcacggtggcagcgatatgccgacgagaaattccccacgcgcagaacaccaatcagccgaggtgagctcccaatcgtac

SEQ ID NO: 86468 - DNA, 649 bp, Zea Mays
ggaccctttcgtggccagcactcctcgggttagtaactacccaattgcttcctgttctagcttgtttatagctttctattgctctcggagccaaccaattgaagtttaccagagtcccatcaccggaacactcatctgctctgtagaacgccgccgcgacaccctctctgtcgacccgcttttctattcttgcatagttcaaattcaagcgtgtgcataacctctggtgaacacgtgaagcttccccgagcttcaattttgtcatccatgctgtcggttgttcggaacgcgtttacccatccgatcatccgcattgtctcagtggaccggttgattcaaagccccgctggtgaaattaattgaggggaaatgggcaggaggaatccaatctggtgtctgccacacgggagcaccagctgttgcagtatccggccggcgtaggctcaccggagttcagccccgtgctgattcgccgtcgtggacctcggcctgcgaagaaaaggaacttgggggaggtttctgtaaagtgtcagcgactgcatcaaatagtgtcttgggctctttcgggttgtacaaaaagatagggtctttcttgcaaagtctgcacgcgcgggcgctttcctccagtaatgggctaacttgggccagt

SEQ ID NO: 86469 - DNA, 334 bp, Zea Mays
tttatttccactttcctctttatctgagaagctgtcagtgaagatggtcatttgttcagttctatgaagattttccatacatcttttctcatgctgaaagactacagagtcagatttgataaatgtgtgtgatttctacagatgtctgagaacaggcacagaggtgcgaggcgtgctcagctagaacagcagacaccccaagaggaggcagccccgcagcagcacttgccaccgccacccccgatgaccattgaggagatgttcttgatgcagacccaagcaatccaggccattggtcagacattagcagctatgcagcaggtgcagcagcaac

SEQ ID NO: 86470 - DNA, 636 bp, Zea Mays
agcaaagcatcgagtggataggcatattccttccttgcagctaggtagtgcagtggcccaagtggccagagtatcgatctctcgaacgaaaacgtgattcaaggcaggccagccatgcatcgtgttcgtctcgccacagtgccgccccctcctcagtcctctgcattgtattctcgctcggattcgcatcgcgtggaacgcgacgaatctaataaccgccaaacgaacttgttcgacaaaaaagtcctctttcccccctgaatctatcaaagtccgcctggaattccaggagcaccactactgtatagttccgtgcaggtgggagtgggaggaagacgcttcacccctcggcaaacacagacaggagggccacgacgcacgcgaacaggccatgcacgagaatgcgaccgtggcgacaggcacgaactgccatgccaccagcgcaagcgcaagcgacagggacggacgacggagcggagacgacttggttggtgaacgaacaaccaccagctgcttggcctggcgtgatcgacctggattctctgaccaccacgaggccccgcaaagcaaaaaaaaaaagcggttgttcgtccagctgagctggccgacatcaccgacgtaaccgacagtaagcac

SEQ ID NO: 86471 - DNA, 379 bp, Zea Mays
aattagctgagccgaaggtggttaatattgaagaaacaagagtcgaagggacaaaaatattagaagttctaagcccttcggcagaagtgacagtgccgaaggcacaaaaaggtcttacaacgacccccaagaggaaaaggatggccagtgtactggatgtgctggagacgataaaaacttcaagttctactccagggaaaacaaccgaggcttcacaagcacagactgagacaaagctgaccgaagccaaagctacaaagagccaggccgagaccgaagctgggccttcagagcccgccaaggagaaatccttggaaaccagagaaaaggcaacggaaaaagaagctgtagaacaaattctgcctgaagaagctgccac

SEQ ID NO: 86472 - DNA, 450 bp, Zea Mays
gcgaacactaccttcgtgccaatggagttgtagaattccctgaagtcttgattgtcaaattgtttaccattgtctactgtcaagtcagaaggaactctgaagcgacatacaatgttcttccagaagaacttatgtgtgcactgtctttgacgttattgttgacacaatcttggcttcgttccacttcgtgaagtattcaactgcaacaaaagtaaattttaagttgccctgcgctgttggcagtggtagtggctaggtgtgtgcgatgagctttgtgaactgcgaaggggcacccgtgcgaggtgagaatttttggcatgcttcgcacgagcgggccagtttgttggatgcgcacacaatggttggccagtagaaaccttggcacatgaccttagcagcaagagctctaggtcccgaatgtgatccgcatgttcctctgtggacctctcg

SEQ ID NO: 86473 - DNA, 421 bp, Zea Mays
agccatggagatatcacaattgaggggtgaagtaaaggagttgcaatcaacagtggagaggctgtgttctgaaaacactggatgggagcgggagaagaggacggctgagtctaaaagccggtgactcggtgagaaggtgacacaactcgatatcatggtggaccaagcaaaggtagaagttgaaattagcagagcagaaactactaccgctcgcgaggaattggcgaagttgtcttctaagctagagacattgaaggtgaagacaatagagtctgatgcgcagatgtgtgggggagtaagtcgggcgcgtgcgctattgtgtgacggttatcgtgggtttggggcgtccattgctttgtttgatgaggagaaaactggtgtttgtgatctgtttattggctggattggatatgaacttggt

SEQ ID NO: 86474 - DNA, 508 bp, Zea Mays
gcgacattgtatgcagatgacggctccatttagttctcagctacaacttaccttaagttagtcgattgatttgcaaaactaatctacaccattataaaactcaccacttcaaacaatgctacatccacacaactaaacatccccacgttcataacttatactaaatccactgatcaaatgttatctagctaaattccatcatcaaaaccaatgctctaaatcatttcatttaccttgtatctgttactcaatcgcattgaacgacgatcatttcttggatcatcctcgtcactcatcaatgcgtcagccccctcactcaaccgcgatcaagccggaagccacggcgatcaataccccgagcaccctccctcaccaacgtctctaggacgatcaccacgacgtcagtactcctggcccttgactcgctctctcttgtctcactcgctcattgccggtcaacctcttggattgccacgcgctcgcttgatccaacctcccctcgctccgc

SEQ ID NO: 86475 - DNA, 618 bp, Zea Mays
atggcaagagggcattcttcaaatgtggtaagaccggttattttattgcacattgtccatataaggataatgatagggggcaagaaagtggagaagaagaaattcttttagaagggaggcaaagctcacattggcaaggagtgagattcgaatgacagctcctccaactttaataatgaatgtgtcaccaccctcgccttcaacaagtcctctctcttcccaaaggtcaaccacaagggccttatggccaaggatagaaaaaagaaggtatacactagaaactctccaaaatatacttcctctagtgatgatgatgattctagtgaacacgtgactatgctcgtgggatcctagagcatgcaggtatggaaaattacaacctatgccatattctgatggagccatgcctaaagatataaaattctagcacatcataattggtggatgccattgagtatcaggtccttatcggctaactccggtacttggtgcatacctagctagacttcaccttcatcgtcgactatgtcagccaattcatggagaactgtaccacctagcacttcaacacggtgaagtggatcatgtgctatatcgcctacatgattgactacctct

SEQ ID NO: 86476 - DNA, 705 bp, Zea Mays
gggttgcggcctggttttatatgcgaaaagggatgcgccagttgtcatccggctagcaaggtctgtgggcaaagacggttgtgctggtagagtagagccaaggtcccagcgtggtttgctaacgtgattctgttgaaccagacgcggatgaggctgcgtgtgtgtgcagtgctcgtgaggctgagtggcagtgcccgcgcgtcagtggccaagtgcctaaccgcgctgggaatgtggttttgggaaaccaccgtgcttgatccacgaaggcgacaatggaatgtggttttgggaaaccacagttcttcaatgggggcaaagtaccttactggaagatccgcgtgtcgacatatcttcagagcattggctaccaggtttgggaaatttgcctcgatcgtgcttatgaggtccatggtgctcaaatccctccacttcagattgaattccattgaattccatgattcgaacaacaaagcctgcaatgcattgttctcttgtctctcgctttttgagtttgaaagagttagacatttggatatggctcatgatatttggactaccctagagaaattttatgaggataccgaccacgtgaaaaccagactctttgaaacctactgtcgagagtatgagaactttgtgcagttgactggagagaccttcaacaccatgttttctcggttccatgcgattgtcaacaagatg

SEQ ID NO: 86477 - DNA, 505 bp, Zea Mays
gatgcagctcctaggctcactgtacatgtgtgtggtcatgcccggggtgatgatagccgtgaaccgccgcaatttctcgccggcagtgaagatccggggcttggcgagaacccacggcctcgtgacgttgacgttggtaagatttaccccaccttgtttgcattaatacccactccgcgtagcacccttcggattcgaggattaaactagggagggagaacgagttgctccggcggggtctccaccgtgggctagaggtggcgccgccgcatgggtggtgtctgaggttggggatgatgtcgtgaccgtcgatcgaaatgtggacgactcagattagggcctcgcgaacccattcacttgattgaatctggatccttggatccggatcgggtggactggagtgcgtaccgcttcatcaaaaccctcgtttgatcacaggcgtaggatctcgatcctacggatcatatggaccgagacctttcagtgcgtgtgttttacattagag

SEQ ID NO: 86478 - DNA, 647 bp, Zea Mays
cgagccttcaggacggcacagttatcttctgaagctttaacaaccaatcgagcagtttctagctcctgtgcgacgagtttctttgaagcacgaagatctttaatggtcaaatccttagctgataatagctatccaagtcgttgaacttcatcctgagatacttgcagctcgcgacgatgatggtccaagtccgacatagtaaagcggtggctcctttccaaaatagtcaaggagttactagcgtcacgatacaacctgtccagattatcgcgagaggatgcaagcactcgtttctcctcctacgaacaagaatcaacattcagcgcccagtcgacagtaagcatggcaaagtcaatccagggagtttacctcatgggccaccctttccaagtcaaactgagcattgagggaagagttcaaagagcgtgcgtcatccagtgaagcagaaactcgggccaagtcggcttgaccttgagaatatttctcctcaagatcagagcaccgctaggttaagtcggcttgacttcgaagatattactcctcaagttcagagcaccgccgggacatatccgacaatgcagctgaaaaggggtacatgattaaagacaagttgatcaataaaaacaactaaggaagaagtgaggtca

SEQ ID NO: 86479 - DNA, 373 bp, Zea Mays
tatgcaagactatctgcgagatcggccttcgtcatggcacaaaggccagcttcgagctttgggaaacccatacttctgcctatctcccggcagacggataattctttactgtccgggaggcagtacaaaaagtcatcctcggttgtaccattaaatactagggctccctgcgattcccgggcataatgtttggcttcagaaatttcttcttcggatagtctctttcccgaagcatgtctaataatataatcaaaaccttcggagggtgcttcgggagtaagggattcggcttctttggccacacttttctcaaaagctatattagtatctggagttattccttcggccccctgctcggttggggcaagcttcg

SEQ ID NO: 86480 - DNA, 566 bp, Zea Mays
cagacagagacaggtgtccgttcccgcgcagatcgccccgagaggtcaacagacagactgctcataatcataaataagcgcgcgcaagagccaacggatcagctgccgtcccgtcactcacaggcccaccacgtacggcgtcgacgcggtttaacagcctagcccgcagaccaaaaatgcgcccgacgatatgatgcgatctctttttttttgggggggttcgtcggaatggattgtcaaagaggaggaggagtggggaaatggacagcgacctggagtggttaaccccctcgcaggcgtattgtatctttcaggcctcggccgcaagcagctggactgcattaggagcagtggcgggcagagggaagcttccggtccggttacttgcgagatgattcgcgtcttgccctctgggcgatcggttttttctattagccgaagggcagggagaattctgccggctgtaggacttgcagggtattttctgtagcttagtttaggtttcagatctcctgcccaactttgtcaagttccagagatacgcatgcatgtgttgctagttcctg

SEQ ID NO: 86481 - DNA, 597 bp, Zea Mays
cctcaatgtcctcgggagagggtcacactctaagacccagaccaccatcactagtaggagggttggacacgaaattgaaaaatgacctatgaggtggtagattccaagcagaataggcaacaagagcaccaacatttgatatcttgcctcttaggatcatgtctagtcagctcaccagatcctcagtaagaattttcttgttggtgacccaggtagagtcagtattaccactgtacaagtaagctggatacgccctgtctttcaaaggctgaatattcttgaaaacatagtcagcaaccacaacttcggcagtcagacctctctccttcaacagatagatctcagcaagcagaactctagcctccgttacctccaaggaagttggagactcaacccagcttgaagtacatacatctggctgtctcctcgaccgaggggagggacttgcagtggttttccacaataaaccactcaaggcgccaccctttaatgctatccttgagaggaatgtcgaggtattctatcttcctcccgtggcgcatctccaaacttgcaccaccaacgagctggtgctgcccccagccatcccaggccgac

SEQ ID NO: 86482 - DNA, 518 bp, Zea Mays
atcattgggaagatcaccaagtgaagcaaccagaacctcaacttcttcgagagagggtcgcactctaagacccaaaccactgtcaccagtaggaggattggacacaaaatcgaaaaaggacttagaaggtggcagattccaagcagaatatgcaacaggagcaccaatatttgatactttgcctctaaggatcatttctagtcggctcaccaaatccacagcaggaatcctcttgttggtaacccgggttgagtcggtgacaccactatacaaataagccgggtacgctctgtccttcagtggctgaatattcttaaaaacaaagtctgcaaccatagcttcagcagtcagacctctctccttccacaaacaaatctcagcaagcagaaccttggcttctgttatctccacgtctgtgggggactcaatccaacttggagcacgaacatctggttgtctccctgaccgaggggggagggacttgccatggttttccacaatgaaccactctaaacgcc

SEQ ID NO: 86483 - DNA, 467 bp, Zea Mays
ctgacatcgtgagcctagaatacggtcaatgcacaacacgattctcggtctggaccaacatgggtttgtttttaatcgtgtcaggtcgtgttgtgacaatatcaaatggttcgtaactgatggaccgggccacaatactattaaatgaaccgtgtctcggactagcccgctaggcatagcctatttggccatctatggtccagtatctcctccctcgccgtttctgatctcgcgagcatgaagaaaaacgagagagcaaacttcattttgtctcaccccacacaacatacatcaacattcgcactcgcctaatctacgagtttggatcgtgtttgaaaaactatatcatttaagcaatatctacctatatgttttatagaatctttagcgacgcacagtcaactaaatagttttatatttaactagtgataagttttagtatttaaataaaatatgtattataaaat

SEQ ID NO: 86484 - DNA, 520 bp, Zea Mays
gggaaatataacagacaaaaaagtaaagagtacattaggtatgagaattttctaattaagtccctgtgtgacttcagtaaatgtgccttgactcgggcacattgttattgactgtgcgagtttcggattcttcacgcgtgtcgcactgttgctgtggctggcgatgcccttctgttatgagccaaggtaggtgccaatggtggtggtggtaactgagcccatgccgcttgagaatgacttgccgaagcaactaatgtcgtgggttgctagttgcccacatgttcagggatatatggcgaataacacgaggcagtatgtaagacctgcttcggctgattctgccgtgcttcggcttcagcgatctcctctgcttttggatcgtgacttggcacgtccttgttgtgtgtcctttatcctccccatagaataagcagaacaatctcctaggttgcatgctgaaccttcctccaaagcttcttccccctctgcctcttggagctggtggcctataagaggtttg

SEQ ID NO: 86485 - DNA, 382 bp, Zea Mays
gggtaatccatttatttccactttcctctttatctgagaagctgtcagtgaagttagtgtccctatcagaagaagaagtgttagtggagttggtcttgtcaggaccaaggaaagggagttgtcaccaagtcaccacctgtattgaggagattaaaccatcagaggctatcagtgtagtatcagatttcttagatgtgtttcctgaggagttactaggtatgccacctgaaaggaaggttgaatttgccatagagcttattccaggcaccgcccctatttccaagagatcctagcgagtgtccggaccagagttggtggaactcaagaagcagattgatgagttgtcagagaaaggctacatcagaccgagtacctcgccttg

SEQ ID NO: 86486 - DNA, 961 bp, Zea Mays
cacgacttatgctcgatcgtaaactaacctcagcaccgtcctccagcagatactacttgtgtagcgggcgagggtgaggtgaggtgaggaagaaagagagccctcgccgcgtgcttaggccccccccaagacgccgagagaggaaagggattaggcagcaagaggaggcgctccgctctcggattagaggcgagcttcctatttccagcaaaggcaaggtgagtagcactggtagcagtactgatgagtgagtgatggtgcggtggagcactgcagcggcaggtttatctttctcctctcttgctcactcgcacatgcatatcccactcacaccagcagcagcgagctgaggctaggctagccatcctcatcctcaactcctacgcgcttagcttgcttgcacaaacctctctctatgtctaagagcttctcgctgcagatctaccgccgatccatccgctaccgagctatgccaatctatatatgcagctcatgcatctaacctactgcatgtcacacagccccagccccatgcccgctgtaccgtgccgccgtgttgttgcttttgcttctctgcctgcgcgcaccttctgcttctgcgccagcttttttcttactcccaagatctctatttgtttttttttccgttgttgctgtaggagaggatcagctagctagctgctaggaggccggagggagagaaagatcggaggaggagctgcaaaggctagcttttctttggtgcggctggtgctggtggtgaactggtctcggtgctcggtggtgcgtggtgtggtgcacactgcacactctccctctcgcgttcgtcttgatggtgggtggtggtggcagctgcctcgcatggctgggttctctctgaggggcggcggaggcgggaggggcggtgaccggggcggcgatcacccgatcggcgccgacagcctgttcctgtacgcgcgag

SEQ ID NO: 86487 - DNA, 452 bp, Zea Mays
agctcgatagcttagcagcttaactaggatatttgaaaggtgcatgcagatataagcaaatggatatagtcttggctagaccgattagttttattgttgttgtgagtcagtgtgtttaagttctagaaattgttcatttaggtcatgtggttatatatagggctactataatatgaattggagaatgtaaaaaaacaggagtatttagatccttggattactgttggttagagtgccaaatatatgtagtctccaaaaagcattgtttcatgaaactcctcaaaaggttatttttttgaagctaaaggttagttccatgattttttaagcttatcaaaaggtgcttaaaaaacattgttttcatacccctcataacgtttcacgaaaattatgcatcatatcattggttacacgacttaccgatttacattactctcctacactcattacaa

SEQ ID NO: 86488 - DNA, 803 bp, Zea Mays
ttcttccccgaagcatgtcgaaaaatgtagtcagcatcttcgtacggagcttcaggagcaggagcttcagtttttctggtacaatctgccctgccgttttttcttcaggtacggcaggctttgtctcggtgggcactaaaggcccagcttcggcttcggcctaaactttggttgcttcgacaatttccttaggggcagggctcaaggccttcgtagtctctatgacagcgtctagtgcgctggccatcctcctcttcttgggagttgcgacagaaattttttgcatctttggcaaatttgcctctgccatgggcttacgatttctggcacttttattacttgttccaccggtggctcctcggccttatcatctttaacttcggctagcccgactgaaggcactttcggtactatagtcggctcttcagcgctctgcacaattggagcagcttgctttgctttggcagctgaagaggtccccgcgccaaatttaggcactatggccggtttaatgtaacatggccggtgcgtcagaaccttcatctttttgccctttggctcagctgcgatggccgaagcggtagtctttctctttttctcttgccctcacagcgggtaatggtaatcagggtatgcgaagccaatagcatcaaataccctgttcaatcttttcttgccccaacccccaaaagctgcggacaaagcattatattcggccttggagtatgctccaagtagctcatcactggtagcttcgatacacttcagccagtcatcgtctggctcatcaaactgctccctaa

SEQ ID NO: 86489 - DNA, 503 bp, Zea Mays
aatcaatcgcgttcccggcgatccagggcagtttaactcaatcgaattggtcgagaagcattaggagaacctaaggatgctgaaacaagagggcaggaagcacgaacagacctagagtgcgctgaccacggtgagggctctaccacggtggcggaaacagaattgggggaaatgggaaattggagagttgtagtggctaatcggaggcaagagcgggtgctcaggcttggtgatgacctaacgcagcagaccgtgccatcaatttatagcggcgctaagcggtggccagtgaatttggtttggcgcggtggcgatcggagatgaaaggggttactagcgctcgagcttagtggctttcaccgtggtggctctccggcgatcaccgggcatgcaagacgtgattcactgcgacgtggtacaacgcttgagcacgtggcgcacagcggtaagcggccaacggcggcgaggtctatcccgactgatcgacgagcaagtgggtacgg

SEQ ID NO: 86490 - DNA, 334 bp, Zea Mays
caacagatgaccgaaagatgagtgaagtgaacaacggtgcaagcaggctatttatagaggctgggggtgaccatccacttcctaccacgctcgtcgaacagtcacaagtattcaataagcaattcaaaccgcctgaaaatgagtcaggcaacagacgcgaaaccgtttcgcgtaacacgacaccgtttggaccaaggtcaactgctcgagcgatatgattacaccccacggtcacatcaagttactactctaggacaatatgctaaacgctctgtgtaccaagacacccattgggcacacccatggggtgtgtagccaggaattttcaaaagat

SEQ ID NO: 86491 - DNA, 494 bp, Zea Mays
ggtcaaaccatatgatcatgacataacttcaaatgcaaaacgaatgatgcgctatgcatgacatgccaacataattccacatcatttaacatgcttcaaatagatacttcaacttcatcaagttacaaatcaaccacctataacattctcgaatcattatcctcaacatatttaaaatagtagaacatgaataattttaaacagacaaacctcttaatagaattcaatgattaacacatttgatacttatgaaaattcaatgacagggcacaagatacaaccaaatggtataaaaccaccactgcatttacttgccttcgtcgggaattggaaatggtactaagtacgatctggaggtccaccacctgttgcggcataaaacttagtgcacacattcatataacattcgctaataaccaacaccgctcctacgcacaaaccccaacaccgacgtgaacaacacctctccctaccacccaccaaactgcagcagc

SEQ ID NO: 86492 - DNA, 825 bp, Zea Mays
ctaccatacacaattaatcaacgcattcaccacaatcatcaaatctgacatatatgtatatcgaagcgcttttcacccactagttcgtattttaacttagaaccacatgagcactactaatttttacccgcgaccataaccatacgcatttagactacaacaagcaattcatcgtgactacgagcttaactaaagccatctaacaagttggttaaccagagcagcaacctaggccgctatacaacatactcgtcggctagcctattattatcgaaatccgagacacaatatacaatacaacatttttataaacacacatattcacaagtattttcgcacaccgaccaacacatacgaatcgtaaaccactaatctccaaatcgcaatcaccatgcatttacttctcaaactgtgaacacatgcatgtttatcatatgaacagaacatttcaataattattctaaagcaactaacttcattacacaacttgtatcacgatcctacttgatttacttgaagtgtctactcgaaatcgtgagcataatcatacactatatgcgaagcaataatttaacgaacgcacaatgcgcatcgacatgactcgacttataaatatagagaaagcgatgactactttggcatgtcaccatctctctaattaagccaaaacaatttctacttatatcgaccgaacattcgtgtcgagcacaccttatattaccttgtgtcgcgtacaaccatgttgtggcgtgcacccgagacactaccgattaacttaacgcaattatcactataatgcacttcgatatacacgttcgacatcat

SEQ ID NO: 86493 - DNA, 1116 bp, Zea Mays
gtaatatggatattcggtatttgtacctgttatccgatgggtatctgatggatattcggtatccacaggttcctcgtagtgatgggtatttgatttgatgggtgctaatacaatattgttgtctgatgagtcggaataatgaaattattgaattatgatacaattgttgtttagtgctaaatgctggaattatagtggactggcggatataagtatgggtagctccaaaaagctcgttccagatatttgagcggcggggtacggtcctcgcgtgaaaatgatgtgctgatttctaacagcgactttacagattgctacctacctacggttacattggaatgcgtttctttgttcttgttggttttcctttggaagcaaagcaaagcaaatcaaaaggaagccaacactcgctgccgtgtaaagcgcccaagatgatgatatcggataagggattaggcactaaacaccatctctccatgcacggaccttttcccggcttctgtcacacgaaagtttaaaaaaaaaaaaaagaggaaaggagacgtctcgtgtgcttgtgtcagtcagtctccactgttgtcgaactgcattgggcaaattggctctatcttctctctcatcacaattcgtctgtttgcttcgcttgccgatccaggaggagaaaacgggacggattcgtctgtttgacctccactccaacaaatagccgtgttcttgggcaggttgctgcctgccctaccaggctaccactgctgtttgccatgccttgaggagcaataatgcctcggcgctgctccatgtggagtccacgcaatctccccatcctaccaatatgacaggtcagccaaacgtttaccagcaagagaagagtctacaggcagaaagatttggaaggcactttttccccccagctggatacaaagagattacgtttgccatgtcggcattgcacatctgcgcttcagagtgcgtcctctttgtggcgtggcggggcccaccggggtgtcagcgtgttagtttttggttatccggtgtctccatttccttgctattcctgcaatgagacgattagcctatatatgcatgaattgctagatctgttttaccgttcgttcg

SEQ ID NO: 86494 - DNA, 546 bp, Zea Mays
aacaaaagcgttaatcaaagtcttttatttaaaagactccgcgcaacagtcgcctaagggtgcaactgaaatagcgttaatcgaagtctctcattacaaagacactccgcacagagtcgcccacggacgcagccggaccaacacaagcgtacgaatatggccaataggccacatcaccatacaaattacaattacatacacacggcgaaggcatcacccattacatcgactcaaccttcggaatgatgcccatctccctgtaattaaacaacattaccctcaaaaagcttctgaagatccccctcgcctacgctcgccccagccggcgaggacaacaattctcgtttaccaacccggtctacacggagacggacacgctccatccccatacgacggcgcctaccactccgcgaaaattcacccacactatgttttcccaccaccctttgccggctagacccgacacttgcactaggaagatccccggcaccctccatacgcggcgaagtctgtggcggaaccgctcgaattattccaacttaagtg

SEQ ID NO: 86495 - DNA, 444 bp, Zea Mays
cgcaagacctgttgatagctctgtcggttaaaccggattcagtaccacatttttccctgcggcaagggttactgcgttacaaagataaaatctatgttggggcagttccctcccttcatacgtagattgtgtcagctttccatgacacgactgttggggccatagtggtataccagtaactcttcgccatatccgacagttattcttctggcctggtatgaaatccagtgttgcttcttttgtcaaaacttgtaccacttgtcaacaagtcaaaccagaccgctctcgctacccaggcctattggagccccttgaaattccaccagcagcttggcacaccatcactatggattttgtcataggcctgcctaaatctggccacgccaactgtgttcttgtggtcgtcgacaagttctcaaaatacgaccatttcttaccgttgca

SEQ ID NO: 86496 - DNA, 1059 bp, Zea Mays
caactcttggccgattaagtcttcagttgggcaatattcactcgggtaaccaccattcaagcaattttgattcaaatatcttaggacagaacaagaaactagttgctacaaaagaaaaaagaattgagagattaatttgagcagaatttttggggcattcgagttgaatataactaaagtcagctcgaagctcgagggctacacccattggtgtgcttttcaagcagaaatttttttcattcttggagtctcaagccaattatactcaaaactagcttgagccttaggggcttgtggaggatagatatcacctggttctccacgggctagatcaagcctatgggccaccgaaggaccttgatgggtcagatgaacatgcttgatgggctgatcggtcggcccaagccagaggataaggacgaggagtccggagatgcaggagtggctattccttaactgattctcgcgtatgcagaggagataaactaacagagtcgcctgcgcgcatatgcgtcagagtcggttccgtgaatctaggcaaggcaatagtaatctattcaacctcatacaattatataaccctaacctcgtcggatatataagtcgggttagggacccctacaaacgattggatccccggttatgcataggtagacctcggatatcaaatctgaaagcacaaactagatcattcccatctcagcagcgcataggacgtagtgtgttacgcatctgagcggcccaaacctgtataaatcttcatgtttcatcgcgctttgcgtggaccatcgagctaatcgttgatcttgccaaccacaaaagcattatgtggtatatctcgtagtgtgttgtcgatgctaaatactgacatgggcgcctcgccatcacttgggagccttcgtacgagagcgaggggaactacgagcgagggagaatctgacggggaaacctgagagggaggggttacgaagaggttatggttacggaggacgtaggagttacgtggtttctcctcgcggggacacgagggcgaaatgctacgaatgaggttattctttc

SEQ ID NO: 86497 - DNA, 645 bp, Zea Mays
cattaaataaataataaagaaaatgcatcccttgcttatcactttgggtaaggcattttattgaagacataacttgaatttgaccttaaaatttttaatgaaaacataaaatagaaattgagaaaggaaattggaataaagttacttattactagaattaaatgaggggaaggaggaaaaatattaatattaaaaatagtggcgtttatattcataaattggatcatatctaatattgggaatactaaaaatttgtcagaagtataaatcctaaaacttttaaaacaagaatttaaattgaaacccagaaaagaaaacctaaactatttgttaaattggaatgttcctcccataatctatacaattagaaatactactccaaatacttaagtaacttttattataaaatatattaccatctcttaacaataagtagtcaacaaattatcattttgaagtaattcttttctgatcatgcattcagaaaaatgatatttccctaaaatcaataatatgagttactatttattagttgatttgggagatttcattaaaggaaacatatgtgtgttgcatttgcctaaacaaatgaataactaataaatggaataaataatttcaagccatgctagaatttattgacta

SEQ ID NO: 86498 - DNA, 743 bp, Zea Mays
ctgaaatcaggctaacagtgaactgacatcaacttcaagcccaatttcgagtatgatctaatgactttttgtggcaacaccctattgcaatgttgtaggtgacatattactctacaactttgctgcagagcttgacatgagttgtcattaggaattgagagaaaaattggctccaagttcgtctgtcaggcttactaaagaagcgcacgccatggtacagtgactcaaacagatcagaacgccagcgcggctgccctcaccgccgacggctccctccgccgtgattcgtgtcgcgggcgttgagattagtgcctgggtgttggatagcgctgcggggtaaaagaatcttcgccgccggtgagctggactccactccggctagccgcgatacccctccccttgctcaccactcgtggataaagcttttcaccgccgtcaagccttcgtcgttgcccgccgcgtggctctgcctttacaccacgtcgccgtgactctctagggccgtcccatcatcgccggtgagctcgccacgactgaggacacgcacccacggcgctagagtcctttcttatctccggccgccgcgttgttcgatcaaattgagtgccaccgacaaagctgcctataaattgagcccgtaactagctttgcaacatcattgcgcacccccacacctagtattgctcccagccgatcactagcaagctccaatttcgtattcccccaaatcagtcgaagaacac

SEQ ID NO: 86499 - DNA, 500 bp, Zea Mays
gtcgagcacttaccagtgatggggacgtggtgtaacgagtctgcggtaggggatttagtttccgcgttggagggaactccgatcaagaattcctatggcctgagggttacatgcaccaaatagcttcctcctacacgatccataccatcaggtgatcctgcaagggccttgccagggtgaaggaaccgtgtagatacacgttgatggtggtgctcgatccatctctgtgctctcagcggaaatggcgtggccccgcttttgagacgtcttcaacttcgttgaggtggtgatcaggttaaagcaagctcggcttcaatactcctgagggagggagagcgtcccggcgatgcggagattgcatatttatattcccagtgtcgaggcttcagtcgaagcctctgcaatccggccggaggaaaactcggccatgtctgttgcaacgcagtcctgatctgaatgggcccacaagctgaccacaacaaatgcgcgcgcgagcgaga

SEQ ID NO: 86500 - DNA, 656 bp, Zea Mays
ctaaaataaaataaatatgtttttgcacatcaagctgaagttctatatgtgtatctaaattaagggtttgaaattcaaacttgtgttgatttgaaattcaaatagaaaacaaaaaaagaaaataaaaagaaaaggggtagagagcttacctgggccctagacttcattccggcccaaccacagaaacacactgtgtggcccactcgaccttcacacccgcgcgcacagctgactgtcttatggggcccacccatcagcctcccacgtcctctcacgcgcggaacttctcccactgatgtaccaggcccgctcgctagtctcggtgttttccctatttatcttcctgacccgcgcggcgaacgccttctccgtgatccgcgtacccgcatgcgcccatctcgccagctccgcctgcatgacccgtccgccccatatattccgcctttagcctcgtcgcctcaaccccatgaagtcaaagccgccacgggatcgggtagaaaccaccagggcgctgtgaagttgagggtcagcagggagtggccgcaccgtgagtcttcaccgcggtgcgcccaaattgagccggggaccttcgccgcgccacactgtggataccggtggctctgcaaagacatcgggtgtcctcgacgccgtggatt

SEQ ID NO: 86501 - DNA, 514 bp, Zea Mays
ctcgaggctccatgttcgaaccaccaccaccccgtctagcacacctacaaatattgtgggttgctcagtaagttcctaagtaaggaggagccatccaggaggggccctgagcccagagagacggtgtgcaggaaagaaaaggccctgctttccccgacgagaccagatgtttgctgatatttggcgaccccaactactacatgtcgaagagacaccagaagctcgaacgacgtgaaattttctaggtttagtaagcaattcaaaggccctgtatccgatcttgggttgatattcgataggctgaaagctaacgacattaagctgaatcccgagaaatgtgtcttcagtgttttagggggcacgctgctgggcttcttggtatccgagcaggggattgaggcaaaccctaaaaggttgctgccatcttgaacatgggaccaataagggaccttaaaggggtgcaacgagtcacggggtgcctggcctcccttatccgcattatttcatgccttgg

SEQ ID NO: 86502 - DNA, 481 bp, Zea Mays
ctagggttcaaaatagatcaagtgttatgaaccggtattgaacccgagccgcaggatcttgatccaaccgtccagattcaatgatgcttgacctaacctaaaccgtaggatccccgatctacgcttctaattcaatatcgcgtataggtttgtttccatctattcacagccgcgcgatgccaatcggacggccccgacgacgactccctaacacaaccacgccccgacgacggagcagagctccccacggtggcgccactccggcgagcgcgcttcaagccccccagcgcacgattcccaaatcaaactgatgctacacggtgtaagtgcatgggcgaatcggtatggggagtacttaccgacgacggcgaagcagggacacccagtcacggcgcgaagccgtcccacggtggagatcgaactgcggcgagcaattcaagtcgcccccgaggctccgcagttcgaattgagcactccagca

SEQ ID NO: 86503 - DNA, 741 bp, Zea Mays
tagcttaatctcatactatagctagtctaccgactacactaaagtactacccatgttgacaatcactcatcatcaacctgaaccacaagggacaagtcaaccttgtgttcacagttagtcacctattaagattcctgtgaagaaccaaaacttgtcaacacaattaaattaacacgattccctctccctttcgatttactcatgataaaagagtagatcaaagggaagaaggttagattaagtgtgaatgcttaatgaagtatgacatgaagatacaaaaatgtattaatcatataacatgaacttcattcattcatttccttcttttatttacatatgattacaaaactagcttcgaagaattcaaaggcgacttgagggcattcaaatcttacaccttcggatgttgagcaatctgttgggtaagcatatgtgaatagccaaaaagtccccctgcatgggcactatatcgctatttatatttatgatacaacgtgcaacttcgtatgaaattacattcacacccgcaaaccctacacatgtgatctactgaacctaccgaaggtattgttatcctttctcattggcatgtgaaacacacacatcttgaatctcccttcgtctcatgatcacatgcttcaggtgctccagggtacttcatctgagtgctaatgtcaaagttagtatttgtttcctcatcacacaaaggtcatcgtaatggagaccacttttccatacccg

SEQ ID NO: 86504 - DNA, 271 bp, Zea Mays
tgaatttccaggaggtacattataggtgtcacatggctgcattttgacaaccaagtgccaacctttgatcagattgtctttgacaaaaaagacttgagaagcttggctagctaatacaaatggctcatttgtccgaagtagacatttaaagttgacactaacaagtccataaacatccttctttatccctcttttttattgaatacgtcaacccacttgcaacgaaataatggcacacgtcttcccccaagaaattgaagctctattatct

SEQ ID NO: 86505 - DNA, 665 bp, Zea Mays
caaggttgtctgcaagttcatccttcgacatcgcagataagccaagctctagcttcgggaatcccatattctttgccttttctcgacaaacagatatctccttgttgtctggtaggcaatatagaaagtcatcttcgttagtgtcgttgtataccaaggatcctgacggatacttcagatccttggcatattgcctagcttcggcaatttgctcctccgatagttttttctgtgcagcgtgacgcactataaattctaattcctcagtagatgcttcaggagcagggaatttagattcttctgtagccttctctttttctaacggtaatggtacttttgaagcatccgaaggtcttgattcagtatccttttcaacaatctccgtaggccctgcttctgcgggaactgagggcccagctttagtttcaacctggatcatgacggcttcgacatatttctttgtattcttgtcttccatgctaggtgcttctacagaggcaggagttagcgcctttgaggattccataacaacatccaatacactggccattctccttctcttcggagttattgaagcaatcttttgaaccttcggcagttctgcttctagcaatgaactcgaggtttttggctgctccgctgctgtcttcggggctgactcttcg

SEQ ID NO: 86506 - DNA, 369 bp, Zea Mays
attttttgttcggttggaatcggtaaacgggaaagtcagaaatagataacggtcggtaaattctggtatatcgaaaacagataaatccgagcaaaatagctaaaaattgattgggaaacagtaactgtaatcggaaaagctcacaataaacaaatcataaccacacggttgttcattcacatccacatacaagtctcattcacaaaaatacacaaaacacaatcttgtcaacatataattggtcatacactcatacatgtccactcttaaattttaacatacaacacataagtcttaaaacacgattgttcattccacatacaagtctcagccacacaaatacacaatacatagtcatgaccacacata

SEQ ID NO: 86507 - DNA, 899 bp, Zea Mays
ggattggggacgcttcaggtggtattagagctgttaggttggccgcaggacgtaacccttagcctgatcaaaagtttttgagtcaaaactattttcttaaaaaaatcttgctctcatcccttcatttcaaaaatgttttcccctttccttctctcagaagtcagatggaggtccgctaccaaaccagcttgtgccagaatgaagatggtttccccaagttgctgagagcatgcacagtctgccttggaatcaggagccagccagagtatgatggtcgtgaattcgtcgagcatggcacagagaagtgtgtcgtgattgtatacattggatccagtccacaccatgtggaatggagtgtcactgctgtggggcacagattcaaagacacctgccaagtcgtcgctcgtaaggcattgagggccctgtgtcagatttatgaagaagaagtggctgacacaccactccgattctttccaccctttcaaagagaccgtcccgtttggatggccaggatgcgtgcattggaagggaagcagctgcttgaggacgaccccacagtcgtgtacctcactgcatacctgctcacccttgatacacagtatgatttcttggctcggcaccaccgtcagatgattgcccgagtagaagatgcagagaagcgcaaccgtcagctccatgtggatctcaccacagctcaagcccgtgtagctgccttggaaagtagtgaagtcattgttgttgaagccctgaagcaagccaaggatgagcatgtccagaagttgatggaggcctacttggtaacccacaaccaacgtagagccctgcggatccaagagcccgcttcatccaacccagttcaacccatgagagctgaagatccccagattcttgaaggtcac

SEQ ID NO: 86508 - DNA, 311 bp, Zea Mays
cccagattagaccctgccaccactgcgcaggtacgtaataatagccgcaggatcatagatccatggtccctattctcccatatctaggcaaaacggttgtcaatccctatcgttcatctcggagcctacgattcggatcttacatagtccagacggtatatttcttttaatcccaatcgtttactcccaatccaacggctgtcagcaatcttccccaccactccgctcgccgacggcgctctacgcctctactggtgattggtgaacacgcagaccgcgacggcggcatttgacggaaagcgccaccagcc

SEQ ID NO: 86509 - DNA, 378 bp, Zea Mays
aaacaaaggggttcttctgtaagttcgacatcgtgaaggggtgtggatcgagattagccgtcagatctaaattccgcggccaggattagatctagcagcgaatgaaccggtaagcgacgagaaccattggatctgaaatcaatggtgaggattttattactctaggtctatttctaaccgttcgttctcgatcaaatcttgttcgcacgatcaccgatcgacgtccacacagctcccctacgaattccaccccgttttcccccagctaccgccgcgacggcgccaccagcatacacggtggtggccatggccggaaatggccagatcgatattccggccacgaaattcacatcccgatagctccacacgatgttgcag

SEQ ID NO: 86510 - DNA, 486 bp, Zea Mays
gtggttttcatcgatgatatcttggtgtactcaaggaacgaagaagaacatgccgggcatttgcatgtagtgcttcaacgtctgcgagagcaccacctttatgccaagttgtccaagtgtgatttttggctgaaggaaatcaaattcttaggtcacactatctctcaggcaggaatagctgttgatcccaataaagtgcaagaggtgatgaactggaagccaccaacgactgtccgtcaaattcggagttttctgggattagctggttattaccgaagatttattccggatttctctcgaattgtgaagcctataactgagttgctgaagaaagaagccaagtttgtttggagtcagaagtgcgaagatgccttccatgcattaaggcagcatctgaccacagcaccagtgttagcgcaacccgacaatagcaagccttttgatgtatattgtgatgcctctggcactggactaggttgtgtcttg

SEQ ID NO: 86511 - DNA, 315 bp, Zea Mays
ttgtgaattctggataggtggatccaaaatgggcatttctagttcccacttaaaaagagtagagaaattgaatcactgcaaaatatctgataattttcactcatcaccagtatttgtttttgcaaatcgcaatcaactcctcgcaggcagtctaataaatgaaaccattcatgcttattggcaaatcaaaaataattgggagataaaattcactttctgtaacaaaacgagtccagtgagttgaaacatgacaaaaagcgcacctaagtaaatactttattagctggtagttgctcgacaagaaaccaagaatcc

SEQ ID NO: 86512 - DNA, 747 bp, Zea Mays
cggcctgaggcgcgtcgattcgtcgccggtgtcagtgctccggcatggctgcgcaccctgccgcggccgtggactcgcacgagcatcgtcgtcttggcctaggtgtggggctgcagtggtttgccaagtcatggtgaagctacgactgccactagtccgatgtaggaggtcgcgaagccgtgataattcctcatcggagttattccgccgccgcggagccttgctgtgtcgtgggcagggatcatcgcgacataatcacaggtaatgtcaccatcgtggcactcgcctttccttccgcatcgtgtagcacctcgctgaagtccgatttgtgcacctgggccctgcgccggagaaacgccgatgaacctccgccgcggttcggggcggtgcggccgtggttggctgggtgaaggagagaaggcattgtggccgttagatctcattcaacgtccacgattagatctggggatagtgggatttgcgccgttagttctccgatggacgatccagattacttgcaaccatacccattcgcgcatagaatatcagtcgtagatctcacatcctacgcttgtcatcacgtaccatttcgcgtatgccttaatcctggcactctgttgccgagtggacggctcggattgcacagtaccctttcaattgtaacctttgctaaaagagaccctgatctttttcgaaatcaacccgcagtccgcggggtatgccacctgtgtctcagttccttttgcg

SEQ ID NO: 86513 - DNA, 311 bp, Zea Mays
aaacagattcatctcgcgatctgcagagcgaaacctaccgtccttgaagaccctgcgaagagcaaaagactacgtctagggccccgggcaggcaacggcctttgattcattcaaaacttatctaccaaaaatgataactttaacaagccaggagcctatctccgctctaatcttgtatgtcgcagcatcccacagcacagtctacacagctttagtgcaggagaaggccaaagacgagaaacgacaacatcagcctgtatattttgtctcagaagtcctcagcagctccatatgcaatatgacggaaatgg

SEQ ID NO: 86514 - DNA, 431 bp, Zea Mays
aaaaaatgtctgaaacgtggacactctagatttgtggaaattgttaatgatgagggtgacaaggtgatgacagatgttgcacataagcagcttcgctactttccactaactactcgagtgaaactgttgtttctatcgaaaaaaccaccatgcacatgcgatggcataaagaaggcgtccgtgagaacaatgagctaatggtgtacctttcagatggggatgcttggaaggctctcgacacgtttgatccagactttgcagctaaaccgaggaatgttcgaatcggcctcgcgaccgatggcttcacaccttttgatcaaatgtcatcatcatactcatgttggcccatctttgttattccatacaaccttccaccttctctttgtatgaagtatgaatttatatttctttgcttaatcatacctggccca

SEQ ID NO: 86515 - DNA, 992 bp, Zea Mays
ttactgaattattcaaacaatagaataaccatttactatcggaacaatacttttttttcaaatcatatcaattgctaggattaaaacataccattatgctattatattgaccttgtcctcaccattgatctatgttaaccgagcacaaacggaaaaaaaatagattgcagcttccaactgtttaactttaggacatcgatgaaatttgtagcaagcggcaagggacggtgcagccgtggagtcgctcatttttattggtattgctgcagcagaaaaccaaagaaatcatggagtcccttgtttcactggtattgctgcattataaaagggggaccagtgtcgactgagatggatccgcacttctagttgcggctgcgtttccttcacttctccgacgtggagctgttcatcgacccaaatgggggcttctccttatcggacatcgacttacactctctctctggatgactcacatgttggctctgaccatagcctccgtctgaccggcacccaacgtgaaagtggtcattcagcagctggcctactccgccatgaatgaggcgttgcgcgctgagtcatccgtctggcattcgaagttcaggcgagcgacatttgctctcgaacctcacaaaaacatctgagtagagaaattgtggtggaagatgatagcaaaatacctcggcgaagcagccagacgaacgcgaacgcagcgcgcgaggagggaggtgctcgaccagggactgacgagggaccgcaaacgccgtcgctatcgtggacgtcgacagcgtggtatcctccatatttttctcttcgtgtgaactctggaaagatcctcctcttgtgaattctgaaaagccctcggtgccagatgagttaaacagacagggagaacgctccactcgatggggctcgtctgtgaccgtcgatgctaaatcttgcgagtgagatctgatagggtgacgtggacgcgagagacgagatttgctcccgcg

SEQ ID NO: 86516 - DNA, 789 bp, Zea Mays
caccatttccctcttcgtaaagtagcgtcttccgcaggggccgagggctaggagcttagatcggagaattccggtgatggcgccgccgtctccgtcggtgttgcgccgccgctcagctgggtggggttcagtcgtgtccgtgcaccgttggatacatggtgggcggtctcgattagtcttggcgtactgattcgcccgagtctgcctcggccgtagatcagcagatgaacgcgagagattaggtcgcagtttttttttaaaaccgagccgccgatgggggatccaacggctaggatcaaataccggttcatggtgtgggcaggctgatctgggcgctcgatctctgatccaacgaccagaaaccctagctaccccttcgcgggtactttttgttaaagagcccccgaggaaagcactaatcaacccgccatccggagtacactattctctgtgtctcgaaaatcttacgccagagcccttgagttttccaggaattgacgcccgatccagagcccgtttaaaatgtataaatgaattagtaaatgtatttttaatactaaaataattccagaatcataattaattcatagaaaattcagattagggctttttttaacccattccagttcctataattttgtaataatattgtttatcacttagtaacactgttttagcataaatcccatattaaatctaatcacttaattaatcttgtaccaaacacgtaaaacttcggaaattcgtaaattcttcgttttaattccgaattaacccgttccagttgtg

SEQ ID NO: 86517 - DNA, 492 bp, Zea Mays
cttcgaccagagctacgcatgaagaaggagaaagcgaacctttggggaggggtcttgctagcgaccgtggagtagattcagctgttcacagcgccaagcaacctggcggggtcagcctagctccgacgagcaattccattgcgatggcacaaccaccgagcgtcggaatgacacaagagcatacgagatgccaccacaatttccccaagccacccgccgaggacccattgataccctccagcaagaacgacggcggcggctgggttcttcttccgcccatcctgctatggtgaatcatgtactctcgatgtcgaacgcgagagctgagctaggtttgtgggagaggcgagcatggcgcgaatatatatgcgctgcatgggggaatctggataggggtggtgagcgactccatccgaattccgcgcgcgccgttcggccgagtccgcgcgatttctgcgcgcttctgttcacgtgcgagtccgtagcgcggag

SEQ ID NO: 86518 - DNA, 514 bp, Zea Mays
caaaagagcacctacatcaacattgatagttagcctcaaaacacgagtactcttctttgatgggtcgacttgcaacataggcatagtattggcgtgtaggtggtctcccctcgaggggcaatattcaattttgcactatcgcttgaagcatgatgtaccaacaatcaggcagagtatgaagctatttagaaagggatggagctcattctagaagtcggagtatggttgtagaaatatttggagactcaaaagtggtaatcattcaactcataggggatttcaactctgccagtgacactatatagtcatacttaagcaactactgagagttgttgacaaaattctgattcatcacgctgacatggctgccataggaacataacttataagccaacagattgtcctagatggcattcatatacatgcctatcaaccaggatgataaagtgaaaatcctataggtcgatggagccgactggagaactgatatcttcaattacttgaaggatccaac

SEQ ID NO: 86519 - DNA, 393 bp, Zea Mays
gtgacatggctagggaaaaacatttagagaagaacgttgctgtcagtcgaaaattcacacaccatcttggtactcaacgaagaaagaagctcgatgtacgatcgaatgaagaaactagaaccgatcaaaagggtttattatagctgctaaacagcagccggcagcacaatgagccaaggagataataacacgcacgaataacgggtagaatctgacgatcggatcgaccagcgaggcagcgagacggagaaatcaacggcgcctgtaaagcgaggcgatggatggatggcctggccatcggagatccccggggggcagcggcgcaacgcaatgcaaaagtcggcaaagatgccgctggcctagctggaaggtataccagcagcagcagacaac

SEQ ID NO: 86520 - DNA, 597 bp, Zea Mays
tggcttcacaacatcaccaagaaccactcacttggtgaatatgagggttgctttaactatggagaccctgaccactttgtccctaactaatctaaaatgaaggacaaacatgaatctagcaagcacaagggcaagcgcaagtataccttcagcaagcataagtccagaggaggttctacaaggaggcactcaagaagaagtatatgtggtgttaggaccttagaggaacatatctacgaactcgttttggcagatttaaaagatttcgaacaaagtttagaaaatctcgatccccaaaggcacattaatattttttaagttgtttttgggtatagtttctaaagcaattgatacatttccatgtactaaagccattcttttgatttcaactgcactaaatttaataaaagtattcgcaccggattagttgtatttggactcatcacatgtttgattagaaccaatctttttccatgaccctctccttcatgatacttactcttgtcaccattacatgtctctactcctttaaagcacgagttttgtgcgtcgtgcatcacacgcgaagcgcgtagacctggtttccctcacatctcg

SEQ ID NO: 86521 - DNA, 548 bp, Zea Mays
ctcagaatctttggaatttttgttatctcgtcaatctttggctcttcagccttttcagccttatcttcggctggcccagctgtatgtgtctttggcattacagctggttcttcagcgccatgtgtagtcgaagcagtttgtattgctttgaccgctgaagaggatcatgcaccaaactcaggcaccatggccggttcaatgtaacgtggccggtgggtcagaaccttcatctttttgcccttcgacacaggctcagctggggtggccgaagcagtagtcttcctctttttctgttgccctcgcagcgggtagaagtaatcggggtatatgaagccgattgcataaaaaaccatgtttagtcttttcttcccccgacccccgaaggctacagacagagcattatcttcggccttggagtaagctccaagcagctcatcgctggtagcttcaatacacttcagccaattgttgtttggctcatcaaacttctccctaaatctgaaggtgtatttcagccggaccagaccaccatcactagaatcagtggt

SEQ ID NO: 86522 - DNA, 529 bp, Zea Mays
aaaaatttcttcctcagataatctttttcccgaagcatgtcgaatgatataatcaggatattcggaaggtgcttcgggagcaagggattcgacttctttggccatatttctctcaaaagctatatcagtatttggaggtacttcttcggccccttgctcggctgtggcaagcttcgtctcaactggcactgtgggttcggcctcggttccagcctcaattgttgcagttttacccttcatctgcctagtattagcttcagcctgtgcctcggcactttcggcaaccttctttatggaagaagggtgtttagagtctgttgtttccaaaatgtctaatacatttaccatccttttccttctaggggttatcgcagaacttttttctgccttcagcactgttgcttctgctgaaggacttagaatctcgagcatctatgctgcttcttcagttttttatttttcagccttatcttcattaacccttgtttcaataagcttagacgaaggcgccttcggcattacagccgac

SEQ ID NO: 86523 - DNA, 576 bp, Zea Mays
attttatgacaaaatttggtccacatggcaagcctctagctgattattagtgacgttcttgtttggcgtaatgacaatatgcaaatgtcataaaatctatgacgaagtagaattgtcacaattttaatgacagaaaaacttcaaatcgtcatagaacatgtttagccacgtcacatacatgacgaaccaaaaaacgtcacacaagcgtcatagatttcaatatatgacatatattcacttatcaatgacacaaggtgaatgtcatagaaggtaaggtgtgttgtagtgcatggtcgggaggccagagctcgcccaaccacgcacacgctcaccaccgcacacggtaagtccgccggcatgccctcaccgcgcctgcgcctatataagtcgcccagtcccttggacatccttactcgtagccccctcactctcgcctgcgctcggccaccggagaatcgcctgaaaacagagagctctgccgcccgccaaagtcgctcgaactcgaccaccgtggaccggccgctccggtccatccccacccaagccagctgctcggacagcctccccagagtccgg

SEQ ID NO: 86524 - DNA, 474 bp, Zea Mays
cttgatcagcccgttactggaccgttgtagagtggacagttaatcagcccgttaatgataggggaccagaattcagggggttttcttggccagggccgtatttcggtttcatcttaatataatatcgagagggcggtttttccctacctgaccaaggtcggcgcagctacgtcctaggatcctcctctcctatagtttaggaacctaaggtggtagcttgaaggccggtgcataggaagcattagggtctatcgacgtcatagaagggcggttttggtcactaaggcgctaggaggtgatcaagaccatagaacctgtggaggctagagtttgcagcagaggcagaaaacattggctctcgtgttgacgccctgtctcgtttatgtagcgcctattatcgaaaaccacaaccagaggatagggttgcgcccacgatcaagacacaggcgactaagatagggatcagtctcggtc

SEQ ID NO: 86525 - DNA, 479 bp, Zea Mays
ccgacgaaggcaaatctgccaaagatgcaaaaggcttttgccgcaactcccaagaggagaaggatggccaacgtactagatgctgtgctggagactacaaaggcattgagccctgctcctgcaaagaaaattgctcaaactgaagccaaatcacaggccgaagccgaaaccggccaagtagaagccgaagctacgcaagctcaagctgaagtcgaagctgggccttcagtgctcatcgagacaaagcctaccgcgcctgaagaaaaagcggcagagcaaattgctcctgaaaagattgagactcctgctcccgaagctttgatcgaaaatattgactacatcattcaacacgcttcggggaagaagctgtccgaagaagaaattctagaagccaggcactatgcgcgaaagttgaaatatccgaagggagccttgctttttaacgggaataatgaagatgatttcttgtactgtcttcc

SEQ ID NO: 86526 - DNA, 311 bp, Zea Mays
gggaaaacatccaaaatcactaaattgtattatatccagaaagactgagtacaggggaggtccagagatcacaatgaaccaggtcaaaagcctgctcagcccgagaagaagagatagtaaatgggagacgagtatgtcggtctaaatgataagcatgacggagaccctcaaaatgtctcctactacaagaagaatctagactgttggaaagcttggtcatgacgtcagatcctgggtggccgagacgacgatgccaagaggtggaggtggtggtggagaccagaacgggtggtggagacgtgccggtggaa

SEQ ID NO: 86527 - DNA, 903 bp, Zea Mays
atctcttccaatgcctggtcaaaatcagatattaacaacccctagaggctgacaagtgcttacaaggcttgtatgggaatgtcactgaccctgtggcgacgactattcttatgaatcagcggagttgccttttcttctcctcgacaggtgccgctggatggttcactcggcgtgaacgcttgcgacgagcaccttctggtttatgaatctcctcgtcttcaccgaagtcttgcccaatcgcaactgccatcggctcaatgcggatagagttagatcattctctggccagcaggctaagaacaaaattcatctcagcatcattagtactggacgacatctcaaagtgagtccgcttctcagcctcgggaagatttcggaggggagcaattaaggcctcaatgtcctctgaggagggtcacactctatggcccgggctgccatctcgaacagaaggattggaaacaaaattggagaagatactctatggaggcaggttacatgcagagtaagataagggggcaccgacattcaaaaccctgccccttagcatcatatcaagtcggcttagcaggtcctcattgggaatttgtctgttagtgactcaggtagaatcgttgacccctgtgtacaagtaagcagggtagactctgtccttcagaggttggaagttcttgaagacaaagtcagcgaccacggcttcagcagccaggcccctatccttcagtaagcaaatctcagcaaacaacaccttggcttcggctacctctgaataagtgggggactctacccagctgggcgtgcgaacatcgggctgcctccctgatcgaggggggagggacttgttgtgattctccatggtgaaccactcgaggcgccatcccttgatgttgtccttgaggggga

SEQ ID NO: 86528 - DNA, 442 bp, Zea Mays
gtgaattatgacttacgaatgctttcctaatattactctataattttttcaccataataatcttttgttgtaattgattctataaattattttttcaccataaccttttgcctcatacacataaccttttggcctcatacacaaaaaaatgcagaaagagttattgtgcgttgagggatgatccaataaagaatgaccgccggatgcgattaagtaagagagtgtagacaaatgaaataatctggaacattgtttttgatagtggattttgtgtggagttaaattgatgggtggatttagtaggggacatgagtgtgtgggttggtttatgaggtgtacttagcattgtttcaactgatggtttataaggggtcgagaaaaagaaaattaattggttctcctaatgatggcgactagcgagtccttttgtattgcttttttt

SEQ ID NO: 86529 - DNA, 778 bp, Zea Mays
tgaaaatggcgtagcggcgaaacccatttttatgatggcatttgggcgaaacccgtatttgataatggcgaatgggcaaataactccactatcatgcatagcagcaattatcttactccttagagcagaattattagcaatccagatttgattccctttcttaatcaaaccttggttcaaagaaaaaccttgttcatttggactatggacacttaattgagccaacatatcctgggctgcctgatccgtgacataggaattgataacttcttgaatccaaactgatgtcacttctgaaacagactgcagagccatcacatgacccactctggacaaagcatcagcagctaaattctctttgccttttctatacacaattctgaattgcagccccataagctttgccatacctttcttctgcaaatatgaatgcaacacttgatcctccaaaaaaactcaaagctctatgatctgttcttatcacaaattctgcatgttgcagatattgcctccacttctccactgctaagatcagagctaaaaattccttttcatagatggacaacaactgattctttgtgctcaaagctttactgagataagcaataggtctatgtttctgcagtaacacaacccctattcccttctcacatgcatcagtctcaacttcaaatgtttcctcaaaatttggtagggccaaaacaggagtagtagtcatggccttcttaagaatctgaaaagcctgttctgcttcagaattccactgaaaattcttggt

SEQ ID NO: 86530 - DNA, 788 bp, Zea Mays
gaaaaagagggttgtgagtattctgaaaaggcaagccattcggtccatcaaagaagattatagggccggtaaaaaaacagaaaattctagcggagtcgaaggattcggctcccaagaaacgacagcctaccaagatggtccctgccgagacgaaggtacaagatgtaccagaaaagactgctggtacttctccgtcttcctctattagtgtttcagaaatactaaaggtaatgactgaacccttcccgtttgctatgctaagtcccctgggatcggatctgactagcctattacagtcaaaggaaaagggaattgaacaaagctcgggagggaaggagactgcttcggctaccgaggtaaatgtcggggttagaagaaacgacgaatgatgaacgtaatgaacggcctcaacggaaaaatttcttgtgcctgctaatgccgatggtaataccgatatcgaagctgatgaggccgcgcctaaagttgagaacctcatgaccttaatgtcagagactgacagacttatagctgatgtgactcccgagaaggacatagctaaagcatccactgataaggcttcagcattaaaaatggaagagttgaaaaaggcttctttggaggacacagagttggacctatggcacctgggcggccaagaactcttcgatgaagatatttctgaattgaaagaattcacgattgcttgcggctacaagtccggatctatgctctttggcggcgtcgacgaagagattttagggtgcatccctaaccgcgccagagcaaaa

SEQ ID NO: 86531 - DNA, 486 bp, Zea Mays
cttgtaacttccttgggtaatgaatttttacttcaacccttctgctggaaccgtgcctatcttacccttgattattttctccacttcgccacttcgcgagtcttgtcttaactctatccttggttatgcttttcacgattatatcctctttacccttgtcacctctataccttaccttgatgcttatgttatccctgtcctttaaaaccttctctcttccatctcaattttatagttgtagtttacctatttcccttggtcgtatcctcttccttgtcgcttgagagtttttaactccatcttttgttgtgctccgattgggtattacctttatctttctcatctctcgatcttaccttggtaattacactaagtccgttctctaaaatctccaatctactatctcaatgtgagagcagtgttttacttacctcacccttggctatatcctctgctttactgcgtgtaagcttgggtgcaactcca

SEQ ID NO: 86532 - DNA, 283 bp, Zea Mays
cttggtgaaggccgaggagtggttcgggtgaggcgagaaaggaacgagccgaggatgggacacggcgtggcagcgccgatctcgggagggggcagggcgaatgcgataatctcagacggaggcaggttgggggcgaggtcacgggatgggggcatggcttgggcgcggagttttgttaccatgcggtggatggggattgtaggagacgtgagaaggactacagatggaggaacgtcgggggaggctgggcggcggagggaggaccgcggtgaggagccagtgg

SEQ ID NO: 86533 - DNA, 476 bp, Zea Mays
cagcagtggtgcttgtgtgagcttcgacttgagggcatcaaaagcttgttgttgtgatggtccccaacgaaacgacactccattctttgtcaactcgtggagaggtgctgcaatggtgctgaaatcccgcacaaatcgcttgtagaatcctgcaagaccaagaaaacttcgaacctgcgtgaccgtggtcggaagtggccagctcgtgatggcaacaatttttgcctcatccatctcaatgccctatgatgtcacaacatatccaagaaaagacacacgaccgatgttgaaggtgcacttctcaaggttaccaaataaacgtgcatcacgcaaaacatcaaaaacaacacgtaagtgttcaatatgatcatcatgagacttactatagataagaatatcattgaaatataccaccacaattttaccaatgaaagcacgtaaaacctcgttcatcagtctcatgaaagtgctaggcg

SEQ ID NO: 86534 - DNA, 338 bp, Zea Mays
cgcaagacctttttgtgccttcgacattgtcatttctgccgaagggcttaaaatttctaatgtttttgttccctcgattcttggctcttcagctttatcagtcttcggctcagctaacttggctgagggtgcctttggcaaggtggccggttcctcagctttctgtgtagaaggaattggttcctttggtgtagcagctgaagaagtttccccgccaaactcaggcactatcgccggttcaatgtagcgcggtcggtgggtaaggaccttcaactttttcctcttcggcgcaggttcgcttggagcagccgaagcagcaaccttttcagaagttgcac

SEQ ID NO: 86535 - DNA, 1175 bp, Zea Mays
gctcaacttttgagctttgtaactttttaatcatagggtttttgcccttggtcaccacatcaaagttatagagcaaacaaaggagaacaactttgcttaaggttgtgagcatagttattaagaaaaagtcagagataattaagcctccagtttggctgtcaggctggtccattctgaaattcggattttcagtgaaacagagccaactttgtgtgtgaattcaagcttgaattgttgagaatttgatcaagattgctgtgacaaagttgtagctagtttgtcaggctataattttggtacaaagagctagcttagtcaccacacaaaattgggagtaaatcatgctccaaatctctctgtcagttcatctaataggagatcaccatggtacagtaaatgttcaactgcagaagatcccaattccaccccctactcgtcgccggtagcccatcgccgttgatcgattgctcgccgtgattcgtgcgccatggccatcggataagcacggctcagtaagaatctcggcgtccgatccacttgcgctcggattgcggctaagcttgccagaccccccctccggccgtcggtcgaccagataagtctcaccgccgtcgagctgccgccattacccgccacgtgccttagtgctggacttcaccgcggtgactcaccgaatgcatgtccggcgatcaccggagccactgccacggtgaaagccacttttcccctgcactgagctcatctcccctctccggccgccaccgcgccatcatcaattcaagcaccgccgcctctggaatctataaattgagcccaccgttatctccgcaacctcatcacgcaccacaccgtctagtatcgctcccaatcttgcaaccgtgagctccaatttcatgttttccccaattctgttctgaaacaccgcatggtcgagctcaccgcggccagcccaattcaggtcggctcatcctctccgctctcttgtttaagtgtgctcatgtgcctatgatactcgtcgacccgcccaattgaattaggagcccactagtcgccgggaacgcgttcatccacccgcaacatccacggtcgccatagccagagcaaaccgggtagctattcatgaaattgtttgaggggaaaccctcgttaggtctcagatttgatctctaccaaag

SEQ ID NO: 86536 - DNA, 540 bp, Zea Mays
gataagcatataggaaataattaaaattcttgctctctaaaaaaggattacccccctaaaagaaagttctctccacgtggaacaatattatccccctttcaaagaaaaagacatactccccctatcgaaaaccctcaatttaggaaaagcacatgattatacaagaggaaacaagaccatattaaaatagactaactccccctaaaactatgcataggcaaataatagaagatattctactgatatcaaatgaagcatttaacaacatatgcatatatgacaacatgggggcataaaatgaaaaagtatagcctattcaaatattggaaaagacatgtaaattatgctaatcgagagatgatatcaatcaaaagatgataccaaatgaaaagatttggatgatggaattcttgcagtggaagcacattgtccttcttcgaggactctattttccttcaatgagactactacacacataatagatttgcaaagcggtgttagtctcaaagacttaggttatagagtaacctccccctaaag

SEQ ID NO: 86537 - DNA, 751 bp, Zea Mays
gaagcgtgtcagagagcttttagcactgtgtgtgccttcattggcacaagggatctgattcaagagcatatatccttcagggtatgaccacttgtggaaagctgggacatgccgaaggagaccaccgccgattctagtgagggtggactggtccgactgaagtataccttcagattcagggaaaattttgatgagccaaacgatgactagctgaagtgcatcgaagctactagtgatgagctacttggagcatactccaaggccgaagataatgctctatctgcagcctttggaagtcggggcaagaaaagattaaatagggtatttgatgctattggcttcgtataccctaattaccattatccgataaaagggcaagagaaaacgaggaagaccgccgcttcggccactgtagctaagccgaagggcaaaaagattaaggttctaacccattggccgcgctatattgaaccggccgtagtgcccgaatttggcgcagggtccacttcagcagccgaagcaacacaaactgcttcgattacacagagcgctgaagagccgaccgtaatgccgaagatgcatacagtcgagccagtcgaagataaggttgataaggctgaagagccaaaggttgaagaaataataaggatgccaaaaattctgagccctccaatagaggcaaaactgccgaagatgcaaaagacttctgccgcaactcccaagaggaggaggatggccaacgtgctagatg

SEQ ID NO: 86538 - DNA, 558 bp, Zea Mays
ctcaaaccaaacaccctataaaactctcagcccaatccttattctgcggaaaaaacgaaaaaaatatctgcaacagtttcctatgtggcatccgtaaaatatcgcatgtgaaaaaattcccctccacggcgcaaagcttcgcctcctctggagctcccaatcgaggtcgtacaccattcccgccttgtttccactgattcgcgccagcccggttgcagcgtttatttgaatttgcgcgaaagggtgttgtgctgctctctctcgccttcaatatgctcgctggctcaccgtctgtatccacgtccgaagaccatcccatggcgctgtgctctctcgccttcaatatgaaggtccttccgtgcgtcggacgcctggctctcgcatattcactcgccccatgcacctggttttccttattcagacacaatatgctctgatctattaatgtccgacgactcatgataatttgataaacattgaatacatccagaaattgtagtcaagttttttctcaataacataacgtggatgatgtaggaaatgaattttacattcctc

SEQ ID NO: 86539 - DNA, 499 bp, Zea Mays
taaaaagttttgcgtttcccatgtagcttcatcttcagtgtgttggttccattgtatcttataaatttgagagttcttctttgggtatccctgtccttttgatctaggactcgaataggatagtctgaatatgttaaatctggttccaaggtaacatccattacatcaatggttcgatctggaacccgaaggcatttcttcaattgggatacatggaacacattgtgcacgacaaacaatgtttcgggtagttggagtcggtatgccactggcccacatctttcaagaataggaaacagaccaatgtaccagggcgcaagctttccttttacaccgaaacgagatacacccttcattagtcatacttttaggtaaatataatcttcaacttgaaaatacaggggttgacgtcgtttgtctacataactcttttgtcgagcttgtgcttctttcaagttatgtatgattcgttgaaccttttcttccatctctttcacca

SEQ ID NO: 86540 - DNA, 624 bp, Zea Mays
ccttgcaacagaaattccattgtcaaagcatggccgccattgacgggcgccgggaatctcgtgagttgccccacctcgactacaaaagtggaccaaatcttcccccatagctttccatccaacgcctcgttcggccgcccgccctgattaccagagagggagagagagacgtcgattgtgggagatcccgtgcgagtcacggtgccgtggccattgacacgtgtgagctctatcaccttgacctaggtgtgtggctacagaagattgccaagtcgtggtgaagctacggtggccaccaattcatcgtaggagggcataaatccgtggtaattcctcaccggagcacttcatcgccatggagccgcttcaagccgtgggctggtttcatcaccgagctaccccggtaaagaaccttttccctctgtcagcttttgtctcctcttcgccttgcaccgatcgggggtagacatggagtagtagggccagggattgcgttactccggcgatcaaccaccgtgggcgcggggtggcgccgccgtcgtctgtctcagttgggggagaatcacttcggccgttgattgttctgtgaacggctgagattagacagtgggataccctttcgcg

SEQ ID NO: 86541 - DNA, 655 bp, Zea Mays
tttcttcttccactcgagctccgtaacaaacgctgctagttcgctgctaggacttggggaacaatcccacgatccgcgctcggcttcacccatgattgggtataaaatgggacccccagcccttgcgccctcctcgtgcccaaagcagccaccaagatcaacatccgagcaaaacaccgaagcacctgggcgtggtggtgaagagagaagggatgccgctgccgtggtgcctactttcctgggttgtctagccttagctagtggatcgggggtgttcaccgacctgggaggagtatgtgcgtgtgtgatttggagcacggaaggcctgggaggcatggcaattcctcgctagagctattgctccgctgcaggaccactgtgcgccataggcagggaacgacacaacataatcacaggtaatatcgctcgcataatgtcgcccttctctccacaatgtgtagcactaattagatttgagtttgcggctttggggtgcttgtggccattgccggccatggccctgccctacgctctggcgagggcagagatgagaggggggaggttgaactaacgtgggccattgatcttaagatgatcggtccggattagattagaatacctcttgatcggtggtcgttgatctgcggataaacgt

SEQ ID NO: 86542 - DNA, 428 bp, Zea Mays
atcatattggggtttcgtggctatggagaggttggttcgcgatgattgaaggattcacggcggtggagagctctgatgaggaattcctcagcctcccggctttcgatcccgagcgccaagacccacacaaccactgtacgatacggtgatttccccacaaagttctccggcacccggtgtcagcgtggacggcggacggcaatagcggcctccctggttcacatcgcaggaggtatggccgcgagctccccagatcccactcgaggtgatattggcagaggatatggcttgttgggttttgatagtcgaggcgaattggtgtcgaatctcatatagactcggtggggaactcccgagccgagagaaaggagcggaggacgcgctattctgttttgagtgcgccgagagttgggggatagatatgacag

SEQ ID NO: 86543 - DNA, 544 bp, Zea Mays
gatcgaggaagaaaacacataccttcggtcggtcttgagctgggtgtcgtgagtgagccccagttgggcatggtggtcagtcagttcaagagaggaattggcggaccagggttaggctttactgctaaggatgggagtgctgcttgctttggaaaggttggtgagtggagtggattgaaaccatcagagaaccttcaaccactcccaagcttatcaaaatcaccccacctaatcctattgtacctttgagacatgatgtgattgagaagcctgtgagagcccctcctcaaaagcaagtgtggattccaaaacctaaccacctcatgaacacacttgatacccttctcgacatctctagtgatcctcttcctagatcccctcaaccatctagaaagaaagctccttctctcaagcaaattccacctaagagagaggtgaggtttcattgtgagtattgtgagagggatggacatttggccattttttgctttaggaggaagagagatgagcggcgggtttctgagtcgagctataagaacatgaa

SEQ ID NO: 86544 - DNA, 425 bp, Zea Mays
tagatacgcctaaagtcggccctgacatacagcaatgcacgaccaagaaaaggttagtatagcttatcaaatcagccttaagttaattcattttactccattgacattgtatacttatataccagagcgttcgatctgttagagctcgatcatcgccgaaaaaaggctatgaagaaattgtttgtaagtcaacttgaacataaagacactcctgatgagcccaggtatgtaattcagtttgattaccaatcagcaagtacagaagtattaccaatcagcaagattgactggttgtgtgatttggttagtaaggagcacttcatttccaaaaatcagtaccaatcagcaagtagatactgaatattctgagacggttcggtttccttttctactgaatgttcttgtttctatactgaatgttcttg

SEQ ID NO: 86545 - DNA, 296 bp, Zea Mays
ttcttgccgcgtctgctccaactacgtccgtgcaagccacgacctccatcctcgctctcccgctgtatacacattttgcgctcactcaacaaccttatcgtgccctccatccttactagcccgcgttcgacgcatgcgccaaccttatcgcgcccgccatcctcactcgcatgtgttcccaaccaccgtcctggcagccttatgcacctcgccccacgatagccacgagctagagcagtagcacttccaacatcctgttcttgagaccctgcgcgtcacaatcataccatcttgag

SEQ ID NO: 86546 - DNA, 289 bp, Zea Mays
tcagtcctgatgcttcctcaaaaactctcagaatttcctttaccacttcaaattcttctgagctaggctgtaaaaacaggtcacatcatctgcataaagggagactcgctgcctgtttccatgtcttaataggggctgtaactatcccaaatcattggcccgagtaagtagggaattcagcacatccataaccaaaataaagagcattggggagagaggacccctctgcctaaatttaatgtgaagtcagtagtcaaaaaggcctcattcattgattcttacatgacag

SEQ ID NO: 86547 - DNA, 361 bp, Zea Mays
caacaataccgtgagagacatttcacggtttatgttgaacttattcaaacattacttcaggctgaaatacatcgtgaactcatgttgtggaataatcaacagcgccctcttggctctgccccattgcccgaagtacatgccaatactcaacataaacccaaaaatgatgttcacactaagaactatcaaagaaactcttgtggtaaaaacaaacacagacacaacaagaagcaaatgcaatgtgttcccaacaagggtaagaacatttccaaacaaaggactgacaaacaacattgtcagaaatgtggttgctttaaccacatcataaagaaatatcgtaccccaagtcatcttgttgatc

SEQ ID NO: 86548 - DNA, 893 bp, Zea Mays
ccagtggcaatgtgccaccgacttaagtgttagtataacatagttgtaatggtagtagtagtagtagtatagtttagtagtagtgtaatgtagtttagttagtagtgtaatgtagtgttggatcaaggggtaattggccgactcataatgagtcggtctttcctttgtaatgatccccgacttatggatggatgaatgaagcttgtttgatgccaattcgttgttgtgtactttgttcttttgtctgacggtccgatcccaggtaaccttgctgacgagtcttagccttttagagatactgactaagtccctttactctgctgcgaccaaaactctcccgagccaccagcctgtccttctgcgctcgacttagtgtgccaacctgtacttttgtcgacgttgtcatggcccttgaaccctagttcctgttttttctccacaggtttctagcttcctgagctcccacatcttttcgcattttgttcttgagttgcgttgtttgaaagattgtgatggcgccccggaagaggaaacagagggctaccacgccggtcatccctcagatcgatcctgatagccaactcccttttgctggtaaccatgtctctgttgtttctgaagctgacctcttgcatcttgttgaaatcggtgttctgccacctaaggaactatgttcctggtggatttggcggggagttactgtcccgacggaggatacccacgaggcggttattttcgtgccttttctcatccgaggactagccttgccagtttctcccttcttttgtggtcttcttgacttttactctctgaatcttatgcatctgaatcccaattatgtgcttcaagttgatgtgtttgtccacctttgcgaagctttccttggaattctt

SEQ ID NO: 86549 - DNA, 698 bp, Zea Mays
cgatgatgtcactcggagcagcggggcaccggattccggattggtcgtcgggaggggaggaaaccgaccgctaaagaactcggcatcgccgcaacgccacgctcgagaatgccggtggatgacggcgaggatcaccgcgatgtgagcacgagaaaggccgccaacgagaacgacaatgctcgaatttggggtaaattctgtattctgttatttcataccgatcactgttttcttacaggtatttaaccacaccctcctcggctggcccatcactccacacacaagccggcccactggcccatcacacttacagcttaacccacacactccactcttcctctgctactattcaccacttgacaccagctttagaacgccctctcagcctcctgcttgtctacagacattcggcatctgcaattcagcaccctggtcaccttaagtcgtgacagtttccccctccagaagacttgcttgtccccaagcaagagcctatggaaaacgttgtggagtcacgatttagattgctccaacgcaacaacacctgtggaactgcacgaccccccttcttcaccaaacgccggtccagaatctcttcaggccacacatcctattgctcaaaatcagaatgccaaggaagatcagtaaacattggcgtataatttggagtaaacggtttcaactacgagacgtgaaac

SEQ ID NO: 86550 - DNA, 528 bp, Zea Mays
atactaatataaccatatcttatatactagtcagtctaaacaacatgaataaagattcaatcaagctagagtagtgacatggttactgatgatgatgctacggagtcatcgataagtggtagtggaggaaaagcttggtgcaactggcgacgaacacgaccgcttaacttggatgaacacgacaactcgtcgtggaagttgagagcagtcatgcaaataacacttgccaaaaaccttattaaatccatcctctatctgtgcaaggttagaaagatgagtgttatggatcgagatctactctccctattggtgatgtgcacgtaaatgctcaggatgaagagggctatgacggcagcgcagcattgagaatggaaaatactattaattgactatctcaagatttttcaaataaagtaggagctctctgatagtagttttagtgtgtcttttttcaaaaagatcggtatatatagggagaactcctgccttcgtagtatcaactagcaatacaatattgattgatgttgc

SEQ ID NO: 86551 - DNA, 506 bp, Zea Mays
gttctatcgaatttgaccctcttggcctttctgtgaaggatctttattccaggagcatgatcgctaggtacaatagctccgggcccctctaaacccttagtgctccaacttgttccctgatgtctcgtgcccttgttgccactgtctccactacttctgccatcgattgtaataaaattactagtgattccatatgtcatgcttgtcaagttaggcgacacactcgcctaccttttgcaaactctacttcgtgagctctcgagaattttgatttaatccattgtgatctgtggacttctcccatttatagtgtgtccggttacaaatattatcttcctggtcttgatgactgctcgcattttctttggacatttcctcttcgccttaaatctgaaacattcactaccttggctatttttttctcttatgtgaagacacagttcgactgcaccatccgaagcattcaatgtgacaacggtcatgagttcgacaactcttccactcgc

SEQ ID NO: 86552 - DNA, 360 bp, Zea Mays
caaatccttagcaggaattctcctattggtgacctgagtggagccagtaacaccactgtacaagtaagtcgggtatgctctgtccttcagggactggatgttcttaaaaacaaaatcagcaaccacaacttcggcggtcagacctctttccttcagcagacagacttcagcaagcagaaccttagcctctgttacttccagggcagtgggagactcaatccaacttggattgcgcacatctggttgtcttcccgaccggggggaacagaattgccgtgattttccacaataaaccactcaagacgccaccccttaatgctgtccttaagcggaatatcaagatatttcgttttccttccg

SEQ ID NO: 86553 - DNA, 461 bp, Zea Mays
tcgaagaagagcgactgaatacggtgattcaatcagcgcgatatcagcaaactctaaggcgctatcatgataaggccatacgacatcgatccttcgcagtgggagatctcgtcctccgccgaattctaacgggggagggacggcataaattgtcacctctatgggaaggaccattcatagtagcagaagtcactcggccgggatcatatcatctcactcagatggacggaacggaaattgggaactcatggaacatagaacacctcaggaagttttacccctagctacatcccagaagctctcggaacgatgatgtattctgtaaattgagaaaaatatcatcaataaaaaggtttcaaaggcactcagattgttcactgtcaattggcacgcttacttaactcggggtgaccactatgccctactaacggagcaatcggcttaagtcggcaatgacttaa

SEQ ID NO: 86554 - DNA, 306 bp, Zea Mays
tgactagactgagacactgaactaagcattattacagactccgactctatcgatctagggatccaaatctatccgggtcctacagtctggggtaccatagtcgaagcgaccacggggcggtgaacggtaagggtgatgaatcccgacaggggtgggagaatcaccatcaagatagtggtgtgctgcgcactcagcacacaattccgcaacctccgcccgaaccttgcccaactcatcaagggcgtggtccaactctgtgttgagcacgatgaccaagttgaccatgctgttcagcctgggatttcc

SEQ ID NO: 86555 - DNA, 1569 bp, Zea Mays
cttactagctggcccaatactaccaagcccagctccgcacgcactcgtgcctcccctgtgcgccaacaggtcggcccaaccggctagccttagtgcgctaacatgtgcccattgtagccaacatgtgggccttagagtccgtacttttgatgagcgggccatgcaaaccagttgtttcttccacgaactccgaactcgtcgtcgctctcccgtaaccgatcacatcgtgctagctagaggttgttatgatctccacactgttgttaggattttaggacaaggtatatatctcgaccccctctggctattgctacatcactggtccgcgcgagctgagtgaccaaggcatcaggccgagggagaatgtgagatcgccaacgtaatcgactcgcgtatacatcaacattaaagcctcggaggttggccatcgagcttcaccagattaccaaggtggtactcgtggcctcgccaagtgaggattgaggtaggaggattgggaattgttcatgggagcattatgatagtcatcgagccgctgcttgtcaaggatcacactcttgtcaccataatccatggtgagaagtccctcatctaacttgtcatcatgccctcagtgtgtattatcaatttttgctcaaaactagtcgccctatagcagggaactaattgcgtgatcccgcatcaccacggagtcaccatcaacttggtcgacctcggtatcatcttcatcgtcggtgagattggtgttcaccttttccttttctctacgtagcatgttgcctttctttagttggcgcactagttggccggagcgtgccatgccaatgaggcactgccgcactagacccgtgcaccgccgctactcggtgtcaagagctagatgaagtctttggaccattgatctagtgaggagcagtctggagattagattggcggataacggttcaggggattaaatctaggtcgtcgatcggggtatggtcggcttgcgcgccccagtattggtctacaggtacatttgcttaagagtccctatgctctatagaatctaacttgtcatctgtaactactgaaaactattacaagtcagtcctagattttacaaaatcaaccctagttttatggacaatataacccgttgtccactcagtggatgtttgcgtgcgagccctatcaaaaaaattgttatttacatataagtccatggtttttcatagataggtccctagaagtccgttcttaattaaaataagcaattgaacttgttttatttataactttttcgttttaattctgattttagtggttctcgaatctacggattcgtcttgacacgtagaattattctatgtagctttttctctgttttgtgtgattttattttatttattattttgtttgcttgtgttgctacaaatagatgagcaagggaatagggaacctaaagcctaatagtttgagggatctgagcaggtgagagccacttagagggggtgaatatgtgatgcttgaaatacacaactttaaacacaaacttgatctaaataaaaagttagtgcaaaactagat

SEQ ID NO: 86556 - DNA, 645 bp, Zea Mays
tgccaaggcactttgggaaacaattatgggcattcctaataagtcaaaggataacgttaagggtagagtggatctggcaatgttatgtgatagaccaaaccaagagatgaaagccgcctactagtggaaagacatggagaaggcctaagccgatttcgtcttgagcaagcccaaaaaagggaagtactagaatggatcaagatgttaaagttcccttatgggtatgctgctaacttgagtagggtggtgaacttatctactgtgcaagtcttagggatgaagagtcatgactaacacatatggattgagtggcttcttccagcgatggttagaggctatgtccctaagcatgtctggctaatgcttgaaaagttgagttatttcttctgctagctttatgcaaaggagttatcttggaccgtgattgcagacttggaaagaatggcaccagtgttactatgtaagttggaaaagatctttccacctggccttttcaatccaatgcaacatttggttttgcatctctcgtatgaggcacgaattgggggccatgcagggccattggtgctatccaatcgagagatgtctaaaagttatttgaaagaaatgtagaaataaaggcaaattacgatgcttccattacag

SEQ ID NO: 86557 - DNA, 648 bp, Zea Mays
gctgttctgtttgtcaggggtgttccgtcattcttgctgatgaggtcttttcggccaatctggtggtgatctccttgggggcattcgatgttatcttgggtatggattggttatcccagtatcgtgcggttatatcctgtttttggaagacagtgttattgcaggcgccgtcgggtaaggaggtggtattcttgggaagttccccgaagttcacgttatccttgttagcgcaattgcttcctgatcgccggtcaaggaagtcggggatctttttctccatggtggtggagggtgaggctgccttgcgggtgcaggacatccgggtggtgtgtgactttgctgacatgtttccggcagagcttccaggcattcctccggagcgcaatgcagcttttgagattaagctgatcccgggtacgcagcctattcataaggccccatatcgaatggccccaaaggagcagattgaattgaagcggcaattggatgatctgctggctaagggtttcattaggtctatcaggtctccatgggcttccccagtattgtttgttgagaagaaggataaaagcaagcggctgtgtgtagattatcacgctttgaatcaagtgacaatcaagaataaatatctcattccccgtattgagg

SEQ ID NO: 86558 - DNA, 736 bp, Zea Mays
atcagagagttgtttggtttccatgagtagtcgatgaggtttcatagtctttgctatggttctgtagacccacctcatcgccctcacgacggagtcacaccagctactgctcatgtctcggctcttttttacctctattcacaaatggatcaagacggtctccatcatagttctcaggttcctgcattgatgagtcagaccttactacctcgcatgggatacaaggagtctgccacacatatttagctctgtctcctaggtgccttggtctctcactttgttttcgacgttgtggattttctcatatgtgagacagaggacaccatgttggatggactttgtgctcgatgttagctgtcatatgcttactacctctgtcgcatatttgcgcagctgatttgacccccttagttccaggtagttattggtcgctcacatcttatgtttagattctatcgttctcagcctgatgatgatactcgcttaggagctcctaccacaggtagccactctaaggatgctttagcctctgagcatcaagttaaggatgagccgatcatgcagattgaggagtaggacctagttccctttagtacaactaatgcctatttagattccattgatgatgatgatgatgatcaggctataccaccatcacctccccctatgcctcctcgctcacatgatcacaagacaggtggttccactgctactctctctctcttgttcctttggc

SEQ ID NO: 86559 - DNA, 633 bp, Zea Mays
atgaattccactgccttggctgaagttagataagcaatgggtttgtattctatccatttggtaaatttgtcaatggtgaccaacacgtgagtgtagcctccctgagctttcttgaacggtccaatcatgtccaatccccagcacgcaaatggccatgttacgggtatggtccgcagttgctgtgctggcaaatgatgctgctttgataaaaattcgcaagctttacatctctggactaactcggctgcattaatctttgtcatcggccagtagaaaccagacctaaagaccttcccaaccagagttctagatgttgcgtgtatcccgcattgtccggcgtgaacctcatctagcagttgcttcccagtaaccgaaggaatgcacttcatgaggactcctgttgcaccccttctgtacagtgtgtcccctatgagggtgtagtgggctgactgtcttgcgatgtgtttcgctgcggctttatcatctggttcctcttcactctttatatacctgatgataggctccctccagtcattagagtctgactctggctggctcaaaacattgcactcttctgcttgatctgaggaaatgctcgggcgtggcaccttctggacaaaaacaccagatggg

SEQ ID NO: 86560 - DNA, 314 bp, Zea Mays
ctcacctcgaggcagagctcggggtggcttggcgcaacttctagcgggttggacgaccggcagagcgatcgcagatcttcggcgagcgcgagcggcgatggcagaccgtgagagagggtgagcttgtgcgaaatgaggcaggtaagagagagcgggtgcgggcggggctcaaaagagagctgggtgcgtgggcggtctccacggcgaacgcgcggacgtgggtcagcggcggtagcggggaagacggagctcacaaggctttcccactgcacagcgagagagagcgagcacacgggcgaacggttcgtggcgct

SEQ ID NO: 86561 - DNA, 1240 bp, Zea Mays
cacaacactattccttgcgtcgctgacagtttacgaaaacatccctgtgcttctattcctttacggaccgaagtccccgacggcgagcggcgtagcgcagagctccggcgagcttgtaccggccggactatgcaaagactagcactcttcgtcgactgccacctaattcaagccttaaccgaagtttcccctcaactaatttcactaatggcgcactaacacgcccttactacggtgaccgtatggacaacggccaactaaacacgttcccggcgatctagggtgacttagctcaattgagttggtcgaggagcatcaggggaacacaagaatgttgaaacaagatagcagggagcatgaacagacctagaagtcgctgaccacggtgagggctcaaggcacgatgttcttggttgatttgggggaaatcccaaattagggaaatctagtggacgattcgagtcacgggttgctgcactggttgcacaattacctagcggagcagacgggggcggcaatttatagcctccaacggtggtggcgtccaatttcacgaggatgtgctggtggccggaggggaaaagggatactggcgctcaggatgagtggctttcatcgtggcagtcctccggcgatcaccggatatgcataccatgattcaccgtgacgtgggctagcgcttaagcatgtggcgcacaacggtgagcgatcaacggcggcgaagtctatcccggccgcacgacgagcaagtgggtacggtgaatctcattcgcgcccgagctcaagctgatccggtgccaagagttttactccgtcgtggttatcccctcaccagcgagcacatgtcgcggcgatggtgtaaatcacggcgtaaaaatcaccggtggcgaggggaatgcatctgcaatctatttcagtcactgtaccatcgcaatcttcttcagtcagcctgacagtcgatgtttagggcagattttctcccaattttccatggcaacacaaccaatgctctgcagcaaagtcgtagccctacaaaccattttcacttttgctatagcatccctagtcaaattcccactggatcataattgaattcgagccctaagttcaggcaattccactgtcagtctgaattcagactccaagcagtctgacagcctatccttgggtctaattatctccaaatttcttatgtaaccaaagcttaatctctatagcaaaattgttccccttttacagc

SEQ ID NO: 86562 - DNA, 404 bp, Zea Mays
cgaacatgtacggtacgactacgagcggcgacgtgtcgtcccctgcttttgactaataaactaatcttgttatgggtaccaggaggtctagatacgcagatgatgttgggattctcagtcgttgcgtccgtcgtactcgacacagcactgcatatgcacacacttttacgtacatgggatacgtgcattcaatatttgttcggttggtttcaaggaaccagcagtcggtcgatctgcatgatcgttgtgtggctggcggccggccgcattgcggttttaatttgtaggcagacgatgcaaattacgtacgacgatgcctagctgcctagctagctccaactattgttgcttacatcacactttttttttgtttagcccactttgcattgtcaacactgcaaata

SEQ ID NO: 86563 - DNA, 573 bp, Zea Mays
gttgacttgaacttgccggtttcccgctgagagccgaggctgaggctgtgggttcggcttcacgtccgagcccccccggggggggggggagtatcccataccatagtggttgtaacagggcttcgatatggggaaaagcctgtttatgagatgtgtcagcgcttctatgttggatgatgccgggatgtcctttgctgtagatgtcaaggtcggagccgagctcgggccaggcagaagtcttcccgaggtgatggctgaatccttcctaatgtgtgccatagtcgatggagttgcctcctacgggattcgcagtggagcaggtagccaagggcgaggcgaaaacagtgtctaaggtcgagctcagtgtcaggcgaggcggagttggcgcccaagggtcggtctgtcgtattagatgtcctatcaggggatggcaggcgcgtgcgtgcaaagtggcgcatgcgtaatcatgctgttggcattggacaagacagcggtcttgttgctgctgtgcacctatagcgccatgtagggtaggtatgtgcattgaatgcaggtgtcccccgttggccctcg

SEQ ID NO: 86564 - DNA, 426 bp, Zea Mays
cgacaaagaggaacggcggtggcctcacagtctcacacaggggcagtgaggtgtggtggcaggcttcccttcactaaatgcggaacagaatagatcagatcagtgtttttgtgtggggaagagttggtaacagcgaacattgggtcccataccggttgctcttccccttttatatgcacggtgcgagagggagccacaaccaataggttgttacgccccctgatcagggcacattatggcaggataggatcgactcggtccataattgaatcgattgggatcaacccaacaaagtttagtttatttgttgttaatgttattgacatattatatgactatgaaaagaataccgttcacattatttctccacttgtgaatgcattacgttataccaacaaaggataggatcgagcttggcgcaagggc

SEQ ID NO: 86565 - DNA, 573 bp, Zea Mays
cttctctggaagttcccgacgacgatctccacgatcgctggttatgacaaattggtatcagattcttctatcctagggattcttctgttgttgactccaaggttcaagcgctcatcggttgacgacgtctaggcggtcgtcgtaacatccagagttcgtttgatcaccgacttcatcacggctcctaacagaccatccacgcaagcgcgtcatctggtcgcggcgatggaggatgtggagaagcgtatcaccgagaggttccagcaggccttggattcttccgcgtcaactctcaacgacatctcaaggaagatggatgggctcggagcgctgactagcaaactcgaggagattgaaaaccgacaaagggagcacgacaaaattgttcagtatttgcaagcaaaattggatctctccatgaaatccttggctcaggtatcacaaaaccaaatccgcttgacaaatgctgtgaacaatgctgccaaggatgcaggcgcaacacagatgcatacgagtgatgggttgatgggagcgcgacccccgatgggacccagaaccacgcgggtatcgcac

SEQ ID NO: 86566 - DNA, 487 bp, Zea Mays
taaaaactgacgaggacttgttatagtggtttgaagtcaatatgcaaaagggagtagtgcatattgaagaggatgttcatgtttttatgggaccttttgttgttttcacctacgaaacataggttccaccaaaaagtgaggagtagagtggcaaatagggagcctacaataatcatgagtgagccattaagattaaagaggagagttgcacacgatgacctaacatgaattcattgaaggcactaaatgatagtagcaatcatagtgatctagttgcatcctccgactctgaatatgatcctgatgctaaaatatttgatgaataagatgatgatggtatcccaacctttaagcctggtaatgggtcacaatccgtccccaacccaaccccactccaatcctataagtttaaaaagtctacccagcccaacttgaatccaaattgatttgatgcagctcaatccaacccatttttaatgccttggca

SEQ ID NO: 86567 - DNA, 1056 bp, Zea Mays
gcttatgggagtgaagtcgttgttttctactgcctatcacccacagacagatgggcaaactgaaagggtgaattagtgtttggaacaatacctagatgtgcatttatgatcatcctcacaaatggaaacaatggttggctctagcagagttctggtataatactaccttccatacgaccttgggttattccccttcaaaattttgtatggttatgaacctcctgtgatggttgttccctggttgagggaggagggagatagagatgttactgtctagttgcaagagggtcagacgacctctgcgttgatcaaagagaggttggctcaagctcaaaacagaatgaaacaaatggcagatcgaggtcgaactccaagggaattccaggtgggagaacttgtgcttctcaagttacaaccctatgcccagaagatagtggttaacaggccatacccaaagttatcttttaagttctttggtcctttcaatattgtggcaagaattggtgctgtggcttataaattggacctgccagaacatgctccaatacatcctattttcatgtgtcccagctgaaggcctttcatcccaagcataccctagtatttgctaagcttcccagggtggtagatttgtctggtccagggatttggcctgaagaaattgtggaagacgtttggtccagaaggggaatcatgaagtgccttaagtgctggtcaaatggtcgggtttgcttgtttcatcagcaacatgggaagatttctatgtggtcaagaacatgtttcctgttgccctcgccttgggacaagcaagttctgtaggagggagagatgtcatgaccagcgcagaggtcattgttgtgtagcagtagagctgagatctatgagaaacttctagaagtattaggcttaatccgggcctaagtatggcttaatctttgattgtaatccggtccatatgatggcttataaatacctgtactgatgaactagaaaggataacgaattgaataacagattagacaccatacttgttgtctctacggcctccgatgattt

SEQ ID NO: 86568 - DNA, 542 bp, Zea Mays
aaggaatgttcttggtgcttttttcatacctaacttgggtgaccacttcaatcattttcataatgaaggaggcatgaaggcatcccttgagaggagagcacgaagcatggataatctcttgccagatcatgtcaaagacattcagcctggacctgtcatttggcttcatgaaggcaagaagtaccttgctctcacccaacacattcatttgattcccacattttggaatgagtgtcatcgtgaacatgacattgaggtatctgtaatacttgagtgcagatttgtggatttctagaattcctcatgctcacatatgtgaaggtcctttgcatcacctatgtcaggaaggcgatactcatgaatctttaccctatcctcagcaatgtcattgtctaagaaacccaatatgtgcacaaaccttctgtagctgactttgaaccatctcccttcaagaaagaaattcatgtagggatagtcatatttgctttcctcatcatccttcttgatccatagagttgaataaaactgagcgataatctgat

SEQ ID NO: 86569 - DNA, 518 bp, Zea Mays
gttgattccaagtctagtcgaagtcaattgataaccaatagtgtgaatgtccttgagaaggaaatcttttattgatgacgtattttccaatttctgagtacaacattgctctggtagctttgagtcttgctaaggataaaacttcctgaggtgctctatattcaatgagttccccacttccgtgccatccatttgagtaagccgatatgatcatggccgagtgacctccgacaccatgaatggcccttcccatagcgacgacaatttgtaccgtccttctcccgttagaattcggcgaaggaccaagtctcccactacgaaggatcgatgtcgtatagccttatcatgatagcacctcagggtctgctggtatctagctgactgaattactgtattcaatcgctcttcttccagtacgtcaatatcttctagcctggtagcctctgcttcagctatgctttcgaagaccagccttggtgccccaaacctgaggtcggcaggtagcactgcctccgaac

SEQ ID NO: 86570 - DNA, 453 bp, Zea Mays
gctgaacggtgggaccagtcaacccttgctgcggggacctcagcatcaaggtctctacagtgacccatacgttagaaggaatagggcaatacgctatactagacgtacgtctatgcatgatggaaggtgacgcagaggggatggcggatgatgaagctatactgaagacgtctctaaacctcaccacgagctgacttaacgagacccacatacaccactacgtttgcatcagaatagctacaggaacccgtatggtgaacggacaagacgcgacgctatatcaggggtacgacaccgcgcgatataggagacgacaccgtaggggctacgtcgcccggaagcaagaggccgaactccaccccgacagaatataagttctcattgtaaagtctacccttgagttataaaagggcaagacaacccacatcttcaaaacacaacgacacacaagca

SEQ ID NO: 86571 - DNA, 731 bp, Zea Mays
gaaaaaagaaccttaatcactgaagaggctacagattaaggagaaaaaaggagatacattccccaatgattaaggttccttttttacttaatttggtgaaaagatacattcccctgaagaggctacaaattaagtacttgagttgaaaaaaaggaaccttaacactggagaaaaagctggtgttgaagcagaaaggccaaaatgaaggaaaaggttgaattggggagttcaggtttctagctatctttagcagctctcatatcacatcgtattttatctcctattttaactaacagtagtgtaaaacggtgttttatacgatcatatacaagatttgctggacaccacctgcgccactgccttttgcctcggacgaattgacaagcagtagcaacagcaccagcaccgcaggctgccgttgtgctacaccatgcttctattaacagcttcgtgagagtaggtagagaacggaagggaagaagatacttggagaagaagaacagaagaacggtagtgttgtgtttctgttattgcataacccattcagttttgtcagaggtttcaagtcctgcgccacgagtgctgcactccacgacacgcctcctcggctaccgttccactcggcctcacaacgatcagcttacaaggcccaccgtggcccaatatattttgtattcgggatccttttccgcgctccacggcgctcaccttggcttgcagcttcatccacc

SEQ ID NO: 86572 - DNA, 489 bp, Zea Mays
gctaggacgatgacacaccctgtaagcagcctttggcccataccccgacgctgttacagccactacggcatgggcggcctctccctcgggagctcgggcatatggacaatccctcagtctcggcctcggctctctacaggacgtcagtaggcacgaatcgtctgcacaatttgccatcacgtcagacgccaggcatctctccttcaaatacaagacccaacttcactaaggacgctccccttggtgtataaatagggcaatggtccctccacgagggaaggatcgatcgatcgacgacatcgacatacacacgacactcgtagacgaacactccctctctcattctatcttagatattggcacttgcctcaatcctctctagggacttcccctctcctgccttgcttgtaaacccctactataggcaccacggtgcgagtaatataagcctcatcctctctactagaagtagggccttgagtagcccga

SEQ ID NO: 86573 - DNA, 481 bp, Zea Mays
aaaactcacgggtgacccgaaatccatgtgaaacccgacaggttcgggtgcaggtttggaattgcacccacgggtgtgatcgtgggtgggtttcagcaatcttcgcgggtgtgatcacgggcaggtttttgctccacccgacccatcaccatccctaacagtgggtgaacaactcaatctccacttcactcacctctccgctcaaccttaacctctagacaaaggcgacaacgtttctcgacgctagagcttcaagatccgggcgcgttacagcaagattcgccgagaaatgagcgagatccattgttttggcggctaagtcttcaggagtgcgaaacgcgggaacatgttagtgctcaacgacttccataggctaggtagcggttccctcccagatttcatcgaaatccactaagtagtcggtgggatttgtcgaattaaagccaaaatcgacatgcaaagaagatattttacagttttc

SEQ ID NO: 86574 - DNA, 347 bp, Zea Mays
cggcgggttgatttttattaagcccagggactctttcgcaagacttggaccaaagaggtatcccacgctctgatccgcacgatcctatatagacggttcagattaaataagcccagcactgaaatggtatgcacccgtggccgttagatcggtaaccaacagaccagatttaaaaccccaacgactgaatcccacgcgtatgattcgaatcggacggttcagtttactctaaccgaatcggtacactcggggagatccgagccgtccatcccgatcctcctattccgaccatcacatagactcttctaatcttaaccgttcatcgcaaaatcgatggcccagaatgc

SEQ ID NO: 86575 - DNA, 275 bp, Zea Mays
gtactatttccgtgacataaataagcatgcgtgatgcgtttctggccatgtgcataagtggatttaatctcccttaattctcctctctatccccagacgcaactgaacaagcactcagggtttacttcaggagctcacgatgctttgctgcttaatgttgtaggagttcgtttacagatagccttgccacgctttctggtatccggagtggtagttgttacctatatatagtcctttgttgacgatgccgcttaacttggttctctgtactttcg

SEQ ID NO: 86576 - DNA, 585 bp, Zea Mays
gcgggtcgtcggtgcagaggtggccgccgctgatgctgatgtggtcgcctccgctggcgagccgctcggagctagttatcccacgtccctaccggtgtggaggtagttcatacctgtagagtagagatggaattagggctccacttgaaaacagatgtaatacttttgctttttgcaaggtactcaagagtactatttaagcagtattagcacttatctatctccaacttgtttctgctatgtgcgataatgttgactcctccctggtacctggccccctgcctgggatgcaggcttaatttgttgaggttggattccagcgtatctgaaaaggttgtcaataattctcaggaggcagcctcgccgaggcctggatctgtacacagctttagctaaggagcgttagtagtacacccatagggtcccctgtctgacattagccatcctttgatacatgctcgggactcgcaggtttcagtccgggtggccaagttgcgcgtccagacccccttgggtcgtggctctagatactaggacacttgtcgcagggcggtggagcgtgctggcccacggtacgggactagg

SEQ ID NO: 86577 - DNA, 627 bp, Zea Mays
ctgagggtcgagagctcaaaggtaaaggcaggtgaacgtcacttaattttttgaaagaaggaagaagcgaccattcccaccttaagttgaaacagactgtgcccaaagatggcacacctcacgaagagagccaccacaatggcttgaatggtggaagtacaaacgtctcctgacccgagaaaaagccctcgaggggagacactcccctaggggttcgggggctactatcgaggatataatccctgggccttatggcccattggtcagcaagcacactgggaaatgccctatggtacctggggcccgttggtcagtccgaagaggctggtaacgtctaccctggaagaacacacccctggacgaaccccaaggcaccgagcccagggtcgggcgtggtagaactagacatcgggcgggcgtgctgaaggaaaaccactcgagtggatcccgcgcctggcccaagaccgacccatcataaatgaccggtcgcattaactgtgcctagcgccatagcgggggcattggtccgcctcccactaatgagctacaaacccctcgggccatagagcactcatggcctacgtgcccctcggaccgtggcacatttataacccacacgtcccccga

SEQ ID NO: 86578 - DNA, 443 bp, Zea Mays
ggtaaaacatggaatagatgaaccaccaatagttttacgctttggataaattctaaaaacccctagaagcctattcgatatattaagagaggttggaaatctcagaatcaacatctcactattttggatatagtttgaacagaagaagaaatatgagttagagaattaaaatgtccaagatccatgacttagactagttggaaagccactagagatatttgtataagtcataggatctccctcaagttcagccaaagcaacttggagaaaatagttcaaagatcaacgacaagtcaaaaactcaagtaatgaaatcaccaagtgcggacccttctcgtggaccgtccggttataaaccgtgaaacgtcccactataattcacagacaatccattgcttcagcccgaagttgactacttgagcaaaagcattttagtgctggcg

SEQ ID NO: 86579 - DNA, 364 bp, Zea Mays
gagattcaggaagaactatggaaaagatggcgaaaatctatgtgaagctcttcttatctctcccatgtagcttcatcttcaccatggtgactccattgtactttgcacatctttatcaccttatttcttgtaacccgagtcaaagtgtcaagaattttgataggatattccgcatacgtcagatcatcttgaacactaagatcctccattggtaactgctcctcaggtaccctgaggcacttcttcagttgtgacacgtgaaagacattatgtacatccgcaagatgatcgggtaattctagttgatatgccacttctcccactcgctttaagatcaagaaaggtccaatgaagcgaggggaca

SEQ ID NO: 86580 - DNA, 666 bp, Zea Mays
acttaagggaatatcttgggcctcttctccccaaacctggtttagatgtgccgtggaacctttcgctagcggggcctcaaatacgccttgatttggaaagctcttggacctcaccaaattgattagctcgaggtccacctctcctcccatggagttgaaactatttgacaaaccctcctcgagttcgttggcaccttctgtggttcctgtttcgtctccttcctcgagtttgccacgacaacgctcacagtcaaccgaggaagcatcgaaaatggtgtaccaccatgtagaccctactccgttccttcatcagggtttcatcatgggccacatctagcaccggcagataatggtacgtcagtcactcgagctcagcccccgcttcatgaagattgggcgatcgtccttattcagcatttcctagtgcttgagcttaactttcaaggcattgctgatgttgcatgagaatatttggtgggtcagtggggcctagaaattcgtgcaatccagggctcccatcttatacatgccctggttagattttactttgtttttatcaagataacatggtcgatctagatccacagcaggcgctatgtgttagggatatgatcctcggtccctggggctcaccggtcagcgagtacactggcaaaaggccactaa

SEQ ID NO: 86581 - DNA, 665 bp, Zea Mays
ggtcaatgtccaaattaatgttcccaaaccgcccatcttcagatttgaaaattattggctccagcttgaagacttccattcaattttccaagattcttggagtcaacctctatttcaaccagacccagctaaaaggcttatggccaagtttaaaagggaacgcaaagcaatccaagtttggtgtaagtctctccccaatttagaaaaattgattgataaggttaaattggtgattcagctattggacttcattgaggaaagcagagacttaaccattcaggaatggaacttcaaagaaattcttatcctccatctacatgacctcttatctaaacagcggacttattggaaacaaagaggccaaattaaatgggtcaccctgggtgatgctgggactaaattctttcacgccaatgctactgtcaagcaccgacacaacctcatttcctcacttaaagatgacaatggaaatacggctctctctcatactgacaaagaatctgtgcttttcaatgctttcaagaacagattggggacctctcaacaaacttccatggtttttaacttaccatccttgattcaaccgattgacaacttgtcagaacttgagcactctttctcttctcatgagattgatcagatcatttcaagtctgccatcaaata

SEQ ID NO: 86582 - DNA, 1644 bp, Zea Mays
cttgcagagaggttatgagcctgtaggcgatgagcaaaggctttcatcaatggagtatagctactacctagacgcatacacattccagaacacagattttctatttcatcaagttcctcactgtagctacaaatgtgcgaggaatgcaaattttattttattaaaactacaaaaggttatttactgagttcagggcacaaacctgtcgatttgatgtatcatcattttctatcgttttagcaaccaaggaaaggcagtggccaagcccactaagaacactgttaagtttattcctatcatgtaggttgattctgtcgttgctcagtaccgcaacaaagttgttgaaggtctgtcagaaaaagataatgcaaatgaaactataagtttaagttggtaatgaatatggtcggggaatatacaatctctaggggtgagaagcagttcaaataaaacatatattccttagtagttattacttgataaaagctggactatgaaacaagctgtggtagttaacatatgcaaattttagggggggggtagtctatccgtaaattaacatttgacactggttagttcaaaattgaactaaccaacgtcagatattaatggatggagatatagtagaactaattaagtgatggaagcaaggaatatgcatctcccagcaaaataattttctcagaacaatagaagtgactcatcattcagtacaccaactgtgaaagcagacgacttacctgttcagcataactagaaaaggatgacgggaaattaagaaccacaagctccaaaaacctaaaagccattaactggatctccacagatagatgggtcgttccattcagaatattagccatcagcaaaaacagtgtactccgcacagatatagtgttatcctgtaagcataattatagtctcacatctgaagtcaaaagctagaaattttaactggacaaggaataacaaagcgatgcaaataaagaatgatgtgcttgaaatagccaaaaataaaaagaaacttatacgatgtatttgtgaatgcaacaaataaagcatgtgccatattgtggttagtagaaatcatgatatcacacaagcaatattattttttactggcatatttacagaaaactggaatgtcaaaatgcaatgcaacgtgtaagaacatcatgaataaccatttcaattaaaagaatacatttctaatcaagcaaaagtacagaaaagcggagaaagagatatacctctttcaaagatgggaagatcagagactgcagtatattgtataacgattcacggaccaccttgtcagtatcacatattctctcctgcagcttctcaattatagcaaccttgtgcagtttaagctctgttgggtgcttgacaacaatgtcctttattccattcagtgcagcttcaacataaagacaaacatatacatagtcagatgctaagaacgcattgaggcatcatggcagtttatccagtgtgtcaccaactcaccatacagactagagaaaactcaccccgccgcacattggcattgtagtgtcccgtctgctgcaggagctcccgtagcgtgagcccgcgcttgttcactgccatgcccgtcctctccgacgccatgctctgctccggcag

SEQ ID NO: 86583 - DNA, 455 bp, Zea Mays
ggcccaatcactcgggagtagaggtataggtggcaaacggatggctcaacaaaacagtaggcaatgagcatgtatatcttgttaaacgtgtttcgtccagctatagtgtgggggtatttatagggtaaccgggataggtggcctaaatacgtctgtgtccctggttacctgctaaattctctaaatatgttatacacggggtaattacagagttgtatgcacatagccctagttacaacaatctctctaccctcggtaaccactgacaagtggggccacccaggagcggggtggctctctttctagataggtgtcgctattgcaaacccattcttgtcgattagcccgaagtcattggggccttcgttgggaggaggtgttcctgcagccctcgctgagaggggccttggcttccttccttggccattcgtaggacgtgggccctcgccttcaac

SEQ ID NO: 86584 - DNA, 932 bp, Zea Mays
attctttaaaacccacccaaaagtaccagcaggccaaaaggaaagcttccccatacgaagcattcagacaccaaacatacttccctcctttccaaggatgaccaactcctctcttactgcttcttatctttatttttcttattatcattggctttcttgtttgtgcttccactgtccttgcctttccttccttccgcttttgatgaagaagtagacgcctgagatgatgctttctttttcttcagctgattgtcatttaactcctcttctgtcatctagcaaaactggattcctagacttctgataacctttgaggacaaggtgggggtccataaaaaatcagacaatttctctttgagcatgctccttgcttgaacctagctcttcattccttcagcctctaacttctcctcagttcagagtccactagaggaggctgaatgcctgccctctttttcctgtctagcagaacatgaggagctttctccataggttctgaattcatctgagcatcctcttccagaacaattttatccatgaactgatccttagggcaactatgaggaatagcaaatgacagtggttccatctttagctctagcaaagcaaacgaaatctctgatgataaaaggtattttgtccagttgaaatattgaggctgcaaaaggctggataaaaagaaaggggcccatgattttgaaatctccacagttaaattaggggcgccaactggggaaaagtacttagcccacaatctgtaaaacaaagcattcttcatccttgagacatggttctgaaacactgggtcaggctgccattctagagcaaacatgttgttaatctccagatggtaatggaaagggtcaaggccttcttcaaaactactggccatgatgctgagcatcatccatgatatggtcatccccctgagg

SEQ ID NO: 86585 - DNA, 402 bp, Zea Mays
gtcggtaacccggcccatgcatatgccagctctctccagcccgatggggcagtacttagtgtcactatatgtcaggcatgtcatgcctactactatgtaacatgtgctgatgataacttaaagtaagaaccttcaagatgaatagtgtccttggatcaagggctattaatgccttagtttgtcagtttataatagggagtactagtcagttcgtaccaagttgtctttattgtggtgtggttggttattgatgatgaagaagcatgcctctctcgcaacaaatgtctcatcattatcattcccaatgcatctgattaactcattcatgactggaccatgagcttcgtttcgcatatgattgcgtgtgttggaatttcagaactgatacaaacgactcggccc

SEQ ID NO: 86586 - DNA, 586 bp, Zea Mays
gttcattacaaaaataaaggggtactgcataataaactttctccccctttttggcaacaagaaccaaaaagagagagagagaagcgccaatccaatgatcactagtgaggaggaggatgatgaggagcgaagaggtggtgcgccaggtcagaggcaaagtgttcctctccagactgggccggaggaggagcactgccagacgggtcctggggcggaggataagaggacgattggcccggatccccgtgatacgagggcgggacaaactgctccggatcatcaaaataagtttcttcttcttcgacgtcatcagctgttgaaaaaggtaccccatatgcctgctggtaccactcgttgacatatagaggaggagggtggagtggtacatcaggagagcggggggcgaagggagtacccaaagcggaagcttgacgacgtaggttgtcgtcggtctcccgctgacgtcgagccacctcatggacatctgcagcaatatttcagcacatggagaagaaagccgcaaacccatgggccaagcgggcacccatcccacggccacgacctcgaccacgaccacgaccacgtg

SEQ ID NO: 86587 - DNA, 1521 bp, Zea Mays
agggggctcggggtaaaactcctaagacacagagcatagtcacgtaggatgggcgggtttgattcttatatagtacagggactcttttaaaaaaacacgcagccgaaagggtatcgttgaatggtggccgtccgatctaaaccaagggctcaaattaaatcagttctcacttgaaccggtaagcagtgctagccacacgatcctgcgcggatggctcagatcggatccgcaacccagcaaaccggtatgcactcacggccctacgatctaccatctacggtcgaggatagcgcctgaccgcaacccatctaattcgtctgctaacgatccgatggccaggaagcttcttcctccccaaggctggacgcggcggcgaatgcatagcgcgcggcgacacctcaccggagatacataatctctcccctctagttccctaaatccgaatctgacgggtgctagacagacggggcgttattgcgaataggttggggagaatcttaccataggtagaagtcacaagtcatgggtccatggcacaccacggagcattgaggcccacggcggcgctaaggtacccggcgagcaattcctactgcgccaaagctcgaatcgtccctaccgaagcagctacacgaagcggaaacaagcacgaagctattggaggattgctcaccgagaatcgcctgcaaagatgctctgcccacggtggtcagcggattccagaggaggaatggacggcggcgagaaattctttggtccagggcgacgcttacgccagatagcaagcttgcgtacgatcctcggtcactggttatcgcctccgaccaccaccctgggattcgaacggcaggaattgccacatgcaacggtggcggcgtacttctctctcctctcttcctctccgcggcggcggtggtaaggcactgcacgcacggtgatacgacctcgaatcggtggatggagggaagggggtcgcggagcttcggcttttatgcaccacggtgaagtccgagcatggttaagaagcgatatcttcacgcgcggattcagcgtttgcgaacggaactagagctgggagaagaccctgccggtggggcccaccagcaagtgaccgagtaagacccggaaagattagttgcggttgcggcgaactcggggggtgagagccagctccgcgcggattttgttcaggtgcgagcgcggatgagaacgatgacaagcgggaccctcttgtcagccactggatgtgtatgcgcgtgaggagccagatgattttgggccggccaagcgtggttgaggtgggtcgaaggattgggcccagtttagtgttttcactttattctttttcctgctttcttattccaaatttctatttccaaattccaacttggttttggatttcaaactcaattaggtgcacatactaaactccagcatgaaattctataggtttttagtaatatagttattttattttagttcttttagacatgcttccaatcatataaaagagaatagttc

SEQ ID NO: 86588 - DNA, 734 bp, Zea Mays
caagcccctcctagacattccttaggatgcaccacagggtggggagcctcggacgatacaatcctaattccatggatgcctctagtcaaagatgaccatatgaaacgaggcgagtaatataaggattccttccatcacattgaatgtgatggacaatgttgcgatcaagaaagagcattgtctatatacctaaggtcgtagatgtacccatggtcattatgtagtgcgtgctgctgtcaccgtagccacgccatcacatgcaagcataccccaaagcatacccacaagcatatgatgtacatgcattcacaccatttaccaactacgtcatactcaatagtatggactctagttccttccactgaaaagacatatctaccactgtaggaagatatctttgacactgtgtgagaccaaaaaaatgcattgcatacaactccgcatctacaataagataggagtattaaagccatgttagctagtgcccactatccaacaagcatgtaactctttcctcctttatgctataataaggagtagaacaacatataacacatgttgagaagacgtaggtcgaacaaaatgccaattagtttagaactctcaccaaaaccaaagtattgggagaggtagtcagtcatctggcttagacaacctttgattgtgtaatttcctcctctgcttcatcaattaatctgccataaagaggttgtaggatattacgttgttgtggc

SEQ ID NO: 86589 - DNA, 595 bp, Zea Mays
gcctcttctaggttgacccttattcttcttcatgaatttgttgaatttcttcacaaagagagccaactcctcatcactctcacttccatttttcttcatcatcagtttcttatttttcaattgctttggaagcattagctttgagagctattgattcacttttcaccttcttagccaaacttatagccttggtttgagacttcttgaatatatcttgagtaagaatttctcctaatacttcggtcggagaagttgtggtcaaatcagttcttactagcatgattacaatagtgccatatttctccgaaagggatctaagaaaattttgagtgaaatccacatctggtacattaaaaccgagtcccttgagctcatttactatctcatttaaccagttgaacctgtcggatacactttcatcttccttcatgagaaattgctcaaattttcacttacacacatatatctttgcacttttcagaattgtggttccttcatgaatttctattagcttagtccaaatctcatgagcggttgtgagattcttcatactgttgaactcattgatgtctagagcatcatagaacacattcat

SEQ ID NO: 86590 - DNA, 343 bp, Zea Mays
gaaggctcgaaatcaggaaaatcagcaagcaactcatcaaaatcagcactagtaatctcgttacaagatggagaaataacatcttgtaacatgtcattgtgagcaaaagttggaataggctaaatcgctaaacaattcagacctagctcaaatgtaccatcctctgctgaataacaagtgtcaagattaaaatctgcaaatacattggtaaactcatcctcctcttcagtttgtgaatcataagaagcgtcagcaagggcaataatagtacgacgattgggacattcagcttgtttatgcccgtgaccaccacacttaaaacactcaatcttgcttgtcttgc

SEQ ID NO: 86591 - DNA, 497 bp, Zea Mays
acaaattcttaaaaaatacgccttcacaagcatccaacatatggggaccatattgcaatgggtgattatgcatgggtcctcgaattgtgcgccttttatataaaatgagtcaaggtcttggtggctaggaacgacatttactactgctatatgcttgctgctactgccttttttgcctctgaagcttactttggcttgttgctttctttcgtaagactttgttccctactagcttcgttgctttagaaatgtcaggagagaaaacaaacactaatctcgtcattatgttggcatcggatgtcactatgaaaggagaagaagtcccaaccgctgggagtgggactgtaatgagcacagatggaacacctgctcacgttgaagaaggtgaacctgtggatatctttgatcatcttggagaagagtttgatagagaaagtgaggactttgagtttgaagaagatagcaatgatgaccaaccatcaaagcctagccatgtg

SEQ ID NO: 86592 - DNA, 368 bp, Zea Mays
caaaagcatagctccaggtcatctcgtgctccgaagggtagccaacccagatacagcggggaaattgcaagtaaagtgggaatgtcctttccttgtctcagcttcgaacagaccgggctcatatagattgaaagacatgaaaggaaacgacattccaagatcatggaatgccaacgagcttcgaagatattacatctgatgccaagcttcgcaccctttttccttataaaaaggggataagggtttttaacggggccgaagatgtaatatttcgtacaaagagtgcctgaaatcaataaaggtacaattctccaaaaaaccagctatgccgtagcgatatcttcgagcgcgaaacaacgaaattatca

SEQ ID NO: 86593 - DNA, 560 bp, Zea Mays
cgtcaacggacttggaactcctaacaagcggctttgacgtcgcggcgaactccgtgctcgggggtggtgtcggtggaggaaataatccgtgatctcccataatcttgctttgcgggccgttagttcctacaacgtgtatgttcgttgggtccctcgaaccccggttggtcctaggttcactctcagtctgaggggcgctattcgtgcgactttttccattaaccatactcgtgcgtgatgagcccctgagcctctgctcgatgcagagatccatctgggggtcatcctgccttttttactctcccccgcacatctcttccgcagcgatgaggggtggtgagtcgaaccactctttcctcgatggtctagcagtggcgctaggtgagctacaaacgggtaatctgagtgaggctctgggtcctttcgtaggatccaagcgcgggatccgttatgggaccgtcctcatactcccagacatcgacacatatagttgtcgactctgttcgactggtctcgacggctcattgcctctctccacgataaaccatgagtcggacatt

SEQ ID NO: 86594 - DNA, 1422 bp, Zea Mays
cggcattgtattcgcacgagagggtattagagtacaactagtcgatgaagacgttattaggcttgctaatgaccttttgtgataccaggtttcctataatcccctcaattcaaggcatacctagatggtgtttatgcccactcaagtaaaacactgcacatcattatgccacatagtttctcaaactaaaataaagaccattggaaatttacccaaattgcgtgagagatatgtccaaacatagtttatggttgtaaggcacctttttccaccatacagttgctaaaaagttagaatataaagaattcaaaacaatagatcaccttcaaaactaaaaataatgtttctatgatattgagggcattgtattcgcacgagagggtattagagtacaactagtggatgaagacgttagtgggctagctaatgcccttttgtgataacaggtttcctataatcccctctattcaaggcatacttagacggtgtttatgtccactcaagtaaaacaccacacatcaatttgtcacattgtttctcaaaataaaataaagaccacggaaaatttagccaaattgtgtgagagaagtgtccaaacataggttaaggttgtaaggcacctttttccatcatacagttgctaaaaagttggaatataaagatttcaaaacaacagatcacatttgaaactaaaaataatgtttctattatattgagggcattgtattcgcacgagagggtattagagtacaactagtggatgaagacgttagtgggctagctaatgaccatttgtgataacaggtttcctataatcccctctattcaaggcatacttagacggtgtttatgtccactgaattaaaacaccacacatcaatttgcaacgtcgtttctcaaaataaaataaagaccatgaaaaatttagccaaattgcgtgagagaactgtctaaacataggttaaggttctaaggcacctttttcccaccatatagtttctaaagagtaggaatataaagaattcaaaataatagatcaacttttaaactaaaaatgatgtttccctcatgtcaagggcattgtattcgcgcgagaggttattagagtacaactagtggatgaagacgttattgggctagctaatgaccttttgtgataacaggtttcctataattccctctattcacgacatacctagatggtgtttatgccactcaagtaaaacaccacacatcattatgccacattgtttctcaaaataaattaaagaccatgggaaatttagccaaattgcgtaagagatctgtgcaaacataggttaaggttgaaaggataattttttccaccatacagttgctaaaaagttagaatataaagaattcaaaacaatagatcacctttgaaactaaaaatagtgtttc

SEQ ID NO: 86595 - DNA, 780 bp, Zea Mays
ccttcgtttcggtcgggtaccgaaggctgcagtcatcagttgatcctcctttttggtgtaatttcccagcacttcattacacactatttcaatcatttccagccactcttggcaaggttctttaaattttttctcaaatttaaaccgataaggaagtcgcacaagctcaagtcctttcttcattccttttagcttcggcatgctaaattcgctcaaggtcggagatgttctgttagccaaatattcttgaactagatctctggtgttgatctgttcggctaccaccctaaattctgccacagcttgttggcatggtgaccccgacgtcatgcgacacagggaccgagtcaacccgaaggttaaacttagcgggctcatcactagtgttttcaacttctccctcttcttctcatcggccttgacatagaaccactcacttttccaaccggtttgccacttggtgcgatagctaagcaccggggccttcatatccttgcgatatgcgaagttataatagccaaagttttcatgtagcccgtcttctctggccttcgtctggtaatgcagctcatgcactcgacagaaagcttcagcattcgggtccactccttggcttcgaagggcctagatgaagacgctgagcctaacgatagtgttaggggtcagctgatgaagatagatttcgtaattattcaaaacttccccaatcatttcgttcaagggaaaccgcaatcccgctctgaaaaaacttttgaaaactaccacctcatcatttttcgg

SEQ ID NO: 86596 - DNA, 512 bp, Zea Mays
gagcatcggagaggaggcgcgtcgtggggggttgtgtggtttttatagagaaggaaaacgatccaatgcttgtagtagtgacctaggtatatggtatgctagggatggatggatatgcagtcaaagcaagccgagaggagagctagctctaggaatttctgttccgaccgtacacccggcctggttttgtttaacaaaccctaggaatagtttatggattggtcctgaccaaggtatcaaccgaacccaagcatccaagaatctttgaattaagtctgaacatgatttgtactttgtagtctgcatatatatttaatcgactcaaatgtgttagagagagagaagttgataggtagtataacattacaagaaagggttaataataagtcaataacttattaggagtatatggttccatctaatgtcaaaactaacatttgctgagatgctacggaggatttaaatctccggctatatatagcagttttaggcaaggaccaattgtctgtgtc

SEQ ID NO: 86597 - DNA, 340 bp, Zea Mays
cggtaatgatccggcttaggtgggcagcgcgaactgtgacccagcccccgaggatatccgagcgggctccccttctcatgcttccatggaggttcacgtcgggtcctcacctctgcattctgattgcatggcagcaacacgtgctctgaactaggaaatcgccttagaggccggcgtacctgataccagagttttaattcctgtcggtgacaccgtgttggctcccgatgatgctccacagattgctccagttggtgatccttcatcaagtcaccaacaggcttcccatgatttggggcttccttcttttgtctccaatcttttggtaattggcttttcc

SEQ ID NO: 86598 - DNA, 858 bp, Zea Mays
gctgatgatgtcctcataaaaaaaaatcttatttgaaagcattatctccttgttacacttttattgctagaaatactgtagcctaacataaattatagatctataagattgaaaatcatgccaagtcatacctctttatattttgatatggatggagtaccgtcttaattagtctcactcgtcttcttttaatagaagaaggcactaggtctcctcacccaacaaagcatcatgacaattgcctagaaagatgagatatggactaataggagcacttcaacgcctactatactagtgggagggggagaaagtcagcaaaaaaaaagttggtcagtgtcattccactaaaacatcgattagactttgtgaattccattgcctttttgactttggtccctaaacgaactatctaggttgcatgacatacgccataaaaaggggcccagatggggcaaccgaaggaattccattattgagagcttgagagatagcgtactgcactgtcgactagactactacccttgcaatgaagagggcaccggctgtgtgtcttctggccaccttgttggcattctacttcttggttccctccattgctgtagctctctcaagtgagttatctctctcaatctgcctgcttgattccttcctttgtctcttagctttgctgcgtcggcatgtcatcagtgatctggccacttgtttctgtggtttctaggggtgcaaaagatggccatgcaagaggatggtcagataccatcggttcaaagcagcactctacagccaaaggtaataccacacactgttgactacttgcctttttcgagcaaaggcaaccatcttgattcttgacccatc

SEQ ID NO: 86599 - DNA, 315 bp, Zea Mays
aaactcaacagtagaagcaatgttcaagcttggcaaatttcgtcttggtagaggagcactggaccaattcggtggtgcaacaggccgagggcaaagaatggtctagggattggtctcaggtagctcgcacaccagactaatccagtgggccatcataccactttacatgagaggttgtttttcagccgaagaggaggtagcgtaccggcccggtccggtggtgcacagcaccgtctgataggttcatcggtcaactacaactccaatggctttactaccatggtggtggtctagtgcccttgacatgactgcccc

SEQ ID NO: 86600 - DNA, 581 bp, Zea Mays
ttaaccacaacacttacaccaatttatacatgaagaaaaatgtaaatgatttacctcacaatgaccataaggttccccagattcacggggcatcctcttgtctgctctggtcgattctttaatggtttccttatcaaaaaaactttatacgtggtgtcatgtacttgttttgaggggatgtagagtcatgaaggtgatccagatagtagaactaaataacataaaaaaatatgacataatacgtaaaaatgaatgtacaaacaaggatttgtatgatagtaaataaaaataatgaactgcattgtgtgtggttgtttgtacaggaagtcggttacaagaatgatgagggagcatccataaacaatcacggttatgtttgtggtggtcctcttgtgccaacgactagcagcatcacatagatcggtgtaaataagctggcaccagttgatatcagccacccggcccatgttttcaatcattagaacttcgttgtttgtgataccccaagaaatagtgggaaacaacagacgattgaataatatgagaaaaagcatctgatggacaactgatcatcttttccc

SEQ ID NO: 86601 - DNA, 431 bp, Zea Mays
actagttcgggaagaacatccctacatccagtatttggctacttgcgctactggcaccattgctgatcaatgctcgtagtaggggttacaagcgggcgagagacagagaggagaggctcccaagtctcttgttgtggagatggttatgctaagggctacaaagtggagtcctaactaagtattggcttggcggtggggctccggcctcttggtcctcttctgtgtgtcctccttcttatgttggtccaccgtctttgcgtatgggtgttagtctaggcctgttcctttgtcaggagatcggcctcctccttttataggccaagaaggggtcggccagcggtggcttcctcgagaaggagtcaccgggtgatggtaaaactgagcgtctaccatggggtgaagccacgagcgcccatgggccctagggtcac

SEQ ID NO: 86602 - DNA, 382 bp, Zea Mays
gagttacaaacgtatcaagtcatacaatgagcccataagcaagaaccagtaacctttgaatcgattatttcaaaatcaactcaaagattcagggcttgtaggggacagatatcccccgggtccactcgggggcgaaaactctgctcggggccacatgctagtcaccccgcagtgacgcctcgtcgtgggccgggcaaagagaatgaaggaaacagaccgacccgggaatgcgatgggcccacgcccggattactcgcggcttaggcgtgatcacgttgaagctgttcgtttttcccgcgtccgacatcctcgaacgtcggagatagctcggagaggaggcgccgggttttcctcgggatagcgaagtttgttcgctattagc

SEQ ID NO: 86603 - DNA, 948 bp, Zea Mays
gggtacgctaggccacgtcgagtaccggaaggccgacgggaggaactgggaggagtggttcgagcgcagcggcatcgctggcttctccgagggaaaggcggatgcagcggcagagtagtagctgttttttctctagtacagaaagtatatctctctctctttgcttcaaatattttacctacctgctatcggttatgaaaaacactttcctatgtcgtcttctctcttctccaacgcatttttccagccgtgtagaatatataaaaaatgaggatttaaactctactcaattgtatatatcgtttgatttctatcacttgtatacttgtatatatcgtttgacttctatcactttaactcatggttgttcgttttatttttctgtttgttttacttaagtagaggtagtaatatacgtgcaattaactattacgtatctagctacctgcccttgtttccctctgttttcatcatgggaaagagagacgtgtccatctaccactacccgccgttgactttggcttgagcgtggctcttggggagcggccctgctcaaatacagcttctatcttttaaataacttattttaggttacatttagtttagctggagagccaactagaacggaacagttctattctaatttctaagaatagaatcgctccattctatgtttggttggtagaatagagccgttctattttttgtttggttgaaaagcacatcagagcgtacccgttctgttttatgtttgattgaagaatgcagaatgacatgatctgaatgcaaaactgcacacaactcgtgtaaacaactcatgcaaaccaaaccaaaccaaaccaaactaaactgtaaaccgctcgtccaaacctacaatgcagggaccaaagttcatcaccacgaattcccttatgcaaatgtgtaacatctcataatatatgagttcat

SEQ ID NO: 86604 - DNA, 524 bp, Zea Mays
ttagatttttatagtttggctcagcagagctgtgtgagctttgccaaacggtccctaaactttccgtataagcaggttcttcattaatcaaccttttaggagcactcactggtaatagctgtctagaaaaatgtttaagcggagccaaagaggccatggacataactcaaagccaataaggccatgggcagaggcagcctatagctgtaacgcaaaaaccttgcgagtccctccgataaaaagccccaatccctccatcccacctgcgtaccactcgtgtgctcgcaaacaagcgtccgagttcgaggcgtggcggcccgttttgcatgttgcgtttgcatgccgtagcagctctgctgccgatgttcctccccttccgaacccctcgccacctcctcgtctcgtgattcgaatcactgccccgctcccattgcgaacgagccagccgccacagctgttgccaggctcaagcggaagggctcgggttcccagacgtgccgggcgatcgatcggagagaggcggc

SEQ ID NO: 86605 - DNA, 760 bp, Zea Mays
ctcacacatgctctgtcatctcctctgctcttttccaagttccgctcggtactagtagtgaggtattataaccagcctcctccaagatctgcctcctccaatccagggatattaactatgcttccctctactagcgtcgcataccaagaattatacattcctgctacaatccaggaatttttaatagcagtgttgtggccgagttaatctagagatattttgtaataaaaagtcacatgccaagatcaatgggtttagtactagcagtgaggcggcacagataagttagattggttatttcttgttttcctccttaaccatgctttattcttgtatgtatgcaatctgaatttattttgttgattctttatgcttcgttgtgaaagctgaaatgggcgcggataattctatggtttgatactctgaatttgattgtgtgagtcgggacatgggatagataggatatacattttccacatgttctatatggattataatctggccagctttatttttctcccttgtattttttcctaggagactgcgtaatcctttcatttgtacccattgtgtgatcgaatgatcctagatttgaatggtcttcatgtaccttccggccgtatatgtatatatgtgtttctggtcttcattggaatagcgtggtaaattaagtttgtagtggctaatagaaccaccagtaaaaaataacttttataggcagctcatgtttacctcagtttccttacctatttttaatcta

SEQ ID NO: 86606 - DNA, 492 bp, Zea Mays
agatttagggagaagttttatgaaccaaatgatgactggttgaaatgcattgaagctaccagcgacgagctactcgggacatatttccaaggccgaagatgatgccttgtccgcagccttcgggggccgggggaagaaaagattgaatagggtattcgatgcagttggcttcgtataccctgattatcactactcgctgcaaaggcaagggaagaagagaaaaactgttgcttcggctaccactgttgtgccgaagggcaagaaaatgaaggttctgacccaccggccatgatatattgaaccgagcgtagtgcctaaatttgtcaaagggacctcttcaactgccgaagcaaaacaagctgcttccatggtgcagagcgttgaagagtctattgtaatgccgaaggtgcctacagtcaggccagccgaagctaaagatgatacggtcgaagagccaaaggtggaagaaacagtaaaaatgctagaaattct

SEQ ID NO: 86607 - DNA, 1060 bp, Zea Mays
ctggcgacaaacggtacgaccagagctgttagtcgttgttatcgccgacggccaataacgaccgtcgaaaataggttattatcaactaacgatatttccgaccgacggaagaccgtcttgccttccgaaataagaattaaacctttatttccgacggttcataacttacatccgatgatataagccttcgaaaaccatacatagttagttttctctggtgattctgcttgtgtcgtgtcgcgcaaggtagtatgtaataactctgggtccttcgtgtctactccgttttggtaattactgttactgtgaggagtatgttgtatcattgttggtattctctacttcctaacgaaaaacgtgctatgacacggcggcgacaagattttagagctccactcttgatggatagcaaagtgtttgatcgaccgacgcgcgctctgatcgaacatcctggtaggcgattccccctctatgtttaatttgaagtgggcagaacaaacaaagtatcgagcccttgcgaggttcgccttgccactgacgacgccacagttaaaggttgaaaccacccacactgcagcgaagaaggaagagctgagtttgcaaaacagaacacagttttgctgaaggttgtgggctgtccaattaagtagctcgatccaggcatcagccgacctccagcatgtacggtagtcggtacctaacagccctcaaaattgtctttgcttttacatttgtttctacactaagccgtatcacaatggacctcatcgtgctcatctagtcatgcatgtgataaaaatgctctcacgatcgacgtagaatcgttcatcgggtatatttatgagggctgggccatctctttagaccgaggacccatcggaccgtgtgctcgtctttgcccagccggttaaccgtcgccgcatggaatagctagctacacagttgaccatgaactttcaacgcagccagctggactagcgtgccatatatcaagctgctgacaaggccaccctaatcacataacagttttattttgcacgtgtgagaaacccaccaatcg

SEQ ID NO: 86608 - DNA, 337 bp, Zea Mays
gttgatagcagtgaagcagacccactagagatcatcaaggttgtgtccgagttcccagatgtgttcccaaaggacctaccaggtatgccactagagcggaaagttgagtttgctatagagcttcttcctagaaccgcccccatctttaagagagcttacagagtatctggagatcgatgagctgtcagagaaagattacatccggccaagcacctcaccttgggccgcccctatcctgttcgtggagaagaaagatggcaccagaaggatgtgtatcgattatcgagctctgaatgaggtcacaatcaagaacaagtaccccttgcccagaatagaa

SEQ ID NO: 86609 - DNA, 348 bp, Zea Mays
aaagacgttcgacacgcctccaacaacagccgctatagcatccggtaaaatttagggtgtgttcatcgccctctactcttggcggacttgctgtcgctcgctatccactgtttcactcgcgcgtcgcgttcactcccgcgcttgacttcatcgtccctgtcaccgagatggcgagatcctccgccgtcactcctccccacccaagtcccacgaggtcgcctcatggtacatgagctccaagcatcctctgttctggtcaaggttgtcgtagctctccgcgatggtgagctcgactgcctcgccgtcgttctcgtcgctgccccctcccgcggagcagaagaagtcgtc

SEQ ID NO: 86610 - DNA, 1130 bp, Zea Mays
gtctggtaaggtcggcccccataaacctggtttatggcaccaaccaaggcccagcctggtcagagccgcccttaagaacactttctcgagtgaaacatgtaccccattgcgaaggaagagtctgtcctcttccattgatttcttttcctgcttatgcatgttaattcttttcaccacctttcaggattcaaacttctgtttactcagaaaaaccgaataatagtgcctattattgcatctaatttgaaacatcatttgatagcgagtgaggatcagataaaccgaatgtttagtccaagaaaagggccacattctcagggatggtccggagccgtgtagctgcttagtctggtctagcaccctaagccaacacactccaccaccctagaacaactgaccaagtactttggaatgaatactcagaggtccggacatcatacaaactcaagagatgctccaaactagggacgactacaataagcactactattaaaggattaattgattaattatagccacaccagaagcggagtctaatttctaaatacattcatgaaacctagattatgtttcatctttactactcggttttgggatcatcccttcgaacgggtaaggctcaggtcatgaagggcaaagtccagggggagagaagcacattctcaatggtggtctagagccatgtatccacttagcctggtccagcaccctaagccgcacactccaccatcctaggatggctgttccagaacctagagttggcccctaaaggcttaggccttatcctgaccaagggacaggtcccgagaccctgctcggcgaggttcagaaacaaaatccagaagattgaaagcgttcagaataaggacccataagattcgccgttgagctccataacgaggccatgtgcagggataccttttttgcagatcaccggacggggaggcagaaaggagctatcacaagagcggtgtcgaccactactcccctcaccaggcgaagcccggcgctgccgcatgtctggcgacacatagcatggaccaccaaggaaactcggtctcaacctgcagagtacaaagcgcatcagcattaactacggacaagacatatacctgcccactccagcggcg

SEQ ID NO: 86611 - DNA, 277 bp, Zea Mays
caaactccaagtggctgggtttagttagcacagcgctgtaatcatcttcagattcaaattcttcagcatcgacctgctcagcttcagcggcaggggcatcctccgatactaccagccctgaccgttgcatcacttcagagattggagcggtttcggcaccttcggcttcctctccgtcgcgagtaaccctaactattgagcgtaccctagccatctgatgattgaatttcttgttttttgatgaaattgaaaattttgtaactttgtcgaagctctt

SEQ ID NO: 86612 - DNA, 457 bp, Zea Mays
cgaaggttgataaggttgaagagccaaaaattgaaaaaataatgaagatgccagagattttgagccctccaacagaggcaacagtaccgaaggtacaaatgggttccgccgtaactcctaaaaggagaaggatggcaaatgtgctggatgttgtgttagaaacaacaagaaccttgagtcccgctcctacaaggaaagttgtagaagcttccaaggcgcaatccgaagttgatactaagcaggcataaatcgaagctgcgacaattcaggctgaaaccgaagctgggccttcagtgcccaccgagatggagcgtgctgaccctaaggaaaaatcaacagagcggattgcaactgaaaagatcgaagctcctggtcccgaagcgtcgaacaaaagtattgactacgttattcgccatgcttcgggaaaggtactatcccaagaagaaatgttagaagc

SEQ ID NO: 86613 - DNA, 497 bp, Zea Mays
ctcgacttctcatccaagaagaggcgtagatgatatatagtttgatgcactctaatacatttagtattaatgctttgacatgtatgatatgcattttgctttacatacttatgattgtgtttaattcatgtgcatatgtatagtgatatggattgtgttttaatttcatatttaataacatgccacaaattattgtttacgactcttcacttgatatctgttcaaaaagaacttaacttgtcatgtacatgagctaaaacttaattctacatggtacatgactatatatttttgttatatggacttactccaacatcttatgttttaactccaaaagttcatacaaacaaagtcccttaaaaaccttactcctttcacattacttaagataatattgtcatcaaacaccaaaaagagggagattgaaaccatctagaccctcaatggttttagtgattaatggcaacataatgttattttgactaacatgtattttg

SEQ ID NO: 86614 - DNA, 727 bp, Zea Mays
cccgagtcaacaccaactacgtccctctgccacggcaagttcctgtctacctagtggtagtcgaggaaatttctgtagatctccctcgccttcgtgtggagaatggagtcatcttggagaacagctcggaggaacttctgcctacacccaccgcgttggcagagtcactagccttcgcagctagatcatcagcttcagcaccgccggcaccagcatttcaagcccctgctcccggaggcaacgacccggacgactctagggacaatgatgaagatgacaacaacgaagaagatgatgaggagaacgttaatgaagaagccgacagtgtgcagcaggactactacatggggttagggcctgtcaccgaacattatacatcaatgttcaagacagggcacttccctaacgtgctgcaggatgtgctgcatgcgttgggaacctacgtccgacccttgtacgagacaaggcaagtgtgtgagcctcctcgggcttgctactgcatcactcgcattcatgtcagggtgatggatgtaggggatagagggttcaggactctatcttcccatgagtccctgacactgctatccacctacgctgcttcggtcagcgatgcttctagggggactctgtggtctctcagccacacctaccggcaacagctgcatgacacgaagtacaggcatcttcctctgcgtctgagtggagggagccagaccagcattattct

SEQ ID NO: 86615 - DNA, 723 bp, Zea Mays
tacgcacctacctttgcaaagctatttttcaaattcttcacgcaacccaaggagtacgcacctacctttgcaaagctgttctcaatattttctctagcctagcttgtgtccattcactgatctctttgctagcttttgcaacggcataattttcattagcttcggcgagctttttccaaagttcttcgacctcggctttttgggcttcggcctgagcattgtatttagctttgtcttctttcattttactaatcaatgaagtcaaaatcttgtctttctccaaaccttcgtgtctcagctcaattacctctgagctaaggttgctaagagctattgtgcaaccttcgtcttcggcgttcttttgtgccctcaaggcattactaagaattaggccctgcaagaaaaagaaagaattaagcatgacaatgagatacttcatttccaactttaaagttaacagcttatgtacctttatgttgttgtatgcaaggctgtcagcaagatcatccttcgacatggccgaaaggccttcctcgagtttcggaaatcccatactcttggctatctctcgccaaacggatatttctttgctatccgggagacagtacaggaaattgtctttgtctgtgccattaaacaccaaggccccctctggatatttcagtttccgggcgtaatgtttggcttccaagacttcttcttcggataatctctttcctgaag

SEQ ID NO: 86616 - DNA, 332 bp, Zea Mays
cccggatcaaggggaaaaggccgtagcccacacctatcaacaaccctaccccctcgctatgaaaacatactaccctcatggtcgttattccccacaaactaccataaataattaccccacttagaaaggatgccacttccaccatctccacaactcataccaccccacccaccagctaccccctctagtgcccaaggacgaagacgacttcccccaaccgcccattcatggaataacaaacatgataccgataggtctagagttgacttcgacaataaaaggtagcaaaagtattactaccgaagggtaaatcacgttgcggtcaccagact

SEQ ID NO: 86617 - DNA, 455 bp, Zea Mays
caaacatccaaactttgtccattttctgattttgaatttcaaattgggttcatcgcttaaatatggacattttgaccaatccaagggttagtatgcatgcatatacacattatgtacttgagtaacacaaattttcatataaaactatttagattaaacaagaatcaaaaaatcatcaaaaatatctaataaatagcctagagagcatatttagaatcgaaatgcaatactacacatgtgtattcaaccttaagccacgtttgagagatctatcacattcatttcacttcttaatttgcaaaacctcgtttcatctaatggctttgtaaatatatcagccaattgatcatccgtgccaatcgaatatatagtgatatatccctttccaacatgatctctcaagaagtgatgtcgtatattgatatgcttcgttcttgagtgttggaccggatttg

SEQ ID NO: 86618 - DNA, 585 bp, Zea Mays
cgccgaagcataataccctcttccactctgagttctattgtggagagcttgagaaagcctagctaggtctggatggagatgcctccgagggagttcaagtgtgctcgtctctgggggttctcgtccccagggggcttcagtcccttcccttgcaacacatgtgccctccttttataggctaagaggagcacatacaagagagttgggctcgacaggtgggcccatgcatactaaaaatatgaagcactgagcgacgggaagggctgatggaccaaggtctttttccgcagtgggtaggtgtcatcccttggtcgtcgtgcgggctcatcttcactccgtcttgtcaacgtgtggatgaaggctttggcataggttatggcgtagcctagcccgtcgtcttgcataggtgagtaggtggacggtgttgtcccatcccctctgcctgtcttttcgcctggtgtcgtagtgagaacagcgggcgtcatgatgggagttacccacacgtggtgcagtgggtcaatggtattcaccttcgataacgcgtgggttactggagcgccttagagcttgcagattgcacacacc

SEQ ID NO: 86619 - DNA, 379 bp, Zea Mays
cagtgatgatctttctatagatcaggattgcgggttgataaaccgaaaatacagggtctcttttgcaaatatctacgaccgaaggggtatggaggattctgagccacacgatccaacatcggtggcccagattagaattaaccctatatgaaccggtacgcaatctctcccacacgactaggaagagacgaccctgattctatttcgttggattcaatctcacccgtgcacccacgatccaacgaccccggtttactcacctaaatcgttatactctcatgttaatctactcccttcaccggccgatcgacggcccccgtctttcttcttcctcaacgcccagtcacagtggtggcctccataccgcgaccccattgcc

SEQ ID NO: 86620 - DNA, 400 bp, Zea Mays
tggcttacgaaataataaagaaaagtgaaaaagatactcacgacactagagaagcaacaaaaacagctgaacaggctgcggagcttgagagacgaataggtattacttaatgatttttacctttgttgtttacttttgcgacttcgaaataatttacgttttctaccgcagctgaactatctcctcccctagagcccttcgagccactggccgaagcagaggccaaagaatcatcagaaattattagcatggccgaaactattatagacgaagtcgttacccgaatgctgaccgaagctgcagataaagttttgaaagaagaagaatagttattgtaaaaacattgctagattattaatgtaatatttgttgaactatgcttgtaatatttggtgatcat

SEQ ID NO: 86621 - DNA, 436 bp, Zea Mays
ggaaaacattaccaggtggggctagagcggagtcagaagagaggtatgggactggagcttcaacttgtttaggttgcggctgctcccccagcttcttagcccgcttttgatagtgtattatagcttgttccccctgtttgtcattcaccgttcatgcaatagaacaattaggttgctcccctgtttctcattcatctttcgtccaatagaacacggaattgacccaacactcgtagcctcaacatcctctatctcctcctaactattaatagttggatcatcatggtccccactacttatttcatcattactcaatatcttcgtagttatccctttctccatttctggtggaatcacacctccaacaatcacctttcctgaagctccactagtctcatcactacctcgaccataatcatcctagccactgtcatcc

SEQ ID NO: 86622 - DNA, 444 bp, Zea Mays
ttgcctgggtggtcgaagttgagccactgatctgcccgggtgaaggtgatcgggtgctccgaccattggtatggggcgggaggaccggtagccgccaccagtatctgacgatcgtcgagcttttgttatctcttgttctcctgcgatccgtgtccgtcgaagatgacattgacctctctgtcgacgcgcgggaaggctccacctcctccctcctcctgctgctggggttgtcgtggttctcctagtgctcctcacggcgggggaggaggtagaggttggaagggtcggtcgtgcccgacggagtgcttgaagtctctgtagttccgaagggtgtggcgcatgtccttgtggtacgggcattgggtgtcgaggatgtcgtccagcgtgcgttcgcctccacgaggtcctcctcgggcgcgagaggcaggtggtccggcggcgtgg

SEQ ID NO: 86623 - DNA, 485 bp, Zea Mays
ggccatcctcctccctttcttaggggtcgccgatgaaacggttgctgtccataacaactctgacactactagagaactctacagctttggctgctgctcgatcctagaactctttgttgttgtcttatccagtggaatggtgggaacttcggctactgcagcaagtacttttatcgattgttccgaaaattccaaaaacaacattaggttaaatttcatttgatttaaagcaaggaaaaaagtattaccttcgaagctgagaggctatcttcggcagattcaacagcctctgactgggaaatccctgcagcaggcagtatagcggccctctcaaaaaaatacgacttcggacgatgagttacaactttcattctctttggtttcggcgcagtagagggggtcgttgatgcaattctcttttttgtcccttgctttcgagccggaaagcaatagtcgggataaacaaaaccaatgacattaaaaac

SEQ ID NO: 86624 - DNA, 518 bp, Zea Mays
ccacgctacaaccatgggagactgaatcacttggaggctgaagcagttcaggaaacacccgacatgatagttggtatatttccaatcgactcccatattgcagaagtgttattcgatactggagcaacgcattcttttataactgcatcatgggtagaagcacataatcttccaataactaccatgtcaacacccattcaaattgactcagccggtggtaaaattagagccgatagcattttcttgaatgtaagtgtggaaataagggggatagcgtttcccgctaatctcatagtaatgggtactttgggaatagatgtcatcctagggatgaattggctagataagtatcaggcagttatcagttgtgatatgaggacaatcaagttgatgtccccactaggagaggaagtggtgaccgagttagtcccgcctaagccgaagaaaggaagttgttatcagatggctattgatagcagtgaagcagatccacttgagattatcaaagttgtgtccga

SEQ ID NO: 86625 - DNA, 530 bp, Zea Mays
tggaagttctcatcttgtaagaccaggtaatagagtgcaatatataggaagtgggatcaacgaaggttgattccgtaatcattaggttatgcatttttttgacagaggggataaccccctatttcatgacgaaatagaaagagacacaagttcttacaagaccatagagccaaccagaatttaaaagccgacaagacacacaactatcagctacgacggaactaaacctgaacgaaccaaactaccagaagcagcacaggatcagcacagagctgaccaaagacatagttcgcaaagatcaaactagagtagcacaaaactaaacagcttcagccccaatatagcccaaagttttcagcagcctggagctaccgaggcgaggggggattacagcaaacgcaatgatgatgaaccaaaatagccaaacatagcagaatcttcattggatccgtctgtcgactggcttccaaccacgagtcttgttgtagatctcacatgccatccttctgattttgaggcttccttgttcc

SEQ ID NO: 86626 - DNA, 477 bp, Zea Mays
gttgtcgtgtccaccatgtcagagtcatttgggtccatggtaagttgttttactaattttgttcactaccttaatgaatagatatattggtccatgattctcttgtccattgcctaggtgtgctgtggtgataacttctaggtctttgtcgttgtttgtgtcctatccatggcatcgtaagggacgacactccctcttcccttttatgttcatgtcattgttagtgtattagataattgatgaaatgtcctagttgggtgcaaaaacattgcaaatatgaataaggtattcttggcatgattttagccatctcttagttgttactatattgcatggaggagctgtagctatagtttaaaattaaattaatcaatgtcattagatagagaacctggtaggttgtggggttgtaattttaatacttgctcagttggtcccatcctggtagcgatagaaacactagtgagctatttatga

SEQ ID NO: 86627 - DNA, 499 bp, Zea Mays
gcgtggggttccacgagctgagggggcgcaggcaggatggagggacgccgggaatccaagccagaaccgagcttcacagccggtagagggaggtccggccgacggcgtcggggctggggaagaagcagctccgctgctggagaccagagacgccgcgtgagacagagctcagggagggagaggagcgcgcagacaccagggcgcgcggcgcggaggaagcaggagcaacacgcggcagggattgagctccactgagcgcgagctcggagggaggttctggcgcgtggaggaagagaagccgataagcaggaagccaagcgctagaggagatggctggggaagaagataagtcttcacgggggatttttacagcccaaagcggcggcagatttttcaactagcggccggatggataggattgtctggataaaaatcaaagggaagaaaaggataacgacggctgcagatttttagggatatacactgggttgacatgcta

SEQ ID NO: 86628 - DNA, 405 bp, Zea Mays
gacagggcaaccagtaagtcttgcagcgcaaacgtaggcatctacaacacaccagatgtatcctatgacacactagatcctgcaccagaaatgataatttgtaagggttgcaaacgcaacacgagctaggtataactcactagacatgtctggtgccataccagtgccacatgggatactcagaggctcaacggtcaacaatggcaagctcacaacgactagctagcatggaaggcaaggaatgtgtctagtggcacactggacatgtctagtgctgtgtagtaaagtctgccactttccaatggctcttttgggcatgaggtttataagtaccactcaaccgaccctttctcaagtgtgggagttgagaaacatagtgtgtgagttgagactccaatcttttag

SEQ ID NO: 86629 - DNA, 465 bp, Zea Mays
gaaaatcttagtttgctatttttgggttaatatttgaaaagttatgattaaaacaagtagctgctgtgttgctgtcccaaaaatctgcaaatgcgcttttgattgtttagttcacccttctggctaaaaatggttggttatcactaaattcgtatagaattaccatgactaagcttgagataacatatgtgtcatatttttatacgtttctttctctagttaattgtgatgtagtgattgtgttgcgtaaatatccaaaaatgtttgtcgtctttttagtggtgttaacgttgtgcgctcgacgatatgtagtgcgctaacgctagtgtgtgtggttacttgtgacgtcgtagttgtgtgcgtaaataaataaaatggtgttgtctttttaaaggtgttagtgttggacgccgataacgtttagataacgaatgctagcgtatggttgtctacggtgtcttccaa

SEQ ID NO: 86630 - DNA, 598 bp, Zea Mays
atgatgtatgtttgtccttcgttagctcagttttaatttgggagcccttcagtatttttttttcagagcatcttttgtactgatacatattcagccgcccccaaattgtttttcgtagtactaaatgcttacaggtaagctttcgtacttcaaacgcatttcaaagaaagtgttattttgacacgatctgactcggtttcgggtgtcattgggataagaaaaactttgttgaaaaatggataatgttagtgtctcgacatctggtaaagttacaagaaaaactcgaattcggtgaatttttgttgacatgagattttttgtaatgttccccttttttcctgttgaagtagggaatggggtcattgatcttttttgaatcatgtattggtggccaaattgggtagtataagcttcggatacacaaagaaaaacttatcacaaataggtgatagtgagctgcctttttccaacttcagatcaacacttgagtactcgttcgtgttttctcttttgggggacaggcacttaaggagttcgaggaacaaaaagtaagagtcctaaagctttggttttttttttacaatatactaggagacaa

SEQ ID NO: 86631 - DNA, 1074 bp, Zea Mays
tttcgcagcacatgctacaggttttactacttcacgccgtgagcatgtggaggaagagaagacaagtgcacggaagcagatagatgcgcaccaccaaacgcactacaggtggcaaacgattgcccagaaagcatgcatgcattcttcaacagttttacattccaccgtaaagtttgacaatgacgtgatgatataattgatagaacatgagcctcgttaagatctaaggtgtatgatatgtgtcggcttgagaacgttaaacgtatctatccaacagagattgattacaaacctctggtgctgatcatctctctacccagatttggctaatgatggaccagtacaggtgaagaaaaagtccaggctcgagagggggctcagggggagagagagagagacgaaggcaaacggaaattgtgcacagctcttggtaccagactatcagttgacagccaaacaactttatagaggtgagaggaaaacaaagaccaccatagtacaaaaagatctgacatataaagtaccatttatcattgtcttgttcttttcttgcatctcccatcctcttacgtctctgctaatctcacttctggtactccacaagcatttctgttgcttcatacccccgctgctacaaagctgtccatattcccatatgctgccaacaccttgacaacatgcatactgctaaatagtgaagacttcacaacaaataacaaaagacacactagagatggaacagggattggtcctaaataagtgtcaagagatctctctggacgcaactaccgcctgaccaatggaaattatcgcctaccatctgaccctgttaatgccatgaccagtcctcagtgcagacgcaacagaaaactctttcattggaaacagagtaggtgcagcgcggcatggatttgaggtagcggaggcaggagtacagactcccaaaaccccaagatccaagcaactacataaacatcgaatcacatatgtgaaataggtttagttggccatatacaaacaaaagttgccgaactgccagcacggtccccacataattaggctcttggattggac

SEQ ID NO: 86632 - DNA, 693 bp, Zea Mays
attattttttcagcctttgacttttcagccttatcaactttagcctcgactagctcagctatgggtaccttcggcattatggtcgcctcttcaatgctctgtgcaatcagaatagtttctattgcttcggttgctgaggaggaccctacgccgaatttaggcaccacggccgattcaatataacgcggccggtgggttagaaccttcacccttttgctcttcggcacagactcagctggggtgaccgaagcagcaatcttcctctttttctcctgtcctcgcagtgggtagcggtaatcggggtatacgaagccgatcgcatcaaaaactctgttcagtcttttcttcccccgacctccgaaggctgtggacaaagcattatcttctgccttggaatatgctccaagcagttcatcactggtaacttcgatacacttcagccagtcgttgtttggctcatcaaatttctccctaaatctgaaggtatacttcagtcggaccagaccaccctcaccagagtcggcagtggtttccttcggcatttcctagctttccacaagcggccatactctgaaggtgatatgttcttgaattaaatctcttgtgccaatgaaggagcaaacagtgctgaaagccctctgacacgctttgacagtgtcatcaatttccaccttcggccttcggaggccaaag

SEQ ID NO: 86633 - DNA, 613 bp, Zea Mays
tctcgaacttgttttgatttactctaactcaactattagaccaaatttgttgttttcagttaaattttataggatcacctattcaccccctctaggtgctctcaattacgcaagttcgtatcaatggaccgggagcagaacaatgagcactgagtcttgatcgagtgattgaagaagtcaggtgaccagcgatggtcgctgaccttggggatatcgacagatgcaaggacatagcagagcggatcatttcaccgatgctgttgtggatcgacgtaacacgtgcctaggacatgggagacacgtatggagtatgctacccacgggagttttgatggttgtgcctcaaaaccacccagcgcagtacttcacaggtttcataacacgtgccttgaagattatgccgtaaattttaatctctatgtcctatttagcaacttgaccgattgaatatttgttatgtaagacctctcccaatgtgggtgaggtatgaacctcaatctagtgcacttagaaatagtggacatgctttcatgaaataatgaccaatgcataagctaacttcataatgtggaactatcgaaccttagatttgttaggatgaacaatatcttcc

SEQ ID NO: 86634 - DNA, 862 bp, Zea Mays
gatttttctatctcctgggctgagcacctaactccaggaaggtcaggggctaacctacaaaaattccccagacacaggcttcatcctccctggacggcgggttgattatgtaaaattctagggtctcttatgcataagtcgctcggcgaaggggtatgaagcgatacagaccgcccgatccaaccacaacggcccagattagattatcataatatccgaatcggtatcccccgctggcgatcggatcccgatccaacggtcttggtttacttcacctaaattgttataccctggataatctgcgccctccatcggccgatcgacgaccctgattcggtaggatgaaaggggaagcccaacctgatctcagccgtgcgcgaggaaatcaataacgcacgcgatgtcatcttcccagatctaatcttattcgttccctccccatccaacggctaccagcccatcctctatctcccaacatcagccgaaccccgacagcagagcaggagcgtcacagcggtgccatcgacgagcaacccagccaggagaatcctcccgcccagacccaaattgaaaggtgccacacgcagcaaagattatggtgaaacgagggagctagttcttacctgtaaccaagcaatacagagcccagatgacccgacggcgatctcacccttcaaatcgttccccgcacgattaccccacggttccgttgagcaagagcgaggtagacaagggttgaagggtccccggggtcccatttatacactgctagtaagtccgattgagccgaatttgtcggaccacgcgcatggtgtttgcggcaatactattgcggggatgacactggccacacggtcccccc

SEQ ID NO: 86635 - DNA, 608 bp, Zea Mays
ggaggtcaccggttcaatccccgacgcacggcgagactcacagtaccgaattcgtggacgcgacagcggtggacacgaaaccgggtcggcggcggagctgcttcctctctctctttccctctctgtgttctcggcaacggtggttagatgcagcggagaaatagatgactgggtcggttttatagggtctacaccatggattccaagcagaggagggtcgcggatcacgcgcgaagtccgccgtccactccggcgcgcgcgtcgggttctgttgtgatccattgcaatgcggccaaggattgaaggaaagggaagatcctgtggagttggccccagacgtcagagtttccccacgccaggaaggagtgcgaggcagccaagcgggcccatctgtaggtgaccgaaggaggtcgcgtgcaagatccctgtggagccgaacagcgggacccgtgtcagctaggaaaggcatcgtttgttctcgtggcgcatgggatgagaggctgacagcctagtcccaggtgtcaatgacacaacgcagttgaatgagggttggcccaggcgtgcgtgtgaactgggccgcgcgggatgggccgacaacgagatttcgg

SEQ ID NO: 86636 - DNA, 404 bp, Zea Mays
cgacgggcgatctcatggtcgcgcacacgcagggcgtcgcgtgctagcatgtgggcccacgaccgcataactctcttccccgttgagatttgacgaacgcatccgtaataaatcgccgagctgatcgcgcacagaatctcgccaacaaaccttctcgagctgttccatggcctatataagcgtccgcatattgcctcccctgaccatcgaataggaagaaccagcgcacacttgtcccgccaccaacacaggaaggaaatccgccgtaagaacgagaaccccgattcaccggcgctaggctctaattcagtgctcaggaagcatcaccggagcgtggcggaagcattcgtgtcaccaacgggcgatcgtggggcccagaccatcggtaattaatcgttggcgct

SEQ ID NO: 86637 - DNA, 316 bp, Zea Mays
cgattaatggagagcgcgacatagcaatcacatgacgcagctaagttcgaacgacacaaatattgtgtcgtgttgccagggcgcagtcaatattcagctaatgccataactcagccgattaccaacacatcctgatcggcgtgtctgagtacccattatacaatttaatcgctcgacttgagtcttaaagctcaacacatcataaatatttagagcgatccgagtctacgtagtatagtctgcacacacgttttaataattttctgctaattatttactatgagaaataaaacagaaaaataataatagaattaat

SEQ ID NO: 86638 - DNA, 310 bp, Zea Mays
atgattcggtggccgttgcagacagggtgtccggtgcactcgcggatagaaggcaatctacgctttccaaaggaaggagcaacggtgttgggggtcttctttcccgccgaaggtactcaaggcaaaaacaccttcgacaaaatactacagaggcatacgcaacatgaagatacaacccgaagataatgcgaacagaagccgaagccttgactgaaggagcttcagcttagtattatgatgaagacgaaggacgataccgacttaaggaagaaaagactatctaatccttaatagttcgtattatgattac

SEQ ID NO: 86639 - DNA, 505 bp, Zea Mays
cacgacattaggtgtcaattggtggatctgcacgtcatacctctgcaagacctccgccacaaaacgatgcgcaggtaggcgaaggccggcgataaaaaacgcctcgaacacaactatctcaccctccggctcaggaatctcttccgcccccggaactcgtccaactccattcccaaaataccccaattgctgcatgtcttgcacgcgaaccgaggagatcctcgaaacaccgaactccaccgtgtggcccgggtgtaactccaccgccgccaaatcgctcatggtatcctcggacgacgattcgcccaacggcgcattcgcagcggacgaagaagtagacgacattgctacgtaccgtcgacggcgacgcgcggtttgcttgacgcgggccagatctccgatgaagaggaacaaggagggtaggtgagcgggcgaacggtttcaaaatgttagggttttgcggcgcacagaaaggtaagagagcccgagccgcgccgcccccctt

SEQ ID NO: 86640 - DNA, 461 bp, Zea Mays
cgggtggaagtgtagcggtgaatgtcaatgatgatgttggacactacttccaaacaaaaaaagggctcagacaaggagaccctttgtcccctctattattcaatgtaatggtggatttgctaaaagttatcatcagtagggctaaattggatgggcagtttgatcgagtaattccgcaccttgtggatggtggactctcgattctctagtatgcagatgacactatactctatggatcacgacatagaaaaagcgtgcaatatgaagttgcttctatttgcatttgaacaagcttcaggtctaaagatcaatttccataacagtgaggtgttttatttcggggctgctcatgaggagctaaaacaatatatagaactctttggatgtaagctagggaaaatccccatctactaccttggtatcccaatccacttcggaaaattaagaattagggattcgac

SEQ ID NO: 86641 - DNA, 322 bp, Zea Mays
aatttcaactttcaaaacataattgggcaagagttgtctaaggctgaaaaagaagagctgagggactatgctatatcttgcggctataaaccaggagcattgctcttcggtggtgttgccgaagagagtttaggatgcctccgggaccgggttggggcagaggttgtcagcactctatcgaaaagtgttggtttcccgaagctcgaagccgatctcagcagataccgacggtagcatatcgctggtagcttgttttattctaactttaaggtaaaattcttcccttaacttttttattgttttgatatgaagatgttttctg

SEQ ID NO: 86642 - DNA, 1199 bp, Zea Mays
agcgcccgcgcgcccgcgctggcagatttgcacagaggccctcgcttgcctggataactcgttaagagccctcagccactattcatcgtctcactgacaatcacacataggtccctcggcttttgtttcttctccaatcagacccatggccacggcgcgctcgccgtcgatcaccccacggcttgtactggccatgaccggcggcggctatcctaattagctatggggtgagcatttccgacccaagacgactcaagaacagccttcaattttggtttgtacacttagagaacgtcctacccacgtgcacggcagaaaccgtgatgtcgagcccgcgttcccattcaatcacgcccaaattggtcaaatggctgctacgatgagcttcatgggtatacagagctgctaaaacaacacacgagaagtgcagagccataccagagcggtctagccacagagcgcagagaaggtgtgcttgctggtgataggaaagggggaaaatggcgccgcgatggctctgggtggaattgggaggtgggattggggctacacggccgtaaggaactatagcttcaccatgcacaaccaattttgagagagatggcagaggcagtgcgaattttggacttcaatcaaactcactggtgaagttgtgagtgtctcactggtgttcatggcactatttataggcacggcggtccggctagctatccacggctatggataacattgttagcgcatgtttaccacgtagggaagagacacagtgagggaggagcaaggcatgggtgacaccacggcggaaagcactgagtcacggcgaccgtcgatgaatatcttcggcgacgcccgactgagctcgcgggatgatgccacgtccaaagttatcctcccccggatcgattccccccactggataactcgagctcatctgattcaatagtgtcgtagatcttttccccgtgttcttcagatatttgcaaagtttgatctttagcttcttcctgaaccgaccaccttccagcctctcgatctcttgattcttgttaaggacagagcaaacttcattaatagagtttgttcacctaacaaccagcttcaaacttactataggatacttgggtcaaaatcgagtgaattcaaagatatggcacgtccaatttggtcctataccactgtgaccatttctgttttcaatt

SEQ ID NO: 86643 - DNA, 688 bp, Zea Mays
ggaaaatcagctgaatcccaagtaaagtttaaatgatgagtacactcataagaaacatgtcccaggtcgcagacagtctggcctctgaggccgaatggtctggtctttcgcagaatagttcggcccttgagtctggacagccattgcagcacagacccgacatcacggacggttcggcctttgagaccgaacggttcgcagtggcatagagatcgcccaattcttctgagggaggcataatagaggaattttagggatctcgacaagttaggacgggtttacatcggccgatcttttggaggagatcgacatagaagatggtaaaactccaagaccgacttttgtaaacaagaccctggagaccgatcctagagatgaaatgatcggtctattaaaagaatattctgattgctttgcttggaattacactgagatgctaggattaagccgagagatagtagagcatcggctgcctattaagtccggtttcagacctttcaagcagaaacccagaacatttcgtccagacttactctcacaaataaaggatgaaattcaccagctgctagaagctaattttattagaccttgcagatacgcaaagtgggtccccaatattgtgccggtggaaaataaagaatcaggtaagctcagagtatgcattgatttccgcaatttaaatagagca

SEQ ID NO: 86644 - DNA, 542 bp, Zea Mays
aagtgtaacacccctggtgttactagaactaaaatttgagcatgacatcatatgcaatgacatgtcattatgtttcttacacctagaatgcatccactaggcaaaaacttcaaaacaagcgtgatgtggtgacttgaagtgttcttaaccctagaatagggtacttaaccatgggtttggggtatatggatgaatgtgaggccaaattgagtattacctcaaaagttattggaaatggtcacaagggactaagttttatgaatatgagtggcacacaaaccctagagtactcacaaccctaaagagaacccttgaaaccctaatttgtgccctatatggtgattttgatttctaggcacttttggaccaaaatgcatatatcaaagtgctaaagtatcacaaactaaacaacttttgcattgtaggattttcaagtagtgtggaacaatttggacttaattgcaaaaagcctcaagagcatccatgtggcttaactctgaaaaatcaatgtgcttaggccaagtttggggccttgtatttct

SEQ ID NO: 86645 - DNA, 491 bp, Zea Mays
ctcactgagtaccttgtctggtgccatgtctggtggtacacctaaaacgttagtggagtacttggcctctcaaacacattttacaacttctataggtatcatgtctttggtgtcatgtttgctggtactatgagcacttctagtgactacatgtgtttgaggccaattctgcaagctctctaggtgttatgtttggttcatcgtatttgatgcacattagacacactggtcctacgctcattcgcaacacggcacactcctatctggtggcccatatctggttcccaccggtcaagcccagcgctactgtagcactaccaactcacttattttgattattttttagtcgagttttgtttcaaacttctcatatgttcttagaggtttacctagcactagtttcacaattgtgcatcactgctcctaagtagtgtgtattttataatacaaccaaggaaaaaaaataaggtcctatcactactataagtgtt

SEQ ID NO: 86646 - DNA, 548 bp, Zea Mays
taactatcgagcgatggctgacactgctggcgctttagagataaccgccaagtcatatctgacgcttggaacttagcttttcccgagtaatgacttggcactttttagaaatagtgcccgacccgggaaaccccatttatactcgcgccgacatgcagttttgattttcgagccctaacttcacatttccgcctcgaaccactcctccgcttccctgagatctcgctcttgttcgttccactgcaagattatgatggtgccgaaatggaagagacaaagctccattgcggcaatcatcccgcccatcgaccccaacagctagttgccattcgcggataaccacatgtctgttattttagaatctgaccttcttcaccttgtcaatgttggggttttacttccaaaagagctctactcttggtgaatttgccgcggggtcactgttccgacagaggatacccacaaatctgtcgtttacgttccctttcttattcatggccttgctcttcccgtttctccctttttctgcgccctccttgatttctaca

SEQ ID NO: 86647 - DNA, 408 bp, Zea Mays
cacttccgcgaatagatcaaatcgtggattccacctccgggtgcgaccttttgtctttcttagatgcttactctggtttccatcaaatccagatgtctagggaagataggaagcataccgcttttgtaacagtggatgggctttactgttatgtcgtgatgccctacggtctgaaaaacgccttgccaacatttgtgcgggcgatgagtaattcttttggggacctgatcagggacaaggtggaagtatacgtcgatgacatcgtagtcaagaccaagagagggtcgaccctagtggaagacttgaccctggttttcgacaggctgtaggcaacccgcacaaagctgaacccggacaagtgcgtctttggtgtctccacagagaagttgctggggctcctggtttcat

SEQ ID NO: 86648 - DNA, 1079 bp, Zea Mays
ccaaaagagaccatcagcaaccctaacgaaggtggtttggttcgattgaaatatagcttcaggtttagagaccaatttatcgaaccagacgatgactggctgaagtgtgttgaaaacactagtgatgaactacttggagcctactccaagtctgaagataatgcactatctgcggccttcaggagccgaaaaaagaagaggctaaatagagtttttgatgctattggatttatgtaccctgactaccgctacccgccacggggcagaagagaaagagtgcaacttctgggaaggatgttgcttcagctgctccaagcgagcccgcgccgaagaggaaaaaggtgaaggttcttactcaccgactgcgctatattgaaccggccacagtgcctgaatttggcggtgagacctcttcggctactgaagccaaagaacctgcgcttacacagaggattgaagagtcggctgcaatgccgaaggcatcctcagccaaattagctgagccaaaggccaataatattgaagagataggagtcgagggaacaaaaatattagaagttctaagcccttcggcagaagtgacagtgccaaaggcacaaaaaggtcttacagcgacccccaagaggaaaaggatggccagtgtactagatgtgctggagacgataaaaacttcaagctctactccagggaaaactgccgaggcttcaaaagtgcagactgatacaaagctgaccgaagccgaagctacaaagagccaggccgagatcgaagctgggccttcagagcccgccaaggagaaatccttggaaaccggagaaaaggcaacggaaaaagaagctgtagaacaaattctgcctgaaaaagctgccactcctactcccgaagcactttccgaagttcttgattatattatacgacacgctttgggaaaaagattatctgaagaagagaattttgaagctaaacactatgcccgagaactgaagtatctgaaaggggccttagtgttcaatggcacagacgaagatgacttcttatactgcctcccagacaacaaagaattatctgtctgccgggag

SEQ ID NO: 86649 - DNA, 480 bp, Zea Mays
gttggaaagctcgaaataaacatatcactattttggagctagtttgaacaaaagaagaatatgagttaaagaatcaatatgttcatggtccatgacttagactagatggaaagccacttgagatgtttgtccaatgtcataggatctctctcaagattagacaaagcaacttagagaagattgttcaaagatcaacgacaagttaggaacacaagttctgaaattgccatgtgtggaccgtccagcaccttctaggggaccatccgcgacaccgctatgacttcggtcgggaactataaattgtggatagtccgactataaaccgcagaccgtccgactataattcacggatcgtccgcatgtgaagatctagttgagcccgtaggtgacaagttgagcagaaggaattggcacggaccgtccgggaccaagggcagaccgtccacgtggtgtcaccaaggaaagacagtcgttgatcta

SEQ ID NO: 86650 - DNA, 396 bp, Zea Mays
agagtacgaagctttgttgttgggactaaggaagctgaaaacaatgggtgtaagaagagcagtattgaaatcagactatcaggttatcacagtccaggtggataagttgagcaaagtgaaaaatcctaatatagagaaatacttcgacatggttcgaaggctagaatcttccttcgaaggtttctcagtaaagaacatcccaaggttgtataacgaaaatgctgacatgttggccaagtctaccgcttaggggctccctttaccccctgaagtgttcttcgaagtactaaaggcaccttcagttgatttgatggaaagagctaaagtgcatttctagagactaaggccaagaattgataagagagattcattctggtgtatgtggctcacatattg

SEQ ID NO: 86651 - DNA, 352 bp, Zea Mays
aaatcatctattgaatggagagtagacttttgttggaagttggaacaaaagttgctagatttgaggcaggtggccagcataccggaaagaatcagccggtgagctgtggtgtgtgggttatagttactggttgcaaggggtggtgactcgatactagcttccgtccctcccttggctacttgtgtcaggtggttctctcttggagtttgtgggtggactgctctactctgtagaagaagcgtctgggcatggaagcaatcttttctttggaacggaacctcttggagtggagttatgtggtgaaaagccatggatcagtgaagaagaggacctggagaaggcaatgtcgtcg

SEQ ID NO: 86652 - DNA, 701 bp, Zea Mays
ctcgatgcctacacgaggtatcaccagattgcaatgaaggaatccgaccaactggtcactttgttcatcactcctttcagctcgtacaacatgacaatgtcgttcagactaaagaacgtggggcaatgtaccagtgatgcaagattaaattctttggtgacctcatcaagagggtcatggaagcatacgtctatgacatcatggtaagaccaggcaatccgaaagcctcgtatctgacctcaggttgacgttcaacatgctaaagtcaaacgacatcaaattaaaccccgaaaaatgtgtctttagcatcccagggggcatgctactgggcttcttggtctctaaacgggggatctgggcgaactatgagaaggtcgccaccatctataacatgggaccaataggagatcttaaaggggtatagcgggtcacagggtgcatggactccctcaaccacttcatttcacgcctcggagaacccggactaccactctataagttgttgtggaaggtagacaacttagaatggacgatagaggcacagaaggccctcgatagcctcaaggacctcttgactagggcccccgttcttgtcccaccagatgatggcgagtgtctcttgctctacatagtggcgatcgcctaggtggtcagttcgttgctcgtcgtcgagggacgaggggaaaggatgtgcacgcccg

SEQ ID NO: 86653 - DNA, 284 bp, Zea Mays
cggatatttattcttgattgtcacttgatttaaagcacgataatccacacataacctcttgcttttatccttcttctcaacaaacaataccgaggaagcccatggtgacctgctaggcctaatgaaacccttagccagcagatcatccaattgccgcttcaagtccacctgctcctttgcagccatccgatacggagccttatgaataggctatgtacccgaaatcaatttgctttaaaaagccacatcgcgctccggtggaatgcctggaagctccgctggaa

SEQ ID NO: 86654 - DNA, 301 bp, Zea Mays
ataaccttaatctatgtttggacagttctctcacgcaatttcgctaaatttcacatggtctttattatattttgagaaatgatgtggcataatgatgtgtggtgttttacttgagtggacagaaaagccatctaggtgtgcctagaatagaggggattataggaaacctagtatcgcaaaagatcattagctaccccaataatgtcttcatccactagttgtactctaaaacccactcgtgtgaatacaatgccctcaatatcatagaaacgacatttgaggtttaaaaggtgatatattg

SEQ ID NO: 86655 - DNA, 867 bp, Zea Mays
agtcctatcgagaaactcggcgatgcggaggaagcacaaggcccgcagtaagggccagcacacttgtgggcccctggaaccatgccctcctgacacgcacgtgtcaggagcacgtctgtacccgaccaatgaggatacaatgcaagcactgttgccccactccagctatatatggtagagcacgtcaccacacacgtatgatcttggatgacaccacaacacaccagagggatgacagagagtccctaacaatgggatggggcatcgctgcgtacggtccccgatgccctccgactctaacccatgggtctcaccaggcgtcactacagggaaaactcagcaccggagtcgccatagtgacccgcatacctgttagataggagcgatgcgccataccaggtgtatgaccacacacgaaccagaagacaatgtcaggaaagttacgttagtcggaccaccatagacaataggttgcaccctcctttggacgacatgtacctatgtaagaacccccttgaactataaaatggaggaggtcaaacagtcaaaggacaggagcattcaactagagttcttcactaccacattcccacacttgcacctggtgtaacatgttcctcagtgagtactacaatcagtactacactggactagggcgcaaacatgaaccgatataaaccctctgttggaatcccttgattcatcattcggagggagtccacgctagcctctctcaccgaacacaaattatactatgtctccggtttctgaaaccacgacaacatgaattatagactaattatataatacaaatcctaccacctacaaatatagaacatgcaacgcatagattaaacatttgctaac

SEQ ID NO: 86656 - DNA, 498 bp, Zea Mays
atttagcttggtggaactggtggttaggaaagcatgggtgtatatatgtatgtcaactttattatgtaggatagaagatgcctttaaagcatagataggtttgggcaagaaaggatagggtaaggaaatactatatccaagattgtggatcttgaatcctttgaagatctggcttaaatcttatccttccttgatctgatgagatcgatcatcttcaatcttcgttcttgaagttgttatccgaatctaggacatgtagtcaaggtagattcttaggtaaacaaaataggttaataggtggttatgagttaaataagtttaagcagagtctgtcttgttgtcttgcttctagattggttgggtaagttatgtaacctgttatatcggtcaagtttggtgttatcatcaaggataatgggtattggtattaccataactagggacttagttgagataggtgtgggtacatggggtaggtagattgaaccgagttttttt

SEQ ID NO: 86657 - DNA, 569 bp, Zea Mays
caaagagacttactgcagggggtccctaccaaagggataccctcagtagaatataggtggaggtcatgagtgccacaatcatttgtaggctcacttaatgggatcatattacgggcagattgagcatcaggcacgattggcacgacctcgacaccacgatcatagtttccatcttcagggcgagaggcaactaacaaacgacgtaccagtacctccatgacttgcttttgtgtcttcatagctgatttaacataattatcccactctcgctgacactcaattgggatgataagtctttgcacgttgggtggaggacctacgtttagcaccccatcaacgacgatgtcctcaacatcatgccaaccaatcttctccttagccttagcaaccacctcactaaaggagggtctatcatcgaatatcacagccacacgttgcatgtcaacgaactcagcatttccataacgatcttgttccacgatgcctccatggtatatgcccaaaaaattgtccatctatttgaaatacgaattcaacgttgaataaccaattgtgatggttagtgcata

SEQ ID NO: 86658 - DNA, 617 bp, Zea Mays
tgaacttaatctcatttgtttttccatcatccaaaataaagttctccattgttacaattgccatcacaaaatccaactcctagcttagtataccccgaaaccccaaagctaagctatcctaaggagctctactccctatcacatgtatccccatcttggcatctagcgggaatacgaggcaacgctagactctggagaaggtggcccccagagtgagctatgctagcgatgtccaagctagaagctggcttgagatccttcccctcgatatttgtgtcctcgtcttcttccatgtcctgatgcatcttctgatgatgcatgtccaggtgctcgtttgcctcttcaagctattgtcgggtattctagagctggttttccagaacctcgatggtgtggtttctttcttctacctatccttcaagctcgcggattcggggactcatttgctcagtctgaaggcccttctctaccaactcagttgatagatccaccaccagatcctcccgatcggtgatggtgaccttaccatcctgagtcaagcccatcagctatgacatggcctcgcgttgtaggtcctgcaagtggtagagtgcactcatgcaccgaaccgtcagtcg

SEQ ID NO: 86659 - DNA, 463 bp, Zea Mays
acgctttggctcacgatgcagccgggcaacacacacctaaaggcacaggatgcaggggacccagtcgcctcctcgccgggcaacacacaccttgattcactcgcacctctatccggcggctccgaaattgtagaggtggtggcttcaggagatgtggtcgacaaaggcgaaagatgaggaggatacatatggattaggtggcggcggtacaggggatgaaggtcgatgatcgagattgggactggtggtcgtggtgaccaatgggatcggttgggattctcggcggtggctacagggactagtggcgacgatgcccgatttgagagtggtggttggcgagattgggactgttgtgtccgtcgcctgtttcttccataagagctacaatgccaataggtgaagtcgcggttgctcatcaaacgaagccacacgatggagaatgaaaagatgtagccgaaatgct

SEQ ID NO: 86660 - DNA, 609 bp, Zea Mays
taattatttctttgtcattatgcccccctccaaatttcttggtgggttgtaggcattggataaagttcttcctcgctctgaagctgacagtgagatggaagaatttagtgtttgcatcgcctaaccgaatgctgataagtcgggcccgttggtgaatcttcgatttctcaactaccgcaaatcctagggagggggccttgagcaacttcaggaatttcaattcttccgacgtgagcaatctatccttctggacgcataggaggagcgtaaaggtttggaccatgcagcttgaacgccctctctaaatccctccatctttacccataagttttttcaaagcggaaggaggggctggatgttctcgttagctctctttgtaagagaagaggagtatgatcagacatgagggagtggaaggagtgcaggtagcaatcggggaagagcatctcccattcagttgtgtagaagaatttgtcaacccttgttagagttggagtcgcatgaccattgcttcaagagaaacaatggccattgaggcggatttctttgagcaactggctgtccaatgccgatttgaacgcagacatgcgatgtcgtttaagtttctat

SEQ ID NO: 86661 - DNA, 880 bp, Zea Mays
atggcccgtggccaccgatgtgcgcagacgccggtacgtgagacttggcaaacgaagcaggtatgaggcaattttcttctcttaaaatttcgatgcttctctgtcaagtctattacatatttatatggcatcccagataggccggcccaacaccatcactcacacaagtccaacacagcccacacgatttacaaaaaaaagaaacacacacctaatcatcgcacgacaaaggctcctcttcagacttcagcttctactacctctgtcactgcttcatcaggtgtgacatctgccccccccttcctgcagaacttgcttgaccccaagcaagggcatgtggttagcgatggtgaagcacatggtagtcctcctaggtagctgcatcctgcggaatgagactccacctgaacaacacttgtggaactgtacaattgccctttttcaccggtctgtagtccaaaatttcagaggcagcacaacctgagcagactgaggcaaatccaaacgtatgcaacttctcccacacgctccacaatcttgtaaggccaaaaacaatagaaggcaagcattggacatggtcgagtgaccacggtatgttgcgcagacagttggagtttgagcaacaccatgtcacccacttgaaactggcgttcagttcggtgacgatcatccttcaacttcattctgttttgagttgttgccaactgctcccttaacattgatgtgaaccgagccccttccaaatgttctccaactgctgagtcatacaagactgaaatcagcttagttctaagtgctgaggtgctacccacccagatttggtgatgtatccaaataacaccctgttgaactgagaaacttgttgcatcttgactgtgaa

SEQ ID NO: 86662 - DNA, 566 bp, Zea Mays
ccgtgccctgttgcttgtctcttcttctcttgtaggggtagtggcaggtcggaaagaaagaaagaaagcctcgcttgcacagctcagctctcagccttggacctgcacaaaagcttgcactgctgctccatcgatctgcactggttttggcctttgatgatgacgatgatagtccggcgtggttgttggaccggacgtgcccattcgggggaagcggaagccgggccgggaagagcaggagcagtgtagcagcctcaccacagagcacacgtactggcacagccacagtggtttggtttcatctcacgtcgtgttcaccttctccacatccgatgggaatggtgctgcatcctcacccaagtgtgctgcttccggcaaacagtacagacgggaacatctgcatcattgacatcggcaaacactagccagtcaactttaataatatggagtatgtatactaatctattaaaaacataatgtaggcatttggtgctactatgctgcatcctcccccgtgacactctggactcaccccacgcgtcccacctgatccccgtccacgcagc

SEQ ID NO: 86663 - DNA, 627 bp, Zea Mays
atgccaccatctgctggttcggacaacagatcttctgggaccatatcctcaagagtctgatcaaagttggccagagacaattcttgtagaccaacaagagcagacagggctggagaaggaacaccactgctttcgccactggcaatataacgtcggctgttcttctgagttagagggatttcatcctcctcttcctcaccatcatcaacaacgcggacagtacacccattggggtcagcgtcatccaggtcacacccattggggttaatagcaggcaggctacacccattgggatcagtttcagcaaatgcaggcactagcacttcttcagcatcaggaaaggaaggaccagcatcctgatccaaactagacactcgacgaagatgtctcttcttctgtttcttcccgtcagcaggagaagcaggatgattggctcggcgagaacgcttcggacgaacgttgttagacttctgaatatctaaagcttcgctagcctctaggatgggcgctaccgccagtgtttcagtagggactgcatcaaaagaatcttcagctaacatatccagcatggcacttatttctgcatcactcggatttaaaggcacctcaaaatgaacctgcctctca

SEQ ID NO: 86664 - DNA, 521 bp, Zea Mays
gcttcggcttcggtcagctttgtctcggtttcaacctgtgttttcgaagccttggcaatttttcctggagtagagcttgaagtttttatcgtctccagcacatctaatacactagccatcctttttctcttggggttgctgctagatctttttgcgtcttcggcgcctccactcttgtcgaagggcttagaacttctgatgttttcgtctcttcggttctcggttcttcaattttgtcagtcttcggcattgcagtcggctcttcaatcctctgcgtaagagcaggtcctttggcttcaatagcggaagaggtctcaccgacaaattcaggcactatggctggttcaatgtagcgcggtcggtgagtaagaaccttcacctttttcctcttcggcgcgggctcgcttgaagcggctgaagcagcagccttctcagaagttgcaccctttcttttttgcccccacggcgggtagtgataatcagggtacacgaacccaatagcatcaaaaactctatttagc

SEQ ID NO: 86665 - DNA, 577 bp, Zea Mays
ccattcctctttaaaaggataacaccctacgaagctagcaggaatgggcctatgggccccggtaaggggaatggatcgacaaaagaaacccccgggcctcataaacatggttgcaagaggtcgaaagatagcatagacaaagaaacaacttttcttatattctctcacagagaaacaacatcgagacacaatacatcatagggtactgggtgttgcggacgacgtcatctatgaataacttgtctacaacatgactagttgtctcgtcgtggccctctaggatgtcctccatcccatcatcacatagagacgaaggagggtcgatgatgtcccagaggccatagccagatcggagctcctcgacgatatcctggacatgagacctgatattatcaaacattccactaaggagaaacagtgagctccgacgaactccgtgacttgccccgcacgataatgcatcttctccttctcggcttctataactaaagagtgaaaagggcaagatgagagttaatgaccaattagaaatgaggaggcgacagaacaacgaccctactagctacacgaccgccag

SEQ ID NO: 86666 - DNA, 514 bp, Zea Mays
ctgttcggtgctttagcaattgagcttaatattatgcatgggcaacaacttgggtggtccgtttaatcttgataggatttcgcgcactcgtcaataatgcagtagacgctttaccaaactgggttcccctttgttcggcccgtcatatatgcctttccatgattcttgaaactagtatcactgcttgttttccttcccgccccttcccatcagctgctcggtgttctctgtatcgtgacaccgttccctttattgcaacttggactgagatttgtgaaaataactgcgcatatagtttagctacaaccagtgaaattaacaaagatttatcaatcgcaagtgcctgttatattcatatgatcttctcgttgatctttggacttctgcaccattatatcctagtcaacggtgcaacatgcatcaactagcaactttggaaatatcaaattcatattttgatgctccactttatcaaagtagttctggtagttttgtcatttatttcctatttcgg

SEQ ID NO: 86667 - DNA, 842 bp, Zea Mays
cggacggaaaaacccctctcccgtttccgtatccgcattttatcatcgaaaacgggatcgggtccggaatagtcgggaacgaaaacgggagcgagataaacggaattgcgaaaacgaatggaaatggaaatactaacgaaaactcataatttaatacaaatagaaatgttattgatgtttgactagtgattgattggcagaacaataacataaaacaaatagatatagagaggcaacattatattgttgtttggttgctaaatatgtacatttagctacatccgatgttgtttaagactttagatcacttgtcatttgaaaagagctggtggttacaacggccaattgtgctataatttgtcacctaaatacacgaggatttagtttatatactaatgcatattaggctcgtcccatatttgtcaaatacagaataaatatgggttcaatccggaaaaaacgggatcccgcaaaaacggacggaataagccctctcccgtttctgtcctgtttccatattctttccgtaaatacggaaacagtcgggtcaaatgtagaaaacgatacggatcgggacgggattttttcgtccgttttcaaccctaagcagtacgcctcctttagttgaactgctaaggcactatcgacaataaacatcatgtcatcccagcgttaaaattctctgcagcaagaaacatcaggtcatcctagcatctacaagagatgactttaatcaaccctgacgatgagcaaaaataacgaactaaatgcaagaaaatcacaggaaacaattctagcagacaaaatcaatttctgttcagactcttgaacgtaaaggcctc

SEQ ID NO: 86668 - DNA, 497 bp, Zea Mays
cgggaggggaagagacagggaaaatctagaagggaatcgttacaggcgtggtgctttgatttatatcccagggaagaagaaacgtacgccgaaagaggaattatggggaggagcaattgtagccattaatggagatagaagaaactgtcgcggaggaggggaaacggtctgcgacgcgagcgcactggggaagaaaggggagaggacgtgtcgtggacggaggttggcgagctccactttagggaagatgaggaggcgggcatagggagccgaaaaaccgatcggcagcgaggtcgcgtcctagtggccggtcatttttcctcagagctagaaacgattggaagcagacttggctaggtacgtgagggactgctggtgggccccacacacaagtaactaggaagtagaataaagaatggaagagagacgtgtgactaagtttgggccatacggccaattagaaattttgtttatttttttctctttttgttcaaaat

SEQ ID NO: 86669 - DNA, 1051 bp, Zea Mays
tttggttcacaaatatgtgaatttgcaagctaaaccctgagttttggacttacttgcaaaagagccacatttgaactcttttgactaagtctgaatttcagtgtagtgtgctcatctttgtgaccttgtaacttctaaacaaaagggattctgccctaggtaaccacatcaatattgtagatctatggaaggagaataactttgctatagaactcatgccttggtaccatgaagaattctgagataaatgagcctgaagttggactgtcagactgcttgaaatctgaaattcagattaacagtgggatggcatggagttagggctcggatttaaacatgatccagtgcaagtttgagcatgattcccataacaaatttgtggctggtatgtagcactacaactttgatgcagagactcgggggtgtttccatagaaaattgggaggaatctggccctaaatcttggctgtcagacacactgaataagcatcgccatggtacagtgcctggacagatcagatcaaccgctcccctcgccgccgatgacttcgcgccgggatcgtcgccgccgttaagattcgcactcactggtaaccggatagcactcggggtcgcgtaaatatcctcgtcgtggatagactccggccaccgtaccatgttcaccgcagcggaatccgataacttcaccggtgaccaccgcctctcggccttgtgccgcgtggctctgcctttccaccgcgtcgccgtgactccctatagctgtcccatcgtcgccggggaagttgccacgacggtggacacgaattcactgcgccaaggttcttcttcatctccggccgccagcacggctcgaccgaattgatcaccaccgctcgctctccctataaattgagccctccaccagctccacaaggtcatcagctacccagcctccgagaatcgttagcaatcgttcgccagagctcgcgaattttgaattcgccccaaattagttctccgccaccccgaaacccacctcaccgcggccagccccattccggtcagttcatcc

SEQ ID NO: 86670 - DNA, 1637 bp, Zea Mays
ggacgatttgaacaattatagatttcacgataaggctaaaggtcttgttgtagtccactttaggagctagctgaagccctaacgaacccaatgggccttatatggatctagagtgctatcagacttaagcttgtgctgaaatatccacttactagtgaccacattgttgctagaggacacaacactaggtcccatgtgtggttggtcagcaaggcctcataatgctcctccatagcactacgctagtgggggttagcgagcgcattactaacgaaggatgatacatgagagggaggtggagcggtggggccatgagcaccagctagtctataggtcggagaacaccagtcaaccgttgcttgaccattgggtgggcgtggtatgggtcgtggtggatggcgtctagatggtgcaccaacggcttggcatgggaataggttggggcactaggtggctcatcggtagagtgaactagtggacagggacacacatgttgctagtagacattggcaggatcgatgaaatgagccatatgtgtcgagaagtatagggtcgtacgtggcatgatcagaggtgatagggtcatacgtggtacggtcgaaggtgacaggacctcacggggcactgttggactaagagaaagttctgtatgatgttgggagcaacaagtatggtgttgagctacaaggggccaagaaggactaggtcacgtacctaatgaggtgacaggcagagtcgacacattgctgacaatgatggaagaaggaaagatggggttgtagggatggggtaaagagacagtaccttggtcaggagtggtgtggtatgaggcgttgtagctagcaacccaatcggtggaagtagcaggagtgggctacaatgacatgaggtgagaggagagatccaacggagacaccctcccacagagcctctaggatgggtgttagggtcgccactatcgagcaggctcacatcaagtatgggcggtggtgacggcatggcctctatcatcatggagacattatcaacacttcggaacacaatggtcctagagagtggtgggcctcgggagggtggatgaaggctagagggtggtggagctcaacacagtagcagagaactagattcatgtcctgatcaaaggccatgaacgaacgtgccccgaaggaattatgcatcttgaagggatacacgcacatagtacggaggcacgtggaccacagtggagcgaaagataagcgtcgagagagcaggtgcagaaagggatagctcgacaccctcagggcgcccatgcccctatgttgctggaggaaggggacaactaggagcggtgtattgggccacgatagagaagggggagagcgaggaggactatgcggccactgatggatagcacgacagggcagtccacgtgcaaggcgaggaacgcctggcacagaggagtgtggtgcgtgggcacggctgtagagatcgttgctagcgagcgtactccatgaagggcaggcaggacacacactgaatggagaggggatgtcggtagtgtgggctccaacgcgagggaaacagatgacagggctagcaccaacacattgagaaactggaggaaggggtggtagggatgaaaatgggtattcaaa

SEQ ID NO: 86671 - DNA, 423 bp, Zea Mays
agcattagctctgtgattattatccgtaaaagattcattttcatgtggttcctttgaattgagcagaattcacaagaatgagtaggtaagattcaccatacatgccatattgacagactaagatcacacgtaagtctgaagggaggtggtttagttaagatcacacgcaagttctaactatatataatgagttggcttcgaaatctcaacagaaatcatgtttaagtgatgggctaagcggtcaccggtcggtgctactgaagcatacttttagaaatgaataccttagaaggggatgatatatttctagtcttctgggtagcaatagcttcatagtgggtcatgagcccatgacaatatctgctaatcaagagcttctgtgaaccaccacctaacttcataaacgatgacattttttcctgg

SEQ ID NO: 86672 - DNA, 650 bp, Zea Mays
tagccgaaaccaaagatgatgcggccgaagagccaaaatcggaaaaaatagtgataatgccagaaattctgagcccaacagcaaaggcagaattgccgaaaatgcaaaagactcctactgcaactcccaagagaaggaggatggccagcgtactagacgctgtcatggagaccacaaaggccttgtgccctgctcctactaagaaagctaccgaagctatcaaagtccaggccgaagccgaagctgggccttcagtgcccattgagacgaaggttgctgcgcctgaggatgaaactgagcaatagacctcgagatatgggcacggcggtggggcaaggtatgatagaaaaagcaaaatcccctgcccccgaagctccggccgaagatgttgattacattattcgacatgcttcggggaaagaactatccaaagaagaaatcttggaagccagacactacgcccagaaattgaaatatccgaagggggctttagtcttcaatggcactggcgaagatgacttcctatactgtctcccggacaacaaagaaatatccgtttgccgggagatagcaaaaagtatgggatttccgaagcttgaggaaggcctttcggccatgtcgaaggatgatcttgctgatagccttgcata

SEQ ID NO: 86673 - DNA, 1334 bp, Zea Mays
aaaaactatgaagttaaagcatcttgggtcatttggttcacaaatatgtgggtttgcaacttgaaccctaggttttgggcctatttgcataaacaccacttttgtaaccatatggctaagtctgattttcagaaattaggttcaactttgggaccttgtaactttcaaacaaaagggatttttctttgggtcaccacatcaatattgtagatctatcataggggaataacttttcttaagagagtaaatatggttgttatgcaaagttaagagaaaaataggagccaatttgggctgtcagtcggtttgctgactgaaatatggtcactagtggtattggtcgaacttgggatcagatttgagctaaatccagaaggaattcgactaggattgctataacaaagataaagaggagctataggactacaactttgctgcagagcctcggataggttgccatggaaatttgagagaaaattgagcccaaacattgactgttaggtgcattgatggcagctcgcgatggtacagtagaccaaaggggatcagatcgccagcacggcaatctcaccgccggcgacctctctgcgcgtagattcatgctgccgccgtcctgatccgtgctcaccagtgcttggactatgcttggggtcacgaaaatattgccgtcgttgataagtgcggtcactaaacaactccgaccaccgtaccaagttgccacgaccactacggataacttcgctggtgaccgccgtcttccggccttgtgccacgtgcctgagtacctccaccgcatcgccgtgaaccccttgtgactctccgtggctcatcggagtgactgccacggtagatgccatagattcacgcgcgccagtgaactcttactcctccgactgccgcgcgtcaccgctaaaattcccggccaccgccctcctgtagtataaattgaccccgccgcgacctccgtaaggtagttaagcatccagccaccaagaattagcctcgatcgttcactagggtgtgcaaattttgaacttcccccaaatccgcacaagaacaccgtgaaaagaactcgccacggccagctcaactcaggtcagtccaagtccctctgttgcttgttctagcgtccctaagccctcctcaagctcctcaacccctttaattgaactagaccgccatggatcatcgagaacgtgctattcctttggtcagtcgcactgtcgccgtggccagagctaaccagttgaccattcttgaaatttaattgggggaaacattcatacggacttggatttggtttcggccgaagttaggaaccagtccttgctcca

SEQ ID NO: 86674 - DNA, 479 bp, Zea Mays
tacgcaaacggtagcccacgcgatgtaacacccctggtgttaagcatactcatacatctcacatgcatcatgaaagcattatcatgagcatcatcaatcattcactacctacatcagaatcttaaactgtcactacttgttataaaatgaactcatgtttgaaccaataggatgcatatgttttatgacaataggttatcattgagtgtttgtgtgtataagttaactcagttagagaacttaggttggttatggtcactcttcaactcttgatttcatgtggtgataatttcttaaactatatgtaattgtgtggttagtgaatgttgtgctcaatgagtgaaatgttgctaagaaccaaaacctaaggagtaagtacttgactcctaaagctgctaataaaaaactcaaatttcaaaagaaatgaagctcaaccaaaatgaaggtttgggaaatgggctaaaagaaataggaaaacc

SEQ ID NO: 86675 - DNA, 401 bp, Zea Mays
ctggtgctgtggtcagatgctgccttaatgcatggaaggcatctttgcacttctaactccaaacaaatttgacttctttcttcagcaactcagttataggcttcgcaattcgagagaagtccggaataaatcttcggtaataaccagctaatcccagaaaactccgaatctgacgaacagttgttggtggcttccagttcatcacctcttgcactttatcaggatcaacagctattccagcctgagagatagtgtgacccaagaattttatttcctttagccaaaaatcacacttggataacttggcataaaggtggtgctctcgcagacattgaagcactacatgcaaatgtccgacatgttcttcttcgttctttgagtacaccaaaatgtcatcgatg

SEQ ID NO: 86676 - DNA, 914 bp, Zea Mays
gaattttctacaaattaaacaagttctagcatttatttatacattaaaaatcaatttctgttattaatttcctatttttattactctctagactaggcatcaaatactgagaagtacaggggccctggtgtaaagtggaccaagacccaggcgagctctgcggtggactgcgggtttatattaaaattgtccaaggactcttacgcaaagtagtctaaacgaagcggtaccggtatttctcggtcgcccgatccacagtgaacggcctagattaaaacaacacactcagcgaaccggtacgcacttcagaccgtgggatcgcgatccgatggacgtgggacaaccacgccccgatctaatctacaacactcattaccgaaccaacgccagatttaatgttgcgaagaggtacgccactttctaatcttgaccgtccatctagatcaaacggccaggagccgtcccctactctacacgacgcgaccgacggcagcactgttcctcgcgacaaggatctcaccggcgatcaccgccccgactattccgagcacctcacatctattactctagcgcaaaacaaagaggatgattgtacgaatacggaggtcgggtgttcaccaacgatttagggcatgcatgttcccggcaacggcgaggtgcggcaccacggcgagaattggctccagtgacaaattgccgccgttgatcagcagctcggctccccggaacgctcccgtgtagacccccgatggttcagataactccacaaccccgctcgacagcttctacggcggtggccaggaaacgcaacggtggcggctttccctccactctggtggcggcggcaaactgttggcggaacgggagttgcacgtagggtttgggatggagccgaggacggcggctttgccccg

SEQ ID NO: 86677 - DNA, 565 bp, Zea Mays
gttggatcaagcaattccactaaagggcaagcacgagtcggtcaccaaatatggcccaagcgtgcctgtggattgaacgaaagggcacaacccgtggatcgtgtgaagggctacatatctcaatctcttaggattcggtctttgtttccgtgttcgcagggaggcagcggcgcgatgttcgcaaggaggcgacacgacacctataggcaggcggtgcggccacatggaagttgcatggtggctagtggcgatcacatcaacatgaattagatgtcatgtctaccttctttgtgcgtaattgtatccccatcttcttgacccttttttattacataataagatttctgtgtattcttgatttgcatatgagaaatctctatgatatcctcctccttatcgttctcagacatcttcgtgttgtccttctcattccacctgcgccacacccacagcttggactttatgaaggactagcctctctgccacaccacatgcctccgcccgcagctccgtctccgcaccacatgccttcacaagcgtcgcatgatatggaagaccatgatcc

SEQ ID NO: 86678 - DNA, 1876 bp, Zea Mays
aacagtgcatctgtcctgtgcgcttaacctactggtcgtgaagccccagacctacatcatcaaacgtggcaaaaccatcacaatttgtcaaattacagtttaacactttccctaaaaaacaaattgtgttgcaattgttttggattctggtgcaaaacactcaatcatttgtcacatcatcatcacatcacatttgaccgaagagactcctggctgcagtggaagactggttaggtttggcttgcgacttcattccctcctcaacaacatccctattgtttgatagtggaaaaaagaaaggattaatgagtagagcatcaaagtatggcaaagcatggccctgtccactctaatggaagccatgttctttggacaggaaatgatactacatgaaggcgctgagatattcttggttctctggtttaagattagccccttcataaaaggcaattgcagcttcaaaaaacctctgccacaattgcacatatcaccatctaaagataaacaagtgggggatgaattgctaatcaaatcagagctccaaaacccacaaacctgtagctcgtgcaatgccgcaccttccctgtagcaagctatccccgaatctggtctcaatgttcgagattgctttgcatcctccaaggcagtttcagccatcccaagcaacaaccagcaaaggctcttgtttgaccagagtgtggcattgctaggatccaagtcaatggcctgaaatgcatcgttatcccaatcatttagataatctgttaaacttttgatgctgagcgaaagaactttacataggattgtgctgaaccctctgaagtcaggtaaacttataactctcattattttgttttgctctacacagtagctatctatgtggaaaaaatgtttgattcatagttacctgtgtgtaagcatccaccgctccaatgtaattttcatttttataggcatcataacctctcaaattagcttccatcgaatccccttttgcgctagatgacacctgacaatatattatcagagttcattagttaaaaacaacagttacattgagtcttccattatttaagatgatgtaccatggttatctgccatataaaatctataacctaagatagtagaatccttgactcatcgaatgtatatatgatcatgacataccccagcagattgcggtccggctaaactggctgaattcagagatgtagcttcttttacttgtgactgcaaaataaaatctataacctaagatagtagaatccttgactcatcgaatgtatatatgatcatgacataccccagcagattgcggtccggctaaactggctgaattcagagatgtagcttcttttacttgtgactgcaaaatttgtttgatggttagaacatgcatagaatttctaatggggcatattgtttatttgatggttaggacaggcggagaatttccaaagtaaaatgttcggtgaacaggatgtagaaaaagttaaaaaggtgatcggaatggcacctctcccacagcagctttagacaacatgtattttgtgattccatcaaaactccaatttgacacacttagaaatgggatagttaatgctaaaagaagttccagaaattcacggttatttctcaaagcagcaacctgtattggctttagtccatcctgtaggaagaaaataaaatggccatcacatgtttgtataataacgagtcgcatactgctaaacgacatgcgattgtacagcataaagctgcatagaagctcaacagatttatagcgcactagattacaatgaccatacactatttaatctgataacagatgaaattatagcacagttacaccagcaagcaatcaatgtgtggtgtt

SEQ ID NO: 86679 - DNA, 374 bp, Zea Mays
attacactctacccaccttaaaaagaattcatcctcgaattcgaccactccaagcaaaacccccaaggtaccccatatagcaccaccattcaaaacatgggtccattattggtcttaattaacacaagaacttctaccttggactaattgtctaaggaaactacacaacctgacatcaagcatgaaacaacatgcaatgaagctcaaagcaagtcatagatgcaatcaacactacaattttcacaccatcgaatttggatgcagctatacatcaacatcaacgtcttaaaacaacactattttatgaaggggtaatatgcactaagaacaacccttaccaacttcaacaattcattttaattaaatggtgaaac

SEQ ID NO: 86680 - DNA, 325 bp, Zea Mays
agctgcaaaaagggcgcgcggcgaatgctataactgcacagagaagtacactgctgaccataaatgtgcagccaaaggggtcttctttctggagttagccgatgaagatgaagaggaggtagctgctgaattgggcatctccctccacgcattgacaggcattgaggtgggacataccatgtagctccgaatcaatatccatggcacctccctgattgcgctggtggattctgggtcaacccacaccttcatccaggagaatgtggcggctaaactttggctgcaggtggactgcagacctggactatcagtgaaggtagctaat

SEQ ID NO: 86681 - DNA, 831 bp, Zea Mays
ttttggttggccacttcatcagttggatgtgaagaatgcatttcttcatggtgacctacaggaagaggtctatatggaaattccacctgggtttgcaaatgaacagactgttggaaaagtgtgcagactttaagaaatcactctatggcctgaagcaatcaccacgtgcatggtttgatagattcaggcgagcagtttgtgatatgggctactatcaatgtaatggagatcacacggtcttctacaaatatcaaggctcttgtatcactatcctggctgtctatgttgatgacatagggatcaccagagatgatgtggaggagatcaagaaactgaagaaaaaactaagtggggcctttaaggtaaaggatcttggaccacttcattactttcttgggattgagattgctagatcgtctaaaggaatcattctctctcaaaggaagtatgttcttgatctattgacagagacaggaatgcttgggtgttgtccatgtggctcacccattgataaaaatttccaaacttgtgccgagtcaggtgaccttgtgaatcaagaaagatatcagaggatagtggttcggttgatatacctttgtcatacgagaccggacattgcttatgcagtgagtgtggtgagtaggtatatgcatgatcctagaacaagacatatggaggtggtctataaaattctgagatacctgaagggaacccctggcaaggggttgtggtttagagcgaatcaacacctgaatctggagggttactgtgatgctgattgggcaagcagtagagatgatcggagatccacatctggatactgtatgtttg

SEQ ID NO: 86682 - DNA, 401 bp, Zea Mays
gctgattgagggcattttctaggagggtgacgttgttatctcgcatggtgagggatagcttctcctccttgatctctttctcaaagatggcaaccatgttggcgttgtcctttacatcctggtgccatttgcgcaaagtctcaatggtctcctcctgctggacgcactggtcttcaagctccttgcctctagtttcaagcacggactgcagccctgccaggttggcctccttttgggagacggcctcctcacactgattcaacccctcctcgcactggtcgagggtggcgcgctggtcaacatgggcatcggtggcctaacgacactctgcctccttttaggccactgccttctccttctgggccaccgccacctcatggtcaaataccttccaacggtcc

SEQ ID NO: 86683 - DNA, 309 bp, Zea Mays
gattaaggtaaatttcgaaggtttcaggacttcgaccagcaatttatctagagggaaccgaagccctgccttcataaagcttctgtaaactaccacttcatcagcttcgggcagagggacattattttcccctccagccctcacaattgagatatcacgaaagtacctccccctcatcgcatcaatctgcccttgcttaatagttgacttcccgaagacaacatggcttggtctccagggccaatcttcggcatcttcattcccactttctacatcgaaactttcactatcgctggagttcacagatat

SEQ ID NO: 86684 - DNA, 605 bp, Zea Mays
tagaacatcctagcctgcccagttcagaaatgtcgggatcaacttcttgcagttattgtttattttaatatttttttcttcaaatcaacagctttgaatcatctgctggagttcagaagtccgtagcagattacttcagagaggcataccatctggaaatgcactatgattttctcccatgcctccaagttggcagtgatcagaggccgaattacctccctatggaggtttgctaactatgaacttggactaaccttagcctatgcttcaggactcttttaccttctatagtctgctcttgtttcttaatttccatttggatttcaggtttgcaagatagtagctgaacagcaataccggaagaagttggaaggccaacaggtctctaaactaatggactccacctgccagcgcccatctctccgcgaggacaacatttgtcaggttcttgctatttctgtatttttttgtgttttatctgattaaactgttggaaaacaaacttaaagctctctaaattccttttgcttagattgttgagcaaaatgactacaataaaactgagcgtgcaagtgaatttggcatggaggttgattatcgtccta

SEQ ID NO: 86685 - DNA, 1206 bp, Zea Mays
cacagcagcagttgcgttggctgtgcagatggagagtggcggtgccacacctgacagggtgacattggtgaccgccgttaccgcttgctcaagagcaggcgatctgaacttgggaaggaggattcattcatacatggatggagtttttggattcagtctcccagtcgcaaatgcgcttctggacatgtatacgaagaatggttacttggaagaggcggtgaagatgttcgagcaaatgccagagaggaacatcatatcttggactatactagtgtcgggatatggcattgctggtcagttggacaaggcaagagtgtttttctaccaatgcacacagaaggatctaatcctgtggacttcaatgatcaacgcatgtgtacaacatggaagctttgaggaggcattgatattgttccgagacatgcaattacaacgtgtggagcctgacaagttcactgttgtcactctcctcacatgctgtgccaacattggtgctcttgatcaaggtgaatggatccatcagtatgctgaaagcaggaatatgaagattgatgcagttcttggcacagcattgattgagatgtactcaaagtgtgggcatgttgacaagtcactgcaaatctttgggcgaatgcaaggcaaagatgctgcagcctggactgccatcatctgtggtctggccacaaatggtcaggccagcaaggctcttgaactgtttgaagagatgcagagaagcaaaacaaagcctgatggtatcacgttcattggagtattgagtgcttgttgccatggtggcttggtcgatgaaggacagaggtatttccaagccatgaaggaggtctatcatatagagccgagaatcgaacattatagttgccttgtcaatcttctaggacatgctggtctactgtatgaagctgagaagttgatcactgacatgcctgttaacaatgacactatgcctctgtttggtgcactcctcactgcttgcaaagctaatggcaatgttgagatgagcgaatggttgacaaaaagaattgccaaggaagattgttccccaaatcctgacgttaatgtactcatgtctaatgtgtatgcaacagcaagtcgatgggaagaagcaataagagtgagaagtaagatgacaaatcctgcggtcaagaagactgcaggttgcagcatgattgaggtaaaagaatactgttg

SEQ ID NO: 86686 - DNA, 356 bp, Zea Mays
ggaatttcatttttttttcgggtaaagcataggtagggctaagagagattagttagttatttaatggagcagcagtaggattaaacaaactcccgttgttttagctatgtaatataatcctttttctccatcacacactagtagtggtaggtcagtaggtgtgaaaaggggagatgctctgatgaatcgttcaacggggacaagtttctagcacaaaattcaggttgcgtggggggaaaagatcatgtctttgtggttgtactggtagcttccggtacagttgtttgtttgtgcattgccctgtttgcgctgtacttttgattccgtgacgaatttgtggtacctgtgatatacgc

SEQ ID NO: 86687 - DNA, 375 bp, Zea Mays
tgttcaatttggataagtaagtcacacatttgtgtacaccttaggtcttctatctttgatgtctgaggaagtcacatggaacatggtggctatgaccacctttaaagagacatgggacattttgaagaacatcctgatctcttttgccacacccatacttgtgtagtgcagatatgggtcgacctcgccgtcactgcttacttcagtaagatcaaaggttatgcctatgaccttgctattattgacacttctcctcaagatgatggggtgatcacctaccttttggctagtcttagtccatattatgacttgtttgccacctcaatgatcaccaaaagtgaggcacccactctcgatgatgtttatgctcatcta

SEQ ID NO: 86688 - DNA, 406 bp, Zea Mays
cgaagatttatagttaaagggaagttgtcccctcgctttattggacccttcttgatcctaaagcgagtgggagaggttgcctatcaactggaattacccgatcatcttgcggatgtacatgatgtctttcatgtgtctcaattgaagaagtgactcagggtacccgaagagcagctaccgatggaggatcttagtgttcaagattatctgaattatatggaatatcctatcaagattcttgataccttgactcgtgtcacaaggagtaaagtgataaagatgtgcaaagtgcaatggaatcaccatggagaagatgaggctacttgggaaagagaagaagagctacgagtagattttccccacctcttccctagtccatcctaatctcgaggatgagattctttgt

SEQ ID NO: 86689 - DNA, 323 bp, Zea Mays
aggagatcaaatttttgggtcatacaatttctcaggatgggatatcagttgatcctgagaaggtgcaagaggtaatggattggaaacccccgactacagtgaagcaaattcggagttttctaggattggcagggtattatcgacgatttattccggatttctccagaattgccaagccaatgactgaactgttaaagaagggagtcaaatttgagtggagccaaaagtgtgaagatgccgttcataccttgaggcagcatttgaccacagccccagtactagcccaacctgacaacaccaaaccatttgaagtttattgcgat

SEQ ID NO: 86690 - DNA, 510 bp, Zea Mays
gttatatgcctgctgttggttacctgttgagattactataaaaaactaaaacagagcaatacagttaaattagtgaagccttctcccatgtcctcctatgaagaggaaaatgtatgagaggagaaggttttgttggacatgtaagatatatgatgcgaagtatatgaagaaacaagctatgaaacagattcatcgccctttatcacttttctctcagttacagataattacagtgataccttcgagttataagagcagtattcgaagatggatgtacccttacagcttcgggtgttgagcgctccggacgcgtgtggtgtgaatgtgtgggccataaaaaggcgattcccatgcatgggtattgacgtattgttcacctatttataggtacactgtggcgtaaaacttcgtatggaattacgtttgtgcccctaaactctacgcatgatctacatgattcaatgggggcattattgtatttgcctccgcaaaacgtgttgtgcaagtctc

SEQ ID NO: 86691 - DNA, 494 bp, Zea Mays
tttgagtaccagacagtgcaggcattgtaaccttggggactacagactattcgatcagcggttttataacgttcaaacagtgctcagaacagattgtggaaaatatggtttatcataagacgtaatgcctccgaatggtgtgcagcccgtgaataaactatgcaggtatctacatccagcggttgcttctacgatctgtgtcctatacaataatccgtcgtccaactttcagacaaattggttcttgagagtgcgtttgccggagaccaaaacgaggctagccacgtcataccagtcaatttaaggccttggagtggaggataccagcaagttgcttttttaccgaatctaccagctctggtacatggtactagttggcttggcttctcaagcgcaatcaggctggagtacgtcagaagtttttggatggatgactaccggaagatttttgctagggtttggtggggacatcgatggcacacctgggatattct

SEQ ID NO: 86692 - DNA, 1388 bp, Zea Mays
attcagtgtagttcggctacataaaccccaggtatgtgtccatttaggaccgacctttaccatttagtttacagtgtataccaaacttgtcaaaggactatcccgagtcaattcagtgactataagtatttacaattccgagagatgtatgcgacacaagcatataggttctagatagaacgagtaaagtggttcgacgggaacacactatggttttcacaccaacatagtgaaaattttctcagaataacctctcggtatactcgcaacttcgtgttgctggcgattacatgtccttttatctcatagtttgcttcatgtcatttagcgacaaagagagtaatgtgctaacatctggttgagcaatatatggctgagatttatagtcttaaattatttggtaaggccttttgcttactaatagaatcccaatttgtgatgtcttctatgccaaaaaggctttcatgcattatattatatatcttcgggttacttcgggtaaaactttatgcatgaggagagatcaaagaattaacttatctgtgtttcattgtatttcaatttaattttcctagattattcaagcactatagagcttgatatagtcattatggcccattggcgatatatataaatatatgatgccacacaacactatcaaataaaatatataggcaaacaaaattgtttacgaaagttgcgtataatgtgactttaggggctcgaacaacccaccacaatctacgcgagtataagctctagcgtatctggcgtcaatgcgtgtgcggccatcagggcaacgataacacatcaaaccttcgtaaccagcgcaacagacgcagttgtggcttggtagttgggtacacgataagtacgcgcaacaggcacaacaggcgcaacaagcgcagctgtgactcaatagctgcgacacacatgcaatgccttcagggcgcacgaaaaatgtgtgactcggcgatggcggtccgactcaacgggagcgatccgattaagcgagagagcgacatagcaatcacatgacgcagccaagttcaaacgacacaaatattgcgtcgtgttgccagggcgcagtcaatattcagctaatgtcataactcagccgattaccaacgcagcctgatcggcgtgtctgagtacccactatacaatttaatcgttcaccgtgagtctgaaagctcaacgcaacacaaatatttagaacgatataaaaatacacaacataaccttcaaatgcattttaatatttttctgctaattatctactacgggaaataaaacagaaaaataataccataattaatgcataagcataagcagatcatgtgcatgaaaatattttcacatatttaaacatgcatttttctactaat

SEQ ID NO: 86693 - DNA, 421 bp, Zea Mays
atcatctgaggagccgatgcccatccaatgttcagatgtcgggtcgtcgtcgatgtcgaaggactccacatctgatgattctctgtcggacatccaagaccagttagtgctggtgtcagagtccagttccccgtcaacgaggaactagaggtcgtccccctcggtgaggtcgctgtcggattccgatgcaacctcaaagtcctattcatctgcatcctagtgcaaaggggctagtttttcatatgccggtataggatcccactctaggattggttcacggctagaggaatgggagacaaaagaagcagaggaatcactcggtgatgtctcaatgggtggaaggaagcaagagagtttttctgagtttgtaggcgatgaatagtggaaatgtggccgatgagcatttaaatagattaaaatc

SEQ ID NO: 86694 - DNA, 680 bp, Zea Mays
gaaaggccttcctcaagcttcggaaatcccatactttgggctatctcccggcaaacgggtatttctttgttgtccgagagacagtacaggaaatcatcttcgttagtgccattaaacactaaggccccctttggatattttagtttctgggcgtagtgtctagcttctaagatttcttctttggataattttttccctgaagcatgtcaaataatgtaatcaacatcttcgatcagagcttcgagggcaggagatttagctttttctatcatgtcttgcccagctgccatgccggtatctggaatttgttgctcagctttatcctcaggtgtggcagccttcgtctcaatgggcactgaaggcccagcttcggcttcggtctggactttgacagcttcggcaactttcttagtaggagcaggggtcaaggcttttgtggtctccatgacagcgtctagcacgctggccatcctccttctattgggagttgcggcaggagccttttgcactttcggcaattctgcctctactggtgggcttagaatttctagcattttcactgtttttttccaattttggctctttggccgcatcatctttggcttcggctggcccgactgtaggcaccttcggcactacaatagacccttcagcgctccaagcggcgggagcggcttgtt

SEQ ID NO: 86695 - DNA, 331 bp, Zea Mays
atcatcttcggctctggtatatgccccaagtaactcgtcgctagtagcctcaaaacatttcagccaatcgtcatctggctcgtcaaaccggtccctgaatctgaaggtatatttcaatcgaactaatccaccttcgatggatccggtagcagtctccttcggcatctcccaattatccacaagtggccacactctataggctatgtgctcttggattatgtctcttgtgccaatgaaagcacagacattgctgaaagccttttgacacgcttcggcatcactttcaatcaccaccctcggtcatcgaaggccgaagcgagaccagatgggg

SEQ ID NO: 86696 - DNA, 446 bp, Zea Mays
ccatgcctatttcttcccacttccattcaggtactgggaggggttgcagcaggcctgcaggcttctgatgttcggcttttgttcgctggcaggtgtcacaccgggccacatactgtgctatttccttcttcatccctttccaccaatatctggttttgaggtccaggtacatcttggtggttcctgggtggatggagtaagctgagttgtgggcttcattgagcaggactttctgtgcctctcccattggtacacacagacggttcttgaaccaaaggactccttgttgatctgtcctaagatccggaagttgctccttgcgagctctttccataagtctagctgtctctatgtccaggcgttgagccttgcatatgagatcttctagcattggtttgacttccaggctaccgttgtctcccagacatgcatttagctgagctgat

SEQ ID NO: 86697 - DNA, 272 bp, Zea Mays
aaattaagactagcttcgccagcgttggcgcatactccagcgaggacaacttcgtaagaggcgatcctgagggcccaattgaatggatcagcagcgaagccgatgctttcgaggaaagtttaaatggtcgtggagatgtctgcgccttctctggcgcgtggagagttgcagctatcttggagaggttgcgaacatgtaaaatctttggcgcaaaacgaagctgccctatctattgaagatataaaagacccctcggccgaagcaagcttagt

SEQ ID NO: 86698 - DNA, 874 bp, Zea Mays
atctttggtacaataatgttatgttggttacaaaaggtttttacctcatcaaacaattcctcctatccatatcacgtacttcactaatattccgcaatgtggctccaatcaatccaacagcaaggacaatattctgatcttttctttgcaaacattgtgacaaatcaatagtcttgcctaataacctcatcatgatatgcagaataagcacaaattcaaagctctccatttgtttcaacaaaccagaagccatatatttcttatccccactagagccatcatcagccacaatctctagtacctctagaatagcatcccacctgagaacaatacgacataaagttttatgatgtgaaccccatcgagtatcccgagaatcccacatgagtttctcatggtgttgttgagccaattgatcccttctcttacaagaagcattaacactattcacaatcaagttgcacgtttggaagagatcaaatacagaagcgcaacacttagcaactgaaacaaccactaattgcaattggtgtgcaaagcaatgtatgtaaaaagcatatggactctcatctaatattcttctttgcaacccatgaaattcacccctcatgttgatgccccatcataaccttgtcctcgtaatctatccattgacaacccatagaaagaaaacataccatccaaagcaatttttagagcggatgatgtagtgttgggtacctcttgtaacccaagaaatctctcaatcacttcgcctcgttcgttgacatacctaaagaaaagaatagatgcatggttaaaaatttggcattgacaaaaaatagcaaccattcaattatagactaacctcaaaacaatcgccatttgctccttg

SEQ ID NO: 86699 - DNA, 691 bp, Zea Mays
cttctggacgtgctcatccttggcttgcttcagggcttcaacaacaatgacttcacgactttccaaggcagctacacgagcttgagcagtggtgagatccacatggagctgacggttcctcttctctgcatcttctactcgggcaatcatctgatggtggtgccgagccaagaaatcatactgcgtatccaaggtgagcaggtatgcggtgaggtacatgactgaggggtcatcctcaagcagctgctatcctaccaatgcacacatcctggccattcaaactggacagtttctctgaaagggcggaaagaatctgagcggggtgtcggccacttcttcttcatagatctgacacagggccctcaatgccttgcgggcgacgacttggcatgtgtctttgaatctgtgccccgcagcagtgacactccattccacatggtgcggactggatccaatgtatacagtcacgacacacttctctgtgccatgctcgacgaattcacgaccatcatactctggttggctcctgattctgaggcgaactgtgcatgctctcagcaacttggggaaaccatcttcattctggcacaagctggtttggcagcggacctccatctgacttctgagagaaggaaagggggaaagcatttttgaaatgaagggatgagagcaagaatttttttaagaaaat

SEQ ID NO: 86700 - DNA, 370 bp, Zea Mays
caacaattttacccccatattttttagaagtatgaggggacaatcaaccccactgagttcatccaaatctatgccattgccatcctcttcaccggggacgatgaagtggtgatggtaatatactttaatgtggctttgattggctcatcctggtcatggcttatgaatctacatgagtcctctatctggtcctgggaagagctctaacagccatttgtgtccaatttggagggcacatacccctagcttggcacaacgtccaccctctatgtcgtttaacagcaacccagtgaattcgtgtgcacttttgcttggtggagaaaaccattcctcgtggattagtagccctcgtcgttgtcgctttttgtca

SEQ ID NO: 86701 - DNA, 668 bp, Zea Mays
agatcagcatacttgggtggtcggtaggtggttttgactggtaagaaatgagcagatttggtgagtttgtctacaatcacccaaattgaatcattgcctctcgaggtactgggaagtcctgtaatgaaatccatgtttatttcttctcatttccactctaaaacaaataaaggttgcaataatcctactggtttcatgtgaatagccttgactatgcaataattgtcgcatcttgaaacatatgcgacaatctctttcttcatttaggtccaccaaattcgtgacttcaaatcatggcacattttgctgcttttcggatggatcgatagtttggagagatgagcttcatctaagaacttgtttttgagctcttggaactttggtatgacaaggcgatcatcgaaccttagtacaccttgctcctcaagtttgaagtggttgttgggttccctattcatcttttccttgatgtgaaatatgcctttatatgcctcttgtccccggatgatttgatcttcaagagaacaacgaacttgaatattgaataatattgttggatatatttggttaaatccattttcaagtaggggttgaagaatatggcaatgtgatttctggctcaaggcatcagctacgacgttggcctttcccaggtgatagtgcacttg

SEQ ID NO: 86702 - DNA, 526 bp, Zea Mays
atgagaaagaaccttataacaaaattgaagctggcatgatggacaacaactttcatgtagttggataaacaagttgtcacgtaaaaatttgagaaaagaactccttaaatcgctccgtcaagcgcgctgaacgaacattgccatggtacagtgaactgaacaagattatgttacgtgtgctcgccatcgacgtccctcctccataattcgagctcgcgccacgattggtgccgctgagacgtggatcaatgaagtggtaaaagatctctggctcggatttggtgatcgagttaccgctctagccacagacaccacgtgccctcaccgtgcttcatccaccaccgccgtgcaagccaccgaacgctttggccatccatggagctagttggaggctcttgtgttggaccgtcgtacagggttcgcggtaagtccgccaagttactggcatgtggacaccgttgaggctaacatggagctcctcgggcaatcaccgccgtcatgattcaacgttcaaatttgaccaccg

SEQ ID NO: 86703 - DNA, 359 bp, Zea Mays
atcagcatactgcaaacaacaacagccattaggaattatatgaggaatgagcccactgataataccttcatctttggccctttgaaccatacaagcaagcccatcaacagcaatattaaaaagcaagggggagaaagggtcaccttgtctgacacctttgtgagtggtaaaatagggacccactctgtcattggtcttgatggccactttaccacccctaacagttctcataacccaatcacaccatttgtcaccaaaaccttttttcatcatcatatgatgaagaaaattccaattcaccttgtcatacgctttctcaaaatctaccttaaaaattatcccactctgcttcctttttt

SEQ ID NO: 86704 - DNA, 479 bp, Zea Mays
cgagacagctccaatttccaaagtcatgagacagtcagatctagttgtgatagagggaactactgacgacggtgtccctgttaccgaagctgaacagaccattgctgaagaagaagatgttgaagaggacgaagaaaattatagtattttgatcccatcaaaaccgagccatctagattttgaaaagtctactgtatctgaagctgacatgccgatgatgatgaagcttggctactttggcgaagctaaaaggaaacttgtttgatttgccagagaagaaaccaccccagcgccgaaggatgatgaagtggtggtcttcaagagttttttcagagcaggactccgacttcctctgaatgagatgataggggaagtcttgaaaaaattcaaaatatatcttcatcaactaacccctaacgccattgttaggcttagtgtcttcatctgggccctccgaagccaagggacgagcccagatg

SEQ ID NO: 86705 - DNA, 540 bp, Zea Mays
aaaaagaagagctaaagaaatatgctgtatcctgtgggtacaaacgaggggctctgctgttcggcggagtcaatgaagggaaactaagatgccttcagaatcgaaccgaggccaaggttgttaggacattctcgaagaatgttggcctgccgaagattgaggcggacctctgcaggtaccagcgacagcatatcgctggtagcttgttctacgctaatttcaaggtaaaaactctcaactttttattgttttttgaattaagatgttttctgacgaaggttgttttgccagagtatactgctaagtaaagtgctgaggatgcaacaagatcttgaagacgagaaaaacgaagctacaatcaaagatctagaaaataaagtcgaaagtcacaaagctgctttggaaaaaaaggacttcgtcattcaagatcttgaaaacaaagttaaagattacgaagctgccttggagaagaaggacttcgtcattcactctatggagggttcgctgactgaagctcaagccaaaattgacagattaaac

SEQ ID NO: 86706 - DNA, 396 bp, Zea Mays
gtcggtggtaaagtgcaagcagatagaatatgctcaaatacaagggtggaaataagggggatagggttccccagtgatctaatagtaatagacaccccaggggtagatgtcatcctagggatgaattggttaatgaaatatgaagcgaatgttagctgtgacaagaggaccgtaacattgaagtccccgttcggagaggaggtagtggctgagctaaggatgcctaaatcagcggagggagattgtcaccagatttcagttgatagtaaggaggccaacccgcttgaggctatcagggttgtgtcggattttccagatgtgtttcccgaagaattaacgggcatgccacccgagagaaaagtcgaatttgccatagagcttatccctggaaccgcc

SEQ ID NO: 86707 - DNA, 727 bp, Zea Mays
ctcatgaagtgcattcactcggctattgggaagcaactgttagatgaaatccatgttgggcagtgcggagtacatgcagcgtccagaactctggtcgggaaggctttcagatcttgtttctattggccaacagcgaagagtgatgctgccgagttagtctagagatgtgaagcttgtcaattcttatcaaagcaacaacatttacccgcgcagcagctgtagaccattcctgtaacatggtcgtttgcatgctgggggctggacatgattggacctttcaagaaagctcagggaggctatactcacgtactggttgccattgacaaattcacaaaatggatagagtacaagctcattgcctctttgacctcagccaaggcagtggaattcatacaagacataatattcaggtttgggataccaaatagcatcattaccgacctaggatccaacttcaccagctctgaattctttgacttttgtgagcagcggagcatcaagattaagtatgcatcagtagcacacccaagagccaatggccaagtagaaagagccaacgggatgatactggaagcactcagaaagaaagtgtttgacaagagtgaaaagcttgcaggaaaatggattagagagctgccatacatggtttggagcctgagaactcaacccagtcgagctttgcatggaaatacctcgttcttcatggtctatgggtcagaggcagtgc

SEQ ID NO: 86708 - DNA, 558 bp, Zea Mays
atctccccctacttctgcttcccataatctggaatcctaaacgactccaatcttcctgcgaatctcctggaaacgcagcctgctcaaagctttggtgaacgtatctgcaagctgttcatcagtcccaacttgcaccaattcaatatcaccacgttccacacattctctggtaaaatgatatttcacatcaatatgtttgcttcgatcatggtgaaccgggttctttgccaacgcaatagcagccgtgttatccatgagaataattgttggcttagcagggatgccaacgacctcctcaagtagcttctgcagccacactgcttgagctgccgcggctgcgctcgccatgtattctgcttcacacgacgatgtggccactgccttttgtttctgagacatccatgacactggactccccccaagaaaaatatagcacctgtagtactgcggcgatcatcaatgtcaccggctaagtcactgtctgaatacccaatcaatttcagactgcctcttcctcgactgtactgtagtccataacctgctgtcgctgacaggtaa

SEQ ID NO: 86709 - DNA, 715 bp, Zea Mays
aaggtgccgaagatcggccctggagaccaagccatgttgtctttgggaaatcaaccatcaagcgagggcaaattgatgcaatgaagggaaggtacttctgtgacatttcaattttgagggctggaggggaaaataatgtccctctacccgaagctgatgaggtggtagtttatagaagcgtcatgaaggcagggcttcggttccctctagttaaattgctagttgaagttttgaagactttcgaaatttaccttcatcagcttacccctgaagctatcatcaagatggggatctttatttgggccatgagaagctagaggttggagccaaatgcaaaatgcttctgcaatatccatgagctatcctatgagacgaaggctaccggcaaggagcaatatcacaacaactttggttgctacagctttgtgcctcgctctgagatgagctacccagttccgacatttcggaagaggtggccggggcctggatgcaggagtggttctacgtgaaaaatgacctctttgaaagggaagataataagggggttattcaacaccctatctggtctatcttcggcatgaggaggccgtccaatgcccttgggaatgacatacaagcttgccatatggccttcaatacagtatgtacttacataggcacatgggacttagtgcaggagcatatcgcttatagagtgtggccactcgcaagtggg

SEQ ID NO: 86710 - DNA, 853 bp, Zea Mays
gcgatgaggtggctatatgctgagcgatgtggtagataagatatgacggtggcaaatatagacaagtcgacagatgacgtagtgattgatatagcccgccaggactggaaccagatactgcttccatcccttctaggtgtctctctaccatatttgtcgtccccatggcgttgatcatacgccaatgaaagagaagtttctccataaagagactatttggggtcccacacttccatctcaatcttggtgtcaaagtgccacatgtcccactgtcatgttatgtcatgtcctaggtgtgaccttgagcaaggagtggccgacatagccttgtgggtacaaggggtagagccctggcaggacctagagtgttgcggctctcctcaagcattaggctcttggccttagttagagcatgctaggagattccctacatcgttgtcgatggaaggttggttacgatgatggaacatggatccattgttcttggctttccttgattggttgtggcaatttgagactggaaactctcaagagtcttagggatccccgagcgtgggattcgatcgacaacatgtcctaaggcatttgactcgtacaccgaggctcctttctgatcaagccatcataggcctcatgggcctttttcgttatccaatgggattgcacgagcacaccatgggttgcccctaagcctctagatgatcaagcgattcagccaggggggtcattgaactatgatggcactaatctggaggtttagataaccccattgttaggtactcaataggagccctcaagacattgtagtctcctaagccattcttgggatggtgcagtggatctaccatttttt

SEQ ID NO: 86711 - DNA, 672 bp, Zea Mays
cataatgattactttcgaagattgtttgatagtgtttatatggggtaggtcacaagattgaaagctgaaggtaaatgcacgagagacatgaggatttagagattcaggctctaaatgtgagataatacacacaggttcaggttctgtgtgtggtggattcttgtgatgtatgttcccatacgatgtcctaatggagtttttctgcccccttttatattccaaggagggacgatagtacatggtaggcaccgagtcgattacttggtgacgtaaccgagtcaataccgagttgtatacgagttgaactctatttgcaagcgtgtcttctttatctgttgaaatcattgtcatatctcttattctgatgatatctttatcatatatgcatttttagaattctcctagttctggaatccctcccggacttgattgttgagttcttgggctcatagccgagcccatgagcccttctgttcaggttctttttcataaagtttgatctgggtacttatgtcatatattattgacagtagctcctcagtctttaggcaaataaaactcttgtgaatcttctggctgcttcccagcagacaccggtgacagtagaggggcgctaggtcaagcgcctatcctaggcggagatgcaggagcgacgccgcctaggcctctgct

SEQ ID NO: 86712 - DNA, 473 bp, Zea Mays
ggcaacttctactctatgggatgaatcgagatatacttcccaaaaatggcggtgtagtatgcagagttggttgtaagttcatccacttcgttcaatttcttgcagtggtggccttgctgctccaagatcccattgaatttgattaagtgttgttaaatgctttatttggtttttaagtgcccttattttggtatttgcaaatcgttgtaggcctcgaatgaatagttgcaaaataactgaagatgaaatcataggagccctttgggcactttatatggttcctacacctggaaataacattaaggatggtggccatgataatgctatgacaggcataggcacaactattgctccaacgtttcatggaaatataatgtctatcatttcactagtttcagagggttcatctttagatggattgaatattagcccattcatatgaagagatggattacaggtggctggtgagggag

SEQ ID NO: 86713 - DNA, 441 bp, Zea Mays
atccaagatacctcactattgccggttccaagggggaatcggctgaagtgctggaagtaatagggcaggagaaaaccgaatcggccgaagcgccaaagcatcctgttgaagccaaagaaaaagcgacagaagagccagagctaggagaatcggcaggtttacgaaaaatcctgagcccgccaccagaaccggagttgccgaaggtgcccagagctcctgcaataactcccaagagaaggaggatggctagcgtgctggatgctgtcttagagttgacaagggcgtcgactcctgcttctgcaaaggagactaccgaggatgctacaactcgtgctgaagccgaagttgggccctcagtgcccattgaaacagagcctgttggaactagacagagtattgaacaaggaccttcggacgtcggtctggtgccagagaaataag

SEQ ID NO: 86714 - DNA, 750 bp, Zea Mays
cgaagtgctgccgcagccgctgattccgccgtggctgaagtacgcgaccaccgtcgtcaggctgacccgaatcagtgtgggagcttcgcctcaccaccctgaggacatccgtagtctcgccacgcaagttttgtggtcggtgtggcgtggattgctcgtcggaggataggttccgccatgcactcgcactcctcagtggccaaccctcctgtgcgcgccatctttggtgagtatttgcactccatgttcgcgtggtcgtccacttcatttaaaaccagtagaatcggcatggggcgctcgggtttgccggattggagttcgccggtgtcgctccgtcgcgttcagggcggcgtcgccgtccgttcggtcggccgtggagtagaacacgtgctggccactcgatcctatctgggcgactttgatttgatcggttcagagtagtgatctggccgtaggatttgagatggacggtagagatgttgacccgcataccccttcgcgttatagaatctgaacccttgatatcaaatcctgcgtctggggtcgcgtaccctttcatgatctaatcctaaccgcagatcgtgatctaatggctcatagttaaccataccccttcggcctggatttttgcataagaaaccttatagttttagaaaatagaacccgtcgtcccgtattgttgctcactttgtctaggacattttaccccgtggcccctgtacttctctgtatttgaggcccagtccagat

SEQ ID NO: 86715 - DNA, 887 bp, Zea Mays
tgataaaaccaggtgaaacggtggaaattacactacatcatgaagatttttacacgcaggaagaattcgtagacggaataccacagaactggtggtgcgaagacaccagggacaaggaagctgttctcagaataaatataacaggcagcagctcaaccgaaaccaagacgcacaccatcaacgtccaacatcgctgcccaccatcatcggcgccaccgccgatgatgaaccaaccggtagccaccgtgcctccgagcaatgtccttgccagcgaggggcactcgaagcgctcctccaagaagagccagtccaagcaccgggaacagcaacaacagcagcaggattacccgcagtttgggagctcggaggtacatgacctgtgccgcatgcggtgcccttgagacctgtacaagctactcctacatcacttcaaaggagtatggatactgaagttgtgtctatgaggtgggaattacgagttttaggtttctcacatcgaatccaagtcccggagggccccgcagaagggagagagaagcctgggagaggagttgctccggctctgtacatatgcttcactcgatcagctgcctctcatgtagcccaagcaaagagtctagagtcctgagatgacagtgctaataacttgttgttttattcttgttccttgttaagggctgttgtctagatagttgaagccaaggatatttgaacaatgcttgatgtaatatgttccatagaattaccttaggtttgttctctcttcacgcagcagttctaatgatcttgtacttcttgactgttgccattcttaataagaaaccgtccagtcatttgataatgcttattattagctgtctttttggctttggtactgtgttaccgag

SEQ ID NO: 86716 - DNA, 640 bp, Zea Mays
aagaaagggtgcaacatcgggaaaggctgctgcttcggctgcttcaagcgagcccacaccgaagaggaaaaagttgaaggtccttactcaccgaccgcgctacattgaactagccatagtgcctgaattttgcggtgagacttcttcagctattgaagccaaaggacctgctcctacgcagaggattgaagagccggctgcaatgccgaagactgacaaaattgaagaaccgagaatcgaagggacaaaaacattagaagttctaagcccttcggcagaagtggaggtgccgaaggcacaaaaaggtctagcagcaacccccaagagaaaaaggatggctagtgtactagatgtgctggagacgataaaagcttcaagctctactccagaaaaaattgccaaggctttgaaaacacagattgaaaccgagacaaagctgaccgaagccgaagctatactgagccaggctgatgccaaagctgggacttcagtgcccgccaaggagaaatcctcggaaactggagaaaaggcaatggaagaagaaggtatcgaacagattttgcctgaaaaagttgtcgctcctgttcccgaagcgtcttccgaagtccctgattatattattcgacacgcttcgggaaaa

SEQ ID NO: 86717 - DNA, 563 bp, Zea Mays
cgggcccgtagctaggggtggtccagatctaccacgcctacatacactcatggctggttgctccctgctcaggtaaagaaccagtgctgctatgtgccttatggcgtgtgaaataagccgccaagaagaacctgacataagcctctgataggaggggggccacctgcttcaaggcaagcagagcgcatgactgttcacaccagtgataggtagcgtgtgccccacattgaatgtaggtggtttgtgcagcccgtaaggcctgcgctacatcagaagcccacacgttaccaaggcaacaccattgaatcaatgaactgcttgggcgcccctcattattacttatactgttcctcgcgcgtcatcgaggcgtgaagggacatgcagaggggacaggacgataacgtatgtattctacctatgatcacctacaccgcaacctacgccctagcctatgcccacacaccaacaagaccgagcagaggacaagacaagatgagggaagacatcgatccactagcattaccctgtgatctctttgtatccctaggcccacttgttagggt

SEQ ID NO: 86718 - DNA, 1157 bp, Zea Mays
cggagtgtttcatcaccctagcgcctgatggatttgaggtcccatggctgcgccggcttgtcagagagggactagaagttggcagtgaaacgccgactgaaatcgctccaatcgttgatgcagtgtcgtggcagatgtcggagccactacagtgcatcttgccctaggacgatgggcaaaaatgtcgtcattatgtcttccgtcgccccggtggcccgagcaacggtcatgtagacgaccaaccagccacctgggtcctgcctgggctcgtacttgtcaacattggagaccttgaagttgggggccacttgatggcccggagacacagagtaagcgcagagactccgcacatgtcttcctgtcagcgttcatgaggtcggtcctagggaggggagtcggtagtgtgtagtctcggtcgtccttggaatgggccactagtcgaggccgcattcgactcagcttgggtggcgtgacttagtgccgggacgtcgtgatcccagtcatactcctctcggcgccttatctcactttcgtgccatcggtcgcgcgaagcattgatggagctctgtgcgtcttgccggctgttgatggcatggcgtaggtcgctcggaggatgagcgatgggtagaaggtgattagctgctcaagtaagcaatcaccgatagccttctgcgtctggagttcgcgggaggctgtcagctatctaggccagtacccctccgacttcactcggcatgttcattgcacgagaaaagtcggggtacaagttccaagcaaagagagggttctctcggtgcagccttgcaccttgctcggtttgctctcgttctcggtcttgagcttgtcgacgatcacggtggcgagagttccgtctttcttggtgtactcgctcgtcgagagtttctcccacttttgagatctcgtccctggatacgggctatgctggatcccgttccctagcctcgtgatgccgccacacattccgacgtctgttcctccatcgtcgtgcctcgcgctggggaggttcttccccttgcattgtaggctcgtcgttggagatgggtgatgactccaatctccccccaataacgaggatgtcagggtagaaaggagctgacacaatggcgcttttctttctgtcctcctttgagggcgaa

SEQ ID NO: 86719 - DNA, 408 bp, Zea Mays
taagacggagattgagaagcaagttgctgcgttattgaagtcaggactgatcacccccagtgtgagcccatttgcgtctccggtccttttagtgcaaaagaaggacggtacgtggcggttctgtgtggattaccgtaagttaaatgatatgactatcaagaatcggtttccaatgccggtggtcgaggagattttggatgagcttgctggcactcagttctttaccagtctggacatgacttcggggtatcatcagattcgcatgggagcctcggaagagtttaagactgcgtttaaaactcaccagggccattaccagtttcgagtcatgcctttcgggcttactaacgctccggctacattacagtgtgcgatgaatttggtgctagctcctttccttcggaaatt

SEQ ID NO: 86720 - DNA, 1655 bp, Zea Mays
caatgccataattatatggcgacatggaattcccatcttttcgaatagtttgcatgagcaacatccaaaactagtttctatgcaccactgcaccactctatccttcaatgaaccatcactgactataacatacttgatagcctcttgttgtgttgttccaatattttagcaatggtctcttgcagctaccacttcttcctgaaaaattctaaacaccttgtgtgtgtacaatatgcttgcttgtttttccacaacccatggggtatgtaaaacaggtgtgccatgtaaactaatattatcagcctttagctcctcatgtcgttggcattctaatgcagtatcaaatctaagccagaactcaacaaaacataatttacggtgaataaagcgattaaagaatgaatttgaactttcagatctcgatgtagttctcaggacccctgcaagaggtatatccataaaaaaagctggaatccatgactcacgaatttgatatctattagccaaccaatcattgctctgaagaccataagcaactataatttcattccaccgcatttcaaattcttctctagtttctgaaccccatacacaattattcaaggcagcccaaaaatccttgtcatgattaagtggaggaccaaccttttcaggtaccttctccatgatgtgccacatgcagaatctatgaattgtatgtggaagaatagttctaattgctgatttcatactagcatcttcatctgttataattaatcttgggtcttttcctcccattgcactcaagaaagtccgaaacaaccactcatatgactcgatcttctcatttgctatgaatgcagctccgaagaaaacactttgcatatgatggttaacaccagtaaaaggtgcaaatatcatattgtactgatttgtactatatgttgcatcaaacgataccaaatcaccaaaatggctataattctttctacttgtagcatcagcccagaatatggagactaattttccatgctcatcaacaactaaatcatagaagaaggcagaatttgcctctttcttcctctccatctgtgccacaaataactgagcatccgcattctttattttctccctaagtcctcgatagtagttctgaagatctcgcttcatgcatccaatattatcaaagccatcacttacttgtaaaagtctatatgcttgtgaggtaccaatacttgctttgtggcacgtgaacaaggtagtcttggctctttcacttactgaccggttcgatcggagaaaaggaattttgtccggtgagactagactatggttatgctcctcaacaaacgaagcaatatagtacttgttgtcctgacttaacttcacatatatacgtgcattgcatccacatcttgtttcaaagtgcttcttttgattgtttgattcagcgcgtctccttgtgaagccttctctcgaacacagaaacctcttatgatcgaccatgtcatttctcttgccttgaccacctatacgaactgaaaacccacatttatgtgcatatgtcttgtaaaattcttccacttcatcaatagtatcgaatgtcattccaacagctggctttaatttgtcctcacaattcggtacaaacgacgacagctgcaataagaaaatca

SEQ ID NO: 86721 - DNA, 521 bp, Zea Mays
acgaagcattttcaaatacttagctagaaatattctttcattcttaccttgctattcttctggaagctcttatcttataaagacaaggtagcagagtgcaatatatagggagttgggatcaacgaaagttgattccataactattaggttattcatgcatcatgttaaaaattatactgataaatttctcctcttatggagatatggcacgtacaaggaaaactgcatgcaaatccactggacctttgggcgtgcctcgccatcagttagcacccaggcatgaagggagcagtagtggctccaacgaccccattggagatctagaagctaaggtggagcaactacgataagagctacgttatcggaacagggcacgggagcaggacagtcagcgtatagctgagttgatagccgaagtcggctgcttgcggtttgagatctccgaatgagactcggccattgattgggctatcaactcgcgctcgatcggttggcatcgtgaagcaaaagctcgggctcat

SEQ ID NO: 86722 - DNA, 393 bp, Zea Mays
gctaattcaaaatcatgggttggataattctgttcatgaggcttgagtgggcgagatgcataggcgatgactttctcattctgcattagcaagcatcccaacccttgtcttgaagcatcacagaagatgacaaagctttggtggatatctggcaatgttggtactggtgcgtttgtgagtttcttctttatgaactggaaactttcttcacactctggggtccacacatatttgttatctttcttgaggagtttggacatgggttttgcaatgctggagaatcctttgataaaacggcggtaatatcccaccattcccaaaaagcttcgaatttcactaacgttggatggctgcttccatttggatactacttctaccttagatggatccact

SEQ ID NO: 86723 - DNA, 566 bp, Zea Mays
ctagcatgtcatcctcggatccttggacgactgtcgtcacttctaccctgcaatattcttctggaatgtcgtttccatggaacttgcatcctgggatcgcaaggcctgtggctactttctttgtacgctgattgttaataccatatcttataactagtgtgcatgccacaggccttgtgatgtcatcaattggatagcggaccttatttcccgttgacgcgatagagcttgggatggtcgaacccttggtggaagccggctgttgagctgctggaattatttgcatctatggagtggtcatctgttgaacagacatcgcactcgccaattgctgcatcaattctagaggaggattcgatagcatttcagacatcaggcctttgaactctttcttggcctcctccttaaaataattcgccatctcttccttgtatcgatcatgtttcttgtacagaccttcgcattgtggttcgaatccttccttccatccttccttagatgagattcctcgtacacgaccaggatgctcagggttattgagaccagccgttagaatgtctctctcc

SEQ ID NO: 86724 - DNA, 483 bp, Zea Mays
aaatcacgtgtgctctctcaagtaaagaattttttgtgactctcattaaccctctggtcgcttcactggtccttcattaaccatttacaaaatcatatggatagaacttacatagctgctaaatattccatgggatagggagaggggtctcgccttccatggcaaggtgtacacatccaggtattggggccccgatgaatctgaagggtctttcccagcttggggagtgcttgttcagtccaacatggaagaggatgcgttagagcaccagatccccaaccagaagagtctcatgctacatatgtcatttgtggtagtaccagagagcctacttgtacctaaaaatttttacgcgggggagcatcgatgttagttaagggtaagacccatattaccttaaggatctctagaggccagctgcttatccattggaggacccataaggtacatatttgtttatattttttgcaaccccgctatggg

SEQ ID NO: 86725 - DNA, 275 bp, Zea Mays
tcctgatagcttttgaaatacagctagggataaaatttcctcaggtgttctatattccaggagttcccaacttctgtgccgtccatctgagtgagacgatatgatcctggccgagtgacttctgctactacgaagggtccttcccataagggtgataacttgtgtcgtccctcccccgttagaattcggtggaggacgagatttcctactgagaaggatcgctgtcgcacagccttgtcgtgatagcgccttagagtctgccggtaccgtgctga

SEQ ID NO: 86726 - DNA, 377 bp, Zea Mays
ttttggcttaactaatgcccctgctgcctttatggaagcaatgaataggatgttgcatgaattcctggacgactttgtggtcgtgttcctggatgattctgatttattcaaagaccgaggccgagcatgagcagcatctccgtctcgttctgggtgctctaaggaagaatcagttctatggcaagttgatgaagtgtgccttttggctatccgaagtggctttcctggggcacatgattaatcaacagggcattgtggttgatcccaagaatgttgcggctgtggtggagtggaagagaccctctagtgtctctgaaattcgaagtttcttggggctcgctggatattatcggcgcttcgtaccaaatttttccagt

SEQ ID NO: 86727 - DNA, 291 bp, Zea Mays
aagtctgaaattcagtgttgagggctcaactttggggccttgcaactttcaaattataggatctttgcccttggtcaccacatcaatattatagcccaattataggagaacaagtttgcttaagagtgcaagccatgttcttgtgaaaaattgaaagataatcatgcccaaagatggactgtcaggctaatactgtctgaatttcagactaacagtggcctagacccaagtttgagagccagtttgaccttgatccagtgctcaaataagtgtaatccctatagtcgattt

SEQ ID NO: 86728 - DNA, 459 bp, Zea Mays
atgtacccacaagatcagtgtcatccatggtgacctctgtctgtgctaatacgagctatcatttaaccagtatgataccaccctacaacttagcccatgagccaccctaaagtaccatcggcacataggtactatgcaacatagtattgggtttctagtggttatgacatggtccggagacggttagatgacacaccattacatccctacagtatcacctatatcccaagtagtagtggcatcaacctagctaggtcacatctacccccatgcacatttataagtgagtggtgtattcaaaggatttgtgcttcttgacatagtccttagaaggactagaaaaaatatctcttaaagttgaaagctctacctcatgtgccctcaaaggcatcaacttcctagggactcgtctgaccgagagtctcatccacgagaactactcaactcacatgtacccac

SEQ ID NO: 86729 - DNA, 1080 bp, Zea Mays
aaggcctacctatatgatttatagaaaccgtagcatgtacatgtaactaattagccgtgtgacttctaaattccactatactcgtcatgttttagccgcattatattaatttcaatcaaccatagaacctaaacggcaaactcgtttgttggaggacactaatataccttgtgacgaggtacacaaatgtcatgttatatattggatgaaaggaacctaaggtgaatatgcttggtagcaattgtacacaaacattcatgaattgaggatatttgtgtgacatgacatatatcaatccatttttcaaatttataactacagtgggaaaatattcaatattcaaattggggaaaatacagactcagtgggtccctacgacctcgccaacgacatcgttcctctagggcgacccctccattagcggcaagcagatacatgtaattgggattgtttttgcttcaaacctgctttattaacatttggtgatttcgttaactataaaacttaatttatagcagataaatacacagtgttaaaatcaacccaacaaactatagaatgataataatggaaactagaactgaaaataatctattgtttttctttattcaccacgtgctcatctttacaacgaataaagacaacaaagcccattacaagcgcgagaaacaccccaacggcccatacgagccccctcaagacaaaagagctgagccccagctcagaagctcgcgtgcccactacccttccgactgtttacttccttgctcacctttggaactggagcggcgacgtggcttctgcgtgggcgggacaatgcggacatacatgtcttggtgagccaccctacccctcgccccctcctacacatagccaccgtggctgtccgctacaacatatcacgtcaactcgagggcaacaccgcacctcacaaccctggtccactccagactgagtgggtacctatgagcttgcccaacaacgtcattcctctagggcgacccctgcattagcagcaagcagatacatggcctaaaatgtagcgatcttccttgccactaatttgagtcagccctaaga

SEQ ID NO: 86730 - DNA, 920 bp, Zea Mays
ccccattccagtgctggcccattacgtcatgccaccagccagcccattcccacacagtcgggcgcgtcgacgggtgggccaccagggttagcgtctcccgcggtgtttgcacgaatgaccgtgtctttgtcgtgtagggccgcctgtgcaagttcttttgctcgcgcatgcgaactcagtgtcgtatcgcttatagtaggacccgcctatcatctctttattttgtcgtcgtattaaactcgaacgaaattgtgaaaccgtccgcgatctccgtgatctcatcctgctatgcatctcctggcctggtgcccctatataaatacaagagcatctcgacaccctccttcctcatccaatctcgatgcccttgcgtccacatcaggccactgcgctgagagtagagaaaaaggagttagctgccaccgttgcgttcgcgtcgccgtcgtcgacccacgtcctcatccacactgtgtcctcgaagggtggacgtagagattcacccgagctccaatatcgtatatgtggagcttcggacctcattggtcaattggagcatcgatgatttctcaccagatttcctccactcatgtcgtcgacctgtgtcctcgtccgcgctatgtcctcggagggtggccgtagagatttcctccactcaatggtcaatcggagcaccggtgatttctcactagagttcctcccccgtcgagcatggcaaggggatgtcgccgcctcttacactggtacatcaccacaattcgtttcgttaagtcctccgcttcatgtagactttacaagacgttaaagtaggtcatccgggtgccacgtgcacttctcgtccaaccgctgtgaggtgggagaaatggaaaatcgtcggaacatagtcgaaagattgtgattagtgtaacgaaaatagatcccgg

SEQ ID NO: 86731 - DNA, 584 bp, Zea Mays
tacatcaaacggggcatgttttaaatgcaggcaggtccgacattatgccaacaactgtcctaacaagactgcttaccctactccgactctgatgaatcagagccaagcctcattaggtaaaagccatcccttatttgtcaatcatgggaaacaaaacttctcacatagccaagtcaaccatgtggaagcacaaactgaccttgtagagccagaagactaggaagagatggcgggagaaagtgaagaagctattgagcagcaaaattagagtctttgacctttgtaataatctcgaggtcgagattctcttcaagaggggtaggatttgtataacctaaaataagaattgtaaacctcacttgcacctgggccactttccctgctctttgggtcgttcataccgtagtcgacctatctccaaaaccccactaaggaccaagctccttccacgccaaccgcaaccgagcatccccgcactgatgggcggcccacacggcgacagcctcatacccctctgctcagtccacgcattgactggtagggaccatgcctcagtccactatgccgacgcgctggtgtctctg

SEQ ID NO: 86732 - DNA, 384 bp, Zea Mays
ctaattagggtagagttggatcgggccattctaataaaagaatgagcatggatctgtgaccaaacatggcccaaatgtacgtttggatcgaacaaaagggtgcagcccaaggagcacggaggtgggtcctctgcaacccgtgtgttcttcatcttcggatagtgcgatgctcgtaggaaggcggcgtgacatctataggcggcgaccctgtggacacactgctcgcctacccctaccacggaggacctcgcgaccaagcagacagcggcccagatctctacatcgaccgagaagcccgagcatcaacgaggaagtggcccagatcctcaggtgcttcgacggtaatgttgttctgtccggctgtcccaccctaccctctactgc

SEQ ID NO: 86733 - DNA, 1446 bp, Zea Mays
caaataagataattcagttttgccaaaaacgcacttggatctcttaaggaaaaactgatgtttccttagtacagagaacaccaatctcagatgctgcaaatgttcagcccaactagcactatacaccaaaatgtcatctaggaataccattgtaaatttcctgagaaaaggagcaagaatcgagttcatagcacactggaaagtagctggtgcattggtaagtccaaagggcataacccgaaattgatagtgaccttgatgagtcttgaatgcagttttgtattcctcagattcttgcatccgaatctgatggtaccccgctgtgagatccaaactagtgaagtattgtgttccagccaattcttccaaaatttcctccactaaaggcatgggaaatctgttcttaatggtaagatcattaagcttcctgtaatccacacaaaaacgccaggacccatctttttttttactaacaaaactggtgaggcaaaaggactggtactgggagttataaaaccagcttgcaacaatgtagtaacctgcctttctatctcgtctttgtgaaaaggtgaatacctatagggcttggagttgacaggtactgaaccaggtcttaggggtatgcaatgatcaaattgcctcattggtggtagatgggtaggaacattaaacaattcagcaaactcttgcagaagcaactggatatcagtttcattaacttgactgccagaatcagcagtggattccactagcaccatggcccaaatatcatgtccagccagccatttctgcacttggagtgctgatacctcctgaatggttgaacccgagtgaacatcatccccatataaggtcacctcctgtccagcatctcgaaactgtagcaccttgtgtacccaatcacattccatagggctatgctgcatcaaccaatcataacccaagatagcatcaaaagcttctaaaggaagtactctcatgtcagtatggtagaaatgcccatgagaccaccattcaacatttctaaccatagagttgcaaatcattttgtgtccactggccaccttcacttgtacaggtgggcactcttccacctgcaactttaattgtttagacatgtgttcactgatgaaagtggaggaactgcctgaatccactagcattagcatcacttgttttcccacaatagatctcactctcatactgtaaatactgtcagaacctgatatggcctgaaaggacagatggcagcacacctctctttgttcatcttcttgttccaacttctgtaaaacttcatcagtcaacacctctggttcctcctcatccaccacaacatttaactgaactggccctcttttggcacatttgagaatgtggccaggctcaaatttctctccacatgcataacacagtccatttactctgcggtattccctgagttgc

SEQ ID NO: 86734 - DNA, 1074 bp, Zea Mays
tccaaatggcataaccaaccattcatataaaccaaatttcgttttaaaagtcgttttccattcatcaccgagtttcattctaatatgatggtaaccgctacgcaaatcaaccttagagaaaataacggcaccactaagctcatctaacatatcatcaaggcgtggaataggatatcgataacgaactgtgatgttattaatagcacgacaatctacgcacatatgccatgacccatctttctttggaacgagtaaaacaggaccgagcaagggctaagagactcacgaatgtaacctttatcaagcagcgtctgcacctagtgctggatctccttcgtctcatctagatttgtacggtatggggcgcggttcggaagagaagcgctggggatgagatcgatctgatgctcaatgccacggagtggaggaagacccggttgtaagtccgtaggaaaaacatcagcatactcctgcaaaaggttaacaacagcaggggtatatccaaagacggtgcatcatcaagcggaacaagcatgcgcgagcatacaagtgcataacagggcatatgagcttcatggagatcatcaaaatcagcacgtgtagcaagtaaaacaggagagtgcaacttgatttcagatttaataggtgcggctcatgtcgatttgacttgttatgcagttttagcagccctattaagatcatctttcaaaatttggtcaggggtcattggatgtataattattttctagcctttaaacatgaaagaataattatttgaatgaccatgatgtaaactatcaatatcatattgccaaggtcgacccaataacaaagagcatgcttccataggaataacatcgcaatcagcataatcagaataagaacccagcgaaaaggggacacataccgaacgtgttaccattattttaccaccatcattaagccattgaatgtgacacggatgtgggtgtgcgcgagggcaaggataatttctctaccaaagctgtacttgccaaattgttgcagctgccactatcgatgatgatgcgaatcgaccgttcatggacaacgccc

SEQ ID NO: 86735 - DNA, 460 bp, Zea Mays
gagttatctatttgtgctcccattgatgtaaaagcaaacagacaattgtactgtctaatattgcgaatgaattttctcgatgtggcatcatcatcaaatcttgcaagagatgctaaaggctcaggtcgaggcttgaagggaggaatgctgatttttccacctttgcagcagttgttgtatctgatagatgaatcctgttgattactcctgaccctttcagcataccagaacacagcatgacaataagagcattcgtaatctagtgttccgtagtatgacctatttgggtatgaggctgtgcagtgaaatgattgtgtattagttatattttttaatttttttagaagtagtaactttattcgctctgacatttgagagagattatgtgcataccttttaatgcttccacatattcggttgtgaactgtccagtatggaaattcgtcaatgttttagctgc

SEQ ID NO: 86736 - DNA, 579 bp, Zea Mays
gtttgaaaagggtctatgtcacatctcaacaagctagtccataattgatcatttctttgatagtcaaatgtctagatgagatgtttcagttcatcacaatacgactttattttatactctaggcgaccatgtttccatttattacatctgatttcgatccgttatcgattttgttctattcgttttcgtcagcctgtaagtcccattttcgatggtctcaatttcgatcgattttctcaaataaaatgtgaaaaatgaaaacggagagagattttcctgacacatctcgttcgttttcatccatactgccaatttattcctggctcaggcaacatggcctatgcgtccactcccgacctcttggcaatgctccaccctgtgcctatagatttattgattttttatttatcttttttctaaaaaaccacgtgtaaatttttaataaaacaaagttccctttttatcttagagatcagtgtttcgacctataacatgacattataagtcatagctttgagatacaacttgacagcgtgaactatgacgccaagctccgacacattggccatggcttcttcc

SEQ ID NO: 86737 - DNA, 456 bp, Zea Mays
cacacctgaagcagacgacctgctgcttcgtcaacaggcgctgcaacaagcaacgagcacagcagtttccctacgggacagcgcttccggcaggggtggcgagggcaagcccttttggtgcgtgaactctgagatcatggagccattgtccctcagcgagcaggcataggtcgagtgaacaccgccggtgatgagctcgtatgcgccacaacaaaggactacaggtgcaacactctcctcctttgaaactgctagttcttgtttgtgtcggaggtgaaattctaaggtggctttgaaagtggcctcgattgctcaatgcacgcgaaggaactacttattgtgcagtgtggaatacagatcgattttagatcagttgtagccttgtaggttcttcatctgtaggttagaaaaacctaccttttgttcttgaatgttggcttcaaatttgaatgctga

SEQ ID NO: 86738 - DNA, 471 bp, Zea Mays
cacgactttagctgaggtcaaagaagcaatgggtttgaactctatccatttagtgaatttgtcgattgttaccagtacatgagtgtatcctccttgagctttcttgaaaggtccaatcatatctagcccccagcatgcaaaaggccaagtcaccggtatagtctgcagctgctgtgctggtagatgttgttgcttcgacaagtactggcaagcttcgcacctccgaactaactcggctgcatcacttttcgctgttggccaatagaatcccgacctgaagaccttcccgactagtgtcttggacgctgcgtgtattccacattgtccagcatggacctcatctagaagtcgcttcccagtagacggtagaatgcatttcatgaagatgcctgatgcgcctcttctgtatagtgtttccctaatgagtgtgtagtgagctgactgtctagcgatgcgctcggctgcattttt

SEQ ID NO: 86739 - DNA, 561 bp, Zea Mays
agaacttcgttcttcaaaagaaaaatgttatgaaaaatccatagaatgcgtgggaaaaataaaaactagcttcaccaatgttggcgcatactccagcgaagacaacttcgtaagaggcgatcctgagggcccaattgactggatcagcaacgaagccgaagcttttgaggaaattttgagtggtcgtggagatgtctgtgccttctcaggtgccaagggaattgcggctattttggagaagtcaggttgcaatcatgtgaaagctttggcccaaaccgaagctactttatctattgatgacacgaaggatccttcggctgaagcgagcttagttggcggaaaattctttactgacatctgggagaatggcggccgagggatggcccacgagataataaaaaagagcgaaaaagattctcacgatacaagagaagcagcagaggcagctgaaaagactgcagaactcgaaaggcggataggtattgcctaattgtttttaactttatattttatttttgtgacttcgaacttatttacgttttgtatcgcagctgaactatc

SEQ ID NO: 86740 - DNA, 449 bp, Zea Mays
gtcactctttgcaagaacattcccgcagctgagcattgacaatgtgcttcgaatgcacatcattgttatcccttacctctgcaatgtagttgtcagctttccgtactgctaaatgacctaaagctcttgtcctgccgtgtaggatatgcagaaccgacagtaaaatctgtccttgcaacttttgtgcaatcctcctcctcctgtgaaacatctccataatttcctcccttatcctgtcagccaagtcacatacaggcagatccttccaatccttaatccaattgttgaaaacctcaacaatgttgttggttacgtagtcgcacttgatgtccgtattgaagccacttcggtaccaaagactgtcatgatgctcatttagccaagtgttgacctttgggattttttggatgcttctaaagtagtggtcgaagacctctctcctataagct

SEQ ID NO: 86741 - DNA, 786 bp, Zea Mays
gttcaatccgtggatcagtgcttcatattctgtcgcattatttgatgctggaaataatagctggagtgcatacttgagttgttcacctccaggagcaatgaagaggatccctgcacctgctccctacaacttcagcgagccatcaaagtacattctccatacttcggtagtctccaggttgtctaggacctgatgctcagtccattctgatacgaagtcaaccagtgcttgagtctttattgccgtgtgaggtcgaaactctatgtcgtgagctcccagctcacatgcccacttggctacccttctgatagcttctttgttgtggagaatgtaacctattggaaatcctgtgactactatgactttgtggtcgtcaaagtagtgacggagcatgtgagcggttagaagtaccacgtatagcagtttctgaacttggggatactttacctttgagggcccgagaacttcgttgatgaagtaaaccggatgctgcactgggtatgtatgtccttcctccacccgctcgactactaacgcggtgcttaccatgtgagtcgtgcaggagatgtataacaatagatcttctgctggctgattcggcgtggctcggcgtggtggtttgagcactggtggtgtagtcaggaactttttcagtgcctctagagcttcttgtgcctctgtgttccattgaaatttgtccaccttttttagcaatttgtagaacggcatgcctttctcgcctagccttgatatgaacctgctcagggctgccatgcatccagtaag

SEQ ID NO: 86742 - DNA, 672 bp, Zea Mays
aaaagagctgcctggtttgtgacatggaaggaatggatatggggggcctgcatgcaaactgctggctagacttggcatgcaatgcaacagcggtggagatatgcttttgactataatcgtaatctagctagggtggacaaagtgtgtataaactaactgcacggagtacatggccatgtgagatggtgggaactgggaaacaggacaaagccacgcgatgctgctgcagaggacgacgacggggaggatatatagagatggtgggcgtcttgtgcttgggaacccccggtcaaaacttgggctctaagcaccgtagtgttgtctaatctctactaactattaagaagataacgtagaccaagagtatgcccccgcttaccttatcacgcggagcatgcacctgctctcccactcacgctgcatgcaagcatgcaactatgtaagctacggatgcctccctcatccactcatgctgcatgcaagccgccggagatagagcccgtggctccctccgctcatgctgcatgcgttcttgtcgagtcaaatttttgcatgtgttcttaattaaaataaaaatttgaaaaagctgagtgtagctcagttggtcgacagtatgcatgtacgcccgacccgacccctcaagtccaagtcattgtcgaggcaattttttgg

SEQ ID NO: 86743 - DNA, 421 bp, Zea Mays
gaaaatattgaacaacacttctatatataccgagtaaaccaaccaaaaacgcaataggatggttactacagcctaggatgtttacagagcaatatagtctaggagacaggtcatactttggtatatatatacacaacttgtatctacagtacatcaccttagaaagtcaagagagaccatcattttggtttgcggcaaatgcatgctgatgccattttgtgcgtacagatactgtcatcattacttgttattaatctgaagcagatgcaatagtactactacacagtacaggccacctacttccactagtcaaaacatgaattgactcatattaaagagcatatcacccctgtttacttctattgaatctacacagtcaatgtcaaaaccatatatatacatgccaacaatttgattgctc

SEQ ID NO: 86744 - DNA, 572 bp, Zea Mays
tcttgagtaaaggaggttaagtgctgcccataaggtgtactctagattgagatctcttcacgaaacatcatctttcttggtgttgatctcttccagtgcaatagtcgagccatcaaggtagccctgcagctgcgcgcccctaaggttaggtagaacttgtgccttccagaccgtgaagttgttcttggtaagctttaccgccacggattgccctagaaggggtgttggcataacagagtttgaggtagatgccatggagatttattattgtcgtcggctagggttctagatttgagtggaggagttgcttctgattacaatgtaagaaaacatgatgccaggtttaaactgttcatcctaacctattagggcgaggggggccagggggctgagtatatatagggcaaaatattgccatcagaattataacatgacagggagtccaagtcagttacaactgccttaaccgactcctattctaactctgctatctctaggacagatcaagcctaattgtatcatatatttaatcagagtcgattgtggtcttcctctattatagaacaaccgca

SEQ ID NO: 86745 - DNA, 305 bp, Zea Mays
gtttgggctctaaccccttttgtagagaaaagtgcaatttgaacttgatttgaaccacattgcaaatcctagtgtagcaatggcaatgaggtgagtttcccacacttaatcaattagattaggtactaataatgtttatctaagttgtatgtaaacccccatagatagccaaaaaggtttggtgaagataagctcaaaagagtcaaagttggcctagtctggacctcaccggactagtctggtggtgcaccggaccgggtgaaagttccctttgcccaagaacatgatctggatgtcgcttagag

SEQ ID NO: 86746 - DNA, 406 bp, Zea Mays
cgttggttgcgtcaatggcatctaaccagtcatcgttgggctcatcaaattggctcctgtatttgaatttatacttcaagtaaaccaagccagcttggctagacctagcaacagtctccttcgacatttcccacccactcccgagtggccacaccttgaaggcaatgtgttcctggactaagtctctcgtgcctatgtaagtgcatactgtgttatatgcagcttggcacgcttgtatgtcgtttccgagggcaagggttggtctcctaatgccgaagtgagaccatataaggcgttggataatccccttgatgccttccctctcaaccagatcgttcttcacatagaaccattcttgcatccaggctccggccatctcttgcagaatgttggaactgggttgctt

SEQ ID NO: 86747 - DNA, 396 bp, Zea Mays
agaattgatttcttattgttaattggtcttcacgaagctattcttttagactccacattgctatcgaagagttaaattggaatcttattgactatcttctactccaacatagcaaagttactattgtaatgtgtatgatcatatccgttactagtttgtggttagtgcatatagtacatacttaatcggatcatgcataacaaataaaaggtttaaattcatgttacaccactattggttgattaaaactacttgtagcatatgagtttatttatgagctagtgaacccaagtacttgatctattttggattacaacaagttataagtccaacctcaataatataaccacttaatgtgtgtgaagaaggctagagagggttcaaactagacttgga

SEQ ID NO: 86748 - DNA, 524 bp, Zea Mays
ctgtccgagactatagtccttggtatcccatgcagacgaattatctgatcaatgtagatctctgcatacttctctgtcctgtgggtggtgtgcactggtaagaaataagcagtcttagtcaatctgtccacaataacccaaatagaatcatggtgcctggatgtattgggcaatcccactataaagtccatgcaaatgtcctcccatttccaagatggtatgggaaggggttgcaaagggcctgttgccttcaagtgactagcttttattctctggcaagtgtcacactcggatatgtacttggcaatttcccttttcattctggtccaccaatataaagttttgagatcatggtacatcttgttgctaccagggtgcatggagaatttggaaaagtgagcttcatccagtatcttctttctgagctcagggtccttgggaacaaccaagcggtctccaaaccataaaattcccttgctgtcctgacggaagcacttgtatttctctgccttttgcttgatcat

SEQ ID NO: 86749 - DNA, 848 bp, Zea Mays
aacttgtgcacatattcgctgacagatcttccatcttgagtcagttctcagaacttgtcttccttaagctgtacaagtccttggggcacatggtgctcccggaaagctgcttcaaattccgcctaggtagcatctctaatggtgacgttgaaggtgtcccaccaggctaaggccatcccggaaagttggtgggcagccagttgaacacgctgattttctgggcaaccaatggcttccagctttcttttgatcgtgcgcatccaatcgtctgcatcgagggggttgcttgatccggcgaacgtgggaggtttgagtctcaggaaatcccccatcctgtcttgcggccttccaccatttggtcgttgattttccagacttcgagtgaggacctcgatgagtcgggtttgattggctagaacttgggctaggtctaagggtagttgtggaggtgcggggaggtgggtttcactttcctctctaatggcttccccttcagctctcaggggaaaccctgctccaattccggaggcggtaggcgtggttttatccgaagccatctgccagggaagagagtcactattatgcacatgcaaattgttttcaaccaagttattttattcattacaccagcacattacaagcataagactactataggtggaactacacgagagcgttcctcgaggtactaccgaactctttctctaaggtatccccaaattccttgagaagatcatcaaggctcgctagggatatattctcggcatcggaccaatcgtctattctggggggaggtggggctggaggggtcttgaagcgtccccaatcctctgggactcaaatgtgat

SEQ ID NO: 86750 - DNA, 559 bp, Zea Mays
gttttctctagggtgtcccctgtgtgttgggtgagggcgtgagggcataccattgcaattggtagagcatcctcatttcaatcgatggggactcagtgcaggaagagatagcatggctcgggaccgctagatgcagagcttggtcctacaatggcgaggatacccaattcaccccactcccctcgatggactaagcaagaggagggaagggcggcctcacctccgccagctgcattgaggtctcaccggccaccaaggggccgaatagatactgttcgatgacctcctcatcgctgaagtcatcgtcggtctcttcctcttcaccctcgtcgtcactacccaccaacctccatcagcaagcttcctccctttgtagctttcgatccctcttcctcttcttttgattctccctcttcttcgcctccacaactcatcgtgtgcatagttgtgtcctttaggagcggcgtgcgggagaggcatatgtggaaaccgttctagacaaataaactatgagaatccgataagattagaacaccaaaatgaaaagggagaagaaact

SEQ ID NO: 86751 - DNA, 641 bp, Zea Mays
gggccctgtagatgttgatcaataatgttttggatcagggtgcttgtgtcaagttggtagtacatagtaaggagaacaaacttcttataggttgtaaggcttggtactacaccaaaatcaaaaagaaatcgatgctaagatggactggcaggttgtagtaactgaattttgttcggtaactgaaaaactatatggcagtgtgtggtgtctagtttggagctcttgtgctcaattagtgtagtttttggctgaagtttctatagtaagttggtcgactataggaaggagaacaagtctctaggagtgttggatctcgtactacacaaaattgtgcgttgtgtgctctcaattctgccttgtcagacatgaggggtgcagctctggttcagtagactgtagatatggttcagtgtttttctccagatttggagctttctggtgaatgattggtgagattctggttcatagtatctttagcaaaaagttagggggttagtgggtgaacaaagttcattaaagatggttcccctgttgttgtttaattctaggagaaaaaagtggtgaacttggtataggagtcgacctgaacatgttcagacgtgagcaaaaatatctgcaaggaaatatccctctccactacc

SEQ ID NO: 86752 - DNA, 469 bp, Zea Mays
acctggtgggcaaacttttccgccattcaacctgtgggacatcaggtcatgtgggaagagttcaaattggcatttagggaacattatgttctggaaggagtgctacagatgaagctggaagaattcatacgctgtgatgcaatatctcaaaaaatttaatcacctctcccaatatgtcatcgattaggtggacatagacttgaaaaagaaaaattgcttcatgaggggattaaatgatagactccagcgcaaaatggctacatgtctggaccttacctatagcagggctgtcagcacaacaatgtcagttgaagccaaaaatgcgggacaaggaaagtcaaaaagatatgcgtgtgaaggatcaactccggggcctgaaaagagaacaaggatggtaattcgacctttcaatccaaaccgttcttctcctcgcccacccacatatcccttcagacaacctgtgttcatt

SEQ ID NO: 86753 - DNA, 377 bp, Zea Mays
aaaaaacgcagacgatacggacgtctcgcctaatatttcaactgttttgactactttacgaatgaaggaaaggacaccacctgaccgagctagctggcagtgttccactaacagtcagtccaacgcagttactctcatccctatgtaaaaggtaggagagctgagggccggagagaacagtaacacacactgtccagatctgatcgattcctgtgtaggctgccatgcatggaaacaaaaccaaaaccgcacgtctcttcgttgagaactaactgctgaattcgcgagagaggctgctaactaattaagcggagatggcacggtagcgtacccacaaatcctcgtacggtaaataagacacgtcatgcattgacgac

SEQ ID NO: 86754 - DNA, 798 bp, Zea Mays
ttgcattttaatgtacatggtggatttgttcgatgtgtaagacttatgtaaaaaatcttaactttaaaagatgataacaaaaacataaaatggaaaatataattttttaatttaaatatatcttatcataacatgttcactccgtagcaatgcacagacgttcacctagtgaatagatgaaagcttcttagtacaacaagaaagaacaatagtgctattggttagaagggacggtttttgttggctgtgtgttggtcagagtttgatccatataatcgtttttttggacatttttatcggctggtagcaaaaccatgggaatgggaatggaagtgggcacgagagagaggatggagaatggtaaaggaagggaatgggaatggaaggcagcatgggagaggacggggaatgggaatgaaaaggggagaacaaagaatgaaaatgacagaaccaggtgtggcagaataggaaataacaaaaccaagaatgacagactactcttggagctttaataaatagtatagattcctggctctgccacatattgatctacgctctttctacgtaaaacgctagatatttttcatgcttatccactttttagataaaacatatcagctaaaataccgtgctttaaaaagtatttcatgctctcctataaatcatgataactaattaaaggatgttttagtttacaatgactaaattttagtcactccattttatttttggtttccatatttaccagtttaatgactaaaatagaataaaatataagaactaaaaattagttcctac

SEQ ID NO: 86755 - DNA, 676 bp, Zea Mays
cggcgttcttatcggcttctaccgtggtgacacagtacggtggccggagttctttatcggttgaagcttatccacggcggcgtacaccagtgttacccacttacccgagaacaacgtggaccggctgccgcacgaatcacggcggcaatcggtcgccggcggtgaagttgccgcgctggcggcctgatccactcgggttactgtaccatcaaaagttcagtttcagtttcttgctacatgtctgacagggcaacttcagaactctttttctccagattttctacggcaacgtgatccacactctgcagcaaatttgtagagtaatataccatctacaaatttgttatgggaatcatacccaaacttgcactggatcatgtttaaatccaagtccaaagttagctctgtttcactgaagttctgaatttcagaattccaccagcctgacagtccaactttgggcttacttatctctggatttttcttaataagtgagcttaccaccttaagcaaagttgttcttctataatcaggttacaattttgatgtggtgaccaagggcaaagatcttataatttgaaagttacaaagccccaaagttgagccttcaacactgaatttcagacttagtatagaactcaaatgaggtccattttgcaaatgagtccaaaactta

SEQ ID NO: 86756 - DNA, 290 bp, Zea Mays
ccggtatctgctgaggtcggcctcaagcttcggaaagccaacactcttcgatagagtgctgacaaccttcgctccagtccggtcccagaggcatcctaagctctcttcgtcaacgccaccaaagaggaacgctcctggctggtagccgcaagatatagcataatctcatagctcctctttttcagtcttggataactcttgaccaatcatgttttgaaaattgaagtccccttcctctgaaatatcttcggtaatcttcttctctttgttaaacaccttctccccttttc

SEQ ID NO: 86757 - DNA, 409 bp, Zea Mays
tgcataggagggaacccagggttgggacctaatcctgcggcaaagtactgaaccaagaggggatccataacctctcccccagcagggaggaacccctcaaggcgatggaaatttgccaacccaagggatgccaactttgctatagctgaagaagtaccccttcctatcccagtaagttcatagaagcaactctgaggggttagatttttctcctttcataattaaatttcgcatatgtgttcaccagcccggtgaggtctgcccacataaacccggcctgatggtttacacccatgcatatcaagttataaagaggaaattcaccccctcggacgcgtttctatgacaactttatcttcctgctccatggatttggcctacagttttcatataataccttttatctaac

SEQ ID NO: 86758 - DNA, 716 bp, Zea Mays
tgaaattattaagataaagcaatagtctcaacataatcaagatataagaatagactcccctaaagatatgcatcgagtatttgaaagaattgattcaatgcattcacttttaaagacatatagggagaagcattatacatcttgatcaaggcttataaaatttgcaataaacaacttaagcctataattctcattatgaaagggtttagaatactcacaaccacaccattgattgttttgtagatcttattatccaagtaggtgttgttgttcttgatgtcctccactttcatttgagagtcctccctttgtggttgtttctttttcctttcaaacttattgaaaatactcaagaaagatgttaatagcatagggagcatatgatgaaagatgatttctttagataggaaatataaacaattcatcatttataagtcacacagatatgaagtaaaatccttaacattagtgcatttcatttgagaaagaggaacatgcactttttaagcattttaataatcattggagattttacttcatcatattgaatttagtaatcattacttggaagcaaatcaatatgataacatatataaatatcgcaaaggcattaaatagattctaatggacatgagcatttaaaagagtgagattgaatgcacatctagctgatttaggtccaataaagaatctattcctcacatgggtagaatatg

SEQ ID NO: 86759 - DNA, 690 bp, Zea Mays
cgccgtgggcggaagactgagtatcttgagattcccctcaaagatagcattaaggggtggcgtctagagtggtttatagttgataattatggaaattctctcccctcccggtcgggaagacagccagacgttcgcactccgagttggactgagtctcccacagatcaggaagtggccgaggcaggtgtgttgctaactgaagttggattgctgaaagagagaggtctgactgctgaagctgtggtcactgactttgttttcaagaacattcagccgctgaaagacagggcctatccggcatatctgtatagagggctagccgactcgactcgggttaccaataggagaattccttctgtagatttggtaagctgacttgagatgatcctcagaggtaaggtttcaaatgttggtgctccagtggcatactcggcctggaacctacctcctcccaaagctttcaccctttttgtgtcaaatccgcctgtgactgatggcaatttgggccttagagtgcggccctctgctgaagaagtcagtactttggttgcttcgctcggggagattcctgatgatgatcggcaggtttattttgaagtgcccctgaaccctagtgatgcggacataaatgacatgcttgatctgttagctgaggatttatccgatgttgctcctgatggtacattggca

SEQ ID NO: 86760 - DNA, 294 bp, Zea Mays
gcagagaccattcctaaggttgatgccaagggttgtgatcgtgcacaggctgttgtctgcctgtttgacgaggatgaagaggaagaagaagaggaagtcccactgatccgcaagaacagccggcactataaaggtagcgagggggtagtgatattccctctccagctctgtcggtccttattagtcttcaggggctttcaatatcagattttgatcaagtactggaggaggtcgtccccgaagacatgctatcagagcctcctaaagatgatatcccggccgtctgttcagagg

SEQ ID NO: 86761 - DNA, 933 bp, Zea Mays
cctacgctctagtcatgggagcacggcaagggggaggggacgacaagcgatggggcaggggcgagggacagggtgctgctggtggttggcaacacattaggcatcaggctaggcatgaggagaggtagagatgggttggggaactactttttcctctaacaaaaattagatggtgtgggagataggggcgggggctacctatatttatttagcaaataaccatgagatgtcaacccatctctatagcgacccgtcatgagttgttaattttctatattttagtgaccaacatgccatggctacaaacatatttagcgaccaaccataagttcctaacatttagcaaccaattgttggtgcttaataaaggttgctaaaattgcactgtgatgtagtttatgtagttcctgaggatctcattacacaccactgcaatggattctagccgctcggggcatgggcatttaaacaaaggttgctgcttgaaacgatatggtagaactttcaaaacgcccggttttacctcttcgtcgccattattgggtttcgacataccctaaccaaactttacagggaacaacctgttcgcaagaaattcttgcactaaatctcgagtgacaatcctatctgtcacatcattgaacgcaataataattgtttcgacaactctgctcatattatagatgggtctctttaagccgaagcttatcctcaatgttgtcatcactatatctttgaactcttccctcttcttcatatctaccttggcatagaaccattccttaacccactcacttggtcatttggtttggtaggccaatacaggaaactttgaatcccttcggtaagagaaggtctatcacccaatgttcttgtgcattttatctgaaggtctatccttcgtcttatagtgcaattcatgcactctgaaga

SEQ ID NO: 86762 - DNA, 579 bp, Zea Mays
cagcatgctctgttatcttgttacgtgcccggtgcatcgctcctcgcctccaattgtccaccgtagctcctcaattcatgatttcccccaattcggttttccgcgccgccgtgagtcaccgcgttgtggaccgttgtctccaggtctgctctcgtcctcctcacccttgtttcagaacccatgcacgctaggaatgcttgtcggctcaaccaattgagctagaccgcgcttgatcaccgggaatgccttggtttgtcttcggtattcgtcgtcgtcgtgggaagatgaactccgggccggattcgtgcaattgatggaggaattagggtcgccaggggtaggattaggtgtcgaccaagttagggcaccggtcgttgcgcatcccggccggtacaagctcgccggagggcaagctcattgtcgttgaccgtcggggacctgggtttgtaaagaaacataagtacaggggcttaagtgtgagcgtcagtgagacagatgaatagtgtgtagggattcttaaccagttattcgaatagtcggggtcctctgtgcaaagttgccaacgcggacgcgcgcgcg

SEQ ID NO: 86763 - DNA, 506 bp, Zea Mays
caatctagtagatctgatctcactcttgtgcttgcgacacccttgtagatgcccctgaccataaccctcttgccttttgggatttattcctcttccatcattaaatttctaccatttgacaatccttatttctttgttattgacatgctcgtacccctagattcttcaatactcttgtttcaaatacttacatctgaatttctcccgcctacttaaacactccagtttgtatgtccatgaccttcatgtcttttgagacccttccctattctatcgttaagtcgctatccttcggcaatttctattctctttgtcttggtatgctcatatccttggaatcttacctattctcatccttttatatatgcttacctttataccccaatgtccatttaaaacatttcagtttatatgcccttgaccacccttgtttcttgatgaaccgtgagcgatcattttatgttgcacatccttggtgatctcgttaattctttataacttccttc

SEQ ID NO: 86764 - DNA, 785 bp, Zea Mays
gcaatttccatattttagggaattccttgtatattcacctttttgttgaggatgtctggctttctgtcttgttatgtgcttcaaggggagatgtttttgtcagggggtttgaggttctaggagcattttgctagttgtatattcaactttcatgttgcttttatgctttgatttggctttcactactggctaggtgttgagcccttttttgcctcttcttgaggactagccattttctcacttggtcttgttgtgtcattgcacattttttgggtaccaagctttgctcattctagatgcctattctggcttttgtttggctttttgtctggcttttcgtcatttgagtgagcttctcttcttccttcttctactgatttatgttcatttggtggtgtggttaatgcactcatcaaggcagagattgtgaacacaaggttgatttgtctgattgtgaacacaaggttgatttgtctcttatggttcaggttgatgatgagtgattctcaatgggtagcgtcttgggttgactcatgtggactaatcgacacgtgggtatatgtttgtgcaaccatgtatctcagcttgtggtgtgcacgtgcagtatagggatggtggtcgatggtgaaggtcaaaatcatgcgggttcataccgatgggctaggagcggcaaaggacgagcattgagtcttgatcgggagactagagaagttgggtgactaattgtggtgagtcacacttaggacacgcaccagcgcgaggatgtggcagagtggatcatgtcg

SEQ ID NO: 86765 - DNA, 1022 bp, Zea Mays
ccggcatcgccgagtcacgtatttttcgcatgccctgtaggcactgttcgtctgtcgttatcaccgagccacaattgcgtctgttgcgcacgttgtgtggacttgtcacgtaccccaattaccgagccataactgcgcctgttgcgcttgttatggaggcttgttgtgttgtcgtagcccagatggccacacacgcgttgacgccagatacgatagagctcgtactcgcgtggattgtggtgggtcgttcaagccctaaagtcacattatgcgcaaccttcgtaaacaattttgtttagctctatattttatttgattgtgttgtgtggcatcatatatttatatatattgccaagtggccataacagctatatcaagctctatagtgcttgaataatctgggaaattaaattgaaatacaatgaaacacagataagttattctttgctctctcctcatgcataaagttttacccgaagtaacccgaagatatataatataatgcaggaaagcctttttggcgtagaagatatcacaaattgggattatattagtaagcaaaaataccttaccaaatgatttaagatcagaaatctcagtcatacattgctcaaccagatgttagcacattgctctctttgtcgctggatgacatgaagcaaactatgagataaaaggacatgtaaccgctagcaacacgaagttgcgagtataccgagaggttattctgaaaaaaatttcactatgttggtgtgaaaaccatagtgtgttcccgtcgaaccactttactcgttctatctaggacctctatgcttgtgtcgcatacatctctcgaaattgtaaatacttatggtcactgaattgactggggatagtcctttgacaagtttggtatacactataagctaaatggtaaaggtcggtcctgaatggacacatacctggagtttatgtagcagaactacattggattccacctttgaaatgcttaccgtaatctatctctgatctactaggagtaa

SEQ ID NO: 86766 - DNA, 462 bp, Zea Mays
cgacattgcagccggctcttcaatcctctacgtaagagcaggtcctttggcttcaatagccgaagaggtctcaccgccaaattcaggcactatggccggttcaatgtagcgcggccggtgagtaagaaccttcacctttttcctcttcggcgcgggctcgcttgaagcagctgaagcaacatccttcccagaagttgcaccctttcttttctgcccccgcggcgggtaccgatagtcagggtacacaaatccaatagcatcaaaaaccctatttagtcttttcttttttcggctcccgaaggccgcagataatgcattatcttcagacttagagtatgctccaagtagttcgtcactggtatttttaacacatttcagccagtcatcgtctggttcgataaattggtctccaaacctgaaggtatatttcaatcgaactaaaccaccttcgctagggttgct

SEQ ID NO: 86767 - DNA, 520 bp, Zea Mays
cccggctccagtcgttcgttccctggcgtgcccaccttttgtacgggctcggaatgactccacggcccgcggcatgtgtctttgcctggtttcgtcggacccgacctatcgggttggtgacgatgcttcggtttcagatcgactccttttcctctctgaaaaaatctgaatcaggtgcagcagcatatatatcggggaggaaataccgaacgtgagattcctggcgtctttacaaaaacattcacaaagattaacaagactagaagacccgtagttgccatacattttcccaacgcgtcgtccgccacgagtgaagacaaaaaggccacgtcttatagacgtgttcgacgcgcataatatatcgatatgtgtatatgtagaaaaggcagtcaatatcacgtaaatcagatgtcccgtttgcgtcgtgcactgaccgatctccggaacgaaccctatttgttcagttatataacttttgactaaaacttagtccatcatcatgatcatgataatacactaa

SEQ ID NO: 86768 - DNA, 407 bp, Zea Mays
ctactaccatgctgaagggcacaaactctcaacacgtcctccaatacttggttagtacaagccgaactagaattcaatttcgtatccacattctcatgaaaaattctccaaaatctggaggtaaactgtgatcctctatccaaaatgatcttcttcagtacaccgtgtagagacacaatccgagccatatataactcagccaattgagatcccttataagtactcttgaccagaatgaaatgaactttagtcaatctctctacaatcacccatatagactcatatcctttcggggtgcgaggcaatccagtaaataaaatccataccaatctcttctcacttccattcgggtatctttaatgggtataatagtccagcttttctttggtgttcggccttaactcttt

SEQ ID NO: 86769 - DNA, 484 bp, Zea Mays
gaaatgtagtagcaggggggattagcgttatttcggcgagtttccgccgcgttggtgggcggcgccgccgtccgctcgatcggaaggttaggggagagccttgggccgttgatctgtcaacgtacgctccggatcagtggtcgatatcatggcttcatttaattaaatcggagccatcgatttccaatccaacgtataccatctcataccgattcgtaaaccacgacgatctaatcgtggctgttcaatccgatctgacggccagtattacgtcgtatcccttaggtcgtactattttacaaaagaaaccctagttttattaaaaatgaacccgcaatctcgtgctcctatgcactgagtctagggaatcttgcgctgcagcccctgcactttccagatttctcgcgcgcagaccagaagtagtgaaattcatttcagaattgatttttagtgtaaaaataattattaaaaacttgtataatcc

SEQ ID NO: 86770 - DNA, 341 bp, Zea Mays
tttatttaagggatttttacaagcgtgtccttagtctagaggttttgcttagttctacccttatctgtattgtctactcagttttccccttcaacacacattttgtgctcagcattcacatcacggggctacgtgagtctttccatcagttagctttcttacaggtggacccacagctcttacatgtgaggcccacttcactgactttccccttcccttcttccaaatccaatcggccgtcagtcggcacaacgaagaacactcgctggggcacactattcgtttccaatctaatctaaatgggcaagctggtggctttccaacatctatgccccttgttc

SEQ ID NO: 86771 - DNA, 708 bp, Zea Mays
gaagaggttaagaatctgctaattataagtatcaatgaaattgatgaacatatatagattagcgatagaatcttcctggttgtactataaagcaaggcatcaatgagtagcttgacctaggtaaagtctagtgatgagtgatgatgcacacttgaagaatttagtactagatatctccacggtaatgtttactataaacccaagacaattttgatatcatatataacctagagtgtttgaatagacatcctgacggtgctgcggttgcaccaaacacgaacttaccctatttaagagagagagagagcattggtgtattcattgtgcactagatgtggtgcactggacatgtcatatagagagagttgcagactggtctgatagcttctacactcaccgaacatgttcgatgaggcaccagacatatcaccggatatgtcactcaaagggggttgtagacttgtgtgagaggtagtgtactcatgggacgtgtcttgtgagacgccgaatatgataacaagcatgacactaagagaggtctacaagtgtgccattgagcgttatactcatcgggcgtgtctgatgagcaccgatcagaacacgctagatatcagtaccggatatgttgtcatgttatatatagccaactaaaagtttacttatactaacatatagctcgtgctaatgctacgatcccgaaggggaggg

SEQ ID NO: 86772 - DNA, 396 bp, Zea Mays
attatgttcgaattgggaatagtgtcaggttcgatgtctagcaattctattacaagggtattcatacccatcctttcccccctcacatacttatgcataatacctctcctaagtactccattcagcgccactaatctgacgttaggcttaaccatcctctggctgtgtcttcgtggaccatcagctgtagcatcagtgtcttcttctgtccatcactgttgtaaccatgtgaaagctttgcttgatggcctactcatcctcccatgtagatagtgatttcggccagctggtatatgcaaacgagagtctagtacttcttcaggcatatgcaaacctgtggatagatctataaatgaatcactcaccggtgtgcgtacacccaatgcttcgaagatg

SEQ ID NO: 86773 - DNA, 349 bp, Zea Mays
tcccgatgcttgtcctggggtggaactggtggtggtggtggaggaggaggcagtggtgcttgttgctattactgttgctgttgggccttctctcctagcgtatctcctctcgctcttggcgcatctcctagcgtatatcctctcgctctttgcgcatatcctgcgttcatgccgcatctgcatgtgcatatccaccatggtgtctgccatatgttgcattatccacatctgggctgcaacttcgggatcagctccggctggtggaggctatggaggatccatctcaggttgttgttgttgtggttgtctaaatatcctccgagtgtgtcgattgggaggtagatcaatt

SEQ ID NO: 86774 - DNA, 1092 bp, Zea Mays
atcttatgaagctttctaaaagctggccttagatttccactgcataaggcgatagttgctggtttgatgaggtttaacatgtaccttcatcaacttacaccaaatgtcatagtgtgctaaggaagtttcatctaggctttgtgaagccaaggcattgagctcgaaggtgaagccctttgcgaggccttttgtcagattcatgaactacactttcaaacgaagacaactaaaggccttcacaacaacttcgggtgttataattttgcctaccagaggggtgctgtatttctggctctagcataccgaagtaagtggtcaaatgagtgggcaaaggagtggttttacatgaagaattatttaaaagagcattatgatataaagggaatcattgagactcctattcatacatactttggctttaaaaaaccaaattgtcggccacacacgacggcgcctgagcctggacatcggcgccatggttggcaacccagacttcttcgctctagagtccaaccttcgatgcggtaggcgctacatgtggggaagatggtgaatcaaacggtagggttccacactgaggacgggtgcccatgccccgactgtggtgagaatcgggcaatcggcctacaacccgcactaactctggtgagcaggtttcagcagctgccccaaagtggggactagaatacagatcgaacctactcgtagagtagaccaaagagaatgacagagagggtcctcaccgagattcgctcgcacaggagtcctgcccatggcgaacaacggcttgcggtggcgcccttgcaacggcgagcaatcaccgaccccctggtattgattctcgcccgacgaggcaaactacgcatgtagcgggatcctacgacgcccctgggctacccattaaagtcagggagttgaccacagggtagaccgacggcgacggcatgagctccctcaccggtctcacttctctctctcgggtctctcagattttttgattggacgatggtgctgcttgggcgaggaggcaaggatgggtggcggctgatatctaggcaagaattatttaaaagagtatatcagttaggtcct

SEQ ID NO: 86775 - DNA, 830 bp, Zea Mays
tgctcgataccatccgcagagggtatcacatatgctccagaaacatccgcagaagaggaagctcccagagtgaaattaacagaagaaccccacggagtcgcaggatgaggcagacatggagctccaaactgggatggtacaggagcggtcggtgtaggagtgggcgcagccaggtactgagggaaacctggcataggcacgaactgaggagtcctaggcatatagaactgctactgagagggtggtacagaaaattgttgctcagcgcttgacatcatgttgacagtgccctgcgaagaggaaaaagtcactagctcccatttaagtttcccattgggattcctcctacacaccacatccttgtgatcctggctgcagatagagcacctgccactccactgacactcggcacggcgatgcgcttcaccacaacggaaacacaccaaccccaacccaggcttaggaacagccggatacctctgagtactccctcctaaagtacctgattcagagggtttgccacgataggagtggtggcgctggtgttgtgactttcccctcttgtgggttaaacccccaatgttgcccctcctcgcgtcctggccacgaggatgatcaacccccaaggtcttctaagattccaagcatggtgtactgatgctgcatctccacgcccaatgcctgctccaccgtagtacaaaatccaccagcggaaaggcgcccaaagcatgcctgatagagggtttcaggccctgacggaactggctcgccttttccaattcattgtaagccacatgaggaacaaaacgtaccatcttgttaaagcccac

SEQ ID NO: 86776 - DNA, 758 bp, Zea Mays
atgaatactaatatgatccgcttttaactcttcatgacgttggcactccaaagctgtatcaaatctaagccaaaactcaacaaaactcaatttccgtggatgaaacaattgaagaatgaatttgagctttcagatcttggagtagttctgatgactccttctagaggtatatccataaaatatgctgggatccatgactcacgaatttgatacttatgtgccaaccattcattcctctctagactataaacaatcatgatagcattccatcgattctcaaattcttccggggtttctgaaccccatacacaaccattcaaatcattccaaaaatccttgttattgtttgttggatggccaactttctcagacatcttctccataatgtgccacatgcaaaatctatgagttgtatttggaaaaacaattctaattgctgatttcatactagcatcttcatcggtaatgataagttgaggagcttttccatccattgccaacagaaaagtttggaacaaccattcataagactcaatcttctcatttactatgaaagcacctccaaaaaagacactttgcatatgatgattcacgcatgtaaaaggtgcaaatatcatattgtattgattcgtactatatgttgcatcaaaagataccaaatcaccaaaatgagagtagttttttttgcttgtagcattagcccaaaatatgtaaaccaacttgccatgctcatccacaacaaaatcatagaaaaatgc

SEQ ID NO: 86777 - DNA, 828 bp, Zea Mays
gcgagggggctatcaacaccgattttgtcgatgcacttcatgtcatgtttgcttgccccactctaggggcactcaaaggcaatatgggagtacactaccatcaaggaccacatgtggctcctatagtgtcgtgactttagccttcctccagacacgatggaggagatggtaaagtttttgcatcgactcaaaaaatgctagtgacactgatggggatgttcaccaattttgatgatgatgcaacctatgagtatgtggcctagtacatgcccctttacaacatgactgggctagggatcccaaccggacaacctctattcattatgggccaaggttctaggacccatggtcagcccccctttgaggatagtaggcctctagtagtatggttaccatgagaaagggaaaggaggtcgctctgaagggcactaaccctagcaattcgaggaagaagagagcagtccgcactagtgacacttctatcccaaagaggatgcatcaacacatttactcaaaggcccctttcatgggtcctattgctaagaagaacagaagccccaacatgtttgttaaacatgatttttaatatatatttgcctcttctcaccatcttttcatatgtttttaggttgacgatgatcagtgcccgtagaatgccccaattttgcaggtagcttcctattttgtccccatgggtattaaagctaccctactagaggagtatcgcaagaggtgtcggccctagctaatagtgaggggcgccagctatggaagatccatgtgtggttttagtagttgagacaactagtagactaatctctactctag

SEQ ID NO: 86778 - DNA, 1165 bp, Zea Mays
tgtacatgtgtaatggcttgtatgatgaggttgtgtgccttcgcgcactcggctatgctcgtgagggcgttaagtgcttggtctgtgtttgttatgttggtctggtgcgcatgtagtcggcctttgtgcggacagtttggtgtagccgtttttgcacttgttaggcttcgtgcggctgtaccattgtaattggttcgtcggacttgatgcgctgtccctgctgcaccctgaggtgacttctgcagggatagtgttcgcggcaaattagagttttacgcacttattgcgctagtccggctgcacccttaggcgacttctgcgcggatagtcttcgtggaagacttcgatttttcgcacttgttgtgctaatccggctgcaccctttaggcgacttttgcgcggatagtcttcgtggaagacttcgatttttcgcacttgttgtgctaatccggctacaccctttaggcgacttctgtgcggatttgtcgcacgcgagggcggctgctgccgggcctcgcggtgactttgtattagtcgaatgtcgaagaccgttgaagcggtcttttttcgacgtggattttgcgggggatttttctcttgtatattacatgactccgcctcgttaaaaacctcaccccccgggaggaaaagagtgcgggccagaacaaaattgtttttacaaattacaagggcgggctggccctgatgagtcaaacaaaaaatttgcgcagattatcaatgttccaggaatgctctaagtcttcgccgtttggcgttgcaagcctgtatgcgcagggggaggccttcgactttacaatgtaagggccctcccacatgggctccagcttgcctctggactccgttcgagctgtccggatgaggacgaggtccccttcgctgaattcccttgggatgactgcctggtcgcgccatgcttttgtctgggcttggtatttgtccagggcctgcagggcgaagacgcggtctccgtcgatgagatccttcgaagttggctcatctacgtctgggacggccgacgcggctgtccgaggcgacccatgctttatttcttgcggggtcatggcctccgacccgtataataggagaaagggggtaaacccagtcgccttgcattcggttgtattcagtgcccagaccacttcgg

SEQ ID NO: 86779 - DNA, 367 bp, Zea Mays
ctgttttaagcatgccacatagtttattaaggcccttatgaattcagtggccaactcttagcttactgggtagcctagcttctccaacctctaactgtaacaaaccattttgattgcatgtggcccaactgttgcgccttctgctagcttgcattccagaaaagctttggacacattgaaccttttagtcctagcttgagtctagaacatatccttgagcgccacgatcatatcgtacgcctcatggtttgtctcaaactgtacctgcagctcaggctccatgcaagcaagcatgaggcaactcacttcaagattagcatccattgctttcttgtaagtggttttagctgcagcagttgcatcttca

SEQ ID NO: 86780 - DNA, 379 bp, Zea Mays
taagtttgcagccatattttgagccaacaaaacataaatgggccctatcttagttgtcctaatacttgtatccttttgtgaaacaacgattgcattgttaaagcaagtaaatcacccataatatacctgcaaaaaataagaccttcactcaatgttggtaacggactgataaattctatccaggatcataagagtaataatccacgacacctttaatagttgtctcgcatcaattaggcatttcagtccatgaaaacttgaatcgcataaattaaacatgagttgatgagctgatggggtgcagatgatactaaaatacatgggacgagtaccaaagagatggacgcggtggccataaaaagaaaatttttctctgatt

SEQ ID NO: 86781 - DNA, 834 bp, Zea Mays
gccattgcgtcagacatcgaggaattaccgacactagtgcatggcatgacagcagttccagcagcagttttgggagtagtagatgacacaataggggttgcggctgctgcatcactggtagcatgtggtagccagttctagttcaaggtgtccctttgtgaggatcaccggtgggttagcgttagtcactcaacaattaagccatggtccatggaagaccacaatcatataagattatacaagtagatacaaagtaaatatggagtgggaactatgttctcagttctcaccttcctgtgtcgccgtcgtcacctgaactttgaggcggtgaggaggaagtcatggtgcttacggcaatgggctgtggctggagctaggcatggatctgcagtggccacaaccgctaaattagatggaatacatggatcaataaataaacacaatagcatggattttctagttcgaacctatgagggatcaataaatatgacagctaatcgaatggtgaagaccaagattcttgtattgatcaaataggccatccaactacgtttatttttacaatgctatgtttatgtttgaaaatgtatctatactaaacttagactatagaccatctgtgatgtgtcaggtactcagataggaattaagagatacctgtagcttgtaggcgaacatgtggccacaaacctggaatacttttggtgatcgcgtggaatctagagcttgaaccttaaatgcttgagcgatccttgcagcggtgataggatgtgcatgtgctcctgcactgcaactagtgcggcgagtaggcgatgcttggcctagactggagcc

SEQ ID NO: 86782 - DNA, 721 bp, Zea Mays
gccgggggacaacatcagttggttgggggtgctagcttagagatgcgccgcgggaggaagactgagtatcttgaaatccctctcaaagatagtatcaagggatggcgcttggagtggttcatagttgagaattatggaaactctctcccccctcggtcgggaaggcagccggatgttcgcaccccaagctggatcgagtcccccacagatcaggaggtagctgaggcaggcgctttgctggctgaagttggattgctgaaggagaggggtctgactgctgaagctgtggttgctgattttgtcttcaagaatattcagctgttgaaagacagggcatacccggcttatctgtatcgaggcctagccgactcaactcgggttaccaacagaagaattccctctgtggacttggtgaaccgacttgagatgatccttagaggcaaagtgtcaaatgttggtgccccagtggcatactcagcctggaacttgcctcctcccaaagcctttactctttttgtatcgaatccacctgtcactgatggcagtttgggccttagagtgcggccctcagctgaagaagttagtgccttggttgcctcgctcggggagattcctgatgatgaacggcaggtccattttgaggtgcccctgaaccctagtgatgtggagataagcgccatgcttgatttgctggctgaggattcttctgatgctgctcctg

SEQ ID NO: 86783 - DNA, 766 bp, Zea Mays
tctgctagtgttccgccgtttgatggcacctcggcacctccggctttaggatttcctttgttcctttctaaccttctggtgagttgatccttaccctactttaccttggtagacagaggactcctttgctatttcttgtatttgcagaatgctctgagctttttgtcggctcagctgaggtcatgcggtgcccctgtcctcgatcaggttctatccttgctgtagtggaatcctctcctacttcaaaaatagatagatgacctgaaagccttgaacatcggttagtgggttgataactttctttggtgtccattgctccctcgttctaccccctgtatcttttcctcttgccctcccagctctaattcgacggtgttccgacgatgaggagaggtgtgcttagagtcaagccgatctgaatcaggtttctgcattcctagatagtgttctaaccatgaactcttccttgaatgctcagcttgattcagagaagagagcccacgagataaattcttttgattgtttacaatacctttgtgttgcgcttttgcttggatgtttagtattcttcttgtctgtaggaggagatgcgaagacttcttgattcccgagacagtctggacaaactgtaccatgatgccagtggctcccttactactttggagaggagtcatcgttttactatgttggagcttgaccgccatagagacgagttgaaggtttctgagaacgaagtgtcatggcttaataggttactgccttcagg

SEQ ID NO: 86784 - DNA, 576 bp, Zea Mays
tgtccgacccaaatctataaattgaggcgatgggagttcaggtttatgagcttcaggagcaggtaggtgtgcaggccatgactattgcaaacttggaagaccagctccatgaccttaaccttaagctggaggaggctaatgatcacattgagatgcaccactaggaacaagtcgagatggaggctaaccttgaagatgttgatatggatgaggaggaggaagacctataggagattgagggtgtttctgagttaaccaccgagagtggagcaccactgccaccagtcaattgagcacacccctcggcagggagtgttatgttagttaataattaggatagattagttagcaacgaatgattggtatgctcctcggagtagccaaattttggttcttggggtgtaactggctaacctagactagagcattcctttgcatggtggtaccctatgttgtaaggcaatttttgtgtaaacagggcctaacaacatggtatgtgcaagcaactgaaaactggttgttgttgttttggaaatcataactggtccgaatcctcagcatactatattggtattt

SEQ ID NO: 86785 - DNA, 946 bp, Zea Mays
aattgttgagatgtatgtgtcgacacttgtagcttttaaataacacaattctccagttgacatgaagttattttcttatgtacccttatgattcgtcgtgaaatcccaaaacgagaatcaagggcttccggtaacctagcctcatcagtgcgcactgagctaggttgtgaatgtcttccattcacaggataatcaatatcctttaggtgtccaccaacactaggttggttaccaacgaataaatggtctgcatttactatctcagaaggtctagccttcagctgcttgcaagcatcttaatcccaatttgtgaccatacttctccccctcttatttacaacaacgttgcaatagggagttaagtgggtttccatgtaaccactctttctggcacttccacataggattaatttgagtgacacctcatagtaaatgcacatggcagttaatttgcaacttcttgcaaatcatttgaacccaaaggttcagttttagtacgtgatcctgagcctgaatgcttaatgcattcattataatttcctggcattcattttggtactcgaaatctccccctaatgtctggaaaagctcatgattcaagcaagcgtacgagccgtaaatagattttcatgaagagattctaaaacttaatgatcgacggagaataaattctcacataaatacccagttttctgtgtgcccatatatgtacgctacggtggtgagattgggaacatacccaatgtacgcatgggaaatctttcatggatttccacgtactaaaaagcataggggaacttgtacatgcagtacatgcagttaatcacaagtcaggagcgtgcaaagcttcctgactccaaccataaccagttggaaatgacaatacttactgatggtcattaatgatctgaaattttcgaatctatcacagattcatcatatcctt

SEQ ID NO: 86786 - DNA, 1339 bp, Zea Mays
gcttgaaagcacaatgcaaccaatgaatgttcttgtgagcgctagacctgatggtcattgtccttgttgatctgaagtcaactacttgctccaaacgacaaatggtatgcatgagccctaaagtatttttgttttaatggctgacatattattgcgcgtatcagtctaaatcctgatgattgactggtatatttggtgataataacagtaagtttgcagaattgtaaccacaaagcgacttgttgttgcgtgtcttgctggaagttgagactaatccttcacgttgaaggacaaatatgtagtattcatgccactacatcaatctaagtccaaagctcactgcataaaacccctatctgtaatgtgcgtaagattcccaaataaatcgccataatagcatacattggccacaaactagatgattgtggttggggattttatctgtatgcttttagaacatctcggtattagggggagaaatgcccatattgtgtaatgcctcaatattctattaaacgcacaaaatccaaactgaacctgtcgttcggtgtgtactcctgtgtatatggagtttgccagaaatcgttgagaagtaaccatattggtctgaatgcttctacctgatgtagatgtggatatacccgagattaatatcgtatccacatttgacttattgccatttgatctattctcggggacgcctgcgaatatgatccattggccttagtcaaaacacgtgttctgattgcatattcacgtggtctgcaaatagctctcctccgatgaactcccctgctggtgatttgcctcatgaagaggttcatcttgatgatgaaattcctagcaatgcgcacaatattattgtgctaggaatacggaacaatgaatctttcgttttttgggaaatgatgaagatcattattaaatgtgggagacaaatgtgtcgacaactatcttgcctctctagattgcaaacggatccaaaacaaagtcctaggcacgagtgcttgaagctatcttatcgggtcattgataaatacaatcgaggctgaaccaataatcacaaaatgaaagtcgcgagcttgaagttcggacatttatgggcactattgaaataatgtgtggtgaatgcgatggttcaagtggtcttgtgagagatccatcccacatatgtgttgaataaacaatgttgccctatgtaatatatctggcaaatggcatgaattaaaatatgcagttaataggattctgaagatccatcatgagatcctaggaggactcatatctttgaattataaatatgcaacatataaatctcgtaccgaataatacattcctg

SEQ ID NO: 86787 - DNA, 664 bp, Zea Mays
tttgtgtttgtttttggttaaatgggctgctgggttgcgtgagggtgagagacgtagaaactgacatggggaggagccatgggcccacctgctagagtcctgggggcagaacatgaggcagaaccacattgcacggatggtctacattagtcttatagagtagtagagatatctatcctttatagaacatacacaaatatgagctcttacagttttaagatcactcaagtctcccaagtgtacaccggagaagtttgagaaaagtcctgatgatgaaggtggagagagctcatagattttgtggtacggtaacattggcgggacaaactccatcaacatattcaagcttcctgaagcacatgaagaaaatgaaaattaagtcattgtagttttatttttccaatttgtacaacgacaaccatcttaagaagcctttctcaataaaactgtgggtggtaccgtcttaccaacaatggtgccaaatgtaaccaacaagaacacataaagtaatgatatgtgaaaaaagtagcaatagataatatatatttggaaccagcttggctccgttcggcagcataggaacagttccaagccaggaactgtttcaggcctggatttagtgcatccggctctttcgctctttctagtccagaattaatccaat

SEQ ID NO: 86788 - DNA, 420 bp, Zea Mays
gctcacttaggatcccaaaagttctctttgtttgaaaaaaaaaacaagcagctcccaaaagctgaagaggaggtggcttgcatgtgtttgtaccgcatagattagtaccggtggtttaatttgtgaatgatccagcgttgtcagagaacaaaccatgcaagtcggtgggttaatcatttgctcaagtgagcagtagcttggttatgcgagcatcgagcaaccaaatggagtttatgcatgcatcagatgttcgatgtgcgtgctgcaactaacggctgcaggcccacggtatccccatcaggcaatcaccacccacccgtcatgttcagtccccacgctaactaggctctcccatgagtgctgggatcttctacgaaaccatacacgggcccgtcccgtttccatataagcatcgcttcg

SEQ ID NO: 86789 - DNA, 333 bp, Zea Mays
gcacaattaaaactcctgaaggaaacataatcaaggcagttgacagttctgcagctgtcatcggtcgtgatactcttgcaaagactgtttatgctcgactatttgattggtatggccatgtcccttcgtgaactgcttttataatttttcaaggcggtgctcatagcgttgctactgcaggcttgttgacaacattaataagtccattgggcaggacatggagtccaggtcacagattggggtcttggacatctatggttttgagtgtttcaaatataacaggtcagactttcggtctttctttcaaactaataagcagaggcctattattcc

SEQ ID NO: 86790 - DNA, 614 bp, Zea Mays
ctcttccctttactaaaggagggtgaaataagttttactagcagcgtcgtaccggaggtgccagtagccttagtgtgccagtcgctcctcaagatggcctcactggcaacaaaatgttctctgatgagttgactcgcgtgcttgactgagattgtactttatctcttctgtcagctaagctctggtgaattcctccggcatcaacgttagcacgatggttcgcccaaccgagcatgtccccgattcacaaaactatatagttgggaacctcacagttagattcatagtagttaatagtttgcttaaacaaactgacgtggttgtttgatctatgcaaaagatggcactggttgttggttttaatagtgaaatatcatcctaaccatttaactagctatgtccaacatattatgtatttatttctctaaatattgtcagctgctctacaatacaaattacatggttgcctcactatccgtttccaacaaactttttggggtaaaatcaaactgaaattcggcgatggctcgtccccttgcaatcggtcttctacctttcagtttctcctccttagtgtggcttcgcatcaatctatgcagagaattaaagcaaat

SEQ ID NO: 86791 - DNA, 726 bp, Zea Mays
tggtgggtcttgccttctctgcacctttcttgcaccagggttgcgctgactacgctgggtgatgctgcaatgtagagtagtaggggtagagctggatctaggctagttaatgtcgccagatcaaataaatattgctttaaggactcgaaggctgcagcttgctttaggcctcgggtggagtccttggctccgcgcatcgttttcaggaaaggaaggcttcgctcggcagaccgtgaaatgaatatgtttagtgcagttagtcttcctgtcaaccgttggatgtctttggttgattatggaggggccatgtccattatagcctgtattttgcttgggttttctttgatccctctttgcgatacaaggtaaccaaggattttgccttgtcggattccaaatatgcacttctccgggttcaagcgaagtctagcttcacgcatattggcgaatgtttctgggaggtcagaaagatggttgtccttgtttttgctcgcaacaactatgtcatcaacatatgtgaaaatgttgtggcccatttgatcttcgagaatgcttttggtgagccgtgaaaatgttgacccggcattcttgaggccttcgggcattcgcacaaagcaatatgtgtcgaaaggcatgatgaaacttgtgttggccttgtcttcctctttcatgtagatttgatgatagctcaaaaagcaatctaggagagacatcgcttcgcatccg

SEQ ID NO: 86792 - DNA, 289 bp, Zea Mays
cgaccatgtattctgtaagatggaaatacgtcatcaataaagagagatttcaaagatactcggctcgtttacgattgacttgcattcttacttaactcggggtgaccactatgccctacaaacggagcaatcgacttaagtcggcaacgacttaaggcggtgcaacatgctcacgcttacttaactcggggtgaccactatgccctacaaacggagcaatcgacttaaggcggtgcaacatgctcacgcttacttaactcggggtgaccactatgccctacaaacggag

SEQ ID NO: 86793 - DNA, 830 bp, Zea Mays
acataactttcaaggtatggcccctagctgccgagtgcgaaatgacgaagtatgctggggctgatacaagtcagattgctggaaagagtagtttggttcatttgcattattcttatcggtacataaatcaatttggcgagcctaacgatgactgtcttgattccatcgaaacaacaagtgatgaactgttagggcgtgtaccaaagctgaagacgaagctatgaattctgcctttggtgctcgaggaaagaggagattaaacaaggtttttgacgctattggatttatttacactgattattgcttccctgctcggaagagggggttaaaaaggaaaagtgcattaaaagcttcttttgctgcaccgaagtagaagaaagtaaaggttctgactcatcggtcaaaaacatattattcggagagagcagcaaagttgtctgccttgtcggttaccgcgagcgcgagtaatttaccctcgaagctaacatttttttagctttctctttaaactgccctatcagcactgtttttgaatcctttgaatttttgaacaggggtaggacgaaatcaagaaaacctctgctggtttttccgttattgagccaaagatgctagatctatcgaagatgccagatttgtagaaggttccagatctgccgaaggtacaagaacaaacaaagacaacacctgtcatggcaggaactcccaaaaagggaaaaagaatggcaaatgtgctagatgctgttttgaggcctctgaaggcagcgacccctgccccaccggaggtttctaagggcaagactgatgaagcattgactgatattctaaat

SEQ ID NO: 86794 - DNA, 525 bp, Zea Mays
ggtttgtcaacttatgaaaaatagtacatggctatttttatcgttgtcatgcagtggcgttcatacctccagctggccgaattccacgtatacaccgatcaccaaaagcttggctcaacttaatgaacaacgcctccatacagtctggcaacataaagtatatgtcaaactagccaggttgcaatataagataatttacaataaaggatgcaacaatgtcactgttgacgccttgtctcgctatccacatcagtcgacacaggtgttgcatatctctcagtgtacactaacttgggtgcaagagtttttggatgggtacaacaaggatccacacgctcagaatttgatagcccagttggccctcgccccccctccttcatctccttacacacttaagaatggattgctacgttaccaaggccggttgtggttaggtgctaatataacactatataatacaacactaaattataggaacaacttccaaccactacctattaccatacccatcgccctatcattttt

SEQ ID NO: 86795 - DNA, 504 bp, Zea Mays
ctagtttagtaggtggttataagttaaatgatattagtcataatctggtttggttgttttgcttctgaatgtttaggataggttatgtaacctattatgtaggtcaggttgttgggtatggccgagttgatctaatttaccgatttaagcttaggtgaattaggagtatggtcttatttttgtaccatcattaagtaactcacactatattagatcatattagattaaataggatctagattagattggatatgactagattaaactagttaagacctgataaatctaccagggtaggatatatattattaggatatgttagaatcttttgagataggatggattatatggtgtaggtaggtcagaatctctgatgggttgaaacagagggttatgcaactatcagatggttaaggtattaactggttaagtgactgaccttaggttagctcaacttaaggttagacttcgttaggttagattaacctatcacattagatcatg

SEQ ID NO: 86796 - DNA, 1360 bp, Zea Mays
aaaactttaaccttcttcggcttaggcgcggtggaagaggatgaggctgccattttccttttcaacccttatttttgggcaggaaagcagcaatcagaataaaaaaatccaataacatcaaaaactctattcaacctcctctttccacgagcgccgaaggaagtggtcatagcttcatcatctgccttctagtaagctcccagtagctcgtcactggtagcttcgacagcctcaagcgagtcatcttcggctcatcaaactgatctatgaaacggtaggtatatctcaggtaaaacaaatcaccttcgctagaaccggcagcagcctccttcggcatttcccagtcattgacaagcggccataccttgtaagcaatatgctcctgtaccaaatccctggtaccaatgtaagtacacacattattgaaagtcatcaaacactcttgcacttcgttcccacttgcaattaacggtcttctaatgtcgaagcatgatcgtatgggatgctggataatacccttcacatcttccctttcactcagatcattcttgacatagaaccattgtttcatccaagaactcggccacttctttcggaatgtcggcacgagatacatcgcatcagagcagtgcacaaagatgtagcacccgaagttgttgtgatattgtttcttcccaattgcttttgtctagtaggataattcatgaatgttgcagaaacacttagcatctagctctagcccttggttcctcatggcccaaatgaaaaccccactttaattaaatcttcgggagtaagctgacgaaggtatatctcaaatgtatttaacacttcaaccaacatcttgtgcaagggaaaacgaagcctagccttcataaaactcttaaaacccactactttgtttgcttcaggaagatgaacaatactttatccccccagccctcatgatggatatatcatatggaaatactttcccttcatcgcttcaatctgtccttgcttaatagtggattttccaaaaacaacatgactcggccttcatggctgatcttcggcatcttcattatcgctctcctcatcgaaactgtcactgtcgctggaacccccagataacccagcctacatttcaacagtgattttttcaacgttggttctttccatagcttcgtaaaaaccagcaagtgtggggtctacagttttcttatcttcggccatttcgatgatgatcgcagcaaaagtcgaagctcaaaaaatagtttcgctcacaaaagaagagccagatagcacgaaaaatattcatagcacgagcctctgtatatatacacaaagcaccactgagcggtgggtccaacaattcaga

SEQ ID NO: 86797 - DNA, 684 bp, Zea Mays
ctgtactggccagactaagcaacggctagccctcccctttgctggacaccgaattcaaccctacgcgactatttcccctcacttaattgctagatttaagctctacatcaccctgttcacggtgacagcgggcacaatggacagcatgaagtgttcccggcgatctaaggggttctagcctaatcgatcgagtcgagaagcatcaggggcatgtaagggtgttgaaacaagagagcagaggacgagattggacctggagtgcactggccacggaaaactgatttgggagaactgagcaattcggggtttctggtgaataattggaggcacgggtgggtgtgttgagtgcacaattacatagcggagccgagggtgtgctcaatttatagagcccttgagaggtggcctgtgaatttgagctcgcgcggtggtggtcggagagaaggaggtgcactggcgcaagcgattggtggcatttaccgtggcaagctcaacggcgatcaccggatgggctgagatgactcactgcggcgtggttaaagcaccgagtcacgtggcgcaaggttgcagggtggctaactccggcgagcctatccaaattggctgtgactcaggcgggtactgcggccggagtagaatagtggccggagtccatccacgaggtgatatttcgtaccccccttg

SEQ ID NO: 86798 - DNA, 433 bp, Zea Mays
aaatttttctactaaatattggtccggacccatcatcatttgcccattccatatagaatggccaattatcagagcaggatatatatcgattcttgaacctctctctctctctgatctccagagacattatgcaaaagcagaatactagctatgttacaacttactccctccatcatataatatagtgcattcaagccaatgttattaaatcgtctagtcgaccctagttgttcccgatcgtccaccccctagtcgtccaactaatggtgattagtcgattactaatcaggtgaccagaaaactaattggtctaataagttgtggcccctagttgagtctagggtaccgacaggatggctaattgcgatgcgacttgataacattgattcaagcattctaggggacaagatcacattaagtagtagcacaaatt

SEQ ID NO: 86799 - DNA, 1544 bp, Zea Mays
tgttcttattgtttatgtatttacttgttcttattatttacaattgttgcttcaggaatttgcagcgtgcttcgtcttctgcccacgtgctcgctccaccgaatacgctgctacgtatcaggtatgtcgcaggttttgcgtgctccatgttatttcctgtgctttggttaattgttatggtttacttgttacgtttgcacttgcttcatacatccatactctgatttatcctatatgcttctcctttttggcatcttggctttacctccctacttgttgttacctctggtggtattcagaactgattccaatgtgatacctgtgctcttgtcccatacctagagcctccatttgcgattctagaaactgctgaccaatggaccatggaccatgtcagagtactggtccctctcttggaaatgagaggaagaggagacctaccacttctagtttgttcctttggccacattttcctttctatttaatgacttgcgctgtgcttgagtcccctgctcgttgctcgatctgtttgcaagatgatgaccttgtttcttaaccaatggtttccacagacatacttgtattgactccatcgaacatgaccgctcagacatccttgcttaaccaacagtgcatccctgtttggtcgacatttccactaagacctcgtacgtatcatgtacatatattgggattatgatgcatcacacgctcattcttatgctctcctccttgttgtgacctggtaaaacatagatcctagatcgttgttgcatttccctagagaggcttccacctccaatagacaccgtcgaattgaagcgaggaggcgggcacgagcttgtagaacacaggctccatgctcaactctacctgctcatgttgttcctctaaaggactcctacattgctcgcttgaaaggtgcccactaggcgctacagtctccacaagcgcatgtcttacctctgttgtgttctgctgatccattgttgttttgtgttccttcagacaacaatccattgctttcttattatggtggcccaacgcatgaatgccctttttgcggcgccttcttttggttccaggagcgtgtcaagagtgcttctgctgtaactcagcggaggattgtctacaacctttgttgtaagggtgggcggatcaggttggaaccttacaaaaaaccacctgagcctctacgaactcttctgaggtttgatggcgatgctcgctcaaatggtttttgcgccagatacgatattacaactcgcttttcgctttcacctccttgggtgcttccgtcaacaaggctataaacaatggtactgcaccgtatgttttccgaattaacggtgtggttcatcatcgaattggaacgttactacctcgtccaggttcacatcccaagtttgctcagctttacatacatgatcctgatgctgagctacaaagtaggctccacgtatttgagagcgatgatgccggtgctgcttgcccagactccgctattacacagtccttgatggagatgcttgatgtcacacccg

SEQ ID NO: 86800 - DNA, 738 bp, Zea Mays
gtttgggagctcgttttcgtggacagaggagtcttcggatgaggatttagatttttttgctgcgttggatgtggccgcggcggagtccttgtcgcagcctgaagcacacgaagtctctattcccccggctagggcgatgctcgaagagcaccaccgacgaagggtggtgtctaagcacaatgttggcgagatgtcgcgaagtgggaggcgtcgatggatggggatggaacggtcccatcttcggctagatcggggtggccagcgggatttgatgtcatcgacgtccggtacgtgtattggggaggggatctgcagaatctttttgagggcgaagagttgaagatgatgctgtttaattttcgtaaggcaggccttattccgaaggctgagccgatgtagcaagttttctgccctcgctctcgtgttgcggtagtgagtgaaaacgctgccctcccccggctcgcaatagagagggagggcatcaagatgtaatttgtattatttgtgcagtgtggtcgacgacccttcgccatgtttatgtacactacgaggacatgttgtgaaatgggatggcgacctcgctttccgcggcgatgttggatgcttatgatgcgtacctggttgcgtcgtaggttgctttagttcgatcgtgtcagacagcatagactttgcaccttgaaggtgatcgtacttgacatttgtgccattagggtgatgtcgcgtattcgtgcatttccg

SEQ ID NO: 86801 - DNA, 624 bp, Zea Mays
tgacaggggaagggaagtgtcaccatcccgacgttttttttaataatccctgacggagaggacaaacgatgataatcgtgtcgtgtctaccacgatcgggtttcggcgacgcagcttcggagcgtgaaccttcgcagataattaaaggcaactgcgggtcgattaacgattgaccaggtatcgtctgtacgggcttttattcatttgtttttttttttggcaatacagcaaccattattatcttctgctcaaaacgtgaggttcctgcacagcaaccatttctggtcttcccgtccgaaagctacagctctttctctgccctgtcgtgtcgtgagggggtgaaacggaaactgatggcgctacgcggcctggccccaacaaacccatccgtcacggccctgtcaccgagggagcgccgtggattcggtcagattggggtttcgttcaccgccccctgcgccgttgggaaatcgaaacatcgggacagacaatgccgccattgcctttcgctaccaggatactgcatgagcgccatgccgccatggaacgcggggatggaagtgttcagtgcacgagatgtccgaaatacaagaataagtggattcatttgtgcaggaaggttct

SEQ ID NO: 86802 - DNA, 1151 bp, Zea Mays
atcaaacacttttgtgaagtccagcttcacaactagagtgggcagcttcctcttatgacatcactgcacaagtttccatggcatggaaaaatgtttctaaactagtctgaccttttacaaatccaatctgatcagggtctatgagatttaagatctttgtctggagatgagaggtgatggcttttgagatgattttaacattacaattctagaggcaggttggtctaaaatccttcatctctgaggccccaatttttttgggaccagaactagaaaggatctattgatgcattctaaattttttttgcccaccgtagaaagccttcaacatggtaagcactctgtctttgatcgtgctctaggccactttatagaagctagggccaaaaccatcaggactgagagcagatagacttgacatggcaaagactgttgtcccggcctcttcttctatgaagatgtgatctgagcttaagccaaaagtagcttgcccccgataaagagcgttaacatcgaactaccagtgagcagggggacctaagttcgagttttggtggaagtagagggtggttgtagccatcatagagttgtggtctgaaagtgctgcgtctccatcctagatgaacttgatcgcatttcgctgacgacggtagcttgccacggcatgatgaaacaccgtgttggagtcaccatccatcacaacacgtactttacttccttgtttcaagtattctgccttctcgagcagcaaggtgaccaggcggtcatggcacatgcaacgcaggtcgtcctccgacatggaaaggaggtgaccctcttcatgccagtcgaagagcatgatgaggaacttgcaatcatcgatggtcactgagcggttcttgtgaacgcgtgcccacgctttagctctccggcaaacctgtttaaggtcaacagcgagacccctagctacatcacattcgatagcaatagagggcaagcccgaaaggatgcgggggtaggtaatcaaggttgtggagccaggcgttctcaaaacggtagatggatcgcattggggtggaagtggagagggttactagaagggggcgatggtcgaaggtggggcggggcttggtagttagggttgagggcctgtttggttcgtggctaactac

SEQ ID NO: 86803 - DNA, 1090 bp, Zea Mays
gccgcgagatgccaacggcggcggatggacacgacccccggcccgcaacgaaacgacccggcctcttcctcgccatccctcctccctccgttcgatgctactagtaggtttggtggtgagcagctagtcctcgactgttgcttgcttctctgtacgcgctaggcggtacagtacagctacctacactgcacaagcaaggcgtcaggcatgtcggtgttggtgtttggtggtcggtgaagagtctgctgggctgtgaaccaatggagctctagcgtgcgtggtccgttaaaaaaatagtcaaatgggcgaagttatgccgctataatttataaagataaaaaatatcgtaaaaatagtagaattctgtacgtattaaacccaagttgatgatagcgcatcgccggtctgcggctctggcctgatcctgatcttgcgcctcattcctcgttgacttgttgctatcgcaacttggcgcaggtaaacgaggccaaagcatacactatagtaacagtagttgcagagggagagagagagagagtggccagcagtagttagggcgtcttatcaattacttgctccgtggcgaaacgcaatgcacatgccgcagccaaggctcttccagtagtcttgtctgacctcaacaataacaaaacatgatgatgatgatatcatactctagcaaggaaaagaagctcttgctgccacgctgcaccttacccaaacgcgtttgttttctcacgagaggaatcggaacgcactcgatcgcttgatcggtcgtcgtcttcttttggccccccgcccccggccccaagtcgcagcgccgacggattggccaccaaagcaaaaagcaaaccgactccgtttttttagaccagcaagcagggtgaactgtctcagcatgtactaagaactggtagactcatactgtcacggtacttggcgtgtaaatacgtagcacaagctgcgattatacttttgaccgcaggcttttcagcccaaaaaatctcacacgtatgccgatcgaaatgagtactagcgtgctccgcccccgcctcgtctcgtcgcacgcatcgaggcacggacacgcccc

SEQ ID NO: 86804 - DNA, 1493 bp, Zea Mays
aagagattcaatcttgcaaccaaagggaccagcaagaagttcagtttttttactgtcagtgttgataggaactaaacaggattttgcgtagttgattcttagccctgttgatagggcgtaactctcgagcaaagcttttaagcagaaaagctacctttgtgaggctttcatgacaataattgtatcatcggcatattgtataatcggaaatccagccccatctctgggcggcaaggggagctgaaggaagccaagttgatgagccttgttaatgatgcattgtaacaggtctgctacgagaacaaaaagtagcggtgagagagggtctccttgcttaacaccccttttttgctgtaagttcttccccgggactccattgagcagcactgcagatgttgctgtagaatatatctccgtgacccaattaatccaataattagggaacccaagttgcctcataatcatcttgattgtattgtgttctatggtgtcgaaggctttcataaagtcaatcttcaagataatgtattcatgctttgatttctgacattgataaatgtattcaaaggcccacgccaaacaatcttgaattgctctagatttaatgaacccatattggttagtgtggaccaagggtataataatcttttggagactgtttcccataagctttgtgatgattttaagtgctgaactgctaagggaaattgttctgtagtctccaatagttgttgggttgctgactttggggatcagggttatgaaagagctgttaagagcagtcaactgaacttggccactgaaaaatttatcacacaattggtatatgtcatgcttaatgatttcccaacaactcttgtaaaaggcaccgttaaagccgtctggaccaggtgctttatttgctggcatttccttgaccactttgtcaatctcatcatgagtgtaggactgcggaagggaggttaagtctcttggggcaatgagatgatgcagatcgaagagcatcggtggcgttgtggtagacccaagtctgttattgaactcatcccagataattgcttctttacaacgatggtccgttatgagcgtaccattctgatcctcaagcccagttatggtgttaaacctaaaccgctctgttgctgccgcatgaaagaaactcgtgttttcatctccaaatttggtccatctgacagtgtacctttgtctccaaaaaatcttttttctttccagtagattcagggtgtgcttcttcaaaatatttctgaagttgaactcttgtgtatataggggtctgatctcttctaatctatccaatacaaggagaacattgttgcaggagcttatggtgttattaatcgtagatagactttttccccagcgttttagcactcgtcgcaaaagcttgaatttagctgcaattcttgaggcgatattgttagctctttggttaatgttccagacctgctgaaccaactcagagaatccaggtt

SEQ ID NO: 86805 - DNA, 729 bp, Zea Mays
gccacccgatcgaaatctggcggcccagattagatcagagaattggcatgtaatgaagccaatctagaccgttggcacatggatcaacggtcaaggttttacgcgaccattatgtaatcccatacgcccgatctggaatcaacgtctacggttgcatcatcctaaaccagcatacagatgagatctcgaccgtctatcccaggatggacggtgtagagggcttcatcatccaccgtgaggcaacacctgagcacggcggggcacaagctcatgatgacggcgttcatgccggcgagttccaaatcgaagtcccccggcgctatttcttacgcagtttagggcatcgcgaggagcagagggaggcaaagctaggggtgggattataccagagtagtaggccgcgaaggcacccgcccacggcaggatgcagtccagagctgtccgccgagctccggtgaacaattgctccaatccggttgacccagtgtgcgattacccacaggagcacgtttccccaggtgttgtgtatagctctgaaccgatcccggtcaccggtggacaccgatgatggagacgcacgacggcgacaccaacttcttcgtttgcgtccacggtggagtttttgtgcgggcgctagttcaacaggggcgagagggcgatgctgtacgctagtacttatacacaacggggagggtccaagtggttgcaacaaccccaagattcccccgt

SEQ ID NO: 86806 - DNA, 1109 bp, Zea Mays
gtgacaggtgctttggaggcagacgctggggcattcttggggccattcaccgagttggagtaagtaggtcctgatgccttcaactggggcagttattcttgaagtgactggggtctccgcagtggcaacaggcatttgctggtggttggttgcttgcgattgagggggcctgaaaggagctctgactctgctgactgaaacatgatggagtgggtccagctggcctattgaagcttggtcccttgggtggaaacccaaaggatcgagttctctggtgccggtcttgctgctgagctcgaaggacttggaatttcctcttgaggtgacctttctcttcttcccttgccctctccacttgtatggctttgtttgagaggtgcgagaagctaaggaaatcttggctggcaaggatggtcttgagttctggtcttagccctttcaaaaagcaagccagcttcttggcttctgtgctgacgtcgtcaggcgcgtagcgagccaattcggtgaatttgtgcacatactcactgacagatcttccaccttgagttagttcccgaaattcatcttccttgagctgaacgatcccttggggcacatgatgttctcggaaagcagtttcaaattctgccaaggtagcatctctgacggcaacgctgaaggtatcccaccaggttagggccatcccggaaagttgatgagcagccaattgaacacgctgattctcgtggcatccgatggcttctaacttccttttcatcgtgcgcaaccagtcatcagcatcgaggggattgctggattcagcgaatgtgggaggcttgagccttagaaaatctcccatcctatcatgtggtcttccaccattcggacactgattctccagacttctagtgaggacttcaatgagtcgggtttggttggctagaacttgggctaaatctaatggcagctctggaggcgcggagaggtgggtctcactcccttctccaccggcttctccttcagctcctaggggaaaccctactccaatcccagaggcggtaggcgtggttttatccgaagccatctgccagggggagagaattactactatgcatatgccaaaaataatt

SEQ ID NO: 86807 - DNA, 524 bp, Zea Mays
ctggggagtaactgttgcccatatttgattccaatatggtatgagagctagggttaagggggagcgagatcgctggccaggggcctttgcccacgggtgagcaagaagaaggatttttttgttaactcctgcttaattcaatcaataacaacataatacacctggcattacatagcctggccctcgtacatgatgaactaacaaaccaagcaggaaactagcaatcttgtctaactaacctgatctgccaacttagcagttaagaaactaaacaaactaatgcaggtagatgggttatcctggaaccctggatgccaagctagcagcacccatgcctgcgtccataacacttcatcccgccttgataagcagcttgccctcatcaagaggcagcaacttaccagcatggcaacaagaggcacggcacgacgtaacaaaaggcatcggtctcgacatcatctcagaataagcttaagatcttgttagagacttgttacctatttcccagcagattagttggcttg

SEQ ID NO: 86808 - DNA, 299 bp, Zea Mays
cgcggagtaaggaggagtctggttcttaaattatttgcactcttctaattacttttcactttcatctcatttattcgatctaagaccaacacggtgcccatcatgcttgacatgttaaaatttctcaagggatatgatttgcgagcgaaagagaaaagatcgtttttataaaaaaacacaacatgttagtttggactactttcgttgtgtgcattcactttcacgtcatacgtgttcgcactaccgcttcgactacctagtcatgcactactttataaggccatcaggaaccaaccaac

SEQ ID NO: 86809 - DNA, 290 bp, Zea Mays
aaaatgtagtaaggaagattggtcatttggattttccaaaatccccaaaacagcccatgaagtaaagcctctaggataaattcagaaatttagaaaactgaattttaaacccttcccaaagttcagatgtgttctctgttttccaaaactcgaatccataaagtccaatcatcaaagtggtgccaaaataccctaggaacactctggtgaagtttgaaatcaaaccaaaatcgcttgacacgatttgacatgggttttgtctcggtttgaacagtgcagacagagctatc

SEQ ID NO: 86810 - DNA, 925 bp, Zea Mays
tgcacgatagaatatgaatcgtacagttgacctccatgactctgacttcacttgtttctatgtcatattttgtagatccaaagcaataccagctagcattaaatatcttaacatattaaagacagcaaggtaaactacaagcttccttgttcagttagtctaatcaatcaggcttcagcacatgtttaatgtccgaccagagattaagctgccaatagcccaatcaaggctgggccaggccaatggcaataccagtggataagcccgatgaatctctgcagagagagagagggatgaacttgctggcaatccacaccaacttaaataccaaatccagtttcacaaatgggagatgaaaaagctcatagacccaaatagtaactaccaagttttgtttcaattaatcacgaaaatgaatatttaagggcaaaacttctaaaatggccttgccgatacaggaaaaaaaagttgctgataaaaaaaactgaagcgacctatcaattaaatccaatccaaaacaaaggacaaaattagtaagatattcaaaggttctcagtcctcattccagaattctgaaggtggaagctggcagaacttaatggcataaacgatgaaaagagctaccttgtatattatatgtaaactaggataaattagtcaaaacaacacggaagattgttctagcaacctggggtagagcttcagtttgtcatcagggacagtcgaccccaacagattttgaggaatccaatggaaaattagtgaatatagtgctaatacttcctaatgaccccacctattttcggacaagactctgatgatcgtctggcctagactcgcccctgctagtaacaatctatcattgccaagtgtgtccctgcttctccctccctcctccctcctctcaacaattctaacactccca

SEQ ID NO: 86811 - DNA, 300 bp, Zea Mays
gcccattcgatgtaagaattatagcaaaaagggtcattggaccaaagaccattggagcaagcctaggagccgtgagaattaggcccatgtgatccaggctaaagatgatgaggctacctaggaatttaccatattcttagtaagtttgctggtgtgcaaagtcaggtaaggcagagctcagggtgttcatgtttggggtcggtggaccgttcacacctcacgttttctaatagcttttcaaatggaaagtaactattaaagtgaagggaggaccgtctggccagagggctcgggccatcc

SEQ ID NO: 86812 - DNA, 271 bp, Zea Mays
aaatatcggagtaaagagcgtgagtgtactttatgattacgtactctactagatacctccttgcaaaggcctctaaagattgtgtttttgtcctaggcattccactcctcataatgtatttcatctcctatgaggtttgtgggatccttaggttttggaagcccttgggtggcaactctaaaactccaatatctatcacctcaaggtatgcacccatatgaattttccaatatggaaaatcatcaccctaaaaagtagaggagatttaatt

SEQ ID NO: 86813 - DNA, 669 bp, Zea Mays
acagtatcctgacgagctttggaatttaaacctcggacattccagctcacaatttttgacagattcatggataactatggtgtaaacaaccggggccagatcaaagaaaaaggcatgaatagccggctcaacacacattcagctcaggggctgtccagccgaagagggcagcaagtgcctggacatgagacgggggaaggggctgatcaaaaagtctgctgtatttttgcaaggcctcctgactgacgccttcgttcacatcgatcacctgcagtgctctcattaccttcttcctgaatctgttctgaccatcaccaaagacagactgaaattccactccaataccagcaatgcgcctactgcggcgtggaggtgcagcagaagaattatcgttccccggtctgacaggaagaggagccggtaaaatgtgatccgtagtccttataaccatggaactgaaggaagacccaggatgaataggggtggccaagtcaggtgtctgcgaaggttcatcagccagaccaatgtccgagatacagcaaggaacagaccgaggatctgccaaggtatccaaccgatgatgttgcgtcctccggccccttctaaaataaaccttcacaggcatgcagtaccgcggttgagggggagctggtgaaaactgggacaccg

SEQ ID NO: 86814 - DNA, 542 bp, Zea Mays
tctaaagttgcaaagaagatgacattcgaagagcagtttactaagaagaaccttaatgaacaaaccaccaaattcaagcaagccttaaccttcgcttcaccccgggaggactccgacccgaatctcaggacgagattcctttaagggggaaggttgtaacaccccagaaattctcagagttcttctcaatgctaactcaagaaccattatttcatgtgaatcaaattgagcaaaagacaacaaaacttgagagcaaaaattaaactaattcttttgtcttaggactcatgcctaaatcatatcatgcattcaaaatgggggaaaatgtttaaaccctagaagaaccctaattaggccatttaagtagaaaggaagaaattggtaaaaagaccataaaaacatggaatcgtggcttaggccaattataaaagttgaaatgcactaattaatctacaataattgttataaaagtttggccaaaataattgattaaaatccccataagggccatccaagtggaagctctctagggaaaaatctga

SEQ ID NO: 86815 - DNA, 450 bp, Zea Mays
ttggagagatgagcctcatccaaaattttcctcttcagatcctgatccttaggaattaccaatctgtttttaaaccataacacacctttctcatcctggcggaaacaaatatacttctcaaccttctgatggagattcttcttgataatctgcactcccttgtcactgagctgggccatgataatctggtcttgcaaagctggctcaacagaaatgtgagacaaagaaccagaagaaatcacttcaatttgcatcttgctcaactcatcacacaaggtgttaatgcgagaatccatcagaatacagttgcactgcaacttccgactcaaggcatctgctaccacattagctttccctgggtgataatgtacctccaggtcataatccttgatcagctctagccatcttctctgtctcatgttgagatcagcctgagtaaaaatgtactta

SEQ ID NO: 86816 - DNA, 584 bp, Zea Mays
catgcaaccaattttaaaagattactagttagttacccgtgcgttgcaacgacacatagattatgatttgataaaatgttgagcatacatgagaaatgtagacatgaaggaaaaattaccaacaacagtcagatcatattgggacatgaaatagtagtaagagaataccatatctgaactacgtacgtgataaattgaattacatgataatattacttcacatcacatgcttacgaaactttcttgtcatttcttgttcgtcttttgtccatttttcttgaccaaacaacaagcatgaaacttcacaggaaggtgagacgataagataaccgtgattaggatctcatggatccccacacacgacgcaccaagcctagaaaggtacgcctgcaagtaccaagagtacacggttcagctcatccttccaaactacatacgcagccatggcaaaagagcatcagaaaccagagagaagcaaccttaccacaacagctgacacagcttttattggccctgcccgtgctcgagttcttggcattaaaatcagatcccagcttcatttttgataatctcgtacaatatca

SEQ ID NO: 86817 - DNA, 479 bp, Zea Mays
tttagctcggtgagcctgagaaaactgtaagagtacaataaacgcagacagtaagtcggaaatgcaaaaattaagagtttagaattcgaaatgacctcttcttcaacctgtttgatagcttcatccgctatctcccttccaccatttagccaaatttcagaataaaatttcccccctaagctgacagcttcggcagaaggttctttcacatcttcggctgacactacgaaatccagttgaattacaaccttcgcatgttcgcagccagctttctcaagcaatgacactgctccactggcccctacataggcgcagtaatcacctcgactggcaaggacttcgtcaaaagcctcgacttgaccctctatccttctaattactccttcgataatgcaccaactttagcaaacatactcttcagcttattgaagcattccatagcgacagacaaacaattttctttcggttgacgaagctct

SEQ ID NO: 86818 - DNA, 341 bp, Zea Mays
cccgacgagaggaaaaccctttccccccatgcatggatggcaatttgtgataataatgcctagctagctaggatcttggagaaggtgacgttcttcctactgaatcgtacccccatcaaccaatgttcagagcttcacttaattctgagggtgacatggctgccaaatgctggcagagagcaccttcaccttggttctgtgtgatcatgccacgtcgagtgaggttttggcacctcttgaattaaccgatggaggaactggggattcctatgtagtatatcacaattgcttgcattaattggtccccgccacgagagcgcaatgaaaaacttccatgggcc

SEQ ID NO: 86819 - DNA, 519 bp, Zea Mays
atgtaaacttccatagtgtttctcaacaactcatgaaagatcaagttcatagccctctgataagtggcaccgacattttttaaccaaatatctaaacaacccattcaaataaaccactgcagccaggacatataaatgtcattttatatgcatcttccccgggcatgaagttttgattatacctgacattaccatcaataaaagctaataactctatttcctgatgcattattaattaacatgtcggctataggcataggatattcatctttaggagttgctctatttaaattgcggaaatcaatacacaacctaagcttaccagactcctccaccgatacaatattagagacccactctatgtatttgcatggtctaataaaattagcttcttagagccgctggatttcatcctttatcctggggagtgagtctagacgaaatgatcttggtctcttcttaaagggcctgaaactggacctaatagtcaaccgatgctccactagctctcgtcttaac

SEQ ID NO: 86820 - DNA, 512 bp, Zea Mays
aaatctaaaacaaaaaaaaaagaaaaaagagaaaacctccatgcggctgggcccaaagtctgcacctcggcccatcaccccctcagctgcatggtccagttggagagtcagcaccgacatttaggtcccacaggtcattcgcagtcgggtgtccaactggggaggaatcgtgccgactgctgggaccatggtgtcagtctcttcctccacctctccttttccccctcggagtgacttacatgcgggtctggtgggttgtcaactcggctggtccgtgtggcgcggcttcatcactggcaggtggacccgatccgtcagccctccctccaacaaccacgccgaccatggtggaacctcgccgtaggctctgggagtcagttgcagtccaactacccacacataaaactagtagtgccgcgtccttcccatccattactctggctcgcgtccactagaaggatgttgtgtgagagagaggggaggcttgaacctgttgtggccgagaaagagga

SEQ ID NO: 86821 - DNA, 902 bp, Zea Mays
cgacaaacgatttggcagcgtgattcgcacgagcaaatatgtggcggcgtcggcagcagggcacagaaacatctaggcaaatgggagaaaagtttccttgtgttccctataagggttttattagtctaccaaaaagcctcgagaaaccaacagttgcatagtaaaacgtcagacatctcaacggtcacatcccaacggtcacattacaaaacaccccctgaggccacttcaatctgtgatcaagggcaagcttcgaccatctcccgaaaatagacttcggggccagctcacctagttgaatcgatctcttggggactagtgttggagcgaaggtcgaacctgaccttgatcaaacctatatggctatcattaaccatgtttgagagtagggtcaacaacgacggaggactccatcccgctccagcgtcgaagtcctcaacgatggccgtcagagaaggctgagcaaagggccacataagaagagggggctcgcagtaaccctcaccacgtgcctcgaaggctcgacttcttcctcgatagtggagtcaaagccccagcgaaggcaagggtctgacatacaagcgaaggcctcgagagccttatgtggggcctagacttcatttcgttgtggctcgagccatttgtaagccccttcgaggggtagactttagggtatgtttaggtcattgtaccatactgcgttgtaatgaccccgttgtggggaatattctgggaatgtagcaggtaaccgggggtgtaattgtacttgggaccatctagccgcccggttacctataaataccctcgttctatacatggacaggacatgcataccaggacgctacagttccctacctattgctttattgtgcacctgagctcttccatttcctgagtgtttg

SEQ ID NO: 86822 - DNA, 291 bp, Zea Mays
ggaaatcttggctggcaaggatagtcttgagttctggtcttagccctttcaagaagcgggccatcttcttggcttctgtgctgacgtcgttaggtgcatagcgagccaattctgtgaatttgtgcacgtactcactgacagatcttccaccttaagttagttctcgaaattcatcttccttgagctgaacgatcccctggggcacatgatattctcggaaagcagcttcaaattctgcccaggtagcatatctgacggcagcgctgaaggtatcccaccaggatagggcca

SEQ ID NO: 86823 - DNA, 1403 bp, Zea Mays
gtggtcaccccgagttaagtaagcgtgagcatgttgcaccgtcttaagtcatcgtcgacttaaaccgattgctccgttagcagggtatagtggtcaccccgagttaagtaagcgtgagcatgttgcaccgtcttaagtcatcgccgacttaagtcgattgctccgttagtagggtatagtggtcaccccgatttgagcaagaacgcaaaatgaagaattctcgaagcctttttattgatgatgtgtttcctggtttacagaatacattgtcgccccaatagcttttgaaatatagctaaggataaaacttcctgagatgttctatgttccatgagttcccgacttctgtgccatccatctgtgtgagtcgatatgatccaggccgagtgacttcagctactatgaatggtccttcccatagaggtgacaatttgtgccgcccctcccccgttagaattcggcggaggacgagatctcccactgcgaaggatcgatgtcgtatggccttatcgtgatagcgcttcagagtttgctgataccgtgctgattgaatcaccgtgtttagtcgttcttcttcgagtacatcgacatcctccagcctagtagcctcagcttctgctatgttttcaaagatcaaccttggtgccccaaacttgagatcagcaggtagcactgcctctgaaccatagaccataaagaaaggagtgtttccatgcagggctctactaggttgagttctcaggctccaaacaacgtacgacaattccctgatccactttcctgcgatttttcatttttgtcgaaaactttctttctgagcgcctctaatatcatcctgttggctctttctacctgcctgttggctcttgggtgtgccacagaggcatatttgatctgaatgcccttttgctcgcagaagtcgaagaactctgaacttgtgaagttggatcccaggtcggtgatgatgttgtttggtattccaaacctgaatattatgtcttgtatgaattccactgccttagctgaagttaaggaagcaatgggtttgaattctatcaacttagtgaacttgtcaatagcaaccagtacatgagtgtatcctccttgagcttttttgaaaggtccaatcatatccaatccccagcatgcaaatggccaagttacgggtatggtttgtagttgttgtgccggtagatgctgctgtttcgacaagtattggcaggcttcgcacttctgaactaacttggctgcatcactttttgttgttagccagtagaaacccgacctgaagaccttcccaaccatggtcatggatgctgcatgcactccacattgcccagcatggacctcatctagaagttgctttccagtatctaaaagaatacacttcatgaggactcctg

SEQ ID NO: 86824 - DNA, 319 bp, Zea Mays
attatgtgtacctcaaggtgtcaccacttcgtggaatgaggagattcaaagtcaagggcaaattgtcccctcgctatattggaccattcctgatctttaggtgagttggggagatgacataccaactcgagctacctactagtctatctgatgtgcataatgtgttccacgtatctcaactgaagaagtgtctctgtgtccctgaggaacagttaccaatggaagagctcagtgttcagggtgatttgacttacacggagtatccgatcaagattcttgacactttaactagagttacaagaaataaggtgataaagat

SEQ ID NO: 86825 - DNA, 565 bp, Zea Mays
tgaaggtgaggggcgccagctgctagctttatcggtgtgacggctacggccgttggtcgggattgggcggcagccggcattggacgagcacggaggtggatgtgaattggccagcatgggcggcgagcaaaccatgtgaccatgtctgccctgcgtcaaggaacagagagaaaagagcaaagcgggtgggaatttaattagaaggatgctggttgatttaacgagacgtcgctggtaatccatttgccaccacgggcggcagccatctactggccagaggctggtagtggcagactatgccaggaatggggtgaaggagagatggcgtgtgcgggaaaatggagagagagagaggctgtaattgaggaggggctgattactttggagctaagtaatatttattttatttctttgagacaagagctcccgtatgagttgtttatcaagacggtgacaatttatgggttggagaggagtggtcatatgttagccgattcgcacaacgctcactcgttggctgagaccgacgcagggaacggagcgaggtgacatacagatgaacgag

SEQ ID NO: 86826 - DNA, 455 bp, Zea Mays
gtactcagagtcaagctgatctgaatcaggtttccacattccttgatggtgcccgtgccatgaattcttccttgaatgcccagcttgatttagaaaaaagagcccacagggtaacctcttttgagtgtttatagtatcttatgttgtgcttttgcttggatatttagtactcctattgtctgtaggaggagatgcggaaacttcttgattctcgagacaatctagataaactgtatcgtgacgccagcgtctccctcaccactttggagaggagtcaccattttaccatgtcggagcttgatcgccatagagacgagttgaagattttccagaacgaggtgtcatggcttaataggttgctcgtcgcgagattctgttatcagagagttgtgtgcctcgaagaagtttgtttcgcaggagttagaggttgctcgtcgcgatacggaggctgctcg

SEQ ID NO: 86827 - DNA, 365 bp, Zea Mays
gcagcacttcttgcagcaggttggggaagtgccccgtctcgaacattgatgtgtaatgttcaacaacaggaccgaaccccatgaagttgtcctgctgggcgtagtcagcttcctcgtggacgtgttcgtctccaccttcgtcgacgtcatcatcctcgtcatcgtcgtctccggagtcgtcggggtcgttgcctccgggtgcaggtgcttggaaggctagtgcagacgatgctgacgtcgatgacccagctgcgaaggccagggactctgccaacggggtaggcgtcggcagctgttcctccgagctgtcctccaggttgactacattctccactcggatgggagggagatccgccggaacttcc

SEQ ID NO: 86828 - DNA, 300 bp, Zea Mays
aggaagatcttatctaggtctgattaaagatagaaaagaattagtttgatatatcccagtgatagtatagttagaataggagccacctaagttagaatccctgtcatgctataatcatgatcatagtatccatccctatatatactcaacaccctatgcctaataggtcagggcaaccaacttaaacatggtgttcttttctcttacattgtaatcagagccaagtcctccacccaccttaagaaccgtagctgatggaaacaacaagtcttcatggtgtctaactcaagctctattgtg

SEQ ID NO: 86829 - DNA, 418 bp, Zea Mays
ctattctcgcattggatatttgggggagctcttcaagtggggttccacgggaaccaatgggagagacaggtatccaatgggttgagagaacattacaaattagtgatgactgctacgacatgttccacatgcggtgaactattttccatcatcgccatgatacattggtgagcgagtatgggctcgtaggtagtcgtggagttagtacgaaggaagcgcttgccattttcttgtgggcatgcgggggtccacaatcatttagatagacaaggaacaagtttggtcactcattggaaactatcaaccgcaaatttagtgaagtccttaacgcaatatataggatgtcatctaacgtgattaagcctcatgaaggacatttcactgagattcaccctagattgcgagagcctagattctg

SEQ ID NO: 86830 - DNA, 654 bp, Zea Mays
ccggagctcacttggtggggtccgaactctatccaatggctccgggctgctttacttcgggggtccgggttgtgcgcacaggggtcctgcgccttctgggcccgatggcgttgtctccgagaacgccaccttaactgctcacgagatacccctggggttgttctccgcgcggctagggatagccgcacaggcatcatgccttcataccgtagtaaggggtacccctaatccagggtaccaacagtcgttgagcccctgttcatcatggtcttgtggtcaaatattgttgctattaactaaatcttcttgctttattcatcatagatatttagttgtgtttctttgagtttattcctcattccttgaaagcaacacttttgtaagaataggaattagtactatacttcgattattatttatcttgttctaaccgctaaccgggaatcaagtgttgtttgaagttgtaatttttagatttcgtctattcaccccctctagtcaactatcaattacgatcagcactacactagacaaggacgtaagcctgaactgatataactcactgtctcacacccccttttctggaatccccacgattcaccatttggagtgagttcacgctagcattcttgtcgaatacaaattctattgtcc

SEQ ID NO: 86831 - DNA, 763 bp, Zea Mays
tcaggaaattttactccttttagtagttcacaaaataatgtcttctcagacgtactcatagtatatgatgctggtggtaaataaaacttgtcacccactggaataggatgaagctcatttcgaatgcctagggactgaagatccaaacaatatttcaagttatccttggacttccgctgaatgcctaggagggtgttgacaatgttatcacacacattcttctcgatatgcatgacatctaaaattatgttgtaacattaaatccttccaatatggaagcctaaaaaatagacctccttttccaaatgacagtaggctccccttccttattttttgctttctttttatgttggcaacctttcccatgcactgcgtgcatattctgtgtttgcaataaaacttcctctccagaaagtggtctaggcgctggcctgtcctcaactttaccatcaaatgaatttggatcaaatctatatggatggtttgggtccaggaatctacgatgtcccatataacaattttttgtaccttgtttcaatcgtagagaacatgtatatgagtggcattcaatacatgctacttgacctgatgtagtacatgctgcaatgtaccctaggcccggataatcagatatggtccatattattgcagcacgcaattgaaagtactcatgctttgtggaatcataagtccttaccccttcaacaaacatatccaacagatcatcaattagtggctcaaaataaatatctatatcactacc

SEQ ID NO: 86832 - DNA, 900 bp, Zea Mays
gtcgttgcgaagcacccatataggctagggtttgaagtcttgctgcaagtttggaatcggagacgaaggcgtctagtcgtgtcgtctcggagataggcaaatagcagcagaagaccatgaaagtgaacctgagccagataggcacatagacagagcgtagtgtccttcgcgtggacgttttcagtcatgtcacacgctaaacgtggtcctgacctccgccggcatgtcgcgtgtgattgtgagcgtgtctggtctcggtcggaaacaatctgcaaagttgtgcccccgaaggtgcatgcgcacaaggagttgagagatagacaagtttcgccacaagggatctagcgaggctgtgtatatctgtcgatttcagatggacaaaccatgcatatatcactgaatttatagtgttatttcttgctgcccaggaaaaaaaattgtggcgattccactagctaggaaattaaaccacaaccgtcgtcgtcactttaccctaaagccatgttccatgaatgcgtggagtgctccttgctaataaaagaatccggccggcaagccattattagagatctttcggaaacaacgcgatgcatcatgtcccatggcacggacaaagctaggttaaaggcgccggtcgtacgtctaaaccgcatgctaacagcgaacaaaatcagtgtcatcaagcgagatatataatgcctgctagctcgtagcttggtgtgtgcctccgctgcatgcatccatcatgacgcgtgtatgcatgacagccgacgcctagtacatgtagagtctgtttattttgtttgaaatacatttttttggtttgaaagctagccttctaattgttgaatttttattattaactttttttaaaaaaatatcttctcagcgtaacaaaac

SEQ ID NO: 86833 - DNA, 921 bp, Zea Mays
taagaactggcttacgtgctcatgcgtgcttttcccgccttcacctgaaaatttagagaaatctagtatcctagttccgagcgaatatggcacaacgtcaaatcggtgactataaggtttctgatatgactgccctgtgcctgacacactaacaccgagtttgtctctgaacaacccgactaccttgtgcctaatcttttccaccatgtctggtgacacccattaagtttgggggtgaaaatcttagattgcctgacatcattttgtcggctttcctcctagggatgttcgagatgtgtgataggtgttctattaatgccaccacctcccaccctatatctttcgggctctctggcggtcgaaaattattcgaccctgtgtacatgaggtggcatggcatggttataatatgctgtcagtggggtaacgtagttctgctgcgatgggtgcgagaactgtgcatattgtgcagctcctagttctatgtacgcaaacccggactgttcggcgtaaggggacgtacggtccgtgactgggccaaatggtttgaggttatatccggacgttccgaccatatatggcgcaacctgggtggtatatgtgcgggtgtgtgttgggtcggatggtccggtaaaatacatcggacagtctgcgatgtatccagacggtctggcgtaaggggccgacggtccgcggtgtaggcggatggtctgagatgactttcagacggtccagctgtgtttagagccggtcgtgagcgtgtcgaaggcagctagaatggtgctacggacgtgttcatcggcataccatatgatggctaggccaagggtgacccatttgtagccgatgtgtttggcgtgggtggatccatattagattcatgcgagggaaaactaggggaagtagatttctcatatgaac

SEQ ID NO: 86834 - DNA, 823 bp, Zea Mays
acaagtttctagtattgtttttgtactcaaaaatcattttctacaataaattctgaattttcttaggcttctggactgggggcacaatttcacagaatccgagggggtcatgtgttaatttcaggacctctatgcgacgattctaacagcctactgtactgcgggttgaatccctgattctgcagggactattttgcaacttgacacgcgcgaattggtaagtttcattaccagccgccagatcaaaatcgaacgaccccgattagattctcatcgtatgccatatgaacccttagatcaggaatcgagggcggcgatttaaagtaaccgagatacgaccccgatcctagatgcggggatcaacggtgttcgcttagtggggaggaaaggggtatgttgtcttgatcccggccgtttgatcaggcatccaacggcaacggatcgtcttcttatccaaaaggcaggacgcggcggagcagtgcgcgtgcggcggcgctcacgcaggagagagaatatcggcgccctggccaccgaatcgcgacacggggagcagcaaaacgaagcaaaggatcacgcagaccgcatggacaggttcttaccccagtagatagctcggacgcatgcgaccacgatgagtagcgacaccaaggcaccgcgcgaccacggcgagggatttcctagccgcagatcaatctcacacccgccaaccaactcaatccgcttccgcatatgccgaggaagactccctagtagtcaatccaggcaccggcgcaagcttgccgcgaatcgatgatggcagccacgacggcgtagctgaaatcca

SEQ ID NO: 86835 - DNA, 1021 bp, Zea Mays
ggaaaacagaataccttgacattcctctcaaggacaacattaaagggtggcgccttgagtggtttattgtggaaaaccatggcaagtccctcccccctcggtcggggagacagccagatgtgcgcactccgagttgggttgagtctcctactgccttggaggtaacagaagctagggttctgcttgctaaaatatgtctgctgaaggagagaggtctaaccgccaaggctgtggttgctgactttgtttttaagaataatcggcctttgaaggacagcatacccagcttatttgtacagtggtgttactgactcgactcgggttaccaataggagaattcctgctgaggatctggtgagctgactagacatgatcttgagaggcaaagtatcaaatgttggtgctcttgttgcctactctgcttggaacctgccacctcctaagtcctttttcatttcgtgtccaatcctcctactggtgatagtggtctgggtcttagagtgcgaccctctcctgaagatattgaggccctggttgcttctctttgtgatcttcccaatgatgagaggcaagttcattttgagatgccagtgagtccagatgatgcagaaatagatgttgtactcaatatgttggctggagaatcttccgactcggcccctgctgaaacaattgttgttacggttataccagagcttgacaaaacagtggacacccgaaagcctgagggtattcgcccaaagcgtcctcaccaagtcagccgcccaactgcgcctgttgaggagaagaagaagaaaaagagacggcttcagcggctgtcatgcttggaccaggatgttggcccttctgctcctgtttgtgaagaagtaccagcagaggtctttacggaagttgatcccaatggtggtgtatctgtcgaagctgaccccaatgggtgtgaccgtgcaccagctgaccccaacgagtgtatccgtgcaccagctgaacccaatgggtgtgaccttgttgaagctgaccccaa

SEQ ID NO: 86836 - DNA, 518 bp, Zea Mays
cccaaaacagaacaactcactcttgtggaaattaatcttaagacctgaagctagttcaaaagcaaatagaagaagcttcaaattgcgagctttgtccagatcatgttccatgaagagtatagtgtcatctgcgtactggaggatcgaaagcccaccatcaactagatgggggtgattcccacaacctgcccgtccaattttgtccgactaatgaaaactttcagcatgtccaccataatattaaataggaggggtgacaaaggatccccttggcggagtcccttttttgtttgaaagtagtgtccgacatcatcattaacatttacagctacactgccgcccgaaatgaaagtctcaatccaagaaatccatttggacgagaagcctttcacccggagtgtttgtaaaaggaacgaccaccgtactttgtcgtatgctttctcaaaatctagttttaggattactccgctctgttttgttcgatgtaattcgtgaattgtttcatgaagaatgatcac

SEQ ID NO: 86837 - DNA, 1634 bp, Zea Mays
gttttgttcccatgtggttgaaatgagattttacctaaaggcttttaatgaggcaaccattgcaaacaactcctttaaaagtatggtgatatgtttttatcattgtatgaacttatggatatggcttgatgttatgaactatgaacatatgggcatgtttgtatgattgtatgggcactgttgctttgtctgtatgatcatggaggtatgtatgaatcattagtttgttgtttacactgctgcttatggtctgggcatgggcgcatggcttgttgttaagaactgctttgtctgaatgaaccattagtttgtttgttgtttgcactgcattgtatatggtggatgtgatgtgcattgtatatgatggcccgacacgatccagttaaaaggtattagtgtcatgcttgggctcgtactcaggcccaagtgtcgacacggtccggcccgacacataattgtcgtgcctcggctcgactaagttggcccggcccgtgtcgtgttcgagccgtgctgacctggcatgacccattggccgagtatagtctcgaccaatatgacatccccatgacccccaccataaacggcacacaccccgtcaacgccccgtccgattgagagggaattatcgggttgacgaggacatagagaccgaagcgtgtgctggtgcaccgtgcatgacccaatcctattggttatgcttgggtcgacccttaggcccatgtcacggcacaagcctagtatagtttatatagcaatctgttaatagcccacgagaccatacacatataagcaatcaccttgcgacctcgccacggtcggcacttgctttggcccgactaaaccctagctttctcaatttgcattctctctctcccgacccactcaccacactgtcacctttagaacagagcttggattttctggtagatcacatacgtcatcacttggatcaaagaactccaggttatgactatttagcttctgtattctattattgtctaggtctgtttgtttaagagttttaatagaggattattccactttatctaaactatctcccagctgcatgcctaatctgttcacgtttttttgcacacatactgtttggaaaagcaaccaaggactggggcggtatggactgaaacaaacctggtgacgctggtggagacaccacagatggggaaggctcggcctgtccattattgtaggaatagctagccgcccatgcaagttctattcagcctgccttttcatcgctctgaccaccatgtcctcatctgcgtgagatgtgctatcaatagttggacacaattcgtcctcaagctacgacggggacagtttgacattaccagagagagagagagagagagagagagatagagtgctagcaataggaggggatgcaaaaacatgtaccacctcaccgttctgtcgtacttccctctgatcaacttcacaacgttcaaatttaggcaaggcgctgtggctgaagtttacaatattctgcaccacctcactgtcttttgtagttccttctgatcagctttaagttgttccaattcaggcaaggcgctgtgggttaagttgacaattgttacctcagcttgatcaacagatgacactttttttttttg

SEQ ID NO: 86838 - DNA, 843 bp, Zea Mays
tcttcctctaaggggaggattggatctcctcggttcttggactctaattcttctggtgtagttcttggaggcggaattcctaaccgttctaaatttcaaatttcgaattccagctggtctcgcccccgcaacctccaatggcgccccgtgcgtgctcgcgggcctgttgggctgctgggcccgtcgaccttaagctgtcatttctgtaagggccggggacacttggttttttttgtcccaacaagaatacttccttcggttctcctctgacttcgttccctgactttgggagtcgggccatcttggtgggaaaccaaaattctcctgatcacagtacctggtttcgtacccctgtggtgtctctgatcggtggaccgcccatattcagttgcttcgaggagttcgcccgggaggtattaaaaaaatctgaatcggcaccccttcagtccctgacgctttctttgggcgtcacctcaccaaaaccccaacctgctccgtcttcgtccgctggttggcgatcctcggttcctgctccgatggcgtataggcgtgttgatcctgaaccctttctcccgccgggcttcagcgcctcggtggtccttcaccgggaaattatggccaggtcagttactaggcgcctcccgccattgcatgaggactgggctattatcagcattcaacctttacctgaccatgagattactttcccggcggtgagggatgtggttagagaataccttgtggagcacagacggcttggggtgcgcgatatccagcggtcgcacctgggtcaggttctggttcagtttagcagcgtgcttgaaagagacaatcttgtcctgc

SEQ ID NO: 86839 - DNA, 342 bp, Zea Mays
acgcgtttggctcgtctacctcatagtccacttctagcatcgatttgcgtatcgcacatacaaaagaatatgtacgccaaataaataaacatacaccagtacaggggtaatcattaatcattacattgtcattcatacatcacacttatcacactcataaatacgtcttaaagcgtaaatacttattaattcattatgactattactgcgagtcattattgatgaaattatgagtaggtggctataataatagttttatcttgtattaatatgtattaacattctttatgaaaataaaggccaattattttctttattactaataatagactaatagatttt

SEQ ID NO: 86840 - DNA, 954 bp, Zea Mays
gttaggaacgttctgccgctaacccacaagcaattacaacatttagccaacaaatttccgtagataccaccatcagggcgagtttggtggcaagggaattgagggggattagagggaccaaaatagccctaagggaacaccgaggagagagcaagaacttcgacagacaatagttgtcaggtaaacactgagcaagaacttcaagagacaatagttgtcaggtaaacattgaggaagtaagactgaataaagttggaaactagaaactggagcgaagaaggaacaacattcagacttaacaatcgatgataaaggttatatgaacaactatacgagggggtggattgtacagtttagggctacaagttcgtcgagccgtcacgtgcatatggatcaattgttcagtgtcttcaagagagtcaattttcggtgttgtcgtcaatcgttgatattgtcgattcattaacaaaagatggtttcgagaggcagggttgatttcggtcatcaaattttactcagtggtgtgtgtgtgtgttctatctaaaaaaggaaaagcttatgtcgtcgttgttcctattcgcagaagtcgtgagaccaacgctgctacattctttgcaaaccatcaactgcacgcggatcgagaaaaagcaacttagtttctcttatcttcctaccgttgattcatagtggagagaaatcagacttcaccatgtttgctccacacacctaagtggattgccaggagatttcaagatcactgctggacatacatagattatgtaatagtatgtggttttttattagggttacacctaaattcgtgtagattatatctttcttctggttattctgttatttctttgccatgtcgatgaaatatggtctttcgcctctggactagagatgacaatggataaaaacccgctgggtattacttgcccaaactcatacccg

SEQ ID NO: 86841 - DNA, 564 bp, Zea Mays
gttgtactcacatcccccataagtttgtgagtgggtgcatgatggtaaaggaagcaaggtatgtggacgacatcgccaacagacctcttcctcactatgagcctcaatcagttgcccttcaagtggcgaccaacaaggaggcgctccccaataagctggcgcaaattgaggcggtcggccttaatgaggatgaaatggtgcttgtaataaagcgcttcaagaccattttgaagggacgcaaggactacccccaacaagaacaaatcaaggggaaagcgttcatgctttaagtgtggtaagtctagtcattttattgcttaatgtcctgataatgaaaatgatcaggaccaagacaagaaagggaagaagaaggagaagaagttctatagaaagaagaagggcgaggcgcacatcgcaaggaatgggactcagactgctattcatccgactccaacggaggacttgtcacctctgcctttaacaagtcttctctcttccccaatgagagacacacgtctcatagctaaggaaaagaaggtacgaacatgtgacactcctaagtac

SEQ ID NO: 86842 - DNA, 370 bp, Zea Mays
gtgagtaagaaccttcacctttttcctcctcagcgcgggctcgcttggagcagctgaagcatcatccttcccagaagttgcactttttcttttctgccctcgtgatgggtagcggtagttagggtacatgaacccaatagcatcgaaaactctatttagccttttctttttccggcttccgaaggctgcagataacgcattatcttccgctttagagtacggcccaagcagtacatcacttgtagcttcgatgcacttcagccagtcatcgtctggttcgataaattggtctccaaacctgaaggtatatttcagtcgaaccaaaccaccttcattggggttgctgatggtttcttttggcatctcccag

SEQ ID NO: 86843 - DNA, 572 bp, Zea Mays
acagcgtctagcacgctggccatcctcctcctcttgggagttgcggtaggacctttttgcatcttcggcaaatttgcctctgccggtgggctcagaatttctggcatttttactgtttcttccacctttggctcttcgaccgtatcatccttagcttcggctggcccgactgtaggcaccttcgcattacaatagactcttcagcgctctgcacgatggaagcagcttgttttgcttcagtagttgaagaggtccctttgccaaattcaggcactacggccggttcaatatatcgcggtcggtgggtcagaaccttcattttcttgtccttcggcatagcagtggtggccgaagcgacattttttctcttcttcccttgccttcgcagcgggtagtgataatcagggtatacgaagccgattgcatcaaataccctattcaatcttttcttcccttggcccccgaaggctgcggacaaggcatcatcttcggccttggaatatgtcccgagtagctcatcgctggtagcttcaatgcatttcaaccagtcatcatttggtttatcaaacttc

SEQ ID NO: 86844 - DNA, 759 bp, Zea Mays
aaagatctggggattcagtgaacttgccgccggcgacccctgcgggtggattcatgccgccgtggtgattcgtgctcggcgcgactggataacgctgagggagtatgaaatatcccctagtggatgaactccggccactgttcactccggctgccgtgtccgcttagccccggccgcttcggatctaccctcgcctgagttagacacctcatggccttgtaccacatgcctcagctttttaaccacaccgccgtgactcatgatagcccattcggtgatcgccggtgagcttgccacggtaattgccaccaatcgcgtgcgccagtacccctcctcctctctggccgccgcgtgtatctttcaaattcaccggccaccgctcaagagccctataaattgagcacaccctcggctccgttaggtattacagcatccaatccacccgctcgtgcctccaattactcaccagagcccgcgaattgctcagttcccccaattctgttttccgccaccgtgatcaagctctcaccgtggtcagtgcaattcaagtccggtcttgccctctactctcttgtttcagcactcctacataccattgatgctcctcgacccattcaattaaactcgaacgtgctagatcgtcgggaacacccgtgttcattcgttgtttacactgcctccgtggatagagtgatttagagctcgaactatgaaattgatcgaggggaaacgtttgttaggtgttgaattagatcttag

SEQ ID NO: 86845 - DNA, 830 bp, Zea Mays
ggggaggagttgaattgtgcctgcttctgtaataaatccctgggcatgccctagccctatggccaaaatgtaggcactgccagcaacgagtaggcgccgagcaacgaaaagcgaagtgatctggcgagaggcagttgtagcatttaccctgaagctttgtcttgaaggtgttggtacctttcgtgtcttgttgctgctgagacggagatctcttaagattttcaacagtcttgcaccaccagaatttaggcctcaccacactccatccaccttcttccagcaccggggcgtcagccttgtgctgaccgaaatgaagtcggccataacttctcaagtcatgttcgccgtccacagccagctgatgtgaagtagcattgctcgcattgaaattgaaatcagcttcactgcagccaggcggaaaaaccggcgagctgcccactgcccatttcctcttctctgagaccgggatttgggccggtgccagcagatctacaggatctccgattgaagatgtctctgaataaaacttccttgttgattttggcgctgaaggtgacgcagcaagcagagacgtgccatcagcagttgcggcgcgcttctgcagatccaaatctgacgggactttgtctctgcgggaacgaaaaacatggggcgaagcatccttgatctgctcctgcaagcaaaaatccccctttgtagggcttaccgtgagggggaaactatgggtgttcccgtccccagcttccaaaccagattttaaggcgattgtgaggacgggggtggctgcagcggcgatgccgccgggggatggggctggagctggagcggtg

SEQ ID NO: 86846 - DNA, 468 bp, Zea Mays
cccgctctgaagctcttgaaaaccacaacttcatccttcttcggctctggggtagtttcttctccagcaaatcgaacaagtttgctttcagcttctccaaaatagcccagcttcatcatcataggcatgtcgtcttcagatacagtatattttcaaaatctagatgactaggcttcgtgggaatcagaatattgtagtcttcttctctctcaacatcttcaccctcaatcacagtctgctcagcttcgacattagaagtaccttcgtcagccacaacagacctgatcgtttcattacttgtgaaattggtgttgtttcagtggcctcggtttcttccccctcacgagacacccttgcagttgatcgcactctagccatttttgatggatttttacagtttgacgaagctaacccgtttgacgaagttaaccttaaacgatgaagtgttcgcttaaaagcgcagtgcag

SEQ ID NO: 86847 - DNA, 530 bp, Zea Mays
cggctatggtggcgagccacctacaacactgtctccttcgaccggcatggctctgtacgcaccctagaataccatggccggcgggtcttgggaccaggcgtccctcaccagcaacttcaacaccatgtcgctgacgctgccgaactccatcgagtggtatgccgactctggtgctggttcgcacatgaccacacctccttgtctggtccctcctcgattatcgtcggtaatggttccttgttacccattacctccactggctcatactcgtttactactccacggcgttcccttgttcttaatcatgttctcgtgtcccctagcattattaagaatttgatttccgttcgttgctttaccattgataataattgttctatcgagtttgacccctttggtctttctgtgaaggatcttcaaactcggaacgtgatcgccaggtgcaatagcacgggtgacctatacccattcttcccgcccaccatcagcagcacacccgcccttgctgtgacgtctaccctgtggcaccg

SEQ ID NO: 86848 - DNA, 398 bp, Zea Mays
tatacctaaaaatgttgcataaatcgatacccaatttcagagcagtatgagtaattgggtaaaccatgggcagtgataaaaataagctggactatacatctctgcatataaaaatctttgcttggtagcattggcctgatgttgtgcacttcactaccaatataaacacacacatttttcctatgtgcttaaaagcacaatgcaacaagtgaatgtttttgtgagcgttagaccctgatggtcattttacttgttgatctgaagtcaactaatggatccaaatgacgaatggtatgcatgagcccctaaaggacccttatggataaaatagtgttgcgcatatcagtctaaatcttaatgattgactatgcatttggtagtaataacaataagtttgc

SEQ ID NO: 86849 - DNA, 389 bp, Zea Mays
cggtggtaggggaagcgagatcgatgtcgctggtggactttctgttagcctccccttgagatcggtctagggttgaggtgggaaattgagacagtagaacctcttactaggccatcaactcccacctctctatttatagactgcacaatagaagctcaccaatctcgtcttatgctagacactcccgattaggatgcgaggtcaagagtaagccattgggctaactgatggagatcaattctaatattctctcccttgatcttatcttgtactttcaattttataccttttaattcttttcgtattccatcatagattagtgcatagaacatacttcgtcgtcacggtcaatcgctgatagacttatcagctacaatacacgtctctgt

SEQ ID NO: 86850 - DNA, 668 bp, Zea Mays
gaaccactttcgaaaagcgagagttgagcggggatgagagaggcgacgccgcaaaagggagcaagcaccggtgccccgtgttttgtgcagttcgatacagatgttaacactagatggtaacgatggaagaacaacatagaattggtagagaacagcatagggaaaaataggttagagcttggagaagttgagtttgtgtttttcttcttgtatgccccgcaccaggcgaccactcagcctataaaaaccctcacactcgttcgccagaatccagcccattaacccacgacggcccaaagttccttttgttgtgcttcttcacttgatttgaagtcctcgttggccctgtagccacaccgtcaacatgttcactgctgacatttctccttgctggaaacgctgattgcccccaaacagtggcatgtggaaactgattctgcaactccagcacatcctcccatgtagccaattcaaccggcatgtaagcccactgtaccagtacctgagaacatggatgatcaccacgcatgacaaaacgatgttgtattatcttctccggaaaactgaaactgtagtcttcagtaggtaggcaacattggagacacagccagtccaactgcgaaacatggaagaccggatggatacgggacgtagatggcagctgcaac

SEQ ID NO: 86851 - DNA, 622 bp, Zea Mays
gaagtccttcctgaggttgatcctaatggtggtgtacatgttgaagctgaccccaatgggtgtgaccttgatgaagctgatcccaatgggtgtgatcgtccagaagctaaccccaatgggtgtgaccatgcagaaattgatcccaatgggtgtgaccgtgcagaaactgatcccaatgggtgtgaccatgcaccggctattgtccgtatctttgatgaggacgaagaagaggaagaagaagttccgctaattcgtaagaatagccggcgttacagaggtagtaggggggatagtgatattccttctccagctctgtctgctcttgtcagccttcaagaattgtccataacagattttgatcaggcactcgaggatgtcgttcctgaagatatggtgtcggagccgactgctggcgacatgatggatgtttgctctgaaattccagacgtgggattagaggtatcccgaccagtatctcgcgcatcgtcgactttggaaggcagtcttcggtgtcaagaagttggtcaggattgcccgactcccatggaggtgattgaggatccttcagccttagaggtggctgttgcagaaaacccagcccccgagggtggtgctggcggtt

SEQ ID NO: 86852 - DNA, 363 bp, Zea Mays
ataccaggcaaaaagcagtacaagtcagggataatgaaaataagcgaatgtggaaagcctccctatcgaccaattctccctaattatgctaggaactgacacacatgctcatgcgtgcttctgccctggtcacccaatttttttgaaaattcgggtatccaatatgactgcttccatggatcatgttaattccaagtttgtcttaggatgccctagttatttcctcctttactatgtcaatggcgtccggtggtaattcatcggcccttgtgtccaaaagcgtgggtgcttgtgtttctttatgtcgtccccttgcccatgggtttgggttttgttgtgcattaatgctagccacatgcaccc

SEQ ID NO: 86853 - DNA, 761 bp, Zea Mays
ggactggattggtacagaacagccgggtccatcagcatctgtaattgatgtggagcattacagtattgcaggaccaggaacagcaactgaaagtgcagagaatgaaacagaagaaacaacagcagccgatgattcagatccacagtcacccactcacccaatcaaagtcaatggcagatagacactggttatagtgctggttcaaatcagaatacaccacaaggaagtccaactgagcaaggagtggtgtttgccacacccgcccacagatgcagcaagtggagagctgaggttcagaactctagaaagtgtatatgacgacactgatgaagtcactgattttcagatagcggtttgtgctatcttgctgcagaggagcctagaagtgtagatgaagcattagaagaaaagtgttggagggaagccatggtcactgaaatgaattcaattcaggataataagacttgggagcttgcactattaccacctggacaccgagctatagggcttaaatgggttttcaaagcaaaaagagaccctgatggaaagataaataagcacaaagctaggttggtcgctaaggggtatgctcagcgtgagggggtggattttgatgaagtatatgccccagtggcaaggattgagactataaggttgttgatcgctttagctgcacagaatgggtggaaagtgcatcacatggatgttaaatcagcttttttgaatggtgatctgattgaggaggtgtatgtacatcaacc

SEQ ID NO: 86854 - DNA, 709 bp, Zea Mays
aattgatgattgtcgcgatatttactgtccgtgatgttctctgtctgttatgcttgtgtcataacttggagttttcaagtcattcctccgtttgctttatctatgaagtccatccctctggagtagtagttgagtcattcgggcatcatatcgtcgcttttaggggtgatggctgagttattattgtcaacatttacgcttttgaagtagcgtccgagtgatgacgaagccacatcagcgttggaatgactgatgaccacgtcggcgcttttagaggtaacagccgagtgacttatgacgacgtcggcgttttagagataactgccgagtgactgaggacgacgtcggcgttttagagataactgccgagtgactgaagacgatgtcggcgttttagagataactgccgagtgactgaagacgacgtcggcgttttagagataactgccgagttagaacgggttgcgtcggccactttgaaggtaatagccgagtgatgatgtggcgcaccggtgcttttagaagtaaccgtcgggtgatgacatggcacgccggtgttttagaagtaaccgccgggtgatgactgggcgctttttggaaacagtatctggcccgggaagatcccatatgcactgcgctttcagccgcctctgctttccgtgccctagttcttgctttcctgcctccagatcctctctgtccttttgca

SEQ ID NO: 86855 - DNA, 401 bp, Zea Mays
gtaaaaggaaagctggcaccccgatatattggcacgtttctcattcttgaacaatgtgggccagtggcataccgactccaactaatagaaacattatctgcagtgcataatgtgttttatgtatcttaattaaagaagtgccttcgagttcctgatcgaatcattgatgtggtggatgttgccttggaaccagacttaacttatttagaacatcccattcgagttttggatcagaaggacagggtcacccaaaaaaggacacttcaattttataaggtacaatggaaccagcatactgaagatgaagctacctgggagactcaagatttcttggaaaagatttttcctaggttttagcttcatgtaacctgtaagatatgtacatttgtttgtaaagttgg

SEQ ID NO: 86856 - DNA, 1360 bp, Zea Mays
gacaaacacccaattcctcaagagcaacacacacacacacacacctccattcatctctgatcaacctatccatccatcctagcctcctccgatccatggatccgccgggctccaacccagatggagtagtaaacatgacgagggcaatgcaggccctgtccccttggctgaaccacccaaggaggacgatcgcccaggtggaaggtctgatgctaacggccgctgcgctgctgctgatccagctcttcttgggcttctacaggcggcggtgtcgcaactccttcctcagtactgtcctgcgggcgtcttccaagatcatggaggctctcatcatctacactctcggtacgatgcagtcctccccgatcaagaactcgttgtatcccgtctgggctgcttttctcgtcatggcttcggcgggcaccaccgccgtacaggactatgatttctgtggcagcttctacaacaagtacatggagggtttcgtcgacttaattaagtacggcttctacgtgaccatgttccgtctgctcattgatccaaacccttataccttgaaggcagccctgggcctgaagtggcatctcaagaactccagggcaagcagttcacgctgtgtcgtcgccctcttctttttcgctttagtcacaaagggcattgaatcctgtcttctagcacttctggtatacaagcggaagtcgaatcttttcacacaggccggagaggcggaggaaggaactgcaaataacagtacgacgagaagtcaccctcggagcatgaatggctacgaatatggagtctgctaccgtccgtgtggaggtggagtcgtcaccatcgcccagatatgggatagtctgggtatctcaacttctctgaaagacctgtgcctgtcctatgccttgtttgtgcagctcattcacaggcgtttcttttgccgagtccatcccatggcggccagctctgtaacaagagaccatgactttgtattcaagaaactgctgccctctgaacgggatttcgaaagagcgttcaggattgttgaggcagagctgggcttctgctacgatttcttcttcacaaagtactactacaccttcgtaatcactaatctgctaccggtgccgttcctccagtctctggctttagcaaagatcactctaatcttaacagtaggggtgtttgccgtcaggaattcactgctacttgagacgccaaatccgatcatacaagtacgcatctcaagagctgacaacatcatcactctgctgcttctgggtatagccctcatagtggagctggtgcatgcggcattttatctggcatcggactgggcccaggtatcagtagccaccatgtatgt

SEQ ID NO: 86857 - DNA, 364 bp, Zea Mays
aaaggtcactagactattcatgagagcatacaaagaaaaagacaagagtctagcaaggatgataagagaccgtgacgactatgaggaaatgacacctcatcaattatttgcaaagattcaacaacatgaatctatagaagccccaatcaagacaagagactctcatgccttgatcttaaatgaacaagacacccccaagaagaacaaagaccacaaggcaaagaaagtggtcgagacatcaagtgatgaagatagctcaagtgaagaagacacagctatgttcatcaaaaccttcaagaagtttgtaaggaaaaatgataagtttcaaaggaaaggaaagaagagggcatgctatgaatgtggc

SEQ ID NO: 86858 - DNA, 690 bp, Zea Mays
cgaagatgcttatggtgtgcagaaaaccacttcaaaatcagatgatattcttccccagacagctggttagtcagtttaatgtctttacgtcaatataaaaaagttatgcgatcatttatcgatatcgttttgatgtcattattttaaacaatgtttttttgtttacatgacacgtacagaaggatgtacgtgtccgccccccaactgtacccgatatgtctactccagtttctcagcaggatacgcagtttacagacacacaggtacatgaattactgttaaggcaacaacatattcgtgtactattagaaagttgccccgatgaagctgatattgattcactggttcatacaaatataacgaaacagaacaaaacacctacaacctcagtggtaatgtttttcttattaattgtatttttcattatagggttgtattcatcgttttatttaaatagcatataaccattacaattttttcagggtaaacatggtgacggtgccaagaacatgccgaccaatacaaacgtcactcctaaagcaacaccacatatggatcctgacgcgccgatatttgatgcgactccgcaaatcaaggtatgagtaaaccccctcgtggtttttctatattctcattagcagtttactaaatttgtaatccatttataccatcattgttagtctactggcg

SEQ ID NO: 86859 - DNA, 685 bp, Zea Mays
taccaatgagaggagcttgagtactaccaaatgttggtggattcgtggagtacgatttctacatggattggtcagacttggacagagtataagtcacagttctctcatctctcgctactcatgtattgtgtctcttaagattataagaccttttatgatttaaccgagttcctaattacccatccaacaacctcagcgacaaaacaataagcttagatcttgttctgagagattggatgaaagaggaacatgggttataccttctggtccgatgttgacaccgcaaattggtcgttgcagtggcgtattgcatcgatacatcgacatatttcctatgtccgtcttgaacccctatccatggttagctggttgttcgttagagcccggcgcctgagggacagtggagtcacgtaatcacgggttacggagaatccggtcactagagaatcgaagtgcaaggagatcaagttcttggaattttgtggttgttagggtttagcgaaggcaaaagcgtttgcttcatgtcggcgccctagtcatgttttatatagcacttctcatgatcagatagcctcagccattgagccagtttgcgctccagatagggcacgagccttaccgataaaaaggaaatgatgaactataactcggtctcggaccaagttagagaacattcctaacttcc

SEQ ID NO: 86860 - DNA, 443 bp, Zea Mays
tcgtggtttcggaactgaggacaataaggtttgtgttcggaggtggatgctagcgcgaactcacattgaatggttaatatttaggactcgaacgaagagcttgggacacagggtttatactggccggagccctagtccagtgtagtgctaatcatagtattgcaatggagtgtgttacatttcatgtgctcacgtgtaagaggaaggagagcttgtccttttatagctcaaggagaagacctcacagaggcgacttgttctctacgggcatatgggcgatttgttatctcggtctggcgtagcgctcctaacatagtccgtagggtcgtgcttagccgtactcctggtatgtcatattgccttgcttgttcatcataagggtccctgtagcgagtcctctgctgacatatttgtggtagtgcatggcgggtcccgtgagtcag

SEQ ID NO: 86861 - DNA, 275 bp, Zea Mays
gaagaaatacattatgggaataactaatgctgacagagtaacgcatgagtaatcagcggaagtcatgatggcttcagtccatgcagcattgataggcagtaacccacacgagtaatggtgagtgattgccctcgatatagtaacatgcgagtaattacgcggcccacgtattgtggactgggcacgccgcctgtcagtggaatgtacaggcacacaccttatccataatgaatgcgaaggcgcgcgtagcccagaggcttcatgccaggttccgc

SEQ ID NO: 86862 - DNA, 362 bp, Zea Mays
gtcaaccttcgtttcaactaactcaaccgaaggtgccttcggcattatagctggctcttcagacctctgcatgggaggaacaatttctcttgatttagcagcagaaaaggcctccccgccaaactcaggcaccacagccggttcaatgtaacgtggccggtgggtaagtaccttcatctttttgcctgcagccttcggcataggttcagctggggcggccaaagcagcagcttttctcttcttcccatgtccccgcagcgggtagtggtagtcggggtagacgaagccgatggcgtcaaaaactctgttcattctcttttttccccgacctccgaaggctgtagatagcgcattatcttctg

SEQ ID NO: 86863 - DNA, 386 bp, Zea Mays
cagagatttaccttattcgtgttttattgtatttcgatttaattttccagatttgatatagttgttatggccacttggcgatatatataaatatatgatgccacacaacacaatcaaacaaaatatagagtgaaaacaaaattgtttacgaaggttcgcataatgtgacttcaggatcttgaacaatccacgagagtacaagctctagcgtatcttgtgtcaacgtgtgtgcgaccatcagggctacggcagcatagcaagcctttgtaataagcgcaacatgcacaattatggctcggtaatcggggtacacgataggtccacgcaatgtgcgcaacaggcgcaattgtggctcgatgatcatgacagacagacagtgcctacaa

SEQ ID NO: 86864 - DNA, 495 bp, Zea Mays
cgggaccacctcttgatgtgcatccgaagaggaggaacgtagaatgactgacctccactgagcatccgatcagccatctccacgttgggaagcaaggcgatgaaggtgttcggtgcaacccggcgaaggtcgagcgcattatcctcaagatcaaatctcgaagcgagcgcattggagactttcgcggcacaactagaacgccccatgcccacaacggagatgacaatagcgctcaggaggtcatcctcagcctgggcaatcctcctagaacgtttgaagaagcgccgaggcgggggagggggcaaagaaatggcgctaacagcctccggtgggggttggggtagcacaccgggagggacgctggtgtccacagcaccagctgcaccattgggtcttcgccgtctatgcccccgacgagtacgcctgtgtccgccgccgccagagcccgcgccagtgccaccaccagagcatgcgatgttgccaccctcgtggcca

SEQ ID NO: 86865 - DNA, 683 bp, Zea Mays
aaaaagatcagcaaatacaccgcacctcgccgccggtgacctccgcgcctagattcgcgccggcgctatgattcgtgctctctggggtgtggattacgaccgaaagtgaaaagatcttaccgcggatgaggtcgtgtgctggccgccatacccacttgctctatggccggccgaaatgatcctcgccggtgttggccgcttgccgctcgtgcgccacgtaatctattttgttaccacgtcgcaatagaccaccataggtagcctatccatcgcctgtgacagtgcctcagtgaatgccacagtagaccgccgcggtgactcatcccctctcctcggccgccagcttctctccttaaattcggagccaccgttcatggactctataaattcatgccccagtgagctcggttaggttgttacacgcccagtgcaccagccctcgcctccgattatccaccgtagctcgcgatttcaaattcccccaaaccggtcggaacgctgctgtgagacatctcatcgtggtcatccctctacaagttagttcaagcttctctgcttgatgttctagcctcccttatgtctcctgttgctcgtagacccatttgattgagctagacctcactgaatcaccaagaacacctcggtttatctccggttctcaccgccgtcgtgagcagacgaat

SEQ ID NO: 86866 - DNA, 338 bp, Zea Mays
gaagggcggtggcgaagcagagagtgagtgaattgtcgcgaagtggtaggcgtcatcgtattgggatggagcgtggccgtcttcgcgtggaccagactggtaggcgagaactgttgtcctcgccgattggggcgagcataggtgagggggagctgcgaaatctttttgagggtgaggaattgaggataatgctgttcaattacagggagataggtatcatcccgaaggttgagccaatgtaatatctgatgccctcgctgtgtatgtaacagtgatttgtattatgaggctgcgcgccttcgttgatccggctgcgcccgtaggcgacttctgcatgg

SEQ ID NO: 86867 - DNA, 615 bp, Zea Mays
gcgggacgaccatgtccattagcttcataaagtcattgaaatgttatgctttgactttgtctccataaccataagcttcgttactattagcagcacaatcatatcggtatggtcatgtggtttctcatttgaggcttcacgaagacaatagaactcctgcacttcttatggtgcctctctctgtcctttcgagtcaaaatccaactatgtaccaaggtcgttcaacgcctcatgtatcatgtcatcatcattctattaatctatctctaggtcaagttatgtcgactctccatgtgcacaccacactaggtagttgggcataaacccattgtagtaaagatgtcactcaattgtctccttcatatgatatttctcaatctcacacttactacatggacacttcacgccttgttcagttgccatcgtgaatgtgtggttcaaattttttcagtgcttgttagcgattctattgagtgtgccccatcctttctccacccctcgtacactaccctttgatggttagccatttctaaggctaatcagcaaaccatgtgaaatattatcaatgagtgtagcttaggtgacatggaaccaattaggaaatatgtcttaaac

SEQ ID NO: 86868 - DNA, 720 bp, Zea Mays
ttgcatattttcatgtactcctatctaaaggatgacaggtttacaaagccctgtacagcaaagtacaaaatataaggcatgcaaacatggataagtatttgacatattatttttttccttctcgattgcgcaggagaactgtacgtcattatattaagaagagaaacgaacacagaaaacacaagaaaacaagggcctcctcactgtggccaaaaacaaaaatacatgaatggatccacaaacacatttgcagtatctgttagaggtaccaaaccaattggtcaagttaacaagcatgtactatcatacacgcatctacagcagaatctaacttgattaaaacaaaaatgttggagtaaaaaatatgcattattggattgtttactgatactaaatgctaaacagagaattaccataattgattagcacatgctatagcagccacacattcacatctcgtgaaaaaatatggtttaaaatttttggccaaccccaaaaggaacatagagtaaaataagagaaacccccacaccagatctataaccttctcatcatgcaagatatcaggaggctcctaagcttgctggctgtcattttagatggaagaaaattctgcttgtataaacctatgggaaacgttgcagcaagatagtcttcataacagctacatacaaaacgcaaatttcagaaatcaataaaaaaatgtattaaggaattaat

SEQ ID NO: 86869 - DNA, 772 bp, Zea Mays
attgataagtccaaccatgtttacctgataggttttcttatggtgtgcaaccttatttttaacaataaatagggtggtttcaagtggattttatgtcaatattatagttgaagaggcgtgcatgttttccttctatggtttgtttcaatagccataaaggctatgcataattttttgttgttacaggctagtcatgtggacgatattgacaacccattttatatatttttttattcatcgacgatatatggtagtttgattttttatgatcattttctctatgcatgcttgttgaatcattgttttggaccgctttatcttaaacgaagtcaatgcttatctgggagttgcttatgtttgttagtcatctatctctataatgatgtggttgttgcatcagattgagattttttttcttcatatgaatgatggtttgatagatcatgtatgtctactactttgaatgcatcatgtgatatcacgaggtacaaattgttcaagtgcagtaataggaggttttgttgtatgtgaggttaatcaaggtagtttggttatgtggattgtattattgcagtccaattactcctgttgagcatagtatcgtgttattattttagtgttgaaagtattatttatggagcttttgcatgagtctgtgtcaagaagtacattagtttttcttgttgttatcccttcattgctttatgagtcttgcgaattttatctcttttgagaggagaaaaagacgttatatgacatgagcaccatttgc

SEQ ID NO: 86870 - DNA, 694 bp, Zea Mays
cagatttacaaattcgtccatccgtgtaataacaaatatgttactacattacaaatgtcctaacatgtgtttcatctactccccactagacgaatcattgtctgtgatacccccgcgatgttttttgaagtggatgtctcattccaacttggagcatcagatgaacccttgttcctaaaacctaggggccaccctctcttccgaccagtaaggctggccaaccgaagcctattctcctccatagatagacaagtgcgactgttgtgaccatcagcaatgccacacctttggcactttctattcttcttcttgaccccttttgcgcccaacttaataactctttgttctatctcactgattgttctgccctttggcttcgcgttatctggtcgtttcaagcttactccactcacattaaaatctagcttctacaattttcaaattaaagaattctcagtgttggaatattagcagataaaaccatctctttgtacgtaaactttaaaaatacccatgcacatgtgttttaaataataccataatctttttaatcgccagttctgttgcgcactcatcactcattgttatgccagtggtccactgtccagcaccgtgctgcccacacataccattgatgttaacatcataatcagcatcaaggtctaaccattactgttgtgtattgtaaccaact

SEQ ID NO: 86871 - DNA, 630 bp, Zea Mays
tcgaccacacacaaataaaaatccagggacaccagcacatcgtactacccaagtgcagtggcctcctcttgatgaagtggacggggatgaagtagtatgtccaggcacaccaccacatcgtaccgcaggagtgggcggggatgaagaagcgggcgtgggcgcgcagaagaggatgagtacggggacaggctaccaaacgcagatctgacctgacccaagtgcgtacagcggtggagatcacaggcgaggatggttaagacgcggcggcgaagatccggggcgagcctgggcgagggcgtgcggatgaggatgaggacgggaatgggccaccaaatgtagatctaacctgacccaagtgcggacggcggcggagatcacgggcttgggtggtgaagacgtggcggcgtagatcgcgggaaagcgtgggcgggggcatgacgcgcgtggttgacgggggcgggggcacggtgtagttttggacgccctcgttaggctcatatagaatagtagagaataggtatatgcccgtgagctgctacaaaatcgatatgataaaatagagcaaaaaaatatgcatgtgtttcctcaatgtagattactacattattcagaaaaccaatttgataaggg

SEQ ID NO: 86872 - DNA, 440 bp, Zea Mays
atttattagggccaaacgattggacaacatccaggacagaaccaccatatcctccaaaatcaatgatagacctggaaaaaaatgaaacttgaattacaaatcatctaattatacttaattgaagtttgaataacgaatacatacatgctcggatctagttgtcctgaacaaatgaacttaaatagttggcgagcacattcttcacgtgatacgtggggaggtttagcaactgcagatttagaggaaatatcccttgcaacaagttcagtagttgcctaatatatatatttgttagtaatcaatggcataaataattatgtattgtagtgtacatatataaaaatataagaagatgacacaacatgactaacttctgtcaatggggttctgtcaaactgtggtgcaccagatgtgggagtatcatgtttaacagtattttg

SEQ ID NO: 86873 - DNA, 672 bp, Zea Mays
gtaagatgatgtagggtatcactaataattgtcgtatgtcctcatgtgttcttttatcgcactcatcagaaaatttggataaatctgatatcctagtccctttgtgggtacgagatggcgtcaaatcagtggtcatatggtttccgatatgaatatgccatgcaagacatactgatcctgaatttatcttggaataatttggctatttattcccgaattttatccatggtagtcggtggtataggaccggatctcgagatgttaggctcatgtgggtgggcattgttatgtcggtatttcatatgaggataatatgtgtgtggtggtgtgaatccctctaactccttatgtgtcgggcgatacttggccctaggtgtgggaatgcttcgactttggtggtccgaaggtggagaaagatagtggtgttgtggtatataatgtggctaagtgttgtgcatattgcatcaatctgagtgttgtacattggacagtctaggtcaccagatggttcggtgagatgttagacagtccgcgatgggttaccgggcgatccgaccgtggtcaagggtgttgtcatatagcacaggggttgtgggggcagtggttgcccttggtacgagttcatcgatataccatacaatggttgggattgagaaggctcatttgttgccg

SEQ ID NO: 86874 - DNA, 580 bp, Zea Mays
cttgtatgaattccactgccttagttgaggttagagaagcaatgtgtttgaactctatccatttagtgaatttgtcaatagcaaccagtacatgagtgtatcctccttgagctttcttgaagggtccaatcatatccagtccctagcacgcgaacggccaggttacaggtatggtttgcagttgatgtgctggtagatgctgttgttttgataagtactagcaggcttcgcatctctggactaactcggctgcatcactctttgctgttggcgagtagaaaccagacctgaagaccttcccaaccagagtccttgatgttgcgtgtatcccgcattacccagcatggacctcatctagcagttgcttccctgtagccgaaagaatgcatttcatgaggactcctgatgcgccccttctgtatagtgtttccccaatgagagtatagtgagttgactgccttgcaatgcgctctgctgcatttttgccatccggctcttcctcattctttatgtacctaatgattggttccctctagtcatcaggatctgactctggttggctcagaatattgcatttctc

SEQ ID NO: 86875 - DNA, 509 bp, Zea Mays
aaatcctttagggagttttactagattccaacattaggattttgaggtgttacaaattctacccccttaaaaatagtctcgtcctcgagattagtaagaaaggggatgcagaaagttctgtgtagttttaacttttagtttcctattcttttctttaatgcccccaacagttttttttcattagcaggtgtggttgggaaaaacatgggcatattatgttttagctaataggtaagattagagcagattaggacaagagaagatttaggtaaggaaaactcctatccaaaatttaagggcaaggaaagttttcatctcgggtggtgaatcctgatttgtctgaagatctggtgtgactcttgtccttccttgacgaggttattatatttcttcttgggtcttgatgtcctcattcgagttaggtaccttcagtcttggtgtcatcatcaggtctaggtgattcagttaggtggatggttgttgaacatgagataggtcaaggtatcgtt

SEQ ID NO: 86876 - DNA, 611 bp, Zea Mays
tgacaatacctagatgatgtgcaactacatctttgatgcgggacattactagctagatgatcagtggaataccattgttccagatcacagctgtcctgggggaaaaaattcctgagcgcttgactagttgttgggtctagaatgcgcgttgggttgaaaatgccacgcgtagatcgtcataccattttcgcgtggaagctgggtgccacatcgttgcataggattttctttcagtacctatcatgattagctacagatggttctatcaatgatgttgctacatgaatcctaccattccaagcatacaccttaaagctttttcttgccacattgtggcccctttgtttcttgagacctcccaaccctaatgaaagaaacaatacattatttggtttattcgcatacacacagtggcccatacttcctctctctcaccctttcttttctattcccccctactatggttctataagtgaccatatttaccatatatcaagtgccagtggtagaccattttatagcatggaggctctaatttatttgtgactcgcaattgaatcatgtaattatttcttttgttcaataccacacttgaaaaatgtgagtgataa

SEQ ID NO: 86877 - DNA, 782 bp, Zea Mays
ccaattttgtttcttgaatatagaaaatactacaacaactttcctcaattttctgtctaaccacgaggcatttgttgtcatcattcagccctcttatattccaattaagaacattccaattcctgagattgttattcatttaaaccagatagtggggcgaggcatagccaaatagtgtaaggaccaccgatccataacgcaagcaaaagagagatcccttgagagagaatcccaatgaagagcctgtgaaaaaagcacaaaaaaggcacaaacttcgtcgagacgcaaccaacgagccatgtccaagaaatgaagaaataatccccccagaatcatagcaagcagtaacatcaaccaagcattccaagccacataagggcagattaatgtgtcgtttaacagcaccatgttccaaacacaaaacaaggaagtcatccttcccacaacacactttaaaagccttctgttcatcatgatcactccagaagcatgtatcgacagtactgtccaccttgcctgatctaggatgaagcaacacctccacggctgcctccaaagggggccaacccacctatcaatagccaccttctgcaaggtagaagcaataatttttgggtagatgccatcatagtcgaagaggtttcgtaaagaaggaaatttgacaggacctaggaaaaattggagatatgaggatttcccagcataagagcaatcacgccgagaaggaaccttagaggattgagatgaagaaccgaggtcaatggagaccttgaggcccttgt

SEQ ID NO: 86878 - DNA, 382 bp, Zea Mays
ccgcaatcgaaaaggagaggccacaggactgcggcaatttctcgccgtcgactagtttgccgccgcgggcaacttcacaccgcgaccgggtacttctacggcgtcaagtccggtatgtcacccatccatgagttcaccgtagcctccgcattgtgtcgatgccgttaaatttgggaatggtttccttggacacgggcgggcagttcaccggcgtaatcgccgccgcggtggagttctcggcggctgtgtgcccagcgtaagggaggagacgggctagggccatcgatcttgcgatgtgcggttaggatcggattagggcaaaagcgattctctgccgttggattccgatcccgcgatcacggtttgatctgtagatttaaaa

SEQ ID NO: 86879 - DNA, 642 bp, Zea Mays
gagaccattgactttttatgccagaaaataaaatttggttcttctgttttgtggtttcactttcgtttgtactaatctggcgacaaggaatttcatagtactcactacaacaacatgttccaaggtcgtttgtctgatggtgtgcatccttttgtgtctgttcatcagttgtttcatttctagtgatgtttcgacttgccaacacttgctggtatgaggaggtgagttgagatgctttctgtattatcagagcttgtgcatgtaatagcttctctaagtcaactattgagggtgatgttgtgattgatgtcatatggttatcagtagtctgctcatgtgctataagtctagttaccacttgagaggttgcttgcagaaactgtgcatgcgccttcttgaactgttccatctgagacttagctggaggagttgccaacacaatgcattctttgcacttagtgacatcacttgcagttgacattccaaggtctgacatctgtatgggtatggaagaatggaagggacgaaagggttgagcaaagacagattatagagagcagagaaaacccatctatctaaggtttacctagctaactgatgtcattgtggacaaaagtgacataatacaccaacaatcatttc

SEQ ID NO: 86880 - DNA, 509 bp, Zea Mays
cacaatctgattactgctgtaaaagataaggatggaaatgaagtccatagtcatccagataaagcttttgtactgcttgaagcatataaagaaaggttggactcctcccaagaaacatcaatgatttttgacctatcaatgcttcttcaacctactgacaatctcgtagctctagaagaacctttcacgacacaggaaattgactcgattgttaaaggtctcccctcaaataaatccccagggctgtcatacctggtaaggatgggaaggcgtctaccagtgatgttggcgggaaggtgtgagagtagtgttgattcaatggagtgtctggatcgtgggccgtgggccggttgaagttgtatcgagtctgatgggttgtaaggcgtactggagtctgtaatgggctggccacatatatgctgaaccaatgccagatggcaggaatatcgaataacagaaagcaaaaccacttcgtaacaaacttatctcgagttgcgttgcgattgccg

SEQ ID NO: 86881 - DNA, 535 bp, Zea Mays
atccagcgccctatacagtcacacttcggcatcaggagatcgtcgattgcaagtgggaacgaagtgcaagcgtgtttgatggctttcaacatggtgtgtgcttacatctgtaccagggattttgttcaagagcatattgcttataaggtgtggccgctcgttaatgactgggagatgccgaaggagactgctgctggttctagcgaaggtggtctggtttacctgagatacacctatcgctacagaaattagtttgatgagccgaatgatgattggcttgaggctgtcgaaaataccagtgacgagctgttgggagcttatacgaaggcagaggatgaagccataaccactaccttcggcgccgtgaaaagaggaggttgaatagagtttttgaggtaatttaattttttatcctggttagtgctttcctgtccaaaaacaagggtcaaagagaaaaatggcaactttatcttcttctaccgcacctaagccaaagagagctaaggttttgacacataggctgaagcctcattct

SEQ ID NO: 86882 - DNA, 675 bp, Zea Mays
aacgcgagcgggaacaaggtgaacaggatgccatgctccgatgcgagaacccgcttctcgctcagaacctattccctcactttgctcaagaactaaatacgccgagtgaggtcagagtggtcctggctcaaatcacaagtggcctatcgtgcaccccagatgcggagggctatcgacaagtactcacccaagcggcgaaccacctcctcccctcactcaaccgccgaatgatctatgccacaccatcaacagttagcgagacgcatggagcaacatcaacgcttcgcgcgatcgccgacatgaggaacagatgaagtgacgagaagagtacgatcgggatcatggtgcaccggcacatagccttgccaccagaatgagtcagtagcaacctccaccaacagttcgaccctgggtcgattgaggtgacacacgcctgacatcactcacctccacgagactgtcgacatgatcatcgccgagaggaccgagggacaagtggagtctccgcctttaccccccagctccgagcgatccagtgaccaccaaacttcaaggtctccaacgtcgacaaatatgaacccaagcaagacccgggtggctggctagctgtctacacaactgccgcacgggccacgagggtgacagaagacatcatgatagtgtacctgcccattg

SEQ ID NO: 86883 - DNA, 617 bp, Zea Mays
gtctttttgaccttcaaattacagatgatgaaagtgatcacaatggaaggggcagaaatactgcagctgctatatgtccacacgagccagctggtgttccaattgggctaggccaacttgctcctcctatagccacccatgtcgtttatggtatatttctctcaatggcgtactatcattaagaccatttacttaagtcacatgcaaatcctaatagaaggcctattaatctaggtgcaacatcagcagcggcaacaggttgtgttaacaatgatgtttatagtggtgttgcttctgtggtgttgtctcagaatccaaaggtatagtttgtggttatttttttatgtttattatatttgtttagtttataatttaatatttttttgtatatctgtttttgtgtgtgtttgccttatgttaggcacatgctgctggtgcatttttagtagggaatgataatatatatgagcctacactagcattgaattattcaaagttaaactcaactgaaagacataggaactccggaggaataagtggcaaaaaggaagaagttattgtcattgctgatgatgtaggggctgatcatgaggtgattttttcggtttattctctca

SEQ ID NO: 86884 - DNA, 521 bp, Zea Mays
acacatccaattcctatacctgaagcatcgcaatatacgtcgaaagacttgttgttgtcgggttgtgctaacacgggtgcggtgtcaagtgctgccttaagatatgaaaggcatcctcgcatttctggttcctttcaaattttacttccttcttcaagagctcagtcattgatttagaaattctagaaaaatcagaaatgaattgtcgataatatccagctaatcccagaaaacttcgaatctgtcggaccatagtaggaggcttccactccactacttcttgcaccttgtcgggatcaacagctatcccttcctgagaaattgtgtgacccaagaacttaatttgcttcagccaaaattcaaatttagaaagcttggcatataagcgatgatcttgtaggcgttgaagtacaatgtgcagatggctagtatgttcatcttcattctttgaatacaccaagatgtcatcgatgaaaaccacaacgaatttgtccaattctggcatgaatactgagttcatc

SEQ ID NO: 86885 - DNA, 493 bp, Zea Mays
ggaacatctagtatgtatcgaaattaacacacataggaggggatgaaagaaagataaaattcagggtctgaatggttacttgtcaaacgagccgcttgaccgggcgcaatgacagcccaggatgcgctgcaactgctagatcaatttaggaaggacctgtttggattacaaggattagccacaaaagtttagttcatttgtcgccaaacaagctgactaatagagtgactaaactttagcttttttaacaattagtccacaaatatgagctaatcaggactaaacacacaaacaacctattagtccatagtatctaaacgccccgttgtgaatcatctaggccccttggtgatgttttggtaattaatgacaactgcttgtgggctaacgattcttggagaaagaagaatgcagggttggaccacatagaatagaaaatattggagattcataagcattggttgtggatcaagtgaaggcaaaggtataacat

SEQ ID NO: 86886 - DNA, 451 bp, Zea Mays
tgtacaactttacatccacaagttacatttgcctgaaagaaccatggagtaaaaaaaggaagagaggctttgatttcctctaaagcatgcaacaaccaacatcttatcttctagctatatgtcaactgtatcaaaattgtggaaccctgtaacaaaataacataaacataagtaatcttctcacgtcaaaacagataaagatcaagacacaaattagtcttgtgagctcacttgcagtgaagtcaaaagtcgcaatataagttagaaaaaaatcactccctagatcacccaattgtccaaaccctaaaccctaaaacccacaggttgttatgaactctgcttgttgaggtttaccaataggacgccgatgctatcagttgtagagggcacacagatgtgtgttgatctgcgttgactgaaaatgatcagtcccggtcagatgttgtaatat

SEQ ID NO: 86887 - DNA, 460 bp, Zea Mays
gcaagtcgaagagtgtgaaaatccttagtctatcaatggctaattgaaaaagaaagttgatcgacacagaagatagataaaaacttgcatctacccaaagatgccactagaagaaaaggaaggcgcttcaaccaagaactatgggaaataagggtattgacctacccttcaatgtcatgaccaggggtgaaatctaagggggtgaggtccatcttctcgtgttgatagaggattgggaagtcttcctctcacactattgctctctcagaaatcttgaatgaatcagtagagaagtcccttcttggatgaagattatatacgcttctaaaagcttccaagttacggtgggcgtcggtcatttcctctcctactctccgctctccccgtatagccaggctgcttacctgttcgtcctcccatctccttcccattagcagcaaggccactgctaccagtctgc

SEQ ID NO: 86888 - DNA, 276 bp, Zea Mays
gtcatcatatatcgtgcagagagggcactgcgaagttatgattcacttatattatatttcgtgaaccaaacaatacctaataataagctaatacctaataataagctagctgattcagtggcaagtatatatatgcatgctagccagctgaggtgccacgtagcgcaggttacggctaggttctctggaacatcatgtgcagaagatatgcgagcgatcagcacgtacagcacagctagcacatcaaccaatccttgcgatccggaccaaatctat

SEQ ID NO: 86889 - DNA, 609 bp, Zea Mays
agccctgacagaggggtcccacacggcagccaaggccaggcgcgcacggtgggtgaagaggctacgacgtgcgcgtggagccgggctgaggaaggccacaagagtgggccgacccgggtaattcagcccaggtaagtatttcttctctttttttgtttttttcctaattctagtttatttccaaattcaagattcaaactaagtttaaatttctggtttgaactttccaaattcctaagtatcaaatatgatccaattatgaatataaatgctactatttttggtattagtatttttttcttcaaataaatgcttctagaggtaatatcagtgaaagaaacatttgttaaattaaaaataggcaaactccctattatttatttttctgagatttgtgattataatctaaatgttataagtccaataaaatctgggtcattatccgtaatattatttttatttgtttaatcatttggaaggataaatcatatactagcgtcagtccaattataattcctcaaagagagcaaagatttccaactttctcaaaatgtatttttagggtttacagtagtggtcgaagctgtaggctaggcccgtcactccggc

SEQ ID NO: 86890 - DNA, 428 bp, Zea Mays
atgatatcttggtctattcaaagaatgaagatgagcatactcagcatttacacatcgtacttcagcgactgcgcgatcatcgcttatatgctaagttgtccaaatgtgatttctggctgagggaaattaaatttttgggtcacaccatttctcaggatgggatatcagttgatcatgagaaagtgcaagaagtgatgaattggaagcctcctaccaccgtacagcagattcagagttttctgggattggcaggatattatcggcgattcattctggctttctccaggattgcaaagccaatgactgaattgttgaagaaaggagtaaagtatgaatggagtcagaaatgtgaggatgcctttcatacattgaggcagcatctgacaacagcacccgtgctagcacagcctgacaacaccaaatctttc

SEQ ID NO: 86891 - DNA, 460 bp, Zea Mays
tgggaatgccatgccttttcaaaaaactagcggcgatgaaataatgagatgctctagaatcaaaaagtaatgtggcaggggtaaattcgattaggaactcaatgagtactaccccaggggcctgctgaacttcctggacgtcgacgtggttcactcgggctcggttgtggaactgtggcctgcttaactgactgttggaggaaggtgccttggaggtgggtgctacgacactcttgggggccattcaccgagttggagtaggcaggtgctgtcggtattagttgtgggcaattgttcttgaactgactggggtcaccatagtgccaacgagcattggctagaggtcgactgcttgcaacgtacttagtgcggaaggaactctgacttggctggttgaaatgcggtggggcagatcctgctagcttgttgaaatttgaccctttgggaaggaacccaaaag

SEQ ID NO: 86892 - DNA, 547 bp, Zea Mays
gtccaataaagcaaggagacaacttccctttaactttgaatcttctcataccccggatcggtgacaccttcagatacacatgatcaccttccttaaactctagtagccttctccgggtatccgcataacttttctgccttgactgtgcagttctcaaattctcccttatcattagcacaaattcttcttcctcttgtataatttcaggcccaaagaactgttgttcaccagtttgatcccaatacagtggagtcctacattttttgccatatagagcctcaaacggtgacatcttcaatgtggcctcgtacctgttattgtaagagaacttcacatacgataagctcttatcccaacttccaccatgtttaagagcacaagctcttaacatatcctccatcacttggttagtcctcttggtctgcccatcagtctgaggatggtaggccaaactaaaattcaactatgtgtccaagcactcgtgcaacttcttccaaaaccaagaagtaaactgtgacccttggtctgacacgatcttcttaggcac

SEQ ID NO: 86893 - DNA, 522 bp, Zea Mays
tggatgacttggaagatcacggtgtggggttttcttccaacaggagaccatgatagcaaggtgtgccaacacgaggcaaccatgggctcgatcgaaatcaagaagactggtgtaggggtgaaaatgatgcagatatttttcgaccatatcagaatctgaatctatttagaaggggcaaaatatgtctagatttgaattttgatattcaatatcctaaacgtatcagaatactcaaagttacatatgcatgatgtcgataaccattccctatcttatctgacacaacttccatatatgtatttgaatctgaatttgagagaaaaaactatctatattatttgtatctatgtgtattcgatccgtttacacccttaggcggaagggtgaccatggcgggacatgctaatgcaaggaagccctaggttcgaagtcatggtgacctaaaggtgcccattccatgaccaaatgaggaccggttgaaaactataaagggttgatcagtgtaatattctacaataatgc

SEQ ID NO: 86894 - DNA, 629 bp, Zea Mays
gctggactggccggagggagtcagaaccggtgctcccaagtggcggacaccaaatttgacctaccctaaacatttcccccaagttaattgcatagttggtgagctatcaagctctgtccgtgtgaaccgaatgggtggcggacagatgagcgtgttcccggtgaccagagggttcttagcgctattacgtgggtcagcaagcatcgtggagttataaggaaactcaaacgagggtaaggggaggctgaactgaccggaatggggctggccacggtgagcagttccttgcggtggcggaaacttgatttggggggaattggaaattcacgcgtgctggtggatgatcgagggtgggagcgggcgctacagcttcacgacaacatggcgcagctacgggcgaggtcaatttatagagccctcaagcggtggtggccaatttggtcgagcaacgctggcagtcggagatggggaagaacctggcgcggtgagttcgtgtccatcgccgtggcaacctcaccggcgacgatgggacagccgtagcgagtcacggtgtcgcggtggaaagtaaagccacgcgacacaaggtcggacggcggcggtcgtcggcgttcttatcggttccaccgcgg

SEQ ID NO: 86895 - DNA, 389 bp, Zea Mays
gctctaagctttccacccgggagtttaggtgggtgcagtgggagaaaaggtcatcgtagtggttatcgagagtgtggaggtatccggccatgtagacaatggtgcggtcatcctcggtagggtctctccctgacagggcctgaagtcttttcctccaggtaggggtatttttgttgctaggtgggaagtaacgaaggggggtttcaaagatctctctgctgtagttttggcatagctgtttaagggctttttgggcaacactttggcaagtgtctaggaagcggtgcccgatgaaggtgacttggaagggagggtggtttgggtaacttcggctttctcccaggtagaccgccatagagcacttctccattccattttcgcattattcc

SEQ ID NO: 86896 - DNA, 493 bp, Zea Mays
ggaaaaccctaaagcttaagtaaaatgatcataacatattactgaggatggatctaagtggcattcacacccttgaaataccaaaaaccctaaaaaggaccctggaaacccctaaatcctaaccctagggcgttaagtgcaaaattagtccacttttggactaaagtgcaaaaaccatgataataaagtgtcctaagtcatatggatcacaaataggtggatttgcaagttaaaccctaagttatgggtctatttgcaaaaagcactacttaaaccctatatagactaagtctcaaaatcaaagatttggctcaactttggagatctgtagctttcaaattattgagaattttccctaggtcaccacatcaatattatatacctatcaaaggtgaacaactttgcttaaggggttcaacatggttgtcatgaaaaatatgaagaaaaatgcacccaaagtcgggctgtcaggctgccttcagtctgaaaccag

SEQ ID NO: 86897 - DNA, 547 bp, Zea Mays
cttgttggcctccctagcgactgagagcaagtaccaacaaggtgcttggccgaatgtaacctttctatgacagctcatcaatctgctccttaagttcaaccaactctggtccagatattctgtaagctctcttaaagatgggggcggttccaggaagaagctctatggcgaactcaactttccgctctggtggcatacctggtaactcctttggaaacacatctgggaactcggacacggccttgatactttcaattgggtctgcttcactgctatcgacagccgtctgataacaacttcctttcttcggctcaggtgggactaactcggtcaccacttcctctcctagtggggacaccaacttgattgtcctcttatcacaactgataactgcctgatacttatctagccaattcatccctaggatgacatctattccctgagtacccattattatgaggttggcgggaaacgctatcccccttatttccacgcttatattcaaacaaatgctatcggctcggattctaccaccggctgagtcaat

SEQ ID NO: 86898 - DNA, 373 bp, Zea Mays
cggtcgtgattaggccagggcatgacttttcgcgaaatcagatgtggaccatggatctggaatctgacgggtgaaagtcgactatgggtgttgttaaatccgatccacagtttcttcatctaacggctatggggagaatagggtgtcacgaaccgtggactgtggatacttgatccaacggacgtagtgcaatgatgggacctgggaggcccgatctaatccacaccgttggtgtgtgatcctgcggccgagaatcatccaaaccctttcactagttcgttttacacatgaaccctccgggaatttaggaactaacccgccatccagtttgactgttctccgagtctaagaaattttgcgcagaaccccctgc
